United States Patent Application Publication US 2008/0066199 A1 - sequence listing, part 6

SEQ ID NO: 39015 - DNA, 260 bp, Glycine max
  Clone ID: 700943674H1
ctcgttcttcttcttttgttgttctgtgtttgtgtttgttttttctctcacctgaaaatgtcttgctgcggtggtaactgtggttgcggaagctcctgcaagtgcggcaacggctgcggaggctgcaagatgtacccagacttgagctacactgagtcaaccaccaccgagaccttggtcatgggagtggcacctgttaaggctcaatttgagggtgctgaaatgggtgtgcccgctgagaacgatggctgcaaatgtgg

SEQ ID NO: 39016 - DNA, 265 bp, Glycine max
  Clone ID: 700943677H1
ctgaggttccttctcagtccacggagactattaagattccaactgctcactatgagtttggctcaaccttcattgatcaccctaggttgttgctctgggggagaattttgactgatgggaggctcaatgccagagtcaagtgtgatttgtccgaaaatctcacttttaaagccaatgctcagctcacaaatgagccgcatatgtctcatgcgatgatcaactttgattacaagggaaaagactatagaacccaatttcaacttgg

SEQ ID NO: 39017 - DNA, 240 bp, Glycine max
  Clone ID: 700943678H1
atctacaacccttgattcatctaatgcagatgttatgactgaagggtcttctgagtcatcagatgcatattcccttgagaattctttccaagaaaggaaaacttcaaggcccaaaggtcgcccgatttcaatgggtactgtttctagcgttattgcggaaggatatggtagacctgcccgatcaacaaaatgggccttttgcttcagaaaaaccactaaggttggatgcaaaatcactac

SEQ ID NO: 39018 - DNA, 262 bp, Glycine max
  Clone ID: 700943679H1
ggtgctagtgtcatttatgctgatacggtaggagatcttggctttgcatctgagcttggaaactatgctgaatacagtggtgcacccaaagaagaggaggtcttgcagtacgccagagttgtaattgattgtgcaactgcaaaccctgatgaccagaagagagctcttgtgataggaggaggcatagccaactttactgatgttgctgccacatttagtggtataattcgggcattgaaggagaaggagtcaaaattgaaag

SEQ ID NO: 39019 - DNA, 83 bp, Glycine max
  Clone ID: 700943680H1
acgagagacacagccattggttacttgtcattgattggtccaaagctttgtatgttctgcgataattgtccattgggtggaag

SEQ ID NO: 39020 - DNA, 261 bp, Glycine max
  Clone ID: 700943681H1
tgcagatcttcgtcaagaccctcaccggcaagaccatcacccttgaggtggaaagctctgacaccatcgacaacgtcaaggccaagatccaagacaaggaaggaatccccccggaccagcaacgtctcattttcgccggaaagcaacttgaggacgggcgtacccttgctgagtacaacattcagaaggagtgtactcttcacatcgtaatccgtctccgaggtggcatgcaggtcatcggtaagacactcaacggcaaga

SEQ ID NO: 39021 - DNA, 267 bp, Glycine max
  Clone ID: 700943682H1
tctcgagccgaatcggctcgagggtgacttattaaggagttctctgctctttgttccttgttttcttcactctccgagagcattttgtgcactactgggttgaaaatgtatttggtggagagcaaaggaggtgccataacatgcatgttcttggctcttttcttcttggggacatggcctgctcttttgactatgttagaaaggcgtggtcgtcttcctcagcatacctaccttgattactcaatcaccaatttcttgtctgcttta

SEQ ID NO: 39022 - DNA, 265 bp, Glycine max
  Clone ID: 700943684H1
cgcgtccttcttcttactcttgcttcccctgttttttcttctgtttttcactgccaacaacaacagcacatacaaacaaaccatgaaacctttcgtggctgcggctgttttgttgttgttgttggtggtggtggtggttgttgatgccaggtttgtggtggagaagagcagtataactgttctgtccccgcataagctgaaggcgaacgcgatggcgccatcggtaacttcggtcttccggactacggaggattcatcgttggct

SEQ ID NO: 39023 - DNA, 270 bp, Glycine max
  Clone ID: 700943685H1
cgccgcctacaccgccgtcctcaacccccacgaccgcatcatggggctagatctcccctccggcggccacctcacccacggctactacacctccggcggaaagaagatctccgccacctccatttacttcgagagtctcccttacaaggtaaactccaccaccggctacatcgactacgaccgcttggaagaaaaagccctagacttcaggccaaaactcataatctgcggtggcagcgcgtaccctcgcgattgggactacaaacgttt

SEQ ID NO: 39024 - DNA, 269 bp, Glycine max
  Clone ID: 700943654H1
acgagttgcaactcgagcgagtcaacgtctattacaatgaagcgagttgcggaaggttcgtgccgagggcggtgctcatggatctagagccagggaccatggacagcgtcagatctggtccctacggtcagattttccgacctgataacttcgtcttcggccagtccggcgccggaaacaactgggccaaaggtcactacaccgaaggcgctgagttgattgactctgttctcgatgttgtcaggaaggaggcagaaaactgtgactgc

SEQ ID NO: 39025 - DNA, 273 bp, Glycine max
  Clone ID: 700943620H1
tttttggttgtgagagtgaaagagaacaatggaaggcataacagagggtgtgaacaacatcaacattaacatctccgattcgtataagaagaatcgcattcaggtctctaacaccaagaagcccctcttcttctacgttaatctcgccaagagatatatgcaacagcatgatgaggtcgagctctcagctctaggaatggctattgccacagtagtaactgttgctgaaattttgaaaaacaacggacttgctgttgaaaagaaaatcacgac

SEQ ID NO: 39026 - DNA, 276 bp, Glycine max
  Clone ID: 700943621H1
tccaaattccggataacatgagactgaaagttgttcctagatcgcgtactaacttagatctacatgttcatctccaaccatagatgaacaacttacatgtgatgaccacagtttgatccgcggttaatcccactaataacctgaaattcaaaaccacgtcatcatccataaatcttcattcctttctcacgagaacaatcaatcacccgcataatttccagtggcacgaaataaacactaaccagcataggcttagaccacgaaaacaacgctcca

SEQ ID NO: 39027 - DNA, 271 bp, Glycine max
  Clone ID: 700943625H1
cagcaacaaagactttggaattttcttgttgactgcacaatttaaccgaagatgaaaatgggaggacaatagagagggaaagaaaaagaaaaaaaataaaggttttagttgtatagggtctttaatacctaactgttggcacttcgaatttttagcagaagatgacttgttagatttatcaattggaaaatgagttacacatattatgtgtagaatctagatcatgtagaacaagttgcagtggtcttgtttaatgacacggagagcagta

SEQ ID NO: 39028 - DNA, 271 bp, Glycine max
  Clone ID: 700943628H1
caacagataatggattacagcctcctcctaggtgttcattatcgagctccccagcagctgcatccatacaaccaaaatagaactgcagatggagtgccaattcttgcagaggaagaccctctagaggatgaaggatccaactatccacaaggccttgttctggtccctcggggtacagatgatgatagtgttgttgtagggtcacacattaggggtagcagattgcgagcttcggctgctggggatgaggaggtggatctacttctacccg

SEQ ID NO: 39029 - DNA, 117 bp, Glycine max
  Clone ID: 700943629H1
cgggaattcagatttctatgcataaaagagagggaggagaggagagaaagaaagggggaagaggagagcacaacaagggggggggcccccaggttgccgcgccgccggcgggtttta

SEQ ID NO: 39030 - DNA, 284 bp, Glycine max
  Clone ID: 700943630H1
attcggctcgagggagccaaaagataaatctgtcaaagaaaaaaggagagtgcttagagagagagcaaaacatagtattgtcatttacatctttttgtgagtatcaacaaatggcaaccactgtgatgaccactgctcccccaattcagtggtgcttagaccccaattctcagctggccctgtgaagaacttggttgctgtgcaacccatgagtcgcaaggggaagggtgcattgggagctcgatgtgactacattggttcatccactaatctgagtatggtgg

SEQ ID NO: 39031 - DNA, 255 bp, Glycine max
  Clone ID: 700943631H1
cttcaggcttgacttcgctgtgagtcgagagcaaacaaacgagaaaggggagaagatgtacatccaaacccgaatggctcaatacgcagaagagctttgggaattactgaagaaggataacacttttgtgtacatgtgtggactaaaaggaatggaaaagggaattgatgacattatggtgtcattggctgccaaagatggcattgattggactgagtacaagaggcaattgaagaaagcagagccatggaatgt

SEQ ID NO: 39032 - DNA, 268 bp, Glycine max
  Clone ID: 700943633H1
cagctgaacagaagttgcacaaatatgctgctgtagaaaaacttcgtgagcgcattggtgatgatgataaagtggtttcacaaattttgatgataagaatggtgcagaagtttttaatgatgaatatgaagactccaacataatctatcctagttcttggctacagaacctgcctgaatggtcaaacaaaaagcttgaatcatcggataagaaagatgactatgcatctgagagtaccattctgacaaggaatccgactgcaaggcgt

SEQ ID NO: 39033 - DNA, 271 bp, Glycine max
  Clone ID: 700943634H1
ctctctctctctcttgttacacattctacattctctctctattatttttcaccctttttctctcttttgcaaagaaaacaatttaattaagtcaatttgtaccaaaatggcttctcaagtttgtgaaactttggctttcatcaacggtgatgatgggttgaaaatcaacggtgctcttctaatgtccctgatggaagagccatcaccaagtgatgagagtgatgatgatcgattggatagcttgattaggtcctttgaggctgaaattagt

SEQ ID NO: 39034 - DNA, 271 bp, Glycine max
  Clone ID: 700943635H1
tttaggttcaatccatctagaaatgccacaatatttcatcatccaacactgggggattttgagttacaacatttgccagttggagctagtgacgctgatcttgaagagcgtataatccaacacttagcggctgcagcagcgatgggaagagcacgccacattgctagaagagaaggccagagaaacaggtcatcagctcaaggtcgcccacattttttggttttttcaactaatcctaattcacctcccatggctcctgcttcttcctctc

SEQ ID NO: 39035 - DNA, 269 bp, Glycine max
  Clone ID: 700943636H1
aagaagagtaattggcaaattgattttggcttgctcggcaacacggtgggagcattcttcacttgtccttggttttggaacgacgacagccgagctatctctcattccattttcatccatcaatggctccagtagcagcagcatcttcagattcaatcaagccaagagatgtttgcattgttggtgttgcacgtacaccaatgggtggatttcttggtaccctgtcatctctatctgccaccaagctaggctctatagctattggagct

SEQ ID NO: 39036 - DNA, 273 bp, Glycine max
  Clone ID: 700943638H1
ctcttcaaaagggagaagaaaaggaaagaaaactctcaaaaaactattatagcaatggcagaacaaaaccaaaaccaaacaactgaagctggaaggcaccaagaggttggtcacaagagccttctccagagtgatgctctttaccagtatattctggagacaagtgtctacccaagagaacctgaatccatgaaagaactgagagagttgacagcaaaacacccatggaacatcatgacaacctctgcagacgaagggcagttcttgaacatg

SEQ ID NO: 39037 - DNA, 269 bp, Glycine max
  Clone ID: 700943640H1
cccagccattgatgtgtgcaagggccttttgggagacaaggccaagttgagcatatatgatcctcaggtcactgaggatcaaatcatgagggatttagcaatgaagaagtttgattgggaccaccctgctcatcttcaaccactgagtccaacttccaacaaacaagtatctgtggtttgggatgcctatgaggcaatcaaggatgcacatggcatctgcgttatgactgactgggatgagttcaagtaccttgattaccaggaggttt

SEQ ID NO: 39038 - DNA, 271 bp, Glycine max
  Clone ID: 700943641H1
aaagcacaacactaaagttcagcaatcagtactctcaagaagaaaattacaagatcatcatcacaataacaatatgagttcaggaattagagcatggagtgtggcaactagcgttggagttgtggaggccttaaaagaccaaggtatatgtaggtggaatcatgctttaagatcagctcaacaccatctcaaaaaccatgttggttcattctctcaggctaacaagctttcttcttctgctatgagctccacaacactaaaacatgggaag

SEQ ID NO: 39039 - DNA, 270 bp, Glycine max
  Clone ID: 700943642H1
gtggcagcgacacgtatcaacttcaataatcgcatcgcagaagcagtttccggtgcatctcatcgtctccgaaaatgaacgacgcagatgtctcgaagcaaatccagcagatggtgcggttcatccgccaggaagctgaggaaaaggccaacgagatctctgtctccgccgaagaggaattcaatatcgagaagctgcagttggtcgaagccgacaagaagaagatcaggcaagaatacgaacgcaaagagcgccaagttgaaattcgca

SEQ ID NO: 39040 - DNA, 266 bp, Glycine max
  Clone ID: 700943643H1
acgcatcggtgacagtccagaattgggaaggaaggggttattcagtcgtgaatgttcagtgcaaagatcgaaccaagctattatttgacattgtatgcaatttgacagacatggaatatgttgtattccatgcaactattaacactgatggtgaccgagcttacttggaattttatataagacacaaggatgggactccaattagttcagaaccagaacgtcaacgtgtaattcaatgcttaaaagctgctgtagagagaagggca

SEQ ID NO: 39041 - DNA, 271 bp, Glycine max
  Clone ID: 700943644H1
gcagaacacacattaagaaacactatctctaatatccatcgagagagtgacacaaaaccctaaccaaaacgacaccgtgggatctgttccgcgtctcagattttgctgcaatgggcaagaaaaagttagattcaaagtccgatcgcaaattcgaaaagaaggtccaattttattccaaggtgaaagatgctgttacctccttgagtgcccaaaagtctattactaagaaaaagaaaaagagcaaacaacaaaggcggcagaagaaattgaa

SEQ ID NO: 39042 - DNA, 269 bp, Glycine max
  Clone ID: 700943645H1
attctattcattcaagattcagcaagtgcgttttggaagcagagaccgaaatacttcgagatggcccgtacaaagcaaactgctcgtaagtcaactggaggaaaagctcccaggaagcagcttgcaaccaaggctgcacgtaagtctgcaccaacaactggtggtgtgaagaagcctcatcgttatcgccctggaactgttgctcttcgtgagattaggaaataccagaagagcactgagctcctaatcaggaagcttcctttccagag

SEQ ID NO: 39043 - DNA, 266 bp, Glycine max
  Clone ID: 700943646H1
gaatctacaatgtagaaggttctatgtgactataaatgaggcgacgatttctgctagtccacagcatctagctagttaattcacaaacttgagttggattttggtgatcttgtgaattgatctgcgatgtcggacgaggtagttctgttggatacatgggctagcatgtatggtatgagggctaggattgcattggctgaaaagggtgttaggtatgaatacaaggaagagaatctcatgaacaggagtcctttgcttttgcagat

SEQ ID NO: 39044 - DNA, 114 bp, Glycine max
  Clone ID: 700943647H1
ctgatgatgacacaacccattggtttagatcattaattggcactagattgataattcttcagggaacgaggcggaagaaaatagagcaagccagagaaaagcgacggcggggag

SEQ ID NO: 39045 - DNA, 268 bp, Glycine max
  Clone ID: 700943648H1
gaaagcttctccgacaaatctcattgagcctttgccgttgtcgttgaatctgccatcgccgacgccgcggtctcaggatcagtcgtcggcgagtagtgggcactcgtcaccgtcgtcgtcgtcatcggcggcagcttttcaggctatgtctgcagcgaagttcggcagcggcggggatagtatcatcagcgttgcttgaaaagacggaaacaagacaaaaattagtgtcattaagttattaattaagtatggtcttagtagttaattt

SEQ ID NO: 39046 - DNA, 270 bp, Glycine max
  Clone ID: 700943649H1
ctgccaataagcaagttggaaactcaacttactgcttacatcacaaatatgtaagatttggtggatttagtgtgttgaaaggccagaaactaaccacggcgaatgcaaaacaagattgttttgcttgactgacttggcagtacaggacatcagaacagactggggactatcagttgataatggtgaatatgtgcttcctttcaagatgtataatcagagccacatcaatgaggttagttacaacttacaagcaccttggagttggggtta

SEQ ID NO: 39047 - DNA, 272 bp, Glycine max
  Clone ID: 700943652H1
tgcaatagcaagtcggtcgctcagacacgcacagatctgatctgatctgatctatctgaagccgaaaacgccgacggggatgatgaagatgtgggtgttcacgttgctcctgcttcctcttcctcatcctcttagtggcgctcttcccctcgtcgctctccgagatccgcttctccgagatccgaaacgacgatcgccgcatcatccccttcgatcagtttggagtcacccacaagggtcgccttgagctcagcgtttccaaaatctcactc

SEQ ID NO: 39048 - DNA, 253 bp, Glycine max
  Clone ID: 700943653H1
aagaaatggcatttgcatccgagggaaaaggaaaatgagagagttctttcaagcatcaggccttccacgacaacaaagagacaacaatgatgagcatgatgctcctttcttgctttgaaaatttcttttttaactctttcttaattgaaattctcagattcttttgctcttcaatccatattgtaagtatgagtatttgtagatcatataccaatactctatgttaaaacaacacctttttttcttttttggg

SEQ ID NO: 39049 - DNA, 272 bp, Glycine max
  Clone ID: 700943617H1
attccccttatctttctctcttctctctccccgcccaaaccctaactccctaccctattccgctttctctcatccatcatgaaaggaggaaagtccaagaccgaatctaagagagccgatgccaaatgagctgtgaataagaagggcgccgccaccaagactaggaaacccgccggaaaggggaaggcagcgaaagatcctaacaagccaaagaggcctccaagtgctttcttcgttttcatggaggaattcaggaaggtgttcaacaagga

SEQ ID NO: 39050 - DNA, 258 bp, Glycine max
  Clone ID: 700943578H1
aaaagggccaccccttcttcttcttcccttctcaacttgtactacaatttctggattgaattatcttcaaaatgagagaaatccttcatgttcaagctggtcaatgtggaaaccaaattggaggcaagttttgggaggtgatgtgtgatgaacatgggattgatgccactgggaattacgtaggtaactttcatcttcaacttgagagggttaacgtgtactacaatgaagcaagtgggggacggtatgttcctcgag

SEQ ID NO: 39051 - DNA, 260 bp, Glycine max
  Clone ID: 700943580H1
cctagtcctcccccagaatatacaacctgtttgggtgacttgtacagtgttgcttggatggaagacagtgacagacacaatttgcgaacagaaactctgcaccaacaatataaattggttaaagagaggactatatctggagattcatactatggctctcacgtgatgcagtatggtgatgtagggcttagcagagatgttctcttccattatttgggtacagatcctgctaatgataatttcacttttgtggatgaaaa

SEQ ID NO: 39052 - DNA, 262 bp, Glycine max
  Clone ID: 700943581H1
gcttcttcgagtttcacagccaagtcgtaaaagggtttcaagggatggaaaacatgcagagcttctggcaattgggtgatgaactccgtgggcactcaaaagcatcggaggatcacaagtggttaatggttgcctcgaaactggccgaacagacaagattgaagggggagcgtgtgaacaaccttgatcggcaaagggacccattgaaacaaggtccagggccaagggttggctccatgaagagaacggagttgattctctt

SEQ ID NO: 39053 - DNA, 261 bp, Glycine max
  Clone ID: 700943582H1
gcttcttcagttacctcactcaccgtaccgccgcgagggggggccccactcgacctcaccactactccgcaacaacaaaccgatggcgatgatgattccctcacctacctctggcccctccccgcagagttcacttccggcggcgacactctctccgttgaccccgcgctcaccctctccgtcgccggaaacggcggtggctccgccattctcagagaggccttcggccgatacagagggatcgtgttcaagaacaccgct

SEQ ID NO: 39054 - DNA, 83 bp, Glycine max
  Clone ID: 700943584H1
ataggggattgtgcattaagtttatttttttcttgtggcatttttaccaaaatttattacacaaaaatttgtctagttattat

SEQ ID NO: 39055 - DNA, 252 bp, Glycine max
  Clone ID: 700943585H1
gaaccaggtgatttgaaagagaagaaggaggcgctcggggaggtgctgaatggggaccgtttggttagcgcgccatacaagctggagttccagcgcgacaaggagttggtttccgtgtgcgacaggaagctctccaaacaggacgtggctcggttcagatccgcggtgaggaaggactactacttccagatgtactacgacgaccttcctatttggggcttcatagggaaggttgacaaggaagggaaggac

SEQ ID NO: 39056 - DNA, 121 bp, Glycine max
  Clone ID: 700943586H1
gttttctaaaagggttacagaagcttgcccttttaaatttggaagggtgccttgtaacagctgcatgcttggattctcttgcagagcttcctgcactgtcaaacttgaagtcgaatagatg

SEQ ID NO: 39057 - DNA, 251 bp, Glycine max
  Clone ID: 700943587H1
ggctaacatttgtcttcatgttatgagggtatcctatattcctattttttatgatactggacacctagtatctatatacacctatagagagaaatgtaaatgtcacaggtctggtccatttggagatgaagtttccagagtgtttggtggtggtcttgtaccaggctcattgactttaattggtggtgatcctggtgttgggaagagtactttgttgttgcagatagctgcaattattgcaaaaggtgaca

SEQ ID NO: 39058 - DNA, 255 bp, Glycine max
  Clone ID: 700943588H1
agtagattcacatacttcagcagcaaaagcctcttcttcttcttcttcttcttcttcactctcttcacaaatgaaaatactttgctctcttcctccaactctctcatactttcacttttctttgttcatgcaagatccaaagaacgattcaaacacaaggaagccatggtaccaaagagcaattgaggtgactagcctatggaaaagtgtatcaaaatccacagaaattccaacacctaattcttcaactttatg

SEQ ID NO: 39059 - DNA, 253 bp, Glycine max
  Clone ID: 700943589H1
cgatcatcaacatcgacaagctgtggtccctcctcccccaggaggccaaagacaaggccaccgccgacaaggcacccttgctcgatgtcacccagttcggttactttaaggttttgggtaaaggggttttgcctcagaaccagcctcttgtcgtcaaggccaagcttatttccaagatcgctgagaagaagatcaaggaggccggtggagccgtcgttctcaccgcttgattttttagggtatttttattttt

SEQ ID NO: 39060 - DNA, 254 bp, Glycine max
  Clone ID: 700943591H1
gtgatattgaaactatgaaagctcagtccaatattgtcagcattcgcacagttctcaacaggattggattggattgccctgaccttgagactcttagcatcaaagaccaaaccctaacaactgaaagtgtggagaagatcattggctgggctataagttaccattttatgcattcatctaaagcttctatcaaagattccaagcttgtgatatctgcagaaagccttaattatggaattaacattctacagggc

SEQ ID NO: 39061 - DNA, 258 bp, Glycine max
  Clone ID: 700943593H1
cacactctctcaagtcccaagaaagaaccctctcacctagctagctatcaaactaccgattcatagcactcttctcttcctcacttatgcgaaactcaaacatggttctcgttctccttttccttatggcaatcttctccgccatgaccactccgtcaacctccgcgatcgacaccttcatcttcggcggctgctcccaggccaagttcacgccgggttccgcctacgaaaacaccgtcaactccctcctaacctcgg

SEQ ID NO: 39062 - DNA, 256 bp, Glycine max
  Clone ID: 700943594H1
ctgatgcatcgtgtttttgtgtgcaggttatcaacgaccgtgagactggaaggtccagaggattcggatttgtgaccttcgcctcagagcagtcaatgaaagatgcgatcgcaggaatgaacggccaggaccttgacggtcgtaacatcactgtcaacgaagctcagacccgcgccagccgtggtggtggtggaggcggtggtttcggaagtggtggtggatacaaccgcggtagcgtggatatggtggtggtggt

SEQ ID NO: 39063 - DNA, 259 bp, Glycine max
  Clone ID: 700943596H1
ccaaccttggcctgcactcaaagaacaaaaccttcaaaatagtatccaaaacaccccttttactcccaatatctcaaacccaatttcaatttcaatttcaaattctcttctccaaagatgtctcttcaagctcaaccacaacaacaaccacaacaaccagtccaagtttacccaacaattcagccaccttcatctcctcatcactcaaatgggccatttggggcagtttccatggtccttgccataatactagtcattt

SEQ ID NO: 39064 - DNA, 272 bp, Glycine max
  Clone ID: 700943601H1
gatctgctcaacactttatttatattgaaaaccaatacttcattggatcatcgtatgcatggccagcttataaagatgcaggggctgataatctcatcccaatggaattggcactgaaaattgctagtaaaattagagctaaggagagatttgctgtctacattgttttaccaatgtggccagaaggtgatcctaaaactggggctatgcaagaaatcctcttttggcagggccaaacgatgcaaatgatgtatgatgcagttgctagagaa

SEQ ID NO: 39065 - DNA, 119 bp, Glycine max
  Clone ID: 700943604H1
ccagattacaatttcacttggatttgttaaccttaaaaaagaaggagaaaagaagacagaaaagaaaaagaagaaaaagaaaaaaaaacggcaagggcccaacggccgcaaaccgaccg

SEQ ID NO: 39066 - DNA, 278 bp, Glycine max
  Clone ID: 700943605H1
tggaaaaaaaaaaactcttgatcattattaatggcctctcattccccaaagagagaaggcccttattatcttaatattgtactattccttaccattctcatctccatcatcaacccttcacaccaagacccttcttcccctctccccccaataaacccaagactcaccaaagcctacacagcactccaagcatggaaacacaagatcacctcagaccccaaaaacttcaccttaaactggtgtggccccaatgtttgcaactacactggcatatactg

SEQ ID NO: 39067 - DNA, 275 bp, Glycine max
  Clone ID: 700943607H1
agaaactgcacagcagattcttgttactggaatcaaggttgttgacctgcttgcaccatatcaaagaggaggaaagattgggttgtttggtggtgctggtgtaggaaaaactgtgcttattatggaacttattaacaatgttgcaaaagctcatggtggtttctctgtgtttcctggtgttggagaacgaacccgagagggtaatgacttgtacagagaaatgattgagagtggtgtcattaagcttgatgataagcagagtgaaagcaagtgtg

SEQ ID NO: 39068 - DNA, 273 bp, Glycine max
  Clone ID: 700943608H1
ccacgtttttcttctccatctcagcctctgtcccaacaccattctcatggctgctctagctctagcactgcttcttctggctttcactggcacttcaagtgctacatggtgcgtttgcaaggatggaagcgacgcgatcctgcagaaaaccttggactatgcttgtggagctggtgctgactgtaatcctctccaccaaaacgggccttgtttccagcccaacaccgttagggcccactgtaactacgccgtgaacagctacttccaaaggaa

SEQ ID NO: 39069 - DNA, 275 bp, Glycine max
  Clone ID: 700943609H1
gttaagaagtagcaaagatgtttccattcgggcacaagggtcaaaagataaaggggactatggtggttatgcagaagaatgtgttggatatcaacagcatcaccagtgttgacgggatcgtcggcaccggcttagacttcttaggcagtgcactcgatacagttacttttttagcctcctccatctccatccaacttattagtgctaccaaggctgatggtgggaaaggaaaagttggaaaggctacaaatttgagaggaaagataacattacca

SEQ ID NO: 39070 - DNA, 268 bp, Glycine max
  Clone ID: 700943612H1
attgctaaacggttcatgacatgccctttaaaaaccttggatggtattaattgtagcactagctttgattttggtgccgagttctgagctgtggtggtgctgaccccgaaaagttctccaagtccatcatgagataaggctgatatattggagctggtgtcaattagtagacaaatttggttgctgactttcgtattcgtgtgtcttcaatagatggtatgtttaaatagaaagcatagttgacaatttcttgaatgtggttgtttct

SEQ ID NO: 39071 - DNA, 273 bp, Glycine max
  Clone ID: 700943613H1
agaatatcctcagccattttctgcgtagccaaacactctgagattctcaggtatgtcgtgacaagcgtatgtggatgatcaactactgagtgaaatcgaaggtaaccacctcactcacgccgctatcatcggccaagacggaagcgtttgggctcacagctccaacttccctcagttcaaacctgacgaaataactgccatcaataatgactttaatgagcctggatcacttgctccaactggattgtatatcggtggcaccatatacatggt

SEQ ID NO: 39072 - DNA, 229 bp, Glycine max
  Clone ID: 700943614H1
cgcaatgacacatgatggcagcaggcttgaagtgacattgggtgcaaagagaatttcctatattgtgggaaccggcacatggaacgttatagtgcttggaataaaacaagtgaagatattcagtcaaggtgctctgcagatggtgatcctgcacattttgattatggaattttcgggcaagtcttgtcttctggcatcatttcatctaagaagttcatctccagatact

SEQ ID NO: 39073 - DNA, 263 bp, Glycine max
  Clone ID: 700943615H1
tgcgggatgaagctgttcttcccgaacgtgctgaagtggatcggacgcgccggggtgaagctccacgcgcgcctggcggaggagattcgctccgccgtgagatgcgccggcggggagatcaccatggcggcgatggagaacatgccgctgatgaagtcggtggtgtacgaggcgttccgcatcgacccgccggtgccgttgcagttcgggagggcgaagagggacttgatcatcgagagccacgaccacgcatttcaggtgaa

SEQ ID NO: 39074 - DNA, 269 bp, Glycine max
  Clone ID: 700943616H1
taagagagaaaatagaggcaatagcaaagtcatatggagccagtggtgttgagtactcagaacaggctgagaagcagattgagatgtatagcaagcaaggattttcaggtcttccaatatgcatggctaagactcagtattctttctcagacaatgctgcagcaaacggagctccaagtgggtttgtcttacccataagggatgtaagagctagtataggcgctggaactattaatccagttgttgtatcctgactcgagccgctcgag

SEQ ID NO: 39075 - DNA, 255 bp, Glycine max
  Clone ID: 700943576H1
cggcggcgggcctaaccctcagtacccgcccaacaaggtcatgatctgggacgaccaccagggccactgcatcggcgagctctccttccgcgccgcctgtgcgcgcgtccgcctccgccgcgaccgcatcattgtcgtcgtcgaacagaagatctttgtctacaactttgcggacctcaagctcgtgcatcagattgagaccgttccaaaccctaatgggctctatgcggtttcgcagctgtccgttactctcgt

SEQ ID NO: 39076 - DNA, 263 bp, Glycine max
  Clone ID: 700943547H1
cagacttaacaacagcacaaagcgggttactgtctgttcaagctaccatctctctctctctttcttagtgcctccttgccagaagttaaaatggcccaagagactttcctattcacatctgaatcagtgaacgaggggcaccctgacaagctctgtgaccagatctccgatgctgtgctcgatgcatgcttggagcaggaccctgacagcaaggttgcctgtgaaacctgcaccaagaccaacatggtgatggttttcggaga

SEQ ID NO: 39077 - DNA, 263 bp, Glycine max
  Clone ID: 700943548H1
ttcttattcttcaccaaaccgataaccaggaaatagctagtgagactaatccatcgcacaaacctcaccgattcaatgacctctaagctaattgcttccaatctccgtcaccaaatcacaaaatcagcccaaaacctccgccgccagctcctatccacggcggcggcggcagtgccggaacacgatgggaacaactccaactctttgggaatgacgatgaagggcgttcgaatctccggaagacccctttacctggacgtgca

SEQ ID NO: 39078 - DNA, 264 bp, Glycine max
  Clone ID: 700943549H1
tcgcactctccctcatggcaaggttgagaggctctatggtctcgcccctgttgctaagtacttggtcaggaacgaagatggtgtctccattgctgctctcaacctcatgaaccaggacaaaatcctcatggaaagctggtactatttgaaagatgcagtccttgaagggggtattccatttaacaaagcatatggaatgacagcctttgataccatggaacggatccaagggttaacaaggttttcaacaaggggatggctgat

SEQ ID NO: 39079 - DNA, 126 bp, Glycine max
  Clone ID: 700943551H1
agtccattcgtggtggatcatgggggagcaacacgagaacgagaatgggagaacgggaacaaagaaccagcatcagcagaagaagaagaagaagataagcgagttcgagttctgcaaagcgtgcaa

SEQ ID NO: 39080 - DNA, 205 bp, Glycine max
  Clone ID: 700943552H1
ctctatcagtgaatctcacggcaagcaatccagcaggtgtatgatgccaagcttaacaagtgaacccaaaaatgttgaaatctttggtgtctatgaaatcatagtgagctggtttagtggtgttgatcaagcccctcacttgctcaccaagacatcggatctgttgtgtgctaccttaaacttttggtggcaattctacatctgg

SEQ ID NO: 39081 - DNA, 258 bp, Glycine max
  Clone ID: 700943553H1
attgcttcttcgttagagctcagattgagatggcttttggaaggtttgagaatgcagttacagctgctgagaaagctagtcagattgacccccgaaatgttgaagttgctgttttgctcaacaatgtgaggatggttgctagagctcgactgcgtggtaatgatctttttaagtcagaaaggttcactgaggcctgctcggcatacggggaaggtttgaggctcgacccttcaaactctgtcctctattgcaatagag

SEQ ID NO: 39082 - DNA, 256 bp, Glycine max
  Clone ID: 700943554H1
ctcgagccgttttttctctctcctcttcgccgctaattaacccttttctccccagcattcaatttctattagtatccaaaccttgattgcgttcttggattttcttgtgggtagggggtttctcctctctttctctgcagtttgatggatcgggaaggaggatccaacgccggatcttgctactactccgttctcgggattcgtagggatgcctccttctctgatattcgcactgcctaccgcaaactcgctatga

SEQ ID NO: 39083 - DNA, 257 bp, Glycine max
  Clone ID: 700943555H1
ttccattctctctgtgtatttccctacctctcccttcaagatgcagatcttcgtcaagaccctcaccggcaagaccatcacccttgaggtggaaagctctgacaccatcgacaacgtcaaggccaagatccaggacaaggaaggaatccccccggaccagcaacgtctcattttcgccggaaagcaacttgaggacggccgtacccttgctgactacaacattcagaaggagagtactcttcacctcgtcctccgtc

SEQ ID NO: 39084 - DNA, 256 bp, Glycine max
  Clone ID: 700943556H1
gttccgcaaagctcctgagggttctctcaggaaaaatgcagctcagaaacaagttttggaagcaatgtctcatagaatgcatgtagacaacagtgtaaaacttattgggaagcttttatttggtattgaaaagggtccagaagtactcaacgctgttagaccggcaggatcggcacttgttgatgattggtactgccttaaaaccatggtgaggacttttgagacacattgtggatccttgtctcagtatggcatg

SEQ ID NO: 39085 - DNA, 257 bp, Glycine max
  Clone ID: 700943557H1
cagaatatcaagaaatggatgaatttgggacaataacaaatgttgagtataaggacaccggagagacttctggttctgttgatgttacatttgatttctatgttccagacgaaaggtcttgattttgagttgaaagttcttgaattttgatttctttgtcaaaagttagtgtctgaaatgcctaccagtgaaagctaatctggatttctgtatatatttttaaattgaagcttacattagggtgacactagattttg

SEQ ID NO: 39086 - DNA, 245 bp, Glycine max
  Clone ID: 700943558H1
gatcttctcatttcttgtctcaaattaatcctcaaacttgcctctctctgtctctctacaatgtgctccatttcctcactccatcaaaaccatgtctaagtgttttggaacaggatattgctaacatgaaggactcttggtttttcgacaataactttaatggtctgtcagatgagatttgtgattttgtcatcaacttttttgatttcccgatggaagacgtgtctgctaatggtgtggaagaa

SEQ ID NO: 39087 - DNA, 257 bp, Glycine max
  Clone ID: 700943559H1
caagaaattcagatctgctgcttactctaactgttctcgcaaaccatcctgatacacatccggattgatagttcgttgcatgcaaccatagttttattaggattttttcttctttgttttcaattaggtttttttgttgctctccttcaaactccatctttccaaatcctctctttgcgattgtgttttgatctgcttcctactgcgatagtttctctactgttacatggccatggcggtttccgcaattggttttg

SEQ ID NO: 39088 - DNA, 127 bp, Glycine max
  Clone ID: 700943560H1
cgagcagtggctcgtgaagcacgggaaggtgtacaacgcgctcggcgagaaggagaagcgcttccagatcttcaaggacaacctgcgattcatcgacgaccacaactccgcggaggaccgaacctat

SEQ ID NO: 39089 - DNA, 259 bp, Glycine max
  Clone ID: 700943561H1
tggggttttgccatcgctatgtatgtagctagtcattgcatttgagaactgttggggatcttctccaacattgtagaaggttgagaagacattagtttgtgggcatggttttgtgttcgagggatttgagctttggatgcagattgaagagggctaactgttaaatccataactcccatcaaggtttttgctttgtgtgtttgtggaaatagcataccctttgagctgctctgtctattttcttctggtgtcttgttct

SEQ ID NO: 39090 - DNA, 259 bp, Glycine max
  Clone ID: 700943562H1
aagaaggcgtcttcataaacgcctttcttctccgtttccgtttcctcgttcgaattcgctttttgatctgcgaaaatgagagagtgcatctcgatccacattggtcaggctggtatccaggtcggaaatgcttgctgggagctctactgcctcgagcacggcatcgggcccgatgggcaaatgccaagtgacaagacagttggcggtggtgatgatgctttcaatactttcttcagcgagactggtgctggaaagcacg

SEQ ID NO: 39091 - DNA, 262 bp, Glycine max
  Clone ID: 700943563H1
cactaacctcccttttgtgagttaattcttaaaggattactacttgagtgggtcttccttatctttgagttttggaccatttctttttttagcctaacgacaatggtacaatgttataagacagaatcttgaaaaatgcccttggaacatagatctaaatcactcgctacttaatgaggtttctaacatttgtgcgctatattgaccatgctatatacccaactttcttttcctcccgattataagattatactattctgtc

SEQ ID NO: 39092 - DNA, 263 bp, Glycine max
  Clone ID: 700943564H1
gagagaaagttctctctgcttctctctcttagactcaaaaccctattgcgagctttgcaatcgaccccgattatggccaacagtaaactcactcgaagaatcatcaaggaaacgcagcgtttgctcagtgagccagcacctggaattagtgcgtccccttcggaagacaatatgcggtatttcaatgtgatgatccttggcgcaactcagtcgccttatgaagggggagttttcaagttggaattatttttgccagaagaaca

SEQ ID NO: 39093 - DNA, 219 bp, Glycine max
  Clone ID: 700943565H1
tgaattactatcaagatctttccttcaagattttttcgatggtggcactttttatgaatttaaaattcatgatttggtgcatgatcttgctgtatttgttgcaaaagaggagtgcctacttgtaaagtcccacattcaaaatattcctgagaatattcggcatctgtcttttgctgagtataattttcttggaaattcattcacctcaaaatcggactg

SEQ ID NO: 39094 - DNA, 253 bp, Glycine max
  Clone ID: 700943567H1
acactcattaattgcaagaatggcacttcgttgcttggtgatgtccctttctgttctcttcactcttggtcttgcgagagaaagccatgccagagacgaagatttttggcatgctgtttggccaaacactcccattccaagttcattgcgagatcttctaaagcctggccctgcaagtgttgaaatcgatgatcaccctatgcaaattgaagaaacacagtacccgaaaaccttcttctataaagaagacctt

SEQ ID NO: 39095 - DNA, 256 bp, Glycine max
  Clone ID: 700943569H1
caagcaaccatggcaatggcaacccaagcctctctcttaaccccacccctctccggtctcaaagccagcgaccgcgcctccgtgccatggaagcaaaactccagcctctccttctccagcccgaagcccctcaagttctccagaacaatcagagcagcagccgccgacgagaccacagaggcaccagcaaaagtagaggctgcaccggtcgggttcaccccaccagaacttgacccaaacaccccttccccgatct

SEQ ID NO: 39096 - DNA, 255 bp, Glycine max
  Clone ID: 700943570H1
actccgtctccagagagagaaagtccgagatctgatcggaaccgaggtaacgctagctccaaacctactctatgctccctcgcgaacctcactttcttcttcttcgtcgattcgtttctattttctggatttaactcggtggaagttctaggttattattgttctttctccgtgcgcgagtcgttgttttccgtaaaaccttaggtttcggattctagggtttggtgaaggttttaggttgagggaaaacgaatt

SEQ ID NO: 39097 - DNA, 256 bp, Glycine max
  Clone ID: 700943571H1
caaaaaactaactctactctgaaagtgcatcattcctcctttgatcctctcttccccatgaccttccaacccgtccccactctccttctcttcctcctaccttgcgtctgcaaattcccattttgccctcgccggaaagcgcaaggtccacatccccgacgagttggacgacgtgttcgacgacgaggaggacgacgcgtggcgagaatggggcaagaaacccgaaccctctttccctccctccgatatctccaag

SEQ ID NO: 39098 - DNA, 254 bp, Glycine max
  Clone ID: 700943572H1
gttactaaagctggttgatctacgttcatcttaatgagttacttatcacttaaacacagaacaattaacatgtttgttgtaattgttggatggatggcttgattgaagttgggacattggtgttatagatttgtgatttagataatgaatcacttaataaatttaaaagtaaattacataatagtgttgttatgttggaaaacacaaaacaattctactttaattatgattagaaagcccaatcaatattctaa

SEQ ID NO: 39099 - DNA, 253 bp, Glycine max
  Clone ID: 700943573H1
gaatttgcgggttttggatttggacttggtcgtcaacacagtctaattaatatctttttgctccttcgcttatgaatcttcttcttcttcttcttgttcctgcaacgcactgaattcgatcaatcaatccatcttcaattgctttgtttcgatcggaggaaaatggccgatcagttatcgaagggagaggaattcgagaaaaaggctgagaagaagctcagcggttggggcttgtttggctccaagtatgaag

SEQ ID NO: 39100 - DNA, 261 bp, Glycine max
  Clone ID: 700943546H1
gagtgggagaaagccttagagagaatttttttcaaaaaagaaaaatattccttcttaattctacgtacgtgaggtgttagaagacacaacaatgaatttggcaaagggtgttggcggaaacattgacaaatcccaagttctgtccgctgttgaaaagtacgagaagtatcatgcttcttatggaggtcaggaggaggagaggaaagctaattatgttgatatggttaataaattctatgatcttgctactagcttttatga

SEQ ID NO: 39101 - DNA, 253 bp, Glycine max
  Clone ID: 700943574H1
cgaggaatgggaggagttggtcttcttcatctttgtcggtgtcttcttctgttgggtctttggggggagttcttcggttatggaatggtccagtgcggaggagaatgagtttgtggttcctcttgggttttctttggttgtttatgcttggagaaggtgagcattaatttgggtggtttttttttcatttttcccccctttacagtaaaattttagggggaaaaaagaatgaaattagatattggcatgtgta

SEQ ID NO: 39102 - DNA, 101 bp, Glycine max
  Clone ID: 700943575H1
cgcggtgatgcttctgaatccgacaaagatttgcttggtagaggagagatggaaacacaacatgattattactctacgacaatgtcaatacgcagaagcag

SEQ ID NO: 39103 - DNA, 260 bp, Glycine max
  Clone ID: 700943512H1
cgaagacaaccaactgcgttttagcctcttgccaggctgctttggaagccccaagggttctgagtcttaattccagtaaatatttctctggaccatatggtgaagatgtcatttttgttgccaatgattggcacactgcccttatcccctgctacttgaaaagtatgtaccagtcaaggggcatctatacgaatgcccgggttgttttttgtatccacaacattgcttaccaaggaagatttgcattcgccgacttctca

SEQ ID NO: 39104 - DNA, 258 bp, Glycine max
  Clone ID: 700943513H1
actcgttagagagagtttgtgtgtgtttttgtgtgtcaccttggtgcatacaagacaagatggaggaccaagatggtagtggtaagttgagccaagggcttcgcaaggtgaagccttaccttgctatattgtcccttcagtttggctactcagggatgtatatcatcactatggtttctttcaagcatggcatgagtcattggatactctcagtgtaccgtcatgtagttgctgctattaaaatagtcccttttgcac

SEQ ID NO: 39105 - DNA, 278 bp, Glycine max
  Clone ID: 700943514H1
ggaattctgctcgagtgtttttctagcgatctgaatactgtttctaagaatgatgatgatcattacatgtatgagactcaatttagttttaacaataatattactagtttcattgattgttgcattgagagtttcactttaggtgatattgacaaattcaatgatatttatttttatagttacatttttttgaagggcagaaattgtagtgaaagcgataattctagtactagtataattactagtacgcatgatacaaatgatagtgattccactct

SEQ ID NO: 39106 - DNA, 267 bp, Glycine max
  Clone ID: 700943515H1
tctcttccaattttctcctccaatttcaatttctcgtcgtccctcattatggctcgtctctcgatcgtcgccatcgtcgccgccgtgctcctcctggccctctccgccacccccgcgacggcgcgtccctgcaggagcttcataatctcctcctactccttccgcaaccctaactccaacacgttcgccaccatcaccgagatccgatccttcacccctctctacatcaccgacaaacccccctcctatgcccttttcttcccccag

SEQ ID NO: 39107 - DNA, 86 bp, Glycine max
  Clone ID: 700943516H1
cgagaaactgaacagcttgtaattgtttgacaaaaaaaaagaaaaaaaaaaaaaaaaaaaaagaaaaaaaagagagggggggaccg

SEQ ID NO: 39108 - DNA, 110 bp, Glycine max
  Clone ID: 700943517H1
gaccacgaaaaaaagcaactacatcagtccatggcaacccccaaccctaccagattctcccttgccatggagagaaccgggcaatgggttttctccccagaaatcccaac

SEQ ID NO: 39109 - DNA, 85 bp, Glycine max
  Clone ID: 700943520H1
gtttcattcattggaagatatgggaacattagaacaaattgatgcccctcaaaccaggtcatcatcatcttcatcttcttccatt

SEQ ID NO: 39110 - DNA, 261 bp, Glycine max
  Clone ID: 700943522H1
gtgcggacagcaacagcaacagaagcatcgttcaagtatgacagtgtgactaggattccttctagcttggactggaggaaaagaggtgctgttactccaatcaaggaccaaggaacatgtcgaagttgttgggcattttcaactgtggctacaattgagggtctccatcaaataactaaaggtgaattagtgtctctatcagagcatgaactagttgattgtgttaaaggtgacagcgaaggatgctatggtggatatgtg

SEQ ID NO: 39111 - DNA, 260 bp, Glycine max
  Clone ID: 700943523H1
agaagcatgagttttgtgttgatgctgttcttaacgagaatgttaccaatgatgaagtatatcgagttaccgtagaaccaattattcccacaatttttgagattatcaaagctacttgttttgcttatggtcagacaggaagtggcaaaacatacacaatgcaaccgttgccgctcagagctgcagaagaccttgttagacaattgcatcgaccagtatatcgaaatcagagatttaaattgtggcttagttactttgag

SEQ ID NO: 39112 - DNA, 260 bp, Glycine max
  Clone ID: 700943524H1
tacctctcaagtttttgaagtatagagatggcagagacattcctatttacctcagagtcagtgaacgagggacaccctgacaagctctgtgaccaaatctctgatgctgtcctcgacgcttgcctcgaacaggacccagacagcaaggttgcctgcgaaacatgcaccaaaaccaacttggtcatggtcttcggagaaatcacgaccaaggccaatgttgactacgagaagatagtgcgtgacacctgcaggaacatcgg

SEQ ID NO: 39113 - DNA, 261 bp, Glycine max
  Clone ID: 700943525H1
gttgcaggggttcgtcgtttacccttccctaaagtatctggtgtgctttgttcggtaataacgaaaaacgatgggagctgaaactgaatcatcacaggaaaagccagcacaagagaggccaaaggctgctctctcacaggaacagttcctctcatggaaacgccacaaggacgctgcagtatcagccagaaaagctgaagtatccaggaagcgtgctgaagatattgcagcaggaactgtccaaatgaatggccgagaact

SEQ ID NO: 39114 - DNA, 262 bp, Glycine max
  Clone ID: 700943526H1
attcactctgaaaccctaattatgccgccattagcgtctctgcaacttcggaggctcttactccgttctcgttccttaccattcacatcttcctctccgattcatcactctcctctgtttccccgacattcctcttcccatttctattctcgaactctcttcaccccttcgttcttcataacaagacatttctcatcggaaacccaaacggatgagattgctagctccctctcctcagagcttctcaaagagccagactcgg

SEQ ID NO: 39115 - DNA, 263 bp, Glycine max
  Clone ID: 700943527H1
gaagcagaagaaggaaacacagacagaactgagagtgagtgagagcagaagaaggaacgtagcaacaatgggtccagcggcaaagacgacgacgatgcgttcgatctctcaagaagcgttcgaagaactggtgaatgagaacatcgacgacctcggcatggaccccaccgaggccctccaagacgcaatccaaaccctcactctccaaggcgtcgatctctcaggcatcgtcacgtgcgtccccggagaaaccaaccccgtca

SEQ ID NO: 39116 - DNA, 261 bp, Glycine max
  Clone ID: 700943529H1
gagaaaacgtgtcccctgggttgcgtgcttcgtttgacagcaaattcgtggtttcagcacggtaagtgctatcggttcggtggccttaacttaagaataataacaaaacaaacacagcctaatacccaatcctcactctactttccccatttatctgtcaaacgcgcacaacaagaatcaaaatccaagggcgagctttaaaccatttcagggttttgttcgttctggtacgagttttcttatttctgatcatctgcctta

SEQ ID NO: 39117 - DNA, 261 bp, Glycine max
  Clone ID: 700943530H1
aacccaatcaactaatatggcctaatttgaaaatcaagtattttcagagagagctgaggcaatacttggtgtatttcattgtggcactgactatattcttctacatgattccaattacatttatatctgcattaactactttggataatttggtgaaatatctcccattcataaagccaattgttaatataaaggcattgaaaacagtgttggaagcttacctccctcaactcgcactgattattttcttggctttgttgc

SEQ ID NO: 39118 - DNA, 268 bp, Glycine max
  Clone ID: 700943532H1
gttgcacaaaatgggagtcctaaccctccatctattgtttgtttgagaaacaccaacgctataccaaaatacatgcctaatctaccacaaatcaaggcaattctccaagtttactctccagtcatgtccttgcaccctgatgaagaattctttccatcttctgtggagtggtttttctccaatggagcacttctatataagaaaggacaagagtcaaagcctgtgtcaatatcaccaaatggggctaaccttcctcaggatcctaaca

SEQ ID NO: 39119 - DNA, 134 bp, Glycine max
  Clone ID: 700943533H1
tgttgatcctttctggaagctcaagaggtttcttaacattggttgtgaagctacccttaagagaaacgtgaaaataatagatgattttgtccatggagtaattaagacaagaaaggcacaattggcacttcagc

SEQ ID NO: 39120 - DNA, 247 bp, Glycine max
  Clone ID: 700943534H1
gtttgggttgggacatcaagctaagaaagggaaagagaaagatcacagaaagagaattcatcggactttgcgaacagctaaacacctcaaagggaaagaaggcatgaatagaggtgttcttcagagctcaccagtgcaacgaatgatgactggaaaccctaactggtggcacatcaatgtcaatagcatggctccacaagctcctcctgtcttgtccactcctaacaactgtcctatcccttgtgct

SEQ ID NO: 39121 - DNA, 265 bp, Glycine max
  Clone ID: 700943535H1
ctgagattgtatcatatgaggttgctgttggagtgtagattcatatatagccggagagtatttatataagaacataggactccatgttacctctatattcacaacagtaatgaaataactggtaacatggagtcctatgtgtatatataaatactctccggctatatatgaatctacactccatgttaccagtcatttcattattgttgtgaatatagaggatgcttcattttcattataaatcttgtattgcatttaaagatag

SEQ ID NO: 39122 - DNA, 260 bp, Glycine max
  Clone ID: 700943537H1
ggcagatgactgaggtcttggaggccttgctgcctgagggtatgattattccttctgcttttgagactgttggtcatatagcacacctgaatttgagagacgaacatttaccatacaagaggctaatagcaaaggttgtgctggataagaataagccaaggatacaaaccgttgtgaacaagattgattcaattcaaaatgagtacaggaccatgcagcttgaggttttagctggaaaccactctcttgtgactacagta

SEQ ID NO: 39123 - DNA, 259 bp, Glycine max
  Clone ID: 700943540H1
tgaaaagatgcgagcacagacgctgatgacacagtggtgcacaagagcagcaacgtgtggccaattgatgatgagcactaacaccaacacccccaaacacgatggtctcgacgccattttcaaacataagcgcttacttcgaacgcaggtcagaaaaaccctaaaatccatccaaccctccctccgatctcaccaagataacaccgttcaagacatagttttgggagctccgtggttcaaatccagtcgcaggctatgc

SEQ ID NO: 39124 - DNA, 258 bp, Glycine max
  Clone ID: 700943541H1
gttggtattgcagtaattaagaatttcacagttgttgtgactagtaacgctttggagattcggttatattgggctgggagaggaaccacttctattccatttagatcagtttatggtcctcttatatcagctatatctgtagatcctaactttgtacccccatcagagggtggtactatcagcatatccatagtattggttgtggttgtagttgtggttgcttgagcaattatcatcttgatatttggtatattgtgg

SEQ ID NO: 39125 - DNA, 95 bp, Glycine max
  Clone ID: 700943542H1
cgaaccgttgccaggtttacattgtcccaccaagcctcctcgcgattccgcagaacagtcgctaggcgcgtctccattgtgaacgcggatatgct

SEQ ID NO: 39126 - DNA, 258 bp, Glycine max
  Clone ID: 700943543H1
cgtgttcctgccgcgtccgccaccgctccaccacgcagcatatactcacagcaataacagcattgcactgaaccctaactcatcactgcacttgcgaagacacagccacaatcacgcatcgctgaaactcgtcatcacactattagactcactagcactgatctcctcctcctcctccgccgtgaacgttggtggtcgacgacggcgttgcggttcatacgttgtattcctggagtgatgttgaatcatgtgagcaat

SEQ ID NO: 39127 - DNA, 259 bp, Glycine max
  Clone ID: 700943544H1
gggatttcagcatggatttgactaagtaacccaagtgttatctgtcaatggagatacttattaaatgaacagcatcaattatataacttgctgtaatatatttatagcgagattttgattcctaaattgcatagacataagttttaggcttactctataatttaatggtcctactctactccaaccttttactttgcacagaatttataccaatttgagtcgcaaacatggagtttcaatctcttcgttaagagtgtga

SEQ ID NO: 39128 - DNA, 262 bp, Glycine max
  Clone ID: 700943510H1
cgacacatttgtggtcgtggcaaaatcatggtcatggacctgttttaaaaccttgggaataagactgaagctgtcaatcccacacttgtgatgatgatttacatcatataaatgacaaaggattcacctctgtctctctgttttagcttgcagagtcacagatagatagtgctttttctcatgccaacatgttccgtgatgacctctattagagttatgggccctttatattttgtttgaattctagttagaggacctcagt

SEQ ID NO: 39129 - DNA, 260 bp, Glycine max
  Clone ID: 700943545H1
gaaagattgaggagtcaaagaaaagagaagcatacctggaaaatgaacttgccaacatgtgggtccttgtggcaaagctaaaaaagtcacaaggagctgaaactgatgtttcggtgtcaaccatagagaatttgcagttggatggttgaggtttgatgtgatcttgtaattgtggcttttgagtggatccattattacgatttactttcaataggagtggtttgagagagaggtgtgtaaagattgttgttcgcaggaaa

SEQ ID NO: 39130 - DNA, 247 bp, Glycine max
  Clone ID: 700943472H1
tgaatacttcaaatctgtaggaagtagagctccagatactttaatgaactctgctccatatgaatctcccaggctgaataggatgcaaagtaatttagaggcttcctttgggcctcaaaggagttcttcctcactgcaggcaaattctgtccagtttatggatgaatatgtgcagacctccagccgcaatctccttgatgctggtgaaaggcgctattgtagtgtgcacaatctacctacatctgca

SEQ ID NO: 39131 - DNA, 267 bp, Glycine max
  Clone ID: 700943473H1
ctgcgcaaagcgggtggtggtggacgcgcgccaccacatgctgggtcgtctagcctccatcgtggcgaaggagcttctgaacggccagaaagtggtggtcgttcgctgtgaagagatttgcatctcgggcgggctggtgaggcagaagatgaaatactgtgaggtctcctgtcgcagaacgcatggaacacgcaaagccctatccatgtgccccataccacttaccgtgtccccctaccagagatacttctaggcgcaccgattcgt

SEQ ID NO: 39132 - DNA, 250 bp, Glycine max
  Clone ID: 700943474H1
caaagtttttgaaatgttgtcaccccttcttctatttctatgcctaactcttcctttgtttttgttgtccttcttcaaataccgtaaaaccttcaagaatccaccacttccaccaggtcctagaggtatacccataatagggaatcttcatcaactagatagtccttctcttcatgagcagctatggcatctctctaagaaatatggtcctttattttcccttcaatttggattaaggccagccatagtt

SEQ ID NO: 39133 - DNA, 248 bp, Glycine max
  Clone ID: 700943477H1
attttcctgtatttttactcacagaaagtggctcaaagactcttcaagagtttgtaacaaagaatgaggacacaaagaaatcttatacttctaatgtggctgagtttgacctggtgatgcagacagtgaaatctggaacacatgattcagagtcttgtttaaaagaagaaacttgccttcctttaggtggatacagtgtctggtcatctcttcctccgatcaacatttcatccttacaacggtctaag

SEQ ID NO: 39134 - DNA, 75 bp, Glycine max
  Clone ID: 700943478H1
gagagactggactagctgagttagggtgagttgcaggcagtgtcatctctcctttgacgacaagatgagcatccc

SEQ ID NO: 39135 - DNA, 250 bp, Glycine max
  Clone ID: 700943479H1
gttattagccccaaatcctggggttacggtttcatctgcgtcgatggcttcgaattcgatcgacggcgacgcgtattggggtcggggctgtgcataaacgacgtgttaagggacgacgagctgcgttccattctggggcgtgtggagagcgagaaggacacggaaacgttcgggctggtctgcaagcgatggctccggctgcagagcacagaaaggaagaagctcgccgcacgtgcgggccctcacatgc

SEQ ID NO: 39136 - DNA, 252 bp, Glycine max
  Clone ID: 700943480H1
caaaatatcatcactcttacaactcatatttctttatttcttcctattacatcatatcacatatcctacctatatttctctctcttttctttctctttcactaggtgtatactagcaatatttgggtgtcaaaatatttttttccttttgcaaattccttgcttcttttgtactcactgaggggtatttctatgcaggagttgtggctcgctagctacaattccaaaatcgaagagaaattttagcatttga

SEQ ID NO: 39137 - DNA, 249 bp, Glycine max
  Clone ID: 700943482H1
agaaaagcttatgcctcagccatcgtttctactcgctagagcgtaagatgggcactcagagaagcaaacccagttgtaccatcgttgcgatctttctagcattttgttgttttgtttcttcttcgaaagcaaagcttgagagtctccaacatgcgcccaaagctgatgggtctctaagcttcttggtggttggagactggggtagaaaaggtgcttataaccaatctcttgtcgcttttcagatgggtg

SEQ ID NO: 39138 - DNA, 249 bp, Glycine max
  Clone ID: 700943483H1
aagatggccgaaccttggcagattacaacatccagaaagaatctaccctccacttggtgctccgtcttcgcggtggtatgcaaatctttgtgaagactcttactgggaagaccattactttggaggtagagagctctgacacaattgacaatgtgaaggccaagatccaagacaaggagggtattcctccagaccagcaaaggttgatttttgctgggaagcagcttgaagatggacgcacgctggcag

SEQ ID NO: 39139 - DNA, 239 bp, Glycine max
  Clone ID: 700943484H1
aagatggagaaagcttcgtacttcaaccgcgtgcggtggcacacctcgctggcgaactcgcagtgtggtccttcgtattcctgggcgcgatcttgatctttttcctccggtcgccggcgtcgtcgccggttccggcggacctctcccggcggtctctgcggacctacaactggggcggacccgtctgggagaaacgggtccggcctccgccagatccgttccgatacgggttcgcgttt

SEQ ID NO: 39140 - DNA, 159 bp, Glycine max
  Clone ID: 700943486H1
ccgaaaccgtacggttacgtaaccgtaggcgatatcagaattcacggcacacacacagtccccactctctacgatgaccggtcaacgcatctcctacggcaaacgctcccactcgcactccgatgtgccgacgccggactccaaaatacaagtcgccgc

SEQ ID NO: 39141 - DNA, 251 bp, Glycine max
  Clone ID: 700943487H1
cacaaagaaccagaaaacaaccttcaacaaagacaaaaaccgctctcttctgttctgtccctcaccttataaaacaaagttccacttcatccgattcatctaaaccacaccattcgcatcacaacacttggttgtttgttaccatcttccaaaaatatcatgctcctaacgtaaaagtcctcggtttcgtcgttcaactgcgatctctaaacaaaaccatggcatcactctcaggcatttgctcctcttcc

SEQ ID NO: 39142 - DNA, 252 bp, Glycine max
  Clone ID: 700943488H1
atcgaggtgtcataaacttgatgtatttgtgtctccaatctctttgaactgtgagagaacagccatggacagacgcacgaacacctccaggccagtggcattgtcttccccttctatcactgccaccaccaccaccaccataacaattttgaactctgagccatcatcctcttcatcccagcaggaacaacagcaaccagaagtcctcttcctcccactcaatcgcaagaagaagcaggtttcttggaaaga

SEQ ID NO: 39143 - DNA, 250 bp, Glycine max
  Clone ID: 700943490H1
atcttcccaagcttgttgaaggtcttaagcggttggctaagtcagatcctatggttgtttgtaccattgaggagtctggtgaacacattgttgctggtgcaggagagcttcatcttgagatctgtttgaaggacttgcaggatgatttcatgggtggagctgagattatcaaatctgaccctgttgtgtcattcagggagactgttttggagagatcatgccgcaccgtgatgagcaaatcacccaacaa

SEQ ID NO: 39144 - DNA, 249 bp, Glycine max
  Clone ID: 700943492H1
gagttgtttttgcttaatggggtgtataacattggggactttattccttggattgatttcttggacttgcagggttacataaagaggatgaagactttgagcaagaagtttgatatgttcatggagcacgtcctggatgaacatattgagaggaagaaagggattaaggattacgtggcaaaggacatggttgatgttcttttgcaacttgccgaggatcctactcttgaggtcaagctcgagaggcat

SEQ ID NO: 39145 - DNA, 251 bp, Glycine max
  Clone ID: 700943494H1
ctcatcactcatctatggctacctttccctcccctccttcaccatcttcttcttcttcaattccgtctccaagatctagaatgttttactatgctggaagtgaagaccactatgaggagcctcacttcctccaagcttgttttctttgcagaaaaccactaggccaaaatcgtgacatcttcatgtacagagggaacacaccattttgtagcaaagagtgcagacaggagcaaatagagattgatgaggca

SEQ ID NO: 39146 - DNA, 146 bp, Glycine max
  Clone ID: 700943495H1
ataatatatcatatgtgtaggttgttgttttagagaatagagatagagaatggccggctggctggagaatcctgtccagaactcacatcacatgagctgttctttgttttgtttatttttcagaataaatggtttactattatttc

SEQ ID NO: 39147 - DNA, 276 bp, Glycine max
  Clone ID: 700943501H1
gcggcacccacacacacagttcgtcggaatgggaagggtgattcgcgctcagcgtaagggtgctgggtcggtgttcaagtctcacactcaccaccgcaagggtccggcgaggttccgcagcctcgacttcggcgagcgcaacggctacctcaagggcgtcgtcaccgacatcatccacgaccccggtcgcggcgcccctctcgccaaggtggcattccgccaccccttccgctacaagaagcaaacggagctcttcgtcgccgccgagggcctcta

SEQ ID NO: 39148 - DNA, 268 bp, Glycine max
  Clone ID: 700943502H1
ctcaaacacaactcaccaacacagttgttgcattatttcttttttccagatccaacttcaaaattgcaatgggagtggaagatacagatatttgtatcatcaaggagccagatcatgttgtagtctattcagatggcatttctcatgattcgggtcatgaagctggaagtggtcatcacaatattacagagtcgtatgaacaaatcaatgagactattgaacatcatagttcagaggatagtgcaaaggaatatgaggtgaaggaatg

SEQ ID NO: 39149 - DNA, 267 bp, Glycine max
  Clone ID: 700943503H1
ttttccctccccgaaaacgatgtcgttcgaggtggaggaggaggaggcgttcgagcacacgctcctggtggtgcgcgaggtgtcggtgtacaagatcccgccgcgaagcacctccggcggctacaagtgcggcgagtggctccagtccgacaagatctggtcggggcggatccgcgtcgtgtcccggcgcgaccgctgcgagattcgcctcgaggatccgagctccggtgagctcttcgccgcctgcttcgtctacgccggccagcg

SEQ ID NO: 39150 - DNA, 263 bp, Glycine max
  Clone ID: 700943505H1
cggctcgaggttatgacagtgccatcagcaatggaaacaactttgttccactagagatggacggttggaaacaaacaatggtggcaatttctagcaaaaacctaaagcatatccttattgcatgtgccaaagccatttcagacgatgatttgctaatggcacagtggctgatggatgaattaagacagatggtgtcagtttctggcgatccgtttcagcggttgggagcatacatgttggaaggacttgttgcgcgattggct

SEQ ID NO: 39151 - DNA, 263 bp, Glycine max
  Clone ID: 700943506H1
tgatcttgataaccctttggccaaggaattaatggaagtctatgagtccatgggcgacacattagcctttcaatatgggggttctgcggcacacaataagatattttctgagagaagaggtcaatggaaggcagcagcccaatcccaggaatttattcgaacactacagcgttattacaacaacacatatttagatggtgataagcaaaaagcaattaacttactcttggggcattttcagccccaacagggaaaaccagcac

SEQ ID NO: 39152 - DNA, 230 bp, Glycine max
  Clone ID: 700943507H1
ggcctctgccccttgaattctattgaggttacaaggctgcttaaaggtctaggtgctccaaaaaatgcaagaatttattgggctggaggacaaccactgggtggaaaggaggtcttacagccattaatcaatgaatttccacatctttacagtaaagaagatcttgctttgcatggagagctggaaccatttgcaaataaagcttctctaatggctgcccatgattacat

SEQ ID NO: 39153 - DNA, 254 bp, Glycine max
  Clone ID: 700943508H1
ggcaattgcaggaattattactgaaagagattacttaagaaagatcatcgtgcagggaagatcatccaagtctactaaggttggagatattatgactgaagagaacaaacttatcacagtcacccctgataccaaagttctgcaggctatgcaactgatgactgacaatagaatcaggcacatccccgtgattgatgaaaaagggatgattggcatggtgtccattggagatgtggttcgtgctgtggtgcgtg

SEQ ID NO: 39154 - DNA, 261 bp, Glycine max
  Clone ID: 700943509H1
gggactgaaagggggtgttctgttctgatcggatctgaaatcatcgggaaaatgtcgtcgtttctgcaccagagaagcagtctccagaacccattctcgaatccattcccggcatcaactccatcatcatcgaattcgaagaaatccctgtccatcatgggccccaccaccctcctagccctaatctccctcatagtcatactcggcgtcttctgcccctgggtgggctttccccagggcttccccttcactcccactccc

SEQ ID NO: 39155 - DNA, 250 bp, Glycine max
  Clone ID: 700943470H1
cagtgttggtcgaacccattgtgtgaagttggtgcaccgtttgtacccagagattgatccagctctgaaccctgaccacgtccctcacattctgaagaagtgccctgatgccattccagaccctaaggcggtgcagtacgtgagaaacgaccgtggcactcccatgattctagacaacaactactacagagacatattagaacccaagggtctcttgatagtggatcaccaactagccaatgacaagagg

SEQ ID NO: 39156 - DNA, 253 bp, Glycine max
  Clone ID: 700943440H1
agcatatgaagctttagaaaaccgtgcccaggccagaatgtggtataaagctgctataaaagcggatcctttatgctatgaggctttggaatgccttattgagaatcacatgcttacatgtgaggaagaagcaaatttgatctcatcattgcaatttggtagtgaggatggatggctctcttcattttattcttgtttgataaagaagtatgacaaagaaaatattgtagtagccaagttcagagatcttgag

SEQ ID NO: 39157 - DNA, 253 bp, Glycine max
  Clone ID: 700943441H1
gtatgatcctaactgtgaccctccagatgggccatgtaagggtgttgaagtgcttgagtgacactgatcctctttgttggcccctctgtatgatcctaactgtgaccctccagccgtcattccaattgatcttgacattgatgaggatctaggggaagagatgataagggacatgatgtggaaagaaatgcttcattaccatcctgaatctgctatggagagtgcagggttgtgctaatgatatttacttcct

SEQ ID NO: 39158 - DNA, 252 bp, Glycine max
  Clone ID: 700943442H1
gagaaaggagggcaatttagcttgcacatactcaagcattccaccattgtggcaaagccaaggtcattttagactccaccacatgatcatgatcatatgatcaatccccttaattttttcttttttcttgtcccttttctttactctgtattgtatcaatgcttgaaaatggggttgttccaaaaatgtcatatatatttggcctgctaatgggtattgtaaatctctgaacttgaagtgatgcacggtttt

SEQ ID NO: 39159 - DNA, 247 bp, Glycine max
  Clone ID: 700943443H1
gttcatcgtcccactttcttctccttttagggtttcctttttgtttctcctttccagatctgcatcttccattttttaggattaagcggtgagattcgtgaatctgagaaatgtcggattcttctcgggaggagaatgtttacatggcgaaattggcggagcaggccgagcgttacgaggagatggttgagttcatggagaaggtagcaaagactgtggaggttgaggagttgacggtggaggagac

SEQ ID NO: 39160 - DNA, 237 bp, Glycine max
  Clone ID: 700943444H1
ccaaaatttctcattctccctttcctctccgaaccctcgatcactctcacgcgctcctatattcgctcctccaccgtcgctctctcgaacaaccacaacaccatcttcatcacatggcaaacgcagcatctggtatggcagtccatgatgactgcaagttgaggtttttggagctgaaggcaaaaaggacacgcggtttcatagtttttaagattgaggagcagcagaagcaggtca

SEQ ID NO: 39161 - DNA, 253 bp, Glycine max
  Clone ID: 700943446H1
caaaacactcataacacaaagcacaaagcaaagctcatccttgagttaaaaaatggcagcagcttcttccatggctctctcatccccatccttggctggcaaggccgtgaagctgggcccatcagccccagaagtgggaagggtgagcatgaggaagaccgtcaccaagcaggtctcctcaggaagcccatggtacggcccagaccgagtcaagtacttgggcccattctctggcgagcccccgtcctaccta

SEQ ID NO: 39162 - DNA, 254 bp, Glycine max
  Clone ID: 700943447H1
cttgtgggagttaactaccacaagaattccctggcaaggtttgaacccaatgcaggttgttggagctgttggatttcaaaataaccggcttgaaattccagaagatgtcaatccagtagtagcacagataatacgtgattgctggcaaacggagccacacttgcggccatcattctcacaactgatgtctcgtctttaccgtcttcaaaatttgattgtcccaaaaacgggtgcaacacattaaaccaagttgt

SEQ ID NO: 39163 - DNA, 256 bp, Glycine max
  Clone ID: 700943448H1
gttgtttggtattccccttgttacaaggtggtccagtatttcctgtggatatgatgatgttgaaagggagtttctgaagttaatcaatccatttctgatgcgcactgaaggtgtattagatgagtatgataagaatgatggtgttaaaaaaagagtaagtgaacatgatgaattgggtgatgctactaactctgcagcaatagtaaatgatgcagactcaaacagtggaacagaggatgacattcattcttcaact

SEQ ID NO: 39164 - DNA, 251 bp, Glycine max
  Clone ID: 700943449H1
aaattttaaaaataacataattatctctaaaaaaacataaataaaaatatgctgttaaaaaaactattatgattaaaaataacccttaaatatgtgtttgcttcctgtatatttacgtttttttttataatttttgtctctgcaagtgtttttatttatttttaatgcttgtaagtttgtattttttttaaaattttagttatgataattttttattctcgtaagtttatgtgttttcaattttagtcctt

SEQ ID NO: 39165 - DNA, 253 bp, Glycine max
  Clone ID: 700943451H1
cctgaacacattttcctttcaccagttctagtgaaagtgctctcagtgtttgtttgaagaagctgactgacatcatcatggacttcgacttcaggactagttttcattctgtcaagcacctctctgctgtgcaagcggctagacttcactctgatgtagataatgatggccgatgtgatttccgatgtccattttgtgattttgaaattgaagttcctgtgctctgcagcaatttcgaagaggagcattgctc

SEQ ID NO: 39166 - DNA, 251 bp, Glycine max
  Clone ID: 700943452H1
gttcaggcaatattggactggcagaagagaacaatggagatgatgtacaaggacattattcaggcactcagagctaagggaatcgatgaagatcctcgaaactatttgacattcttctgccttggcaaccgggaagtgaagaaaccaggagaatatgagccttctgagcaaccagatcctgattcagattatcagagagcccaagaggcccgacgattcatgatttatgttcataccaagatgatgatagt

SEQ ID NO: 39167 - DNA, 254 bp, Glycine max
  Clone ID: 700943453H1
gaaagcacatagaagagaaagaaagaaaacaaagaggagaaagaaagtagttgaggaagatacaaacaatttttgcagattgttgagaatgcctttcaagaagcctcatcacacctcagacaagaactacataacaggggacgacggaggcaagttcgagatacaacctagaggactcaacattgtgtggggaaatgattctcgatactggaaaattccagaacaaggtcctgcggagctgatccaagtttcat

SEQ ID NO: 39168 - DNA, 262 bp, Glycine max
  Clone ID: 700943455H1
gtcttgttgagaagtgcaatacaaggatggcaggcactctctttcgtttattcgtgattcttctagggctttctcatcttgtgtgcttgaaagcagtcccagttacaagaactgaaaaccttatgcaaggtcaagttcaccttactctggtagaacaaccacaaggttatgcacggagagcaaactgtgcactggtgatggtaccaaccattcaccggagaggactggaatgtggaactccatcgatctattcccctatcag

SEQ ID NO: 39169 - DNA, 254 bp, Glycine max
  Clone ID: 700943456H1
caaccaagcttctctgttaaaaaaaaattaggcgtctaaagggccaaagaaagttgaagctttttttgttgaggtgaaagtgaaatggttggcaaggataatctgagggctgaggacttgaacttgtgctttaagaagcttatgatggtggccgggagtgggaacagtgacgaaaggggtgaacttgaaggttggggtgatcaccgagtggaaggatattcctgtggagcttctgatgcaaattctgtcccttg

SEQ ID NO: 39170 - DNA, 252 bp, Glycine max
  Clone ID: 700943457H1
atcatgcctacagactcctgaagatgtagacaagttgcgtagaattggagtgaaaactatattttgcttacaacaagattcagaccttgaatattttggagttgatattaatgccatacgagaatatgccaagacatgcaatgacattcaacacttgcgtgctgagataagggactttgatgcatttgatctacggaggcggcttccagctgtagttagcaaattatacaaggcaataaattccaatggagg

SEQ ID NO: 39171 - DNA, 254 bp, Glycine max
  Clone ID: 700943459H1
ctcaattttgctcttcttccaattccatccaaacaattaaggataaaaataaaaataaaataagcagacatgtccacacttccctcctcaacctttccaaactccaacctctccctctctacctccttatcctcacaaaaactcccacttttccacacccttttccccagacccctcccttttcctcatctgcgaattcaaaccccaccaccattccttcccccgcttctctgcaagtcccccgagggcacgga

SEQ ID NO: 39172 - DNA, 253 bp, Glycine max
  Clone ID: 700943461H1
gcgtagggggttgttattattcttcataatggttgcaacagctgctacggcgtcgtttctccctgtgccttcgccggacgctggaaaagggaaacccaagggtggtggtggcggcggcgtttctgtgaacctcggaggactcaaagagaagcaaggtttgtgcggttgcttgcaggtcaaaaatatcgcacaagcccctccgaagaccatggagaaggttgagaatgatttgccatggttgccgtcgtcgtcg

SEQ ID NO: 39173 - DNA, 253 bp, Glycine max
  Clone ID: 700943462H1
cacacttcaatttatcagcatggcctccgttcagtgccacaaaacctgcaaagtgagctgccaacaggaaaaccagcacgcctcgtttgggcagaaagtttctgacttgttcaaagggcatcaacataatgaccacagctccaattatgccacccaaaccaaagtgctttcccagtcagggtcagggttaggccccttcaccaccaaaactcaaacacaatgcggttgccccaaacacatctcagtaccactc

SEQ ID NO: 39174 - DNA, 254 bp, Glycine max
  Clone ID: 700943463H1
ctcgagccgattcggctcgaggccgcctcggctagggttcggaaacgaagacgggttctgacctcttttcgcgatgagggacaagtggaagaagaagcgtatgaggaggctgaagaggaagcgccgaaagatgagacagagatccaagtagtgcgttaaacctagtttgtttccgttgcttttacaattgcttatgttgtcaaataggacacccagttgttagtggcactggtctctcctttttgatgttttga

SEQ ID NO: 39175 - DNA, 258 bp, Glycine max
  Clone ID: 700943464H1
ccatttgccaattgccatttcaatccccagtttcttcttcaacgtcctcttacgagcagatcccaattctccttcccagtttcaaaccctaattccctcattcccatggcctcagaagagcccactgtcgcggtggaacccgctcccgaacctgccaccgccgagcctcccccggaggagaaggaggagcccaaacctgaagccaaggctaagataaccaaggaacccaaacctaaaaaggtttccagaccacgcaac

SEQ ID NO: 39176 - DNA, 251 bp, Glycine max
  Clone ID: 700943465H1
gaggtgttcacctcttgtaatgatgtgctgcggaagaagcaattctgttacatgcttgcacgtcatggaattacttttgagcttgatgagaagatggtttcagacgatgaggacagagaattgttgcaggaaatcataaacaattctaagttaagtgaaggatatctcacccttgctcgtgatattgaggtcatggagcccaagtcccctgaggatatatacaaggcacacttgcttgatggccgggctag

SEQ ID NO: 39177 - DNA, 248 bp, Glycine max
  Clone ID: 700943466H1
aaaaaacagagatatacttgtttattggtcttcatctcggtgtcttcctcgaaggaatgaacttgccaagaaacttctcagcttactgccacatcattcatttggcaagtgcctaaataatgttggtggtctagacatggctctttctctttatcctgaatgtgccaatgacgccaacgttacaccaaaatggtgggatcatttacattgcgccatgtctcactacaagtttgttcttgcaattgaga

SEQ ID NO: 39178 - DNA, 250 bp, Glycine max
  Clone ID: 700943468H1
gaaacagtgtgatgaaaatgaaggtccttgttttcttcgttgctacaattttggtagcatggcaatgccatgcgtacgatatgttccctctccgaatgaacactggctatggtgcccgtactccggaggtgaaatgcgcaagttggaggcttgctgacgaagcacacaacatctttggctttgagcccattcctgaagagtgcgttgaagcaacaaaggaatacatccatggcgaacaatatagatcaga

SEQ ID NO: 39179 - DNA, 252 bp, Glycine max
  Clone ID: 700943439H1
ggaatatgtttgcagacttaagagacagactaacatgggaagatacaacaaacttggcctccttcttgggggagcagctacgccaccttcatcttttatcatatccacgtgtaaatatttcatctttctctgatattgaacatgaattaggcttgggtgaggctaatggttgcattgcaactgttcactgtaaatcccacgctacagcagaatggaggctctttaccagaaccttaacaaagatgaggaagg

SEQ ID NO: 39180 - DNA, 250 bp, Glycine max
  Clone ID: 700943469H1
ctttttgctcagtttctgttgtattttctcaattacaacatcgtattctgcaaattcaaaccgggtcttggttttctgaaagatgggaggtggcaaggacaagcatcatgatgaatctgacaaaggaattttttcacaccttgctcatggggtagctggtgcagcacatggtggacatgggtacccacctggggcttacccaccaccacctggggcataccctccacaacaaggatatcctccagctggg

SEQ ID NO: 39181 - DNA, 253 bp, Glycine max
  Clone ID: 700943407H1
gtctttacgaggtacctgaggacatgattacattctaacaccacacattcctgttatttctttctctctgcgttcttcttcaatgcaactctattctgttcggtgacacaacatcactctgaagaacgtcgcacgcaccacccttctctctcttcaacaactcagctctcagaacagatacagtttccactgagtaaatcgcaatgcaggtaactgagacgaggactgttcaagttaagcagctttcagatct

SEQ ID NO: 39182 - DNA, 254 bp, Glycine max
  Clone ID: 700943408H1
gaggggtaaaacagcactactaacagcagacaagaaaaatggagattgaggacacatcaagtagagtatctattgcatttcctcttggcttagctcttcttggtgccttgtcattgttcttttgttgcttcttttgttgctgcttgcactgggaaaaactccaacctttgtttccattttgtatggttatcgtcgatactcagcctcagacacaagcagacttcactccccctcctcacaagccaggctttcct

SEQ ID NO: 39183 - DNA, 256 bp, Glycine max
  Clone ID: 700943409H1
ggaaaaggctgaaaatgctattctctctggctgttcagctggaggactgactacaatattacactgtgatcgctttaaaaatctgttgccttctgaagctaatgtgaaatgtgttccagatgctggttattttgtcaatgtagaggatatctcaggaacacatttcatcgaaaagttctacagtgaagttgtttcaactcatggctcagcaaagaatttgccctcatcctgcacttcaaaattcagcccagaacta

SEQ ID NO: 39184 - DNA, 251 bp, Glycine max
  Clone ID: 700943410H1
gtgattgttgtgactcgttcttcttcgtcgttatcttcttcttttgttgtttgtgtgtttgtgttttctctcacctgaaaatgtcttgctgcggtggtaactgtggttgcggaagcgcctgcaagtgcggcaacggctgcggaggctgcaagatgtacccagacttgagctacaccgagtcaaccaccaccgagaccttggtcatgggagtggcaccagttaaggctcaattcgagagtgctgaaatgggt

SEQ ID NO: 39185 - DNA, 252 bp, Glycine max
  Clone ID: 700943411H1
attttctaaccagttgttcacggccagtggacataaatatgacaccaccaagatcttaacccctgagtatgtccttaatgttgatgcatacaacaagtacagcaagttataccttagccctctgtttgcattatctattggatcaggttttgcaagatttacggcaaccctcactcatgtagcactctttaatggaagagacatttggagacagagtagatcagcaatgagtaacgcaaaattggatatcca

SEQ ID NO: 39186 - DNA, 253 bp, Glycine max
  Clone ID: 700943413H1
gggtactgttacatcaatggagcctaatgaaggcacttttattcttcacaacgagaaaacaaggaagggcaagataaaacctgttcatgttgttgatgttcctgggcattctcggcttcgacccaaactggatgagtacttgcctcaagcagctgggatagtttttgtggtagatgctttggactttttaccaaactgccgtgctgcttcagagtacctttatgatctattgactaaaggaagtgttgtgagg

SEQ ID NO: 39187 - DNA, 243 bp, Glycine max
  Clone ID: 700943414H1
gagagagagagagagaaaacaacaacaaacctcatcaccacacagagtagtagagagagagagaaaaaaaaaaagagagtccgttagttaatttcagtttatttattgtatatttttaaaaagaagagaaaaagcaatggtgacagaggaagaaatatctgaagcggttcagtctctgctgcggattccaaaccctagtagattcacgaggctaaaccaggtggtggaggagctccaggccaa

SEQ ID NO: 39188 - DNA, 257 bp, Glycine max
  Clone ID: 700943415H1
gagaaatgtgcaaaaccaggttcagttattgagaagaaagcatattttgaagctcatttcaagaggaagggcatgcttggttttattccatctacaggtcatgagggatcatcagatagagcaaccagtgaaaatgatggatcagagagaaatgccaagcaagaggattttgagtccaatgatggccattatgttcaatttgatgaaatgtcccaaaaggattttgagctagatgaaggtgaccattatattgaaat

SEQ ID NO: 39189 - DNA, 252 bp, Glycine max
  Clone ID: 700943416H1
ttcatagggtctctctctgttctttcagatccttttcacatcccccccccccccctcccctattttcagggaaaaaccgatgctgcccttttgcactgtgagcttgtgtgatggttttgatgaagttgggttgatcggcatttgcgattcataaagtttgaatttttgaaactcctagtctctggttggaagggtgtctttctggggaccccaaaaagggtggagtgttgaacttttgaaaaggtttgggtt

SEQ ID NO: 39190 - DNA, 255 bp, Glycine max
  Clone ID: 700943418H1
gcacgaagagcagagggaggaagaaagggtcgaagagaatgtgggaatcaattgtgttgacggtcgttgccaccgccggcaacaacatcggcaaaatccttcagaagaagggcaccgtcattcttccccctctctctttcaagctcaaggtcataagggcatatgctttgaacaaaacctgggtgataggttttctaatggatatatttggggcactgttgatgttaagggcattagctcttgcgcctgtctctg

SEQ ID NO: 39191 - DNA, 253 bp, Glycine max
  Clone ID: 700943419H1
gcaaaacatttgttaaacgatggaagtaatgtgtggtgccaaagttggcaatatggtccataaggccaagccttatgtgttaactgtggggttgcaatttgggatggctgggacatacctcttcaccatggccagtttgaaccatggaatgagccgtttggtgttcattgtgtatcgcaatgccattgctgcattggcccttgctccctttgccttgatctttgaaaggaaagttagaccaaagatgacatgg

SEQ ID NO: 39192 - DNA, 253 bp, Glycine max
  Clone ID: 700943420H1
tctttggcaccgacggaaacctactagccaagcaccgcaagatacatctttttgatattgacatccctgggaagattacttttattgaatcaaaaactcttactgctggggagactccgacaattgtggacacagaggttggacgcattggcataggcatctgttctgacattcgatttccagaactagctatgctatatgctgctagaggtgctcacttactctgctatcctggggccatgaacatgacaac

SEQ ID NO: 39193 - DNA, 256 bp, Glycine max
  Clone ID: 700943421H1
ccttgccttctttctccctccaaatccctaattcccttccatcccaaaaattcaacaatactaacattattaactcttctcttcgtgtttcccaattaggtttccgagtctcaaccaatttcaccatgtccactcaaattccgagttagttagttatctctttccgccatggaaggtaacaaggacgaagcattacgctgcgttcgcatcgccgaagaagcaatcgcgtcgggaaacaaagaacgcgccctctaat

SEQ ID NO: 39194 - DNA, 182 bp, Glycine max
  Clone ID: 700943422H1
tgatgctagggcggaagctgatccactatctggtgttggcagtggaatgaattttggcaatcagttgcaatcaaatttgatgaaccctggttcatctggtcaaggtcagggtcaacagttttcaaatgcttctggtagtcagatgttgccagatcaacagcattcgcagcaacttgaacctc

SEQ ID NO: 39195 - DNA, 255 bp, Glycine max
  Clone ID: 700943423H1
agtgagagatagagatcgcagacacagagcagaatggcttctacccaatgtttcttgcaccaccatgctcttaccacccctgccagtgccagatccccatcactacgcatcttggttagcaccaagcctaaccagcttgtttgcaaggcacagagacaacaaacaccacaagaggatattgatgtcagcccaatctacccccgtttagctctaactgtgctcattggtgctgctgctgttggctccaaagtccaa

SEQ ID NO: 39196 - DNA, 256 bp, Glycine max
  Clone ID: 700943425H1
gcaaaagagggatccagataaacaaattataccctaaagagttgctaaacccaagctgtgggttttgcagtttctttgggttgaagcacttccgtcttcgagttgaggcattgagcagagcaacgaagctcctcccaaaccaatgactttggtcgacggcgcttcctactgaatttcctagacccttttggcttcacgatgggtcctcgacagtgccaagtctgcaaccaaactcagtccaaatacaagtgccctt

SEQ ID NO: 39197 - DNA, 257 bp, Glycine max
  Clone ID: 700943426H1
cacctcactcactgattctcaaaaactcaaaagatggtgatgaagaaaaaccttctcttctcactttcacttctcctaatggttctcttcacttcatctcaaaccaccccagcaccatcaccttcctcaaccccaacagacatcatcagaatcctcaaaaaagccggaggattcaccaccctaatccgtcttctcaccactacacaagtctcaacccaaatcaacgcccaacttctgaactcaaacaacggattaac

SEQ ID NO: 39198 - DNA, 255 bp, Glycine max
  Clone ID: 700943427H1
cagctcactcactgattctcaaaggctcaaaagacggtgatgaagcaaaaccttctcttctcactgttcacttctcctaatggtactcgtcacttcatctcaaaccaccccagcaccatcaccttcctcaaccccaacagccatcatcagcatcctcaagacagccggaggattcaccaccctaatccgtctgctcacgactacaggagtctcaacccagatcaacgcccaacttctgcactcaaacaacggctt

SEQ ID NO: 39199 - DNA, 122 bp, Glycine max
  Clone ID: 700943430H1
atcatattcctgagaaactggctcgctggcctattttggttgggggtatactcttaaccaacctcttgtgatgctcagtgattttttgggttatcaagtcagtttgtatacttttttagctc

SEQ ID NO: 39200 - DNA, 252 bp, Glycine max
  Clone ID: 700943431H1
ggccgttcagtgacaccgagtgtaaagaagaggagagaaaccgagaaagaagaagaaaactagggttttgcaattgctgcaatggcgcatcaaggagaaccggcgaactgcggtggggtgagctcgaggaggacgacggcgaggatctggacttcctcctgccgccgcggcaggtgataggccccgacgagaacgggataaagaaggtgatcgagtacaagttcgacgaggacgggaacaaggtgaagatca

SEQ ID NO: 39201 - DNA, 259 bp, Glycine max
  Clone ID: 700943432H1
tgggtgacaaactcattgggcttgtgacttcaagagaagatattccagatctgctcaaggcaagtaaaattcctaaaatttattagtctgaaatgattttccactaatcatactttgccacagcttgatgacgtgatagatcttgtggtccccagaggcagtaataagcttgtctctcaaatcaagggtacaacaaagattcctgttcttggtcatgctgatggaatatgtcatgtatatgtagacaaaacagctaata

SEQ ID NO: 39202 - DNA, 116 bp, Glycine max
  Clone ID: 700943434H1
agcatagacgctaatgggtaactgcctagattcttcagccaaagtagaagctcctcacagttccagaaccccttctagacgatcaaaaacgaatcatacagctgttccaaacaaca

SEQ ID NO: 39203 - DNA, 254 bp, Glycine max
  Clone ID: 700943435H1
ctctcgcacgtgcgcaacaagtttgtttagtcttcgtcctggtctactctcaactcaagtctgaaaacacaaaacctaaacgcacagcactttgtagttaaccaccctccaccgagccgtcgaaccacccccgtctgccggcgtcgcacctcgccaccgacaaccagcgtcggcgcaccactgcaccagagcagtaggccgtcgcagtcgcacgcggcaaccaccagccaccaagtcttcgtagcagatctgtg

SEQ ID NO: 39204 - DNA, 253 bp, Glycine max
  Clone ID: 700943436H1
cggctcgagctgctgttagatctgtacccgcctagccattgatttggaaaagtccaacttcaaggatgagtaagcttcagagtgatgctctaagagaagctatctcaggaatcatggctgattccaaggaaaagaacaggaaatttgtggagaccattgaactccaaattgggttgaaaaattatgatccccagaaggacaagcgtttcagtggctctgttaagttgcctcatattcctcgccccaagatgaa

SEQ ID NO: 39205 - DNA, 255 bp, Glycine max
  Clone ID: 700943406H1
cgatcagcaagaacatattcaagaaaaagataggcaacttaatgagttgcaggaacaacatagggttgctcaggagaccattatgtttaaagatgagcagttcagagaagcccaagcatggatagctcgtgttcgtgagatggatgtttttcaatcaacaacaaatcaaacattacaagctgaattgagagagcgcacagagcaatataatcagctctggatgggttttcagagacagtttgcagaaatggaaag

SEQ ID NO: 39206 - DNA, 252 bp, Glycine max
  Clone ID: 700943437H1
ctgggctcaacgtgatgcgaattatcaacgagcctaccgcggctgccattgcttatgggctcgacaaaaaggccactagctctggggagaagaatgttctcatttttgatctcggtggtgggacttttgatgtctctcttctcaccatcgaggagggtattttcgaggtgaaggccactgctggtgatactcacttgggaggtgaagattttgataacagaatggtgaaccattttgttcaggaattcaaga

SEQ ID NO: 39207 - DNA, 150 bp, Glycine max
  Clone ID: 700943438H1
agaacatctcttgctcttcccactttctctctctaaagaatataatactcaaaattcatccatttgtattttatttttcttaataaacaaagcgcgtatagtctcacgcgcccgacgatgggttttcccgtagggtacccggagctgctg

SEQ ID NO: 39208 - DNA, 233 bp, Glycine max
  Clone ID: 700943355H1
ccaccggctacatcgactacgaccgcttggaagaaaaagccctagacttcaggccaaaactcataatctgcggtggcagcgcgtaccctcgcgattgggactacaaacgtttcagggaagtcgctgataagtgcggacattgcttctctgcgacatggcgcacactagcggccttgtggcccgcaggaagtgaacagccccttcgagtattgcgacattgtgaccaccacgac

SEQ ID NO: 39209 - DNA, 235 bp, Glycine max
  Clone ID: 700943356H1
gttttctcttcctcgttcgtttcatttcgtttcgttgaagagcaacttttctctctctgtctctgtacaattctcccttttcttccctcgtagatcgaaagggaatattcttccatggcctccaagcggattctgaaggagctcaaggacctacagaaagaccctccaacctcttgcagtgccggtcccgtagcagaagatatgtttcattggcaagcaactataatgggtcccc

SEQ ID NO: 39210 - DNA, 229 bp, Glycine max
  Clone ID: 700943359H1
attttgtttctttgttttttagagcctccattgtgaagatttgatctcacttagtgtgtgtgtgtgtgatggggaattcatttgggtgttcggcttccggcgagaggttggtgtcggcggcgagggacggcgatttggttgaggcgaagatgcttctggaatgcaacccttgtcttgcaaagtactcaactttcgggggtctcaattcccctcttcattttgcagcttc

SEQ ID NO: 39211 - DNA, 231 bp, Glycine max
  Clone ID: 700943361H1
ttactgttgtaacctcaccattaccgattatttccagacctaccagttcgagaatctgttctccaagcggaactcgccggtggcgcacgcggtcggattttgggactaccactccttcatcgccgccgccgcgctttttgagccggaagggttcggcaccaccgggaacaagacgatgcagatgatggagatcgccgccttcttcggacacgtcggcagcaagacctcttg

SEQ ID NO: 39212 - DNA, 230 bp, Glycine max
  Clone ID: 700943362H1
gaaactatgcgtttttgggatttgcgtgctccttggttagaacctctaaggggtccgaatggtttagacttgagtagactgaaaaaagatatacagccttggcaagaacgccgttctgcggaatatatgacttatgctcctttaggttccttaaattccgtgggtggcgtactacagagattaatgcagtcaattatgtttctcctagaagttggttagctacttctcat

SEQ ID NO: 39213 - DNA, 237 bp, Glycine max
  Clone ID: 700943366H1
gtgctgtttaatacacgagactagttctctttcgatggtcccttttgagtgaaaaaccttgtcttctcagctttctttcgagagatcttaaagacattgactaacaacaataaagtggatcaatcaaaagacttacttcttcttctaacaacaataagatcacatctttcccactcatgaagagacttagcagctcagattcttccagtgccctcatgacaatttgtccatcaacag

SEQ ID NO: 39214 - DNA, 234 bp, Glycine max
  Clone ID: 700943368H1
ctttccaatacaataatcactaactgaatattcgatcggagatgtctgccgccgccgaagaagctaacgctcccgccgtcgaaaagccggttgaggaggtgaaggcgccgaaccccgcgaaggagaagaaacctaaggctccgaaggaaaagaagccaaaacaggccaaaacagcttcacatcctccatattttcagatgattaaggaggctttgatcgctttgaacgagaaag

SEQ ID NO: 39215 - DNA, 234 bp, Glycine max
  Clone ID: 700943369H1
tctacactggtaattatgatcaatatgttcagacacgttctgagctagaagagaaccagatgaaacagtacaagtgggagcaggagcagattgcctcaatgaaggaatacattgcccggtttggccatggttctgcaaaactagctcgccaggcacagagtaaggagaaaacgctggcaaaaatggaacgtggtggacttgcagagaaggtggtcagagacaaagttttggtat

SEQ ID NO: 39216 - DNA, 231 bp, Glycine max
  Clone ID: 700943370H1
gatggccgctgttgctgccctgtgcgtgcaatacgaagctgatttcagaccaaacatgagcatcgtagttaaagctcttcaacctttgttgaacgcaagacacgggcctgctggtgaaactccaaactaatctctgtctatatgtatcaacgagtatgtgcataagtctaagtctgcacccgagatataagaaagtgactgcttcagaagcggatggaaaattgcttgaac

SEQ ID NO: 39217 - DNA, 232 bp, Glycine max
  Clone ID: 700943371H1
ctttctctctctctctctctctttcacgaactcactcactcagacgctcacgctctgtttcagatctgaagaagccacataaccctaagcttcaaacgggtaagtgtcgctgggacttcaatggcagtgaccgaagctcaaaatcctcttcttggagaaaacacatgtggttccttgttaaaaaagcttcaggaaatatgggatgaggttggtgagagcgatgagcaacgag

SEQ ID NO: 39218 - DNA, 231 bp, Glycine max
  Clone ID: 700943372H1
ccatctcgcaggtcgcggcgatcgcggcccacgaccagggggtgaaggtggagctggcggagtcctccagggccggtgttaaggccagcagtgactgggtgatggagagcatgaacaagggcactgacagctacggcgtcaccaccgggttcggtgctacctcccaccggagaaccaaacagggcggtgccttgcagaaggagctaattaggtttttgaatgctggaatat

SEQ ID NO: 39219 - DNA, 233 bp, Glycine max
  Clone ID: 700943373H1
ttatcatcacatcctccgaatacaaaagtttaccttgcaaataaatcaacaccaaacgcgcccacaacacacacacagagacatttttctttcttagaagcgtccaccacacggaacctcgcaattccttcacacccaccataataataatatcttcattgttcttttcttctttgttaccattaaaaacacacacacacacacaacaacactctgaaactaacaacaacaat

SEQ ID NO: 39220 - DNA, 228 bp, Glycine max
  Clone ID: 700943375H1
agattttagaatttgattgagttggattcgtttccattggttgttggagtgtgaaaaaaattctgtcttcagttaatgggcactcttcattctcaaatgtgataaatacgatttccttgcatgtcaagtgttgatatgtgtgctaaaatattaaataagacgattgaaatatatagtcatgtgattcatgacatagttctttgtcctaaaattgaggctgatatctgt

SEQ ID NO: 39221 - DNA, 229 bp, Glycine max
  Clone ID: 700943376H1
gtgtgccttttgcattctctctctaaatccaacgtttggagtgtttctctctcactcctctctgcaagatccgcaccccaaaccctagcaaacccctaccgcagagggagccgagaagaacaacaacaacacgcaccttcacaaccaccaccctcgcttcttccgatccagttcgactagcttttggaaacaattataatgacaacttcagagcagcaagtccctccca

SEQ ID NO: 39222 - DNA, 231 bp, Glycine max
  Clone ID: 700943378H1
ctcattgctaccctgttggtggataacaaaacttcagcaacccctttgcatctgatctaagaatcccaacttcaagtacccattttttgtcatttcatgatctaggtgatagatcgtgaaaatgacaaggatgacccatgattttggggatactatgcagaaagatgcagtgccggtggtgtcggccgatgtaatatttgcttctcttcggtttcctaattacaaaatcgg

SEQ ID NO: 39223 - DNA, 231 bp, Glycine max
  Clone ID: 700943380H1
cccacttccaaatcttctcctctcgctatgggttgcggctcctcccttccagataggggctcaaggcagttgggtcgacccaattcagagaatggtggagggcaggacgccaagaatctgagggtcaagcttgttctcttaggtgattctggtgttggtaaaagctgtattgttctacgatttgttcgtggtcagtttgatccaacatctaaggtaactgttggagcttct

SEQ ID NO: 39224 - DNA, 232 bp, Glycine max
  Clone ID: 700943386H1
cagcaagtggataacatatataaaggagaggccaagaaccacaaactcaaccaccttcactcgcaaaacatggtggttttaaagtccacttcaccactctcatctctcacttcccacttctttaacctttcttcctcctcctcctcctcctccaaattcacctccccacactctctccgccgccgccacttccaccatgtccactccacttcaagagttgcgcaattcacta

SEQ ID NO: 39225 - DNA, 225 bp, Glycine max
  Clone ID: 700943389H1
gatcttacctacctctaatttgaggattttcactgttgccgagttgaaggctgcaactaggaatttcaaagctgatacagtgcttggggacggaggtttttgaaaagtcttcaagggttggcttgaagagaaggccacttcaaagggtggaagcggaacagtcattgccgtcaaaaaagtcaactctgaaagcttacaaggacttgaggagtggcagtccgaagt

SEQ ID NO: 39226 - DNA, 226 bp, Glycine max
  Clone ID: 700943390H1
tcctgtgagccgtggcaaagcttttgaatttagtgcctctcctctctgtttacccttccagatattgcagatacagcaagatcatgagtgggacttcggaaaagaaacttgtaagaatcgatgttagttctgatactgtatgcccatggtgctttgttggcaaaaaaaatctagacaaggccatagctgcctccaaggataaatacaactttgagataatatggca

SEQ ID NO: 39227 - DNA, 227 bp, Glycine max
  Clone ID: 700943391H1
ctgctacttactactatagtgtctgactcacaggccagagggcaaagattttgagcacaatggcctcgacacaatgctttttgcaccaccacgccctcaccactccagctagagcttcaacacagcgcctagttgtgagcaccaaaccaaaccacattgtttgcaaggcagcacagaagcaggttactgtccaagagggtgaggacactactactggccttgtctct

SEQ ID NO: 39228 - DNA, 227 bp, Glycine max
  Clone ID: 700943393H1
cttgctgattttttacaagttttctgagatcagggtccctatggtctccaaagctttctagttgtctttataatggcaggctagagatattgccttctaaggactgggaactagagtctattcatagctcggaagttttggatatgataagggaacacataactactgtaactggcttgagagcaaaatctagtgtaactgagtgttgggcaacaacccaagttaga

SEQ ID NO: 39229 - DNA, 228 bp, Glycine max
  Clone ID: 700943395H1
gtgttaatttgtctattcagtacttgctagtgggtagtgagagctacatataagacaaagttctaaactagaccagtgtatgaggtgagagctagaaactgaggacttagctagtagttagagatgcctgagttttgcgtgacaggtggtactgggttcatcgcatcttacctggtcaaggccttactagagaagggtcacacagtgaggaccaccgtgagaaaccca

SEQ ID NO: 39230 - DNA, 255 bp, Glycine max
  Clone ID: 700943401H1
ggtaaatgatctgatacgtgtgatctgtatacacacatggttgtaggggaatattgaagtggagcttactatttcaatttcaagagtgatgttataatgatgatttgagattgcttcatttactgttgcaatctcttttgttttgactgcgcgacctaactatgttttaaaacgctcaaggtcccaacaataatcaactgggaaccttagttaaatgatcttattgatcaatcaagctggataatatacatatat

SEQ ID NO: 39231 - DNA, 255 bp, Glycine max
  Clone ID: 700943402H1
caatcagcatactcttcctggaggtgttggtccaatccaagtgcgatatgctgatggtgaacgggaacgcctcggtgctgttgagtacaaattatttgtgggctctctgaacaaacaggctaccgtaaaggaagttgaggaaattttctcaaaatatggccgggttgaagatgtttatcctatgcgtgatgagaagaaacaaagtcgtggatgtggttttgttaaatactcacacagagatatggctctggcagc

SEQ ID NO: 39232 - DNA, 232 bp, Glycine max
  Clone ID: 700943354H1
ctgatactatcttagaatttgggctaaggacctaattcaatcccataaaactgacttgttaggtgagactattaagctttataagctctatataagccatatgtctagttgatataagactacacaccgctcttgaggttgtaattatggtagtcctcatagaagttgcaactatggcgggtgccttgcagcatcttacaataatttacagcttctgaaattatctttgagg

SEQ ID NO: 39233 - DNA, 255 bp, Glycine max; identical to SEQ ID NO: 39205
  Clone ID: 700943403H1

SEQ ID NO: 39234 - DNA, 246 bp, Glycine max
  Clone ID: 700943404H1
tggccaaggtggaacatttgcgctttattccttgctttgccgacatgcaaagataaaaaccattcctaaccagcatcgaactgatgaagagctaacgacgtatagttcggtctacgttgcatgaaaggtcgtttgcggcaaaaaccagaagtggtttgggaacaagaatcttcgagagagcattttattctggccttgttagcaccgcatggttattagaaacggattcttacccggctatatcgt

SEQ ID NO: 39235 - DNA, 237 bp, Glycine max
  Clone ID: 700943312H1
aaaaccttcgtggggggggggggcacacacatcttcgggcagcgtcagcttagaattattattagtgtgaaattattaattaattcttggctagacaacaacatggcctccgccgcagccgcagacggactcttccggccgatctacgagggctgcatctccgcctacgacaacgacgtggagcgccgcccctaccacaagaactgcggctgcgctctgcacagcaagtcgaggagg

SEQ ID NO: 39236 - DNA, 241 bp, Glycine max
  Clone ID: 700943316H1
gatatattgagattaaatagtaaagcctcaattttggacttgagagtggaatgtcaggatttggaaagatattctgtcatcaaccgatttgccaagttccatggaaggggacaaaatgatggggcagaggcctcatcatcttctggtgcaaatactaatgctcaaaaatcgttccccctaaaatatgttactgcagttccattgcctaggaatctccctgacagggtacaatgtttttcac

SEQ ID NO: 39237 - DNA, 249 bp, Glycine max
  Clone ID: 700943317H1
gttaagaaacagagcatagagtgatttggtgggtggagagaggaacagaacagagcaacatgaagccaccaacgaaacccatttcgagccctggtcgaaccgagaagtttccaccaccgttgatgagattcttgagaaacaatgcctcaagcagaagcagaggaaggtcaagaaccaccaccgccatgtttctgagaaagaagaacaccaacaatattgaaacacaagaaccctcttcccccaaagtca

SEQ ID NO: 39238 - DNA, 246 bp, Glycine max
  Clone ID: 700943318H1
cttcgagtttcacagccaagtcgtaaaagggtttcaagggatgcgaaaacatgcagagcttctggcaattgggtgatgaactccgtgggcactcaaaagcatcggaggatcacaagtggttaatggttgcctcgaaactggccgaacagacaagattgaagggggagcgtgtgaacaaccttgatctttcaaagggacccattgaaacaaggtcaagggataaatttgggttccaggaagagaaca

SEQ ID NO: 39239 - DNA, 244 bp, Glycine max
  Clone ID: 700943319H1
cgtttcttcctccttcaaacaccatcgcagattcttcgctcctttccattgattcaaaacatggctaccaccaccactcctgctagatcttttctccaagtcgccgctacagaggaggccgcgccgcctctcagagtcgttcagattgaaggactggttattctgaagataattaagcattgtaaggaccactcgccttctttagtcactggacaacttcttgggttggatgttggcagtgttc

SEQ ID NO: 39240 - DNA, 239 bp, Glycine max
  Clone ID: 700943320H1
cctcgagcgaatcggctcaggattctgcttatgagagtgatgagaacagcactgacactgattcttatcctgctccaaaggctcacagcaacaggacaacctcagtgtccagaaggggaagaagaagaagaaattgaagtcaaagaaaagcaaggcacatgagtgtccaatttgcaacaagattttcaggtcaggccaagccttggggggtcacaaaaggtcccattttgttggaggtt

SEQ ID NO: 39241 - DNA, 240 bp, Glycine max
  Clone ID: 700943321H1
caaaaccacttccaaaaagcctaagattaccacatagtcacattcacattgaagttaaacttgcattgaaaatggagggaagagatgaggatgtaagagtaggagccaataggtatggagagaggcaaccaataggaacagctgcacagacacaagatgccaaagactacagagaggcaccaccagctccattgtttgagcctagagagttaacatcatggtctttctacagagcaggca

SEQ ID NO: 39242 - DNA, 241 bp, Glycine max
  Clone ID: 700943324H1
ttcagttttctcccactctttgtatatttttctttctcccttcttccttcacatccattgctatctcttctctcacccaacaaaaactcattccttttaagcacaatagaagaagaagaacaacaacaacaacagcagcatatctcagatatcatcatggccgttgaagcgcgccatctcaatctcttcccttctcaactcatcaccaaccggtatatatatcattaccccttcctcttct

SEQ ID NO: 39243 - DNA, 237 bp, Glycine max
  Clone ID: 700943325H1
cagaagcggaaaaaagaagaaggaagaaaagttagcagtagtttggcgtggtaattggtagagcgagaaacagagaaatggacgattacacgagggaaatgatggacctgaagacactggtcactcgcactctcgagaagaaaggcgtcctcgccaggatccgtgccgaactcagggcgagtgtgttcgaagccatcgaagaggaagatcgtgtgattgagaaggaacaaggtctac

SEQ ID NO: 39244 - DNA, 236 bp, Glycine max
  Clone ID: 700943326H1
gaagaagccacataaccctaagcttcaaacgggtaagtgtcgctgggacttcaatggcagtgaccgaagctcaaaatcctcttcttggagaaaacacatgtggttccttgttaaaaaagcttcaggaaatatgggatgaggttggtgagagcgatgagcaacgagacaagatgcttcttcagttagaacaggagtgcttggatgtgtacaagagaaaggttgagcaggctgcaaag

SEQ ID NO: 39245 - DNA, 235 bp, Glycine max
  Clone ID: 700943327H1
gcactcttcatcaagctccgctccaacacaggggaaaatgagggagatccttcacgtgcagggagggcaatgcgggaaccagatcggttccaagttctgggaagtggtgtgcgacgagcacggcatagatccgacggggaagtacgtcggaaactcagatctgcaactcgagcgcgtgaacgtctactacaatgaagcctcgtgcgggcgcttcgtgccacgcgcggtgctgatg

SEQ ID NO: 39246 - DNA, 236 bp, Glycine max
  Clone ID: 700943330H1
ctcgctccttccttctctcatcaacaacatgcagatcttcgtcaagactttgaccggcaagaccatcaccctcgaggtcgagagcagcgacaccatcgacaacgtcaaggccaagatccaggacaaggaaggtatccctcctgaccagcagaggttgatttttgctggtaagcagctggaagatggtcgcactcttgctgattataacatacaaaaggaatcaacacttcacttgg

SEQ ID NO: 39247 - DNA, 240 bp, Glycine max
  Clone ID: 700943332H1
gtctcaatgtagatgatgatgagttagtgagtgaaatggatgaagcacccagttttgcttcatctctaccagtccccaatgttcaagaaatggtaaggaataaccctttgcaggttcctgaaagatatgcgaggagtcaagaagagttggagaaagtcaaccatatgcctcacctttcatctgaggtccctgtcattgatttagcactgctttcaaatggaaacaaagaggagttgttga

SEQ ID NO: 39248 - DNA, 246 bp, Glycine max
  Clone ID: 700943333H1
gtaagtatcaatggcttccgaagaatcccagaacaagccccccagcgagcagtccactaccgaactcatcacgagcgcgaagctggtggcggaggcggcgcagtcggctctgaagagcgacagcgtcaaagtggacaaggccaaggtggctgacgctgccggcgatcttctcgacgcggcggggaagtatggaaaacttgatgacaaacaaggcatagggcaatatgttgacaaggctgctgatta

SEQ ID NO: 39249 - DNA, 244 bp, Glycine max
  Clone ID: 700943334H1
ttggaagtgagtgttggtggtgaagtacatacccattttaagattattaggctgggaaacatagaactgttctagttgtggtaatcctcaccttacgaggaatctgtgtaacaaaatcatatcgagaaatttgttaaaggggatgaaagaaagctgtgtttgataaaaaaaaaaaaaaaaaaaaaaaaaaaaaaaagggggccccccgacaatggacccatgccccccgggatttattccgggg

SEQ ID NO: 39250 - DNA, 91 bp, Glycine max
  Clone ID: 700943337H1
ctcgagcgattcggctcgagtagtaataaggtcttccaagctagccgtgtaaattattacttgtgcaaggtcatgcaataatctcacaatc

SEQ ID NO: 39251 - DNA, 236 bp, Glycine max
  Clone ID: 700943338H1
agaaaattcgggatactaagtctcatagaaagcatggcaatatttcagttggagatactcatatgagcaagtcaaaacgaaccaacaggaagcttcctactgcaagttttgactcagtcccagtgcaagcacatcctgaatttgaaaaaccaaaacggaacatgaggaaaattccaagccaatcctcagatcctcctgtgcaggaaaatccacaaagtgagcttgaaaagattaaa

SEQ ID NO: 39252 - DNA, 237 bp, Glycine max
  Clone ID: 700943340H1
ctcgagccgcgttttcgctctgcgccaagttctcttctttcaaatctcactccttttgtgagtgaagactttggttctagcagcttcagagagttgcaaggaaacaacaacaagggttgttctaaggatttgagttcgatgaattcgcataagggagtgtatggtggggggttgccacctcactatccaaggcatcgtggttcttcttcctctgctgctacttcgagttctgctatg

SEQ ID NO: 39253 - DNA, 235 bp, Glycine max
  Clone ID: 700943341H1
actagtttttgttcctattatgattggcattctgttttttctctttgagttttatgatgatcagctacttgctttcatggtcttgattcttgtctggttgtgtgaactttttactctcattagtgtccgaacaccaatatcaatgaagttctttcctcgcttctttttgctgtatttcctggtcttccacatatatttcttctcttatgcttatggtttttcatatttggccctt

SEQ ID NO: 39254 - DNA, 235 bp, Glycine max
  unsure (1)..(235): unsure at all n locations
  Clone ID: 700943342H1
ttctcgagccgnatcggctcagcttgtttgtttccatttcttgcttctattatttacttgtttttctctagtattcatggtgctcgctggtaaacttagtactgaacttggggtgaaagcatccgctaccaaatggttcaacctcttaacctcgctacttcaccatgttcagaacctttgtgatagagtgcatgaaaccaagctgcatgatggtgttgactggcacggtgttggt

SEQ ID NO: 39255 - DNA, 232 bp, Glycine max
  Clone ID: 700943343H1
agaaacccaaaaatcaaggtttatggagtggaaccagttgaaagtgcagtcttgagtggaggccagccaggagggcatctgattcagggaattggtgctggtattgttcctgctgtgctggatgtgaatctgcttgatgaaattcttcaggtatcaagtgaggaagctatagaaactgctaagctgttagccctgaaagaaggtttgctggtagggatttcatctggagcag

SEQ ID NO: 39256 - DNA, 232 bp, Glycine max
  Clone ID: 700943345H1
aggatccaaaagtggcaactctttttgctataggaggagtcttcaatcttcatctacatcagttctagctataccgttccttctgctactactcaactgcaaaggatggtgctgcccaagttctctctgtgcttctggcttctcctttcttcacttgtgattctcttaataaattgtccagttaaatgtgacgatgatgaggaagacaatctctatcaaggtatcaacaagt

SEQ ID NO: 39257 - DNA, 237 bp, Glycine max
  Clone ID: 700943348H1
gcaaggatcaagtgataactgattgttttccattgagtctgatttagttcttagcttctgcttcgatgccttcaatcatgtcactctcagtggtaccataaggctgctggtttcttttcttcctccggggtgaagcttaaagaagccaaggaatcagcaggaacatttgttggcgaggtcacgaaggatacaaagagtaatgtggccgaagtggcaggacgagtgggatcgatggtg

SEQ ID NO: 39258 - DNA, 242 bp, Glycine max
  Clone ID: 700943349H1
cgcattgcttcgcctcacaacagcagctgcagcagcaatggctcccaaacgaggtggaaaggctccggctcttgccgctaagaagaagcctgagaaggtcacgaatccgttgttcgagaagcgtccgaagcagttcggaatcggaggggcgttgcctccgaagagagacttgactaggttcgtgaagtggccaaagaatgttcaaattcagaggaagaagaggattctgaagcagaggttga

SEQ ID NO: 39259 - DNA, 241 bp, Glycine max
  Clone ID: 700943350H1
cccaaatccaccgctctttattttcgtcttttctacccttcccggatcccaatccctaatctttctaccactctcactccaaaaatctctaattttttcatctgggaagatcggttgacgaatcgaggatccgatcgcttgcgaggaactagggtttcaatcgatcgcatcacacacaaacaatcatgtttagccggatgttcggtaaacctaaacaggaaaccaatgctgttgccacttt

SEQ ID NO: 39260 - DNA, 239 bp, Glycine max
  Clone ID: 700943310H1
gatatcttagttatctaattacctcaattaatcccttaattgcaagcatcatggctgaggagaaacaccaccaccacttccaccaccacaagggcgatgatgtgcctggcgaggttgattataagaaggaggagaagcaccacaagcatcttgagcaccttggggaacttggtgctgcggctgccggtgcttatgccttgcatgagaagcatgaggccaagaaagacccagagcatgct

SEQ ID NO: 39261 - DNA, 227 bp, Glycine max
  Clone ID: 700943352H1
cttcactcccctttcccattcttcctcctcctcttttctctctctctctctctggagtgaaagtactatttaattgatcatggatatatcatatattcttctacaatatagatatcacataaccatagcaatagtagtttcactatcattttctttgttgttatatgctgctccacactttctgaccattctcgcctatttttggcctttgtttgcttccactactg

SEQ ID NO: 39262 - DNA, 264 bp, Glycine max
  Clone ID: 700943273H1
gaagaaagtggtgaatggtggagatcctcgtcttcggggttgcatcggaactctggaagcacgcagcttgatcaatgggctcaaagattatgcactgaccagtgccctcgggaccggagatttccacccatacaggctaaagagctgccgcttttggagtgtacagtgtctcttcttactgactatgaagctgctaaccattaccttgactgggagatagaaaagcatggtataattattgaattttctgatcctgtctataac

SEQ ID NO: 39263 - DNA, 263 bp, Glycine max
  Clone ID: 700943274H1
agcaagtgaaggcaaagcaggttaccttccacaggaagaagaatttgcagtattatgagatttcagcgaagagcaactacaatttcgagaagcctttcctctatttggcaggaaacttgcaggtgatcctaacttgcactttgtggaatctcctgcattggctccaccagaagttcaaattgatttagctgcacagcaacaacacgaagctgagcttcttgcagctgctagtcagccccttcctgacgatgatgatgaatctt

SEQ ID NO: 39264 - DNA, 260 bp, Glycine max
  Clone ID: 700943275H1
cggctcgagttagaaaacaccctctaccgcctctaagtcctacaagaacccatcccctccccatccgctcccaaaatctcactcttcttactcttcttcctccaagaaagtaaacaaccctcacattcaccacagcagcacacattgacaaagacaaccttggttgtctccaatcaaaacctttcaagctggcgttcgagaaccaagacaaccctgtccgagatatcaagcccaggaataggagtatcatgggtgctgga

SEQ ID NO: 39265 - DNA, 260 bp, Glycine max
  Clone ID: 700943276H1
gagaaaggagggcaatttagcttgcacatactcaagcattccaccattgtggcaaagccaaggtcattttagactccaccacatgatcatgatcatatgatcaatcccttaattttttcttttttcttttcccttttctttactctgtattgtatcaatgcttgaaaatggggttgttccaaaaatgtcatatatatttggcctgctaatgggtattgtaaatctctgaacttgaagtgatgcacggttttgagatggtt

SEQ ID NO: 39266 - DNA, 258 bp, Glycine max
  Clone ID: 700943277H1
aagagaatggctcccaagggtttaatctttttggctgtgttatgcttctcagcactgtcactgagtcattgtcttgcggtggataatggacttgtgatgaacttcacaaggaatcatgccctcaggctgaagacatcatcaaagaacaagtcaagcttctctacaagcgccacaagaacactgctttctcctggctcagaaacatcttccatgactgtgctgttcagaggtgtgatgcttcactggtgctggactcca

SEQ ID NO: 39267 - DNA, 256 bp, Glycine max
  Clone ID: 700943278H1
gtgaagaagttgctatgccttgttgggtttgtggtgcttgtgagtactattggtggggtggagagtgctggtgaatgtgggaaatctacaacccctgataatgagcttataagcttgcaccatgtgcctcagcagcacaagatgagaatgctagtgtttctcagagttgctgtgctcaggtgaagaaaattgggcagaaccctagttgcctctgtgcagttcttctctctaacacagccaaaatggctggcgtcaa

SEQ ID NO: 39268 - DNA, 252 bp, Glycine max
  Clone ID: 700943279H1
attattagttatatacttatattttgttccttttaagtttaattaatttgagatattttgggctaattatgggtggcaaggacatggcaaaggtgaagtgggggagaggaggaggaggcaagagggtgtggagaggaggataaagaagctgcagcggctggtttcgggcggcacccgaatgaacccggaccggctcttcatcaagacggcggacacatcttgcaattgaggttgaactcaatgtgttgcaag

SEQ ID NO: 39269 - DNA, 105 bp, Glycine max
  Clone ID: 700943280H1
caaaaagcaaaaataataaattttctgaaagtgcactaactcatctttttgtatacgatacatatctgcttgtgggtgtttatctgttccgcttccacacaacat

SEQ ID NO: 39270 - DNA, 146 bp, Glycine max
  Clone ID: 700943281H1
ctagatagttaagagtggctatctgcatctgtatcagtcagtgtgaattgcaaaagggtcttgtttcttaatgttttgtaagtccttaaattttgagccgcaggtatgggaatatactaataaatgcatgctggattttgaagtgt

SEQ ID NO: 39271 - DNA, 257 bp, Glycine max
  Clone ID: 700943282H1
atcaccttctccactcttcactaccctcaaaacccttttcctcttaccacttctcatgtggccaccgtggctcaactcaccgagcgggttccgcgacgagctccagccgtcctcggctgccgcagcaacctcgccctgccgcgcgtattcgtcggtggcatctacgttggcggactgacgacgtccgccagctccacgagagcggcgagctccaccggctcatcgaacgcctcccgcgctccaaccagaacaacgcc

SEQ ID NO: 39272 - DNA, 257 bp, Glycine max
  Clone ID: 700943283H1
cttctctattttaagtaattcaatggcttacactgcaagtcttgtgttcttagcttccactttccttatcataaactttcctcttctggcaaacgctatcggatcaatggaccatgcagaaccctcaacgactgcgacggccaactcatttgcatcaacggaaggtgcaacgacgaccgcgacgtcggaacccacatctgcggcggcggaatgccgccaaatccgccaccaagcggcggaagctgccagtcctcggg

SEQ ID NO: 39273 - DNA, 256 bp, Glycine max
  Clone ID: 700943284H1
cgagaacaataatggcacttatcagtgggttgtcaagcccaaaactgtcaaatatgaatttaaaaccaacacccatgtccctaaactaggggtaatgcttgtagggggggtggaaacaatggctcaaccctcactggtggtgttattgctaaccgagagggtatttcatgggcaacatagtacaagattcaacaagccaattactttgggtcactgaccaggcatcagctatcagagtggggtctgtccaagggga

SEQ ID NO: 39274 - DNA, 261 bp, Glycine max
  Clone ID: 700943285H1
caaaaatttaacttcagagaaaatatctcaacctggattaatggataaggcacttgatggaacttctcttgaaggagttacttgcaagttgattgttaaaattccaaccaaggtagaagccctgctcaaagtgctagtgcaggttcttttgatgatcctacaatcatgaatagtcgagcctcatctcctgttcttccagagaagcacgatcagtttgatcactgctcaaaggaaaagagtgacctttatcgagccaatatt

SEQ ID NO: 39275 - DNA, 261 bp, Glycine max
  Clone ID: 700943288H1
attgtttgttgttgtaactcgttcttcttcttttgttgttctgtgtttgtgtttgttttttctctcacctgaaaatgtcttgctgcggtggtaactgtggttgcggagctcctgcaagtgcggcaacggctgcggaggctgcaagatgtacccagacttgagctacactgagtcaaccaccaccgagaccttggtcatgggagtggcacctgttaaggctcaatttgagggtgctgaaatgggtgtgcccgctgagaacga

SEQ ID NO: 39276 - DNA, 262 bp, Glycine max
  Clone ID: 700943289H1
tggcgcaggtccaactccctcttgatgatgctgagaatgatgcccgccactatgatgatgaccgccctgacattggtggctttggctgtgccaatggcaaggtccagatcatccagcagatcaaccatgagggtgaggttaacagggctcgctacatgccccagaaccccttcatcattgccaccaagaccgttagtgctgaggtttatgtcttcgattatagcaagcatccctctaagccccctcttgatggtgcctgtaa

SEQ ID NO: 39277 - DNA, 261 bp, Glycine max
  Clone ID: 700943290H1
aaatcaatttgtccaacatggccatcaacaagattcataatcaggcactgcatgagcttgtcgaccctaccctagggtttgaatccgatttcaaagtcaggaaaatgataaatgctgtggctgagttagcatttcagtgcttgcagagttctaaagagatgagaccttctatggaagaagtggtggagactctcaaggatatacagagtgatggcaaacataaaagccagcctgaggtaatggacatcacaagcacagctg

SEQ ID NO: 39278 - DNA, 260 bp, Glycine max
  Clone ID: 700943291H1
cctttgcttatataatgtcagaatggactaagcagcaaggggagatacagggggcatatcaaataaaagtcactacaagtgccctggccttgttgctaaccagtaggcacaatgaattggcaaatatacatgtccagggctatcttattaagtctggcgagggaataactacaagatcaaaagctaaatcagccccagatcaatgggtaatgttgccactttctacaaagatagtggctttattggcagatgcattaact

SEQ ID NO: 39279 - DNA, 256 bp, Glycine max
  Clone ID: 700943292H1
gttttcgatgtagataaggatgttgatgaccttttgccagttgaagttaaagaacagcgcctcagcaatctgctgcaggcattgatggttgcagcttgtgttgctgctatgcctctcttgaagaagataccaacctcagtgctttggggttactttgctttcatggcaattgaaagcttgcccggaaaccagttttgggagagaatactatatcttttcactgctccaagtcgaagatacaaagtgatggaggaac

SEQ ID NO: 39280 - DNA, 254 bp, Glycine max
  Clone ID: 700943293H1
aaagctactttatctaatttcactactggggtttgaaaattttgcaatttcatcatttaatttgatgctgttttctcatcattggcatttttttcctcccccaatcttttttggatgacaatacttgctcatgatgtattttcaaatgaaaaatctgattttaatttttgttttttgtttaaaatatatgatatatcctttttattgcagatgttgtatttggacaaagttttttactttttcatcaatttttt

SEQ ID NO: 39281 - DNA, 250 bp, Glycine max
  Clone ID: 700943294H1
caagactcatgctatgtgcattctaaccgtcaatttttccgtgaatgcaacatttacggcactgtagacttcatatttggcaatgctgccgtggttttccaaagtgcaacatttatgctcgtaagcctatggctcaacagaagaacaccatcacggcccaaaatagaaaagacccaaatcagaatacgggtatatccttgcacaattgtcggatcctacccgccccggatcttgccccggttaagggcag

SEQ ID NO: 39282 - DNA, 256 bp, Glycine max
  Clone ID: 700943295H1
agaataatcgagacacagatcatagtgatcattttttaatttctcagatttatccgacgtcgctgcagatccaccaaccgttatggctgccttcagcggtgataaacggcaccgtttttcggcttccttggcgccgcagctgccctcgtcttctcctgtatgggagctgcctatggcacagcgaagagtggcgtgggcgtggcttccatgggtgtaatgagacctgagctggtgatgaagtcgattgttcctgttg

SEQ ID NO: 39283 - DNA, 165 bp, Glycine max
  Clone ID: 700943296H1
ctgaaagtgggcaagaatctgaatgcagatatagaagtgcttcaagctatacgtgttgcacaccctgagtgtcagtttattcttgatgctaatgaggggtatactctgaggaagcagttgaagttcttgagaaactacatgatatgaggttgactactgttctat

SEQ ID NO: 39284 - DNA, 274 bp, Glycine max
  Clone ID: 700943302H1
tcgcatgcacgcgaatgcagctcgagggccttctcttcctccttctttctaagcatcatacttcttctctccattgtttcatttttatttccaattcttcaagtgaaaggaatataggaacttgaagtgatgaaaacaacagaatgttaaaggaagctttgatgtgaggtgaggtgaggaaatcacaagaggaatttgaaaatgagtacagcaagattcatcaagtgtgttactgtgggagatggagccgtgggaaagacatgtatgctcatct

SEQ ID NO: 39285 - DNA, 251 bp, Glycine max
  Clone ID: 700943303H1
tcggagattagctcgaatgtgagtagccatgctcttgagaagtgcagtaatgtgaaagagacacagaaaatattgaaccacagttttttcaccagaaacctcaagaaagtgtaccctatagggcttcagaaaagcacttcatctttgtctctgtcttcaatttcattgtctttgtcacaaaactcaaatgactcttcccaggctgattctttgactccactggatgaaaagatttcgctggcattgcgttt

SEQ ID NO: 39286 - DNA, 265 bp, Glycine max
  Clone ID: 700943271H1
gatggttctaacatagatgccaaagaaagtgctctagtttggaattacgagtatgcagaccgggactttggttcatgccaagctaaagagctttttgatcatctggaaatgttcttgccaatgagcctgtttctgttaagagtagtccaaacattgtggaagtaaaacctcagggtgtgagtaagggaatcgtagcagaacgtcttctcttaacaatgcaacaaaggggagtgattccagattttgttctatgcattggagatga

SEQ ID NO: 39287 - DNA, 240 bp, Glycine max
  Clone ID: 700943308H1
gggaggagaaaagaaaagattgggaagggagaagcatgaaaatcggagacaggaagaagaagaagagcatccccagcgacgaatgaatgggcaattgcggaagcagagaggaatctgccgtagtttccaaggctcaagttgttcagcagcttcaccatgcgacgtcgttgggcgccagtgccaggaccgacaagaagcacgctcacaggcacaatctcagcgagtgcgcttcggatctca

SEQ ID NO: 39288 - DNA, 269 bp, Glycine max
  Clone ID: 700943238H1
tcccttcacaccattctcacaaaacaactttcaaactctgagaaagaatggctgccaacacattgatgagtactgctatctcagccttcccatctctcctttcttcctcaaaatccgatttgccaccgcagttcctcttgctagctttggtgtcaccaatgcctcttcttctcgcttttctatgagtgctgactggatgccaggccagcctagacctccttaccgtgatggttcagcacctggtgactttggattcgacactcttcgtc

SEQ ID NO: 39289 - DNA, 197 bp, Glycine max
  Clone ID: 700943240H1
caattcctacttttaaggaatatttcaaattcttttacacttattgggtttttaagtcatttttccttcagtttttttcccctttaaaaatagacttgcaaccaccatgatgtcatgaataatttaacaaaattaagcattttttcttataactgcactgctggtatctcttctggtatagcaaatattccacacaa

SEQ ID NO: 39290 - DNA, 84 bp, Glycine max
  Clone ID: 700943242H1
atgataccttggctctccaagctgctgagaaatcattctatgaggtcattggtgagacataccattcttcttccatccaaaact

SEQ ID NO: 39291 - DNA, 267 bp, Glycine max
  Clone ID: 700943244H1
acttctgttaccaatggctccctcatcaaactacatttctttccttttcctcaccacccttttgtatgctcttcaaatcagtgcaagagacagccagttcttcagcaaagtccccattttgacaaaaacagtgtcaaagagacagaacttcccaacaaagaagcaccagaagtgaacaagccagagcaacaaccacctttcattccggagactgaaaacagctatggcctatatggtcatcatgatgagtataaccaagtcccttcc

SEQ ID NO: 39292 - DNA, 262 bp, Glycine max
  Clone ID: 700943245H1
actggtggagctgctggatatgggaatcaaggttatggatatggtgggtatggtggatatggtggaagtgatagttcttatgggaattctggtgcatatggtactgttggcgacgtactggaagtgctccaaacaataatgctagtgcttctggtggtagtgaactaacaagtagtggtggcagtggcaactatatgggtgggggctatggggatgcaaatggaaattcaggttatggaaatgcagcttggagatctgaaca

SEQ ID NO: 39293 - DNA, 265 bp, Glycine max
  Clone ID: 700943246H1
aaggatgtcaagaataatgtgtcaaaagggaagaaacgaaagcatgatgcgggagttgagaagggcagcgggactgttgaaaagcttgtcaagattcaaattcctgcaacataaagaaacaacttgttgatgattgggactctgttactcagcaagataagcttgtaaaacttccccgttcaccaactgttgatgaaattctgacaaagtaccttgaatacaaatcaaagaaggatggcattgctcctgattcaataggagaaat

SEQ ID NO: 39294 - DNA, 262 bp, Glycine max
  Clone ID: 700943247H1
agaaaagagaacaaggtagttggtgttctttgggctaataagagggacagtggactatggtttgcacctcctgagtggagagaatgtaggcttggcattcaactcttaccgtactgcctatctctgaggtcttgttttccaatgttgattttgtgaaggagcttgtggagtggacattgcctgctttgaatagggaaggtgttggagaaggatggaaggggtttgtctatgctctgcagggtatttatgacaatgaaggtgc

SEQ ID NO: 39295 - DNA, 137 bp, Glycine max
  Clone ID: 700943248H1
acccttctcagctatgctcaggaaaaagtgggattttcagttcctcacaggcacttcttgtgaagccattgaagaggcagatgatggggaagatcaagggattgagaattgcagccaatccaccagcatttccgctg

SEQ ID NO: 39296 - DNA, 265 bp, Glycine max
  Clone ID: 700943249H1
gttcaatagtcatttgatcacaatttttagtagtccaaatctagagactatatgactgtttttcatggtttccagaggatggtagtctctgcgatcatggaggtgactactatggatccatattagaaacaggccttctgtcctctggaaaccatgaaaaacagtcatatagtctctagatttggaccactaaaaattgtgttcaatagtcatttgatctaaaaatttatatttgcaaggtgatgtttagttaggaatttctaag

SEQ ID NO: 39297 - DNA, 265 bp, Glycine max
  Clone ID: 700943250H1
caaaaggatatatacaagttcttgtacttgctccagacaatatgctgggaacttcagctatggttaagataacatccgtgggaaggtggtcagtttttggggatgtaattagacagtgaaccctgtaagtgacaataaagctctaaacaagctggttcctaatcaggattgcggtaactcagccaagactggtggattttcagaagagccagaatattgtgcctgtggaaatgacatctgttgtggtcagggtactctcgaaaat

SEQ ID NO: 39298 - DNA, 264 bp, Glycine max
  Clone ID: 700943251H1
agtggggctgcttttgggttcccaccatcaatagatctaaacaactgaacattccatgtctcatgatcttctagaaatgttactggccgatgttcagttgtgtagatctatgatggtggggctgcttttgggttcccagagactcctgaagatgctgccagagctggtcttattagtgggaaggataatatcattgatcgtagttctcaagatgcttatattaatgctattcgacgtgcagagaactgcatctatattgaaaat

SEQ ID NO: 39299 - DNA, 266 bp, Glycine max
  Clone ID: 700943252H1
atcaactcactcatcaatctcgtttgttctcactaactattacttcatcatgtcgtcgaacaaggttggtcaagtcatcaaatgcaaagctgcggtttcatgggaggcagggaagccacttgtgattgaagaagtagaggtggcaccaccacaagctggtgaagtgcgtttgaagatcctctacacctctctttgccacactgatgtttacttctgggaagccaaggggcaaactccattgtttcctcgtatatttggtcatgaag

SEQ ID NO: 39300 - DNA, 268 bp, Glycine max
  Clone ID: 700943253H1
gcacgaaaatcattagccacagccctaacccccccgacgccttccatcgcatcgcctcctaaaacaccacacatcaaaacgacagtgtttcggagcaatcaatgtaaaatcttggacaataacgacgaatctttattctctctccgtcgttgtttgttgcatcattaatagtagatgccaatggatccgaatccgcaagcctccgtggagtccgacccggacccgcttcgcgtgaagaggaagacccttgaggccgtgctcttgcagt

SEQ ID NO: 39301 - DNA, 251 bp, Glycine max
  Clone ID: 700943255H1
tttggttaagtcttcaagtctactagggtttgcctcagggacagcccgtggaggtgttccatcagcacgcattgctatatacaaagtatgttggatcaaaataggttgtcctcagctgaaacccttgcagcatttgatgaagcaattgctgatggagttgatataatttccatttcaaccggacttactagtatagtgtacattccgtatttccaaagcgcatttgatataggaagtttccacgcaatgta

SEQ ID NO: 39302 - DNA, 269 bp, Glycine max
  Clone ID: 700943256H1
cagcaggatgaaggaaattgctttcaagaagcaagcagagctcgaagagatatttgtctgtgctcatatagaagtagatccagatgctgcccgggagaagattatggccttgatgattcaggaaacattgaaccaactgaattactggctgacatggacaatcagatagcaacagcaaaagaagaagctttaagccgaaaagatatattggacaaggttgagaaatggatgtcagcatgtgaagaagaaagttggcttgaagattataa

SEQ ID NO: 39303 - DNA, 265 bp, Glycine max
  Clone ID: 700943257H1
attcaaagggtatctgggctctggtatgtctacatagaaggacccttgtctgattggtgaaattgactccacaatgatggattgttgcttgatgtgattgtagagttgttatggaaggcgtgattgaaggagaaacaatttccaatgtttcctaatgcatgatgtttggaagacttggaatcttcttttctgcagaagtgtgggagggatgcatagtccattaccttcagtaattcctccgtcccacaaccttgcagcacctgga

SEQ ID NO: 39304 - DNA, 264 bp, Glycine max
  Clone ID: 700943259H1
cagcccagaagtatcgtgtggagaatttgtatgagggtccccttgatgatcaatatgcttcggctatcagaaactgtgatcctgagggtcctctgatgctctatgtctcaagatgattccagcatctgacaagggcagattttttgcttttggtcgtgtattctctggcagagtttcaactggtttgaaggtgaggattatgggaccaaattatgtccctggggagaagaaggatttgtatgttaaaagtgttcaaagaactgt

SEQ ID NO: 39305 - DNA, 263 bp, Glycine max
  Clone ID: 700943260H1
ctccgtcggtcatcatcatcagacccaaacaaattctctacgcagatcgaatcaaagctcctccatccaattccgagatgagcactggcgaccttctcagcatcgaaccctcgaacttaagttcttctttgagctcaagaagcagatatcatgctctcttatattgtcaaataagaccgatagctatatagctttcaaggtgaaaacaaccaatcccaagaagtattgtgttcgtccaaacaccggagtagtcatgccacaat

SEQ ID NO: 39306 - DNA, 259 bp, Glycine max
  Clone ID: 700943261H1
aaccctaacaatgggaggcaaatgtccgcataggaacgtgaagaagagaagatattctcacaagacagcgcggcgtacgaagtttgagttgaaaggggacgacatggttatgcgcactgaacaaacccgatgaagagagagcccctttacccctcgatgaagatttgcctgggatgggccagtactattgccttcactgcgatcggtacttttccaatgtagccgtgagggatgagcactttaagaccaaacgacacaa

SEQ ID NO: 39307 - DNA, 264 bp, Glycine max
  Clone ID: 700943262H1
cccggcgccacctggatcccccacccgggttaactgctgaagagttcgaggacctcaaaccctccgtgctggagcaccacacctactccgtcacacccacccgccaaactcctccctcctcgcgcaggctatccacgcgccaccacacgcggtgtggtccgtcgtgcgctgcttcgacaacccacaggcctacaagcacttcatcaagagctgccacgtcaaggagggcttccagctcgccgtggggtccacccgcgatgtcca

SEQ ID NO: 39308 - DNA, 265 bp, Glycine max
  Clone ID: 700943263H1
aagaaaaggagttaggaatgtcttaacagatatataacctgtttgggtacaagctagaagagcttttcaaagcttttctgttgaaaatatagaactttttctatcaaagaagctctcaaaaactctcctctcatggctttgtacccatgtaggcacatagtatcttagtccagcattgccttatgctaaacttatgtttgacatctcgtataactcatctattcttattttactcagataataacagagttaaaaaaattattta

SEQ ID NO: 39309 - DNA, 84 bp, Glycine max
  Clone ID: 700943264H1
cctatgactcaggctcgtagattcctgggtctaagctatagttcgccaatacttgtgtgtgccatgagccacttgatcccaacg

SEQ ID NO: 39310 - DNA, 259 bp, Glycine max
  Clone ID: 700943265H1
cgtcttcataaacgcctttcttctccgtttccgtttcctcgttcgaattcgctttttgatctgcgaaaatgagagagtgcatctcgatccacattggtcaggctggtaccaggtcggaaatgcttgctgggagctctactgcctcgagcacggcatcgggcccgatgggcaaatgccaagtgacaagacagttggcggtggtgatgatgctttcaatactttcttcagcgagactggtgctggaaagcacgtgccacgt

SEQ ID NO: 39311 - DNA, 263 bp, Glycine max
  Clone ID: 700943266H1
gtggaatgtgccattctgatctccaccagattaaaaatgatcttggcatgtccaactatcccatggtcccaggacatgaagtggttggtgaggtactggaggtgggataaacgttagcaggttcagagtgggagagttggtgggagttggactcctcgtaggttgctgcaaaaactgccagtcatgccaacaagacattgagaattactgcagcaagaagatctggtcttacaatgatgtttatgtcgatggaaaacccacac

SEQ ID NO: 39312 - DNA, 260 bp, Glycine max
  Clone ID: 700943268H1
gctgtatgagatctgtgatgacaatagcatttgaatttgcatttgaaagccatatgcaagagcatgtagcatctatggcacgccaatatgttcggagcattatatcacagtccaaagggtagcattagcactttctccttctcatttgagttcacatgcagggcttaggtcaccattgggtactcctgaagcgcaaacccttgctcattggatctgcaacagttataggtgctacttgggtgtggagctacttaaatcta

SEQ ID NO: 39313 - DNA, 136 bp, Glycine max
  Clone ID: 700943269H1
atcatgtggttgaagaagctggttcctcaggatcatcctctgacagtcagagattgacaaagacagtttcaccatcagtttcttccaaaaaatttggttccctttctgattggattccaggccaggctccatttca

SEQ ID NO: 39314 - DNA, 267 bp, Glycine max
  Clone ID: 700943234H1
atttcagagtttcaatctagagtcaccagagataaacagcaacatgtgtattattaatcaggaagctatcaagcagttgcagtcccttatggaaaacttggatgagcaacagaaaacacattccagattatgcaccggggctatccaacagaaacattagtacggtttctcaaagcaagggatgggaatgttgtcaaagcacataaaatgttaattgattgtttacaatggagagtggaaaatgagattgataatgttttatcgaag

SEQ ID NO: 39315 - DNA, 273 bp, Glycine max
  Clone ID: 700943204H1
caagtatttgtcagaatcacattgttaattctcttctaaagatttcattcgttcatcttcggtatttaaaggcgctccataatttctagttttgcagatacatttttctctggaaaaatcctgaatttcggaactctggactatctgctagattgtgcctgagtttgtacttgtggccatggttgcagatcgaagctctgaaatgtcgttattagttggattttagaaatagatttgcatttttcgaagcttcagaactgaaacaagcgagct

SEQ ID NO: 39316 - DNA, 135 bp, Glycine max
  Clone ID: 700943205H1
atatgcccttcttctccttcttcccacttgcaatctctttatcataccaacaatctagtttcatttcagtatttcatcttctcctcttctatacttgcgtttgtccattttccaactaaatgaggaaactttggt

SEQ ID NO: 39317 - DNA, 277 bp, Glycine max
  Clone ID: 700943206H1
aaacaaactaattaagcaacacacacttcaatttatcagcatggcctccgttcagtgccacaaaacctgcaaagtgagctgccaacaggagaaccagcacgcctcgtttgggcagaaagtttctgacttgttcaaagggcatcaacataatgaccacagcttcaattatgccactcaaaccaaagtgctttcccagtcagggtcatgggtaggcaccttcaccaccacaactcaaacacaatgcggttgccccaagcacatctcagtaccactcatg

SEQ ID NO: 39318 - DNA, 257 bp, Glycine max
  Clone ID: 700943208H1
ggaatgcggctcgagaggagagagagagaaagagtggttggaagcgtccattgaaggtagagagagagaggttgtgggaatgtggtgctgcttcgtgtctggttattgcctcgcgaggtttgagaattcagtgaagagaaacggagttgccgatgctgcgatgtcctagatgatagatctgtgaggaaattgaactgtgaaaaaaaatggcgacttcggaggtagagagaaggggaaattcggtaaacgggaaagga

SEQ ID NO: 39319 - DNA, 278 bp, Glycine max
  Clone ID: 700943209H1
aagaagcattagcaaaagcaagaagaactagtctaagcagaaatggcctcttcagtgatggcatctgtggccctcaaacctgcccctttcactgttgagaagtcctcagttagaggccttcctccctctcaaggaactcctcttcattcagagttgtggccagtggtggcaagaagatcaagactgacaagccttatggaattaatggtggcatggctttgagggaaggagttgatgcatctggcaggaaaggaaagggaaagggcgtttaccagttt

SEQ ID NO: 39320 - DNA, 273 bp, Glycine max
  Clone ID: 700943212H1
cttgtgagggagcaaccataagcggtttatactgtataaagctactacttatggggtcatggggtcggtggatgatcaaattgacttcataatgggtgatttcttcctcttgacacataattaaaggtttaattgtaagattgaggaagaatgaaaaagtgacttgacaggtgtaaggtggttcatgcaatgagatactaattaagtgacaatatgtttttttaaactgttgtacattaaaaatggatctattatgaattatatagtatttgt

SEQ ID NO: 39321 - DNA, 270 bp, Glycine max
  Clone ID: 700943213H1
caagaattgtttgaggcagtagagcaggagagaagctggagggctaccccttcaagaaatgctgctatttttcatcacccagcctttggtgattttgaattgcagcatttgcgcatgaatgcaaatgatgctgactttgaagagagaattattcaacatttagctgctgctgcaacgatgaggagagtgaaccagcttggtcggagggaagggcagcaaactcgttcatcacctcatgttcatccacacttcttagtgttatctaatcag

SEQ ID NO: 39322 - DNA, 273 bp, Glycine max
  Clone ID: 700943214H1
ctgagctcagcactcgaatcgagtttaaagctgaaaatgagggaaaattccactcattccacccagttgcgaccatccttagttacctgaccaaggcccctctggttccaccgggtacccagtggtgaatgcgttgtcaaagcagcgagctatgctggaaaacatcctgagggcttgtgttggattagctcctgagaacaacatgatcctagagtacaagtgaagttcaaagtcttaagagtaacggtttgggatagtgtagttgaatgtgat

SEQ ID NO: 39323 - DNA, 270 bp, Glycine max
  Clone ID: 700943215H1
cgcagccggcgcacctcttcctcgacgagctcggcgtggcgtacgacgagcaagaggactacgttgtcataaagcacgcggctttgttcacgtccaccatcatgagcaggatcctcggaggcccaacgtgaagctcttcaacgcggtggcggcggaggacttgatcgtgaaggaagggagggttgccggggttgtgaccaattgggctctggtttcgatgaaccatgacacgcatcatgcatggaccccaacgtgatggaggcgaaggtt

SEQ ID NO: 39324 - DNA, 275 bp, Glycine max
  Clone ID: 700943216H1
ctgatatgaattgtattgcaggtagtggaattgaatgagaaagatgggagcgtaattcacttgccttggatcagatctgactcagaatcaggtgccgcagtacacggtgcctcccaacgctggtttggctcttttcctaccaaggactttacctactctgcggacggggtattcggaagtgctgaagctgaagctgaagctgaagctagagatagtgagaggaactacactcttgtaggatgcacttgtgcccctgcgtttcagtaccaggactt

SEQ ID NO: 39325 - DNA, 270 bp, Glycine max
  Clone ID: 700943217H1
tgaaggttttggctggaattgacaccaacttcactgttacatccaaggcagcagatgatgaagaatttggagaattatacacctttaagtggactactctcctgattcctccaaccacatcttaataatcaacattgttggggttgttgctggaatctcagatgccataaacaacgggtaccaatcttggggacctctatttggaaaactattcttttcattttgggtgattgtccatctatatccattccttaaaggtttgatgggtcg

SEQ ID NO: 39326 - DNA, 274 bp, Glycine max
  Clone ID: 700943218H1
gagaaattaaaaaataataatttaatttaaaattattagtaattataccatcaaaattcataatcgtgaatcaccattaaatcggataacgttgtggttatgtcattaattaacattgtatttgataacatgaaattaaagtaaaagtgaaaaaaaaagtttgaaaacgactaaaagcatgaatctaaaaaagaaatcttatttaaaactagcaacagaaaagagtacttgagtgtaaattgatgttcattgattcattcaattattaactgtg

SEQ ID NO: 39327 - DNA, 200 bp, Glycine max
  Clone ID: 700943220H1
gagaactcagctactgattgctttactcactacgcttcagtgcaggcatgggaggcaggtgcatgtccaatcggcagtgcccagtccagtcacgcatctggtacacttctgcccttgacgacggtgcattgaccttaactcgctcaacccggatttgcctcggtccgtcatcaacggcattattacctcggagtccatct

SEQ ID NO: 39328 - DNA, 105 bp, Glycine max
  Clone ID: 700943222H1
cagaaatcagtatattctgccttgttcaatcaatgactcttctgccttcccttccttccttccttaaacccaatcggagaggaataagatgttgttccacacaac

SEQ ID NO: 39329 - DNA, 270 bp, Glycine max
  Clone ID: 700943223H1
cattactgaagatggtcagcatattcaagatccattggttttgaaagaaacaagtccagccaagggattggctgtacatccacaacataataatagtcagtcaagtatggatgctgcaataatttagaaaaggtgacagacaaggcagtagtccagtggatgttaactctgcatcaaataggtcttgatgtggttcgcactgataggacattagttttttatgagaagcaagaaaacttgtcgaaactatgggatattcttgtagtttat

SEQ ID NO: 39330 - DNA, 276 bp, Glycine max
  Clone ID: 700943224H1
acagaaggaggagagccgcggcaacgaggaccacgtctccgtcatccgcgactaccgatccaagatcgagtccgagctctccaacatctgcgacggtattctcaagctcctcgactctccctcattccctccgcttcctccggcgattccaaggtcttctacctcaagatgaagggagattaccacaggtacctcgccgagttcaagaccggcgccgagcgtaaggaggctgccgagagcactctctctgcatacaaagccgctcaggacattgca

SEQ ID NO: 39331 - DNA, 272 bp, Glycine max
  Clone ID: 700943225H1
cagaaactacgagccttcagaagaggcttttgacattgattcagtccccagggaggtcaagtctcagcctcttgcagagaagaaagcccctggtaaaaagcctactggtttgggtgctctcctagtggtcccccatctaccgcagatgcatatgaaaggctgcttctatccattcctgagtttgcaaacttttggaagctttttaagtcttcagaacctgtggagcttactgtagcagagacagaatatgcagttaatgttggttaacacat

SEQ ID NO: 39332 - DNA, 279 bp, Glycine max
  Clone ID: 700943226H1
ctcgaggtatctctctctctctctgtctctgctgtggagtttcgcgatgccgtcatttggagccttctcctcattgtctctttatgctctgcctgaaatcaagggtgaggcttctggttccgtcttcttcgtcgatagctccaggaatcaattccttcgcgcgagatcatccaacgatgagcaacctgcaatgttgcttcaagaagttggttctgctgtgtcagtcttgcttggttttgcacctccttccaccttttctgctggcagcttatccaaatt

SEQ ID NO: 39333 - DNA, 271 bp, Glycine max
  Clone ID: 700943227H1
gccatgcttctgtggctacctcaaaaaccctagcttgaagcagtatgttaactctcctaatgccaaaaaaaccgttagttcttgtggtattgcctatccaacttgttaagcacctttatatatatatataaaatgtgtgaacaatatatatatattgattaaaaaatatagtttaatttatatacacactttgatcctataaaaacatcttgacacaagcattcaatagaatttcaccactttatcatgacattttactataatgatgtgg

SEQ ID NO: 39334 - DNA, 271 bp, Glycine max
  Clone ID: 700943228H1
atcattttgtaaatcaaagcaatctgcaattgtctctgcaaaaaatcatgaggcatctattcacaatgtgcatactattaattcagaaggctattcgatagatcagctctctcttgtcagagaggacaaacaccattctttgagttcatcatcagggatatgtggtgtgatgtcctcaaaaggtatttcatctacatttcatagttcaaatagtggacagcttgaaaggtcgtctgaaccatctaagaacagcaaaaaaagggccaggcca

SEQ ID NO: 39335 - DNA, 268 bp, Glycine max
  Clone ID: 700943229H1
gttagcattaaccctattgattggaagattcagaagggtcttctccgtcctttatttctccccagaacctttccccacataccttgcacagatgtggctggagaaatagttgaatcggaactcaagtcaaagatttcaaagttggcgaccaagtccttgctaaactcactcatcaatatggaggtgggtttgccgagtttgctgtggctagtgagagcttaacagcagccagaccatctgaggtctcagccgctgaagctgcagcatt

SEQ ID NO: 39336 - DNA, 269 bp, Glycine max
  Clone ID: 700943230H1
attcagctaaccgaagaaacaggaaacttcctctttctcaccgccactgaatcctctttatatacaaacccttgcccctgctcttccccgcatcacacacacacaacataaacttacaattcagtctctttcgttatcaaattatttcttcgatcaaggtcgttttcgaaacttcaccaacatgagctactacgatcatcagcaacagcctccaattggtgttcctccacctcaagggtataaaggaaaggacgcttaccctccaccag

SEQ ID NO: 39337 - DNA, 252 bp, Glycine max
  Clone ID: 700943232H1
gtaaaacctcagtctctcactcgcagatctttcactcacccaaaaccaagctagtccgaggaagtcctctattcagaaccagatatggagacaaaacccaccgagatcagcagcggaagatgttcggaggctacaacaagaggttcagacatttcagccctaccctcggctgctccatgaacttccacatctacttccctcagtctccttctccctctcacaaattcccagtcttgtactttctctctggcc

SEQ ID NO: 39338 - DNA, 269 bp, Glycine max
  Clone ID: 700943233H1
aaggaactgaacatggatctctttaggaagtgtatggagccggtggagaaatgtttgagggatgctaaaatggacaaaagaagtgttgatgatgttgtccttgttggtggttctccagaattcccaaggttcaacaactgctgcaggacttctttaatggaaaggagctgttcaagagcatcaatcctgatgaagctgttgcatatggtgctgctgttcaggctgcaattttaagtggtgagggcaatgagaaggttcaggatcttctc

SEQ ID NO: 39339 - DNA, 272 bp, Glycine max
  Clone ID: 700943203H1
attttcgcagcgatctttcgctcgttgttgtacgaggcatgcggtcggatagtgaacccgatttacgggtctgtcgggctattatggtccgggagctggcagctgtgtcaagccgccgtgaaaacgtcttgaaaggcgcgccgattacgccgatcacgtctgaagccgcggcatagcggcggtgcccaccgctcaagggttacgacatacgccacgtgttcaaagacgagaactccgccgccgcgtccaacggaactcagcaccaacgagtc

SEQ ID NO: 39340 - DNA, 243 bp, Glycine max
  Clone ID: 700943160H1
tgcattcttccggtggctccagactctagcttggccacaaagggtgtggttcacatcgatgtgatcatgttggctcacaatccaggtgggaaagagagaacagagaaagagtttgaggctctggccaaaggctctggattccaaggtttccaagtcctgtgctgtgctttcaatacctacgtcatggaatttctcaaaaaggtttaagttctttggcgtggattcatatcaagttgcatttgg

SEQ ID NO: 39341 - DNA, 137 bp, Glycine max
  Clone ID: 700943162H1
ctttgaataatctatatttgtctcgcaccatttattcaaagtacgtgaaaggagttatagaaacacgccaccgtatatatactatacgtctatagatgatacttgaataaatggtgcgaaacaaatatagattattc

SEQ ID NO: 39342 - DNA, 242 bp, Glycine max
  Clone ID: 700943163H1
gcagggaaaggggatggttttcttctggcagcagaaataggtcaacgtcaagagagagatggtgaacagcagttttgtgtggattaagagttatcttcaacttttgatgaccagaacctaatactactattttattacttgtcttttctaatcgttttgttcattttactccaggcaattggagcaacaatcattgagtactggcactaaaacttttgcctaatctgttattgcatctcgaa

SEQ ID NO: 39343 - DNA, 250 bp, Glycine max
  Clone ID: 700943165H1
atttgactctcacaaaccttgcatccatccacacatggctggcatgaactctagcgtattggcctgtagctatgccatatctggtgcagcatgctccgagctcaatgggaaggtcacttccgtggcctctgttgcatcctctggctacaagttgccattgatcaaatgtgaggccagagttcccaaagccaaagaatctgaaggaaggagaggtgcccttgttctcttggcagctacccttttcatctct

SEQ ID NO: 39344 - DNA, 116 bp, Glycine max
  Clone ID: 700943166H1
cacttaccgtcaactcttccaccccgaacaactcatctccggcaaggaagatgccgccaacaactttgccagaggccactacaccgttggcaaagagatcgtagatctgtgcttgg

SEQ ID NO: 39345 - DNA, 242 bp, Glycine max
  Clone ID: 700943167H1
ctcattaattgcaagaatggcacttcgttgcttggtgatgtccctttctgttctcttcactcttggtcttgcgagagaaagccatgccagagacgaagatttttggcatgctgtttggccaaacactcccattccaagttcattgcgagatcttctaaagcctggccctgcaagtgttgaaatcgatgatcaccctatgcaaattgaagaaacacagtacccgaaaaccttcttctataaag

SEQ ID NO: 39346 - DNA, 244 bp, Glycine max
  Clone ID: 700943168H1
cgatccttcactctccttcttccgcgactatctcgaaagtctcggggcgaaactccctgaatctgcttattccgaatcgacgggcgtggagagcgatgaggacatagaagatgttacggaggagcaagagaaggtagaagaagaagaagaagatgatgaaataattgaatccgatgttgagctcgagggtgaaacctgtcagtctgatgatgatcctccacagaagatgggagacccctctgtc

SEQ ID NO: 39347 - DNA, 242 bp, Glycine max
  Clone ID: 700943169H1
cctcaaggagcatgtgatcaagccggtgatcccggagaagtaccttgatgagaagaccattttccacttgaacccctctggccgttttgtcattggaggtcctcacggtgatgctggtctcaccggccgcaagatcatcatcgatacttacggaggatggggtgctcatggtggtggtgcttctccgggaaggatcccaccaaggttgataggagtggtgcttacattgtgagacaggctgc

SEQ ID NO: 39348 - DNA, 241 bp, Glycine max
  Clone ID: 700943170H1
tttcaaataggtaaaaagtgtacctcacaggtttccaaataagctttttttgtcaagttcatgtgcgaataagttgacaggacaattgctagttgctacagcctacagcttatagatgagctagtacggtaggcggtggagctgctggtttcagcttgatttttcgaataccctcatctggtagtaatgccatgggggctacaatccgtagcagctcaaaattcttgcattcaaagggatt

SEQ ID NO: 39349 - DNA, 234 bp, Glycine max
  Clone ID: 700943172H1
ctaaatgaagcttcagagcagcaagtggtatcatgtgtatcagaacctagaaatgctcaacttgaagcaccggaactctcacaggctgataagaaatatcaaccatcttcccaggccattgacaaacctgcagatgatggctacaactggcgtaagtatgggcagaagcaggttaagggtagtgagtatccacgaagctattacaagtgcacacatctgaattgcgtcgtgaag

SEQ ID NO: 39350 - DNA, 241 bp, Glycine max
  Clone ID: 700943173H1
tgctggctaaacctttctctcacataacataaggaaaaaggaacatattcactttagttacttcaccacaacaaaacactaacgttgttgttgttcacttcaccaagcattctcttatgctctgacagacactctggttggttgacatggattccaattccaaggccattttggattatgctttgtttcaactcactccaaccagaactagatgtgagttgttagtctttcgtggaggtgt

SEQ ID NO: 39351 - DNA, 244 bp, Glycine max
  Clone ID: 700943174H1
attgctgccaaccaaggagatcgtgccactaacgtaatcaggggcacaaagaaagaacaagttcaacaaatcatcaaagatcttaaggagttcaaagaaagcactaaggttgacaaggtggttgtcctgtggacagccaacacagagaggtacagcaacgtagttgtgtggactaaacgacaccatggattacctctttgcttccttggacaggaatgaggctgagatttccccttccaccttg

SEQ ID NO: 39352 - DNA, 241 bp, Glycine max
  Clone ID: 700943175H1
ggaacgcttctccgtccccctcgacgccgtcacctcctttctcctcctcttcaacttcgccgtcgtcggagtcctctccgtctttgccggcggcggcctcccgatcctgctccgccagtgctacacggtctgcctcggcatcatcgttgccgcgtggttcaccaagcttcccgagtggaccacgtggacggtcctcgtcgcgctcgcgctctacgacctggtagccgtcctcgctcccggc

SEQ ID NO: 39353 - DNA, 241 bp, Glycine max
  Clone ID: 700943176H1
agaagaggaagacgaagtggaagagaaagagaagggtaagggtaagaagagtaagaaggatccagttacaccggcgccgagtgagaggcccacgagggagaggaaaacggtggagcgcttctctgtgccctcgccggctaagtctgcaaggtcctccgctagtaaaggtttgataattgaaaagggacgttgcacgcagctcaaggatatcccagacgtggctttcaagttgtcaaagaga

SEQ ID NO: 39354 - DNA, 239 bp, Glycine max
  Clone ID: 700943177H1
agaaattggtgctggtgaccagggtcacatgtttggctatgccactgatgaaacccctgaattgatgccattgagccatgttcttgcaacaaaactcggtgctcgtctcaccgaggttcgcaagaacggtacctgcccttggctgaggcctgatgggaagacccaagtgaccgttgagtattacaatgacaatggtgccagggttcctattcgtgtacacaccgtgctaatctccaccc

SEQ ID NO: 39355 - DNA, 242 bp, Glycine max
  Clone ID: 700943180H1
gttagaggagaaatcatcatggcatcagcagcatctgggtttgtgttgtcacttaatgttgcagctgccaccacaaactcaagggtggtcatgttcaacacaaagaacaacgcttctaggcttgttgtaagggcttcagatgagcctgcagcggcggcacccgccaccgccacacccccagctgaagctgaagctaaaccaaagccatcacctattggccccaagagaggtgctaaggtgaa

SEQ ID NO: 39356 - DNA, 247 bp, Glycine max
  Clone ID: 700943182H1
cctcgagccgaatcggctcgagatcttatccctctaatcactctagccgttgcaaatttctactcatttttcaatggcttctgcacgatgttgagttccgttgctttgttcgtgggcttgcttgggtcaccggcaacgatgccctcgagaaagccttttcaatctacggcgacatcgttgaatcgaaggttatcaacgaccgtgagactggaaggtccagaggattcggatttgtgaccttcgcctc

SEQ ID NO: 39357 - DNA, 241 bp, Glycine max
  Clone ID: 700943183H1
cttgaaaatgttcgttggaaagcacttggagttcttttcactgtctgggtccttatacttgcctccgagattgcaaaaagtcacacaacaacttgttcagtggaatactggatacttaatctactacaggtccctgtggcattaggagcgacttcatatcaagctgtgcttctgtacaaggcaagagagtgatagcatccaaaggagatcaaagaacacaatggcgagcgcaccagttagt

SEQ ID NO: 39358 - DNA, 239 bp, Glycine max
  Clone ID: 700943187H1
cacgaagatcattgacacatacttcctgggatatttccaactccagggaatatgaccgccggggatggcatccagtgacttacaagtactcagacgctacacctatgcttctaaactttatcaaggaaatagataatatttattttgaaaccgaataccgaagagaatggtgcagcacaagggtaaaccatccacttgcttcctttttgcaagaaaattcactcggactgctgctttaa

SEQ ID NO: 39359 - DNA, 239 bp, Glycine max
  Clone ID: 700943192H1
gacaaaatttagcagagttcaaaacaccaaccaagtaaagtaaagaagggaagatgtcactgataccaagtttcttcggtggtcgaaggagcaatgttttcgaccctttctcgctcgacgtatgggaccccttcaaggatttgtctttcccttctgctgaagattcagctttcttgaaaacacgagtggattggaaggagaccccagaagcgcacgtgttcaaggctgatattccgggg

SEQ ID NO: 39360 - DNA, 238 bp, Glycine max
  Clone ID: 700943193H1
ctttgaaacgcacagcttcaatcaccgaccacaccacccatcaacgacatgcttcctctttcccttctcaagactgcccaaggccaccctatgttggtggaactgaaaaatggggagacatataacgggcatttggttaattgcgacacatggatgaacatccatctgcgagaagtcatttgtacatctaaagacggagatagattttggaggatgcctgaatgctacatacgaggca

SEQ ID NO: 39361 - DNA, 239 bp, Glycine max
  Clone ID: 700943194H1
atgcaagtgaaattggatttagtcatggatctgtgtcatctcaatctaacatggatgctgatgacaaaatcaccccacaagtttttaagggacacaggaattgtgagacagtgaagggtgttaacttttttggacctaaatgtgagtatgtggtgagtgggtctgattgtggtcggttttcatatggaaaaagaaaggtggtcagcttattcgtgtcatggaagcagataagcatgttg

SEQ ID NO: 39362 - DNA, 239 bp, Glycine max
  Clone ID: 700943195H1
ggccactgttgaggttgtgtcagccaaggttgccctcccagaggacacaaaagaggcatcattgaaggttgacgaggagaagaacacagaagaagttgttgagactccaacaccagaaactgtggtcactgagcaaaccaaggaggaaagtactgaggccccacgacctgcagcttctgaagacaagccctcggttgaagttcagactaaagaggtggcagaggaagttgtgtctgaga

SEQ ID NO: 39363 - DNA, 243 bp, Glycine max
  Clone ID: 700943196H1
aggatggatgtaagtatatttgcatctgagaatagggtacatgagggtacgagaagcgcaatttgcatcggctacatcgcgggatatagagtggcagcaatcgctcaggcttgaactcccacttatgctttggtgagggaatccacactctctgactgctccaaggcacaactcgtccacaatgttgaggctttgggcgttaatttggtccgcggggatctgtacgatcatgagaagttggtg

SEQ ID NO: 39364 - DNA, 245 bp, Glycine max
  Clone ID: 700943158H1
gtcacaatcctccagtatatcaattcaaccagcaatccagtggcaacaattctaccaacagctacagttacttgattataagccagcgcccgtggtgccaaacttttcatcaagagggccttcatcgctttcaagcaatattctcaagcctgatattgcagcaccaggagtgaacattctcgctgcatggattggaaataacgcagatgatgttccaaaaggaagaaaaccctcactatacaaca

SEQ ID NO: 39365 - DNA, 266 bp, Glycine max
  Clone ID: 700943201H1
caattctcccgcttcctccgcaacccaaccctctatgctttcctgatcgacaacatgcactacagcgattcacgtaacccttcattttttcagatccacttcaccacgatcgcaatctccctccattttgtgctctcctttctgtcacgatcgttttatttttccagatccaccccacgacgaccgcaatcactccatctgtgctctcctctcctgttattgcgatctcccctccgttgctgcaactgcgaagccaaggcaaagct

SEQ ID NO: 39366 - DNA, 274 bp, Glycine max
  Clone ID: 700943202H1
ccgtgaagcgcagaattcacatgattgctgctcactttgcacccaatgatgatatttcaactaccaacgttctgcctatgaactgcagtggcagtctgaactctgtactccggagatgtataataaggtgtattttgcacgccaatcttctgcttctcttggttattttatgaggcagacttcaattgaagagggtggctcaacttcctttattgctcctaaaacaaatcatggtgctgctgcatctgaatgtccttctgatgcaagggcacca

SEQ ID NO: 39367 - DNA, 255 bp, Glycine max
  Clone ID: 700943117H1
cgatcgtaaccaggctctggttttgcggttagggtagctctttctactcaaaacaaaacaaaacatcaatttctgtttcagttcgcggagatcaatatttgtcgctgaggtcgatcgtcgataaaaggcaatgtttttgtgggattggttttatgggattctagcgtcgcttggcctgtggcagaaggaggccaagatcttattcttgggcctcgataacgctggcaaaaccaccttgcttcacatgctcaaaga

SEQ ID NO: 39368 - DNA, 137 bp, Glycine max
  Clone ID: 700943119H1
ggaattccgctcgagctacaatgccaatgctagtggcaaaactcctgagatagatgttgttgtgtcaaacaaggatcaaaaagtcattgcaggatcatccaaggcaactcctaagaggaacgaaaagggtgtcaaaa

SEQ ID NO: 39369 - DNA, 248 bp, Glycine max
  Clone ID: 700943120H1
gaagaggcaaaaaaagaagaaaattgatgttgttattgttgatactgctggtaggctgcagattgacaagacaatgatggatgagttaaaagaagtgaaaaaggcattgaatccaacagaagtgttgctagttgtggatgcaatgacagggcaagaagccgcagcgttggtgactactttcaatcttgagattggaataacaggtgccatcttgacaaagcttgatggcgattcaagaggtggagcag

SEQ ID NO: 39370 - DNA, 252 bp, Glycine max
  Clone ID: 700943124H1
ctacgatccgtctctgaaaaaagcccgcaagtccctcctcgccaagcatgacgtcttcatcgtcgatggcgacctcaacgacgccaagctcttggcaaagctcttcgatgtggtcgcttatcacccacgtgatgcacctcgcggcgcaggccggggttcgctacgccatggagaatccccactcctacgtccacagcaacatcgcgtcgctcgtcacgcttctcgaggcctgcaaatcggcgaaccctcagc

SEQ ID NO: 39371 - DNA, 247 bp, Glycine max
  Clone ID: 700943125H1
tcatgatctgcattttctctctgatacagctaaaagggcacatacaacatcaaattggctgttagatttgaatctcccagcagaagagaatgaacagaaacaaacaaatgatggaaactctgatcatgtctcaactgagaaccaaaacctttggttgcaagatttgtgtgatctggttgatgaaaagttgtttttaaaccttatgattttgaagcacttgcggatagagtgttgaaagtgatcagaa

SEQ ID NO: 39372 - DNA, 246 bp, Glycine max
  Clone ID: 700943126H1
attcggagatagttgacaggagaaatgggctgcgcaaacagattgaagataggttgattgcagctgctgcaagtggcaaggatttagaagagactggcagtgaggatgatggtcttttggatctgagtgatgatgattttttccttgctgggagttctagtgacgaagcagatgcggatgatgatggacagacaaaagtgcaagagagcaggcttctagtgcttctgggaaaggcgtgtctggcat

SEQ ID NO: 39373 - DNA, 247 bp, Glycine max
  Clone ID: 700943128H1
gcttggagctctttgcatgcaatggctaaaggacaaggtatactcaatccgtgatgcagccgctaataacatcaaacgcttggcagaagaatttggaccggattgggcaatgcagcacattattccccaggttttggacatggttactgatccacattatctgtatcggatgacaatcttacaagcaatttctctactagctcctgttctgggctcggagattacttcttcaaaactgctccctctg

SEQ ID NO: 39374 - DNA, 246 bp, Glycine max
  Clone ID: 700943131H1
gcgttgctgtgtgagagaaagagaaatggcaacaagcgaagaagtggttgccgcggcgcggagtgagccgcgccggaggcagggttgaagcacaaactggagagaaaatggacgttttggtgcgacaaccaatccaaacccaagcaaggcgctgcttggggaacctctcttcgcaaggtctacacttcgacaccgttgaagagttctggtgtttgtatgatcaggtattcaagcccagcaagttgc

SEQ ID NO: 39375 - DNA, 248 bp, Glycine max
  Clone ID: 700943132H1
cggtggcatttttgttggttcgagtgagcgagggaagatgtactctagagattcatggggtggtccgttggagataaacgcgacggactcggcaacggaggacgagcggaccggaacctgcaggacgtggacagggcggcgctgtcgcgtcccttggacgagacgcagcagagctggctcctaggccccggcgagcagaagaagaagaagtacgtcgatctcggctgcatcatcgtcagccgcaagat

SEQ ID NO: 39376 - DNA, 253 bp, Glycine max
  Clone ID: 700943133H1
caaaattttatatattataatgcgtggcctgtgtatacctgtgcaattactatccgatggctaatttaaacaggtaaatgacgtagcagtggaagtgctagaaggtgatcctagaaatgttctttgcgaggcagtggaaaagcaccaagcttcaatgttggttgtgggtagtcatggttatgggacttaaaaaggtacaaattcattaattttggtcctagtaattatgtttatgttgctttgtaatgatata

SEQ ID NO: 39377 - DNA, 246 bp, Glycine max
  Clone ID: 700943134H1
cgaatatcttgttgtttggagcgatccgagaaaaactctgtaaacatgttggtttaccaggacctccttacaggtgatgagcttctctctgactccttccgttacaaggaaattgagaatggaatgctgtgggaagttgaggggaagtgggttgttaaaggagcagttgatgtagacattggtgcaacccttctgctgagggtggaggagaagatgagggatttgatgatgcagctgtaaaggttg

SEQ ID NO: 39378 - DNA, 251 bp, Glycine max
  Clone ID: 700943135H1
tgcaaaacatgtgactgaaaaaatgatgcttaatgctggtaacatttacccccacaacaccccaaaaaccaaggaagcatattactacagaatgatctttgagaggttcttccctcagaactcagctaggctcactgttcctggaggagcaagtgttgcatgtagcacagccaaagctgttgagtgggatgctgcttggtctaacaaccttgatccctctggtagagcagcacttggagtgcacatttcag

SEQ ID NO: 39379 - DNA, 121 bp, Glycine max
  Clone ID: 700943136H1
cagaatttgggaaaggatatacaagaagccaattaacatgtgtgcttttaattacctattcaccaccatgttcttagtgctaacattcttgtctttatccatcaaatgctcaactgagttc

SEQ ID NO: 39380 - DNA, 248 bp, Glycine max
  Clone ID: 700943138H1
caattctacaactccccaaactgcccctcaattgaacacaacatatgctccgaggaagccgtccacgtggcaatgacactcgacacgacatacatccgaggatccatggcggcgatcctttccgtcctccaacactcttcgtgcccccaaaacaccttcttccacttcgtgtgctcctccaatgacaacaccaacgcgtccctcctacgcgccacaatctccaacacattcccctacctgaatttcca

SEQ ID NO: 39381 - DNA, 245 bp, Glycine max
  Clone ID: 700943140H1
gaaaaaaggaaagggagaagaatccgataattgagggtgcggtgtgtggtgtgtagtgtgacagagatggacgccgtagcaacaggttcggagctgaacaagtccggaagcggaggttcggaacgaagcgaggacagcggaggagctggaggaggagggatatttgagtactctgggtgggttatcatttgggagtgaattccattggccatgagtactgtcatctccgattcctcttcattagg

SEQ ID NO: 39382 - DNA, 247 bp, Glycine max
  Clone ID: 700943143H1
agtgcccgaaactttcgacgacacggaggaggacgacggtgctgatggctccaccgccacgaacaccgtccccaccaccaagcctaagaaaggcaaggccgcattgcctctcaagagggacaggacgagatctaagaggttcttggaaattcaacaattgacggagcgtaagaaagagtatgacttgaagacagcaatatctttggttaaagaaacagctaaaaccaagtttgtagaaacagtagaa

SEQ ID NO: 39383 - DNA, 243 bp, Glycine max
  Clone ID: 700943144H1
atgagttcttcggctgctgcaacggttttgatggtgaatttggacaatggggtgagtgaatcgcgcgccaatgaaatgaagtggaggagaatggagtcgttggagaagagcatatcccctgtggctcacaccttgatcaggtttagctatggtgaaattatgtctgctactagaaatttctcaaagggagggtgttggggagaggagcattgagctgtgtttttagagggagagttgggattt

SEQ ID NO: 39384 - DNA, 160 bp, Glycine max
  Clone ID: 700943145H1
agaagctgctgttgtggttgttgatctttctctgcacttgtaaagcacaggaggaacagagctccaccccggtgtacctgcaccataactgttccggcggcaacaccaccgccaacagtgcctaccaactcaacctgcggaccctcctcacttccctgtc

SEQ ID NO: 39385 - DNA, 243 bp, Glycine max
  Clone ID: 700943146H1
gagaggacttcagcagaagacattgctttgtctggtgatggaaaagcagggaagggtggtcaattgaagcagttgacaaaaaagcgtcatggaagacaccataaacatgattgtttatgtgctatttgtgttctaaagcgacgtaggaaggaacgggaagagaatgctcgaattgctagaggaattttggatctagtggtgataagcatgctaatgaggaatcaatacaagtagagagtcccg

SEQ ID NO: 39386 - DNA, 245 bp, Glycine max
  Clone ID: 700943147H1
ggaaattagggctctcaagttgcaatttcggttgcagattggggtggtaccgttgcaattgcaatgatttttgaagaggaaaaaaaagattcggaccacttccgaagtagttccttaaccccgattagtcatttgcatcctccaattttgatggaatatgtttaatctatgatttcgttctcttaatgctttgaagtttatctagggtttgctattgcaatttggtatcagaagattgattaacc

SEQ ID NO: 39387 - DNA, 245 bp, Glycine max
  Clone ID: 700943148H1
cagctcttgtaaaatattatcttgctagccttcctgagccactaaccacattagagctttataatgagattagaagtgctcgatccagtatatattccatgagaaacatactcaagaggctttccagtgtaaactacatgactctggagtttataacagcacttctactccgtgttagccagaaatcacttctcaataagatggatgctcggagccttgctatggaaatggcacctgttattatg

SEQ ID NO: 39388 - DNA, 241 bp, Glycine max
  Clone ID: 700943149H1
agctcatccttgagttaaaaaatggcagcagcttcttccatggctctctcatccccatccttggctggcaaggccgtgaagctgggcccatcagccccagaagtgggaagggtgagcatgaggaagaccgtcaccaagcaggtctcctcaggaagcccatggtacggcccagaccgagtcaagtattgggcccattctctggcgagccccggtcttacctaaccggtgagttcccaggcga

SEQ ID NO: 39389 - DNA, 247 bp, Glycine max
  Clone ID: 700943151H1
gtggagtgggcagtttcccttgaagtggcacataattaaagatgttccaaatagtcagtttcgtcacattattcttgaaaataatgataacaagcctgtgacaaacagtcgagatactcaggaggtgaagttgggacagggggttgaaatgttgaccatttttaaaaactatgaaactgatgtgtccatcctggatgattttgatttttatgaagaccggcagaaggctatgcaagaacggaaggca

SEQ ID NO: 39390 - DNA, 245 bp, Glycine max
  Clone ID: 700943152H1
atgatcgtgaaaccgccagggtaccagagtggatcgcctccggtttctcctgccggttctactcctccgatttctccgttttccggaggaaaagattcgcttcggtttcgaagaaggtcgggatctgatgcgtacgagaagagagggcagaacagatcaggcccttcttctcctttcgatgtgtgacgcattttctcgtacctgaaagctgaggatgtagcagcttttttggcctttgctgtatt

SEQ ID NO: 39391 - DNA, 244 bp, Glycine max
  Clone ID: 700943153H1
tcgcaattcctcccaagtttatcaatctgttcccaagcttttcgtgttcgaatcttcttcttccttttttgtccctttgaaaagctaaggaattgctgaattggggtattacatgaaaccttctgcaagtggttcataagtttcctcttctctgttcttcttagaacaaataatcaaatagaacctcctcaagttgagacaagagtaatggcagccctatagtaattagacaatatcaggacaa

SEQ ID NO: 39392 - DNA, 243 bp, Glycine max
  Clone ID: 700943154H1
caagtactctgcagttgtcggcaatgatgatgcagattttagtcttttaccctttctttgatttcagccatgattgttccttgcatggtgctagttttgcctttcttggtcaagaacttcgcaagatatccaaagaggcacatgttagcattgctgctctctcagcttatctaaatgagttacttgaattttcaccagaaataatcttaaagtgcatgcattgtttgcccaatttgctattcg

SEQ ID NO: 39393 - DNA, 254 bp, Glycine max
  Clone ID: 700943116H1
agcctctgctgcaactagattgcaatgctcaagcaccagcaactgtgccggtaaagttgccacctacaactttgccacctacaaccccaactgcaacatctccatcttccagcacgccactggcgacacaacacaaccacccacagtggtggcatcccctcccaccacgagtacaccatcaaccacatcccagccacctgcaaatgtagctcccaaacctgctcctgtgaaaccatcagctcccaaagttgcac

SEQ ID NO: 39394 - DNA, 269 bp, Glycine max
  Clone ID: 700943079H1
gggtcagaggtgtctaaacagatggagcgaagaaagacaatccagacagagaagaagagtctgtccgatctgaaaagcagcggagaagactaccctggctccgactaccgtccccaagacagaaaaaactggatgtcccatctcgaccctcagaaactccgcatcaaccaaatcgtctggcccggcacccacgactccgcaaccaacaaaattggcatccctctcctcactcgccccttcgcccagtgccaatccctctccatctaccg

SEQ ID NO: 39395 - DNA, 270 bp, Glycine max
  Clone ID: 700943082H1
agaagagacactgaggtcgttggcgagaatgggaagaaagaaggggtatgttgagttcgaggagtcgccgccggacgattttgatccggcgaatccgtacaaggacccggtggcgatgctggagatgagggagcacatcgtgagagagaagtggatccaaatcgagaaggccaagatcattagggagaagctccgctggtgctaccgcatcgaaggcgtcaaccacctccagaagtgccgccacctcgtcaaccagtatctcgagtccac

SEQ ID NO: 39396 - DNA, 268 bp, Glycine max
  Clone ID: 700943083H1
gtcaggacctcgaaatgtccgcttgcagaaacggtaaatgcctctaccaagtctcatatggtgatggctcattcactgtaggagaatacgtcaccgaaactgtgtcgttcggagccgggtcggttaatagggtcgcaatcggttgcgggcatgataatgagggtttattcgttgggtccgctgggcttcttgggcttggtggtgggcctttgtcattaacttcacaaatcaaagcgacgtcgttttcgtactgtttagtggatcgcga

SEQ ID NO: 39397 - DNA, 270 bp, Glycine max
  Clone ID: 700943085H1
gatcacaaaccacattaaaaaaagactcccacgttctcttctctctccgtctctctctctctctcttcatttctcattgactctctctttctctctctctctgcacagtgccaatggcggatccaatcgcgaaggctctgatcgcgtttgcgctcttagcttcccttttgctgtgcttgcaagcttcctccgatgtccccttcatcgtcgctcacaaaaaggcctccctcaacagactcaagtccggcgccgaaagggtctccgtcacca

SEQ ID NO: 39398 - DNA, 270 bp, Glycine max
  Clone ID: 700943086H1
ggacaatcaattggggtaattcctgatggtgttgacaagaatggcaaacctcataaactgagattgtattctattgctagcagtgccattggtgattttggagattccaagactgtttctctatgcgtgaaacggctagtgtacacaaatgaaaatggagaaattgtcaagggagtctgctcaaatttcttgtgtgacctgaagccaggagctgaagtaacaataactggacctgttgggaaagaaatgcttatgccaggagatcctaat

SEQ ID NO: 39399 - DNA, 270 bp, Glycine max
  Clone ID: 700943087H1
gcccttttggacaaagataagacacacaggcgaaatagtgcccagattcttgaacagcttctggaaacagaacgtgaagcacatgcacaggcaaataaccgggcggaggctctctctctacagttacaatctgcacaagccaaaattgattctctccatcaagaactgactaaatttcgactgaatgaaactgcattggacagtaaactaaacactgcttcccatggtaaacgaatgagggtagatgacaacattggtgatgacatggat

SEQ ID NO: 39400 - DNA, 268 bp, Glycine max
  Clone ID: 700943088H1
gaaattgtcattgttgatgcaataggaagtagtggcttggacttgaaggtgccaccttaaacttaaacattctgcagttagttcttttatttatacagactgacccaggtgtgccagttgtatatgctggatttggtgctctaatgatcactacttgcatcagttatttgtctcattcacagatttgggctttacaagacggcacagcagtcttcattggagtgaagactaacagagcaaagatggaatttccagaggagatgaaccg

SEQ ID NO: 39401 - DNA, 270 bp, Glycine max
  Clone ID: 700943089H1
caagcgcatccgcggcgacaaggccaagctcaacttcccggccaccgctccgccaccctccaaaaaagtggtgtcatcatgtgagaagaagaagaagaaaagtgtgagtgcagaaaagaagagtggtgggcgagctcggaagaacgtgtacagaggaatcaggcaaaggccgtggggcaagtgggccgcggaaataagggacccacataagggcgtccgcgtctggctcggcaccttccccaccgccgaggaagccgcccgagcctacga

SEQ ID NO: 39402 - DNA, 265 bp, Glycine max
  Clone ID: 700943090H1
tttgagtcttatggacatgtaactgatgtagtagtcatgtatgaccagaatactgggcgtccacggggatttgggtttatttcatttgatactgaggaggcagttgatagggttttgcacaaatcatttcatgatttaaatggtaaacaagttgaggtaaagcgtgcacttcccaaggatgccaatcctggtgcaagtggccgtatgatgggtggtgctggaggtggtggtgctggaatttgtgggtatcaaggttatggggcat

SEQ ID NO: 39403 - DNA, 267 bp, Glycine max
  Clone ID: 700943091H1
acttctaacacatacactactctctctctctctcttattgtatggccgccaattccagtagccgagggatcaccgccttagggaagcgagtcgccaaccggatctggacttccaacgcacctcctctcacttcaaggaggggagcatacagtagcggctcagtgtacgacaagaaccctgatgatgagatccagtctgggcaggtcccagacgatgtgatccaggcggcaacacaatccggcaaatactgggccccacatccacaga

SEQ ID NO: 39404 - DNA, 263 bp, Glycine max
  Clone ID: 700943092H1
acaccttttccttttcccttccgttggtgccattcgtgcagcaccggatcctctcatttctccggcgataactctcccttttccggcgaattcaccgcttcctcgatatgaatcccgagtatgactatctgttcaagctccttctgattggagactctggtgttggtaaatcatgccttcttctaagatttgctgatgattcatacattgagagctacataagcaccatcggagttgattttaaaattcgcactgttgagcag

SEQ ID NO: 39405 - DNA, 267 bp, Glycine max
  Clone ID: 700943094H1
aacagaaatggtggcaccaaccttgaatgttgttgcttcttcttctctaagactaagactcgaattgccctctcttcttcactcgaagctcaaacaagcacgctttccgtttccgtcgttctcgcttcaaaaccctaccttccgtcctgttatctgcagagcctccgagtcacccaccgttccacctaagaagcgttctactaacaacagaaacgctaaaaacaacagcaaaaagaacagtaagagtaactctgtcactgttgattc

SEQ ID NO: 39406 - DNA, 275 bp, Glycine max
  Clone ID: 700943096H1
ctgaggcaagttttcagccagtatggagaattagttcatgtgaagattccagcaggcaagcgatgtgggtttgtccaatttgcagacaggagctgtgctgaagaggcccttcgggtgttgaatgggacgctgttgggtggacaaaatgtgcgtctttcatggggtcgcagtccttcaaacaaacaggctcaggcagatccaaaccagtggaatggtgctgctggtgctggttctggtggtggatattatgggtatgctgctcaagggtatgaaaa

SEQ ID NO: 39407 - DNA, 259 bp, Glycine max
  Clone ID: 700943101H1
aacaactttcacttggccaatatgcttggcaagggaggttttggtccggtatacaaggggcaattggataacggacaagaaattgccgtgaaaagactttcaaaagcatctggacaaggattggaagaatttatgaatgaagttgttgtgatttctaaacttcaacatcgcaatctagtgagacttcttggttgttgtatagaacgagatgaacaaatgttggtatatgagtttatgccaaataaaagtttggattcat

SEQ ID NO: 39408 - DNA, 257 bp, Glycine max
  Clone ID: 700943102H1
aggatgcagcgcgagctctgtaacagtcccgcgaagttgttctgcgaatcagatcaagccagcctctgttggaaatgcgatgctaaggttcacagtgcaaacttcctcgtcaccaaacatcccaggattcttctctgccatgtttgtcaatcactaacagcgtggcacggcaaaggacccaagtttgtacccacaatgtcagtttgcaacacttgtgtcaacaacaatagtactgagactggaaccaacagaatcat

SEQ ID NO: 39409 - DNA, 253 bp, Glycine max
  Clone ID: 700943103H1
aaatgttcccagatagtgattttctgaacaaagaaattgaaattccaatccctggtttccatccctacaggctcaacctcttcaggttggtttggaggacaatatatgtaatgttgagcactgtaatatcaatgctcctcccattcttcaatgacataggtggacttcttggagcatttggattttggcccttacagtgtatttcccagtggagatgtacattattcaaaagagaataccaaagtggagcaca

SEQ ID NO: 39410 - DNA, 254 bp, Glycine max
  Clone ID: 700943104H1
attaagcaacacacacttcaatttatcagcatggcctccgttcagtgccacaaaacctgcaaagtgagctgccaacaggaaaaccagcacgcctcgtttgggcagaaagtttctgacttgttcaaagggcatcaacataatgaccacagctccaattatgccacccaaaccaaagtgctttcccagtcagggtcagggttaggccccttcaccaccaaaactcaaacacaatgcggttgcccccaaacacatct

SEQ ID NO: 39411 - DNA, 251 bp, Glycine max
  Clone ID: 700943106H1
gtcctgatgatcatatatttgtatactatactgaccatggaggtcctggggtgctcgggatgcctgctggtccttacttatacgcggatgatctgattgaagtcttgaagaaaaagcatgcttctggaacatataaaaacctagtattttatctggaggcatgtgaatctgggagtatctttgaaggctttttcctgaagatatcaatatttatgcaaccactgcttccaatgcagaagaaagtagttggg

SEQ ID NO: 39412 - DNA, 250 bp, Glycine max
  Clone ID: 700943107H1
gcaatcacagctagccactcctccaacacgggccattggtcctagtgctggaaccagttctggaatgccccccgctgttactaatgctgataggcatacaggaggggaagaaggtagacctcctgctttggtttcagtggattcctcgaggcgcagaatgtcagggcccattttaaatactttatcaagtgccaatgccttgggtcagtcaagtggatcatctaggagggttgctgtctctagtagccgt

SEQ ID NO: 39413 - DNA, 252 bp, Glycine max
  Clone ID: 700943109H1
cggtgagggccttccatggcttccgcttgtgcttcctctgcaattacagctgttgccatctctacgccgagttccgggcagaagaatggatcaggaggttgttttcttagtggaaggaaattgagggtgaaaaaggagagagcagcaattggaggacgatcgatgggcactacagtgtgcgcagttgctgagcctgacagacctctatggttcccaggcagcacccctcctccatggcttgatggcactcta

SEQ ID NO: 39414 - DNA, 249 bp, Glycine max
  Clone ID: 700943112H1
gttctacctcatcaccttcaccctcctctccctcctcttacccctctcgtttcttctcctagccaaattctccgatgcgcaatactatctccaaaccctcgcttggtaccattcaccacaacactttccatatgttttaactctcgcccttcacatcaaccctctcattctctacgttcttgtgtcattattagcatggcttccttaatccacggcttaacgggaaaaatcatcattttgagtgactcg

SEQ ID NO: 39415 - DNA, 250 bp, Glycine max
  Clone ID: 700943114H1
taaagtatggcttcgacggcagcgtaccttgctcggcgcgcggccagaaggagagggttcggatcctctaccgccgcgccctcaaagacactctcaactgggccgtacatcgccacctcttctacgacgacgcttcaaacctccgcgaaaggttcgaggagaacagacacgtggaagaccctgataccattgacaggctcataacggatgctgaagcttcctacaacaagtggcgccatcccgatcccta

SEQ ID NO: 39416 - DNA, 249 bp, Glycine max
  Clone ID: 700943115H1
gtgataataaatttgaggttgagagagtgaaagaggagatgggtgcgataacgagcgcggtgatagcagttgtaggagttcttctaggttggatcacaatagagatcgcatgtaaaccttgtcttgaaaagggtcgcgaagcatcgatcgaagtctcgatccagattacgatcccgacgacaccgcattcgcgccccactcaaccccaccgccgcctccgccaccgtcaaagccgtttgagaaattgat

SEQ ID NO: 39417 - DNA, 267 bp, Glycine max
  Clone ID: 700943078H1
tgatttgaggccaggcaagccctgctcaaccaccacacttctcctcgttcacgctacccctttctgctcttcttctacctttcaagttttaaaagtataaagatggcagagacattcctatttacctcagagtcggtgaacgagggacaccctgacaagctctgcgaccaaatctccgatgctgtcctcgacgcttgcctcgagcaggacccagacagcaaagttgcctgcgaaacatgcaccaaaaccaacttggtcatggtcttc

SEQ ID NO: 39418 - DNA, 274 bp, Glycine max
  Clone ID: 700943042H1
gtggtttccacaaagccatttagaatgcgaatcagttggcttaactctcgaagcaacagtgaattgggcccaatagattgggtaggttctggtttttacaaaacctgtggggatttcaggactggcaagcatgaaataactgaatcgttaaattccttttcacacaaggtaaggtcgacaaaaggcaccacgggagttgttcgcatctttcctaggaagggggaagtctgggctctctatagaaactggtctcctgattggaatgaaataactc

SEQ ID NO: 39419 - DNA, 272 bp, Glycine max
  Clone ID: 700943043H1
ctttcatctggtattagaggttatgatggagcctaccgccacccagctatgtaccgcagacccgctttggggaattactcggatgctgcattgcagtttcctgtgatgcccacatgcaaagctaccatggatttgtctgctactgctacatctgcctcacccgtctttgttgctgctccagcagagaaaggccattttcttttagactttctcatgggaggtgtttcagcagctgtctccaaaactgctgctgctcccattgaacgtgttaa

SEQ ID NO: 39420 - DNA, 272 bp, Glycine max
  Clone ID: 700943044H1
atcgatttctctgcttctactcagtagttcgttgaattcaccggtttgttcaactcaaatcgtgcaatccttctttcaagctcgcgatttcctcttctggaattctcaaggtagttttagccttaggttccaagttccaagttgagggtggaatttgaaacactaaattggtgcattcaactatacaacacagaataacaattcctccactcctttactttccaaattgaaggatatgctgagtattggacaacacgatatgatttccttct

SEQ ID NO: 39421 - DNA, 266 bp, Glycine max
  Clone ID: 700943045H1
catgctttggcgcttcatagtgatgatcgctacttggctgagccagcactggacactgtgaagagaatgaagttatatgcagagtctcttgcacgctttcaaggagggtcaccttacatatatcctttgtatggtttaggagagcttccccaggcatttgcacggcttagtgctgtttatggtgggacatatatgttgaataagcctgagtgcaaggtagaatttgatgaggaaggaaaggttgttggtgtcacatctgaagggga

SEQ ID NO: 39422 - DNA, 277 bp, Glycine max
  Clone ID: 700943049H1
gcaccaacagcatcggcggcgacagtcactctccgacaacaacacttccgcggcgaaaaatgtctctggtggcgaacgaggatttccagcacattctgcgtgtgctgaacaccaacgtggatgggaagcagaagataatgttcgctatgacctccatcaagggtattggaaggagattcgccaacatcgcttgcaagaaggccgatgttgacatgaacaaaagggctggtgagttgagtgctgcagagttggatagtgtgatgactgtggtggcgaa

SEQ ID NO: 39423 - DNA, 275 bp, Glycine max
  Clone ID: 700943051H1
ccaagacatagcaaacgatccagactcttttttcatttgcagcatcaaaatgagtggtagcaacgatggtggcggcactggagctctaggtttttgaaggtggctagtgcagctgccgctacagccgccgttgccggcggtttatatgccattctttcatcctcaacctctgctagctctgagatggaagtgccgtttggcagcgcacggcgtgagagcaaagaacgtgacgatggtggctccgggtctcatcctcgcgagggtgccaccacggt

SEQ ID NO: 39424 - DNA, 275 bp, Glycine max
  Clone ID: 700943052H1
ggaagacgccgccaacaacttcgcgcgtggccactacaccatcggaaaggagatcgtcgatctctgcctcgacaggatccgaaaactcgccgacaactgcactggtctccagggcttccttgtcttcaacgccgtcggtggcggcaccggttccggcttgggctcgcttctcttggagcgtctctccgttgactacgggaaaaagtcaaagctcggtttcaccgtttatccttcgcctcaggtttcgacctcggtggtggaaccctataacagcg

SEQ ID NO: 39425 - DNA, 275 bp, Glycine max
  Clone ID: 700943054H1
tgtttcccctattattatctcgctctcacaaaatcatggcattctctagtgctttgattctgtggtcgttgctagcaatcaacatggccctgccaaccctcgcaaccgtctacaccgtgggagatacttcaggttgggcaattggtactgattatagcacttggactggcgacaagatcttttcagtgggtgatagtctcgcgttcaactatggagctgggcacacagtggatgaagttaaagagagcgattacaagtcgtgcactcgcaggaat

SEQ ID NO: 39426 - DNA, 271 bp, Glycine max
  Clone ID: 700943055H1
ctaacttgtagcagcgatacctcttctcttatcactaaaaaatgaccaagagaaccaagaaggccggtattgttggaaaatacggcacccgatagcgtgctagtttaaggaagcaaatcaagaagatggaagttagtcagcacagtaaattcttttgtgagttctgtggaaagtacgctgttaagaggaaggccgtgggtatttggggctgcaaagattgtggaaaagtgaaggctggaggtgcttacacattgaatactgcgagtgctgt

SEQ ID NO: 39427 - DNA, 275 bp, Glycine max
  Clone ID: 700943056H1
cttcaactcatctgcttcccctagcaaccttcttcttacttctctccgcttcttatctccagattgctggggcggaagcacaaccgttgactagtctcaagcttaactctcatattcttcaggagtctactgctaaagagattaatgaaaatcccgaggcaggatgggaggctgctataaatcctcgtttctccaattatacagttgaacaatttaagcgccttcttggagtcaaaccaatgcctaagaaggaacttagaagtacacctgctata

SEQ ID NO: 39428 - DNA, 272 bp, Glycine max
  Clone ID: 700943058H1
gctccttcttctctaaacactcatctatgactacctttccctcccctccttcaccatcttcttcttcttcaattccttctccaagatctagcatgttttactatgctggaagtgaagatcactctgaggagcctcacttcctccaagcttgttttctttgcagaaaaccactcggccaaaaccgtgacatcttcatgtacagagggaacacaccattttgtagcaaagagtgcagacaggaacaaatagagattgatgagtcaaaggagaaa

SEQ ID NO: 39429 - DNA, 267 bp, Glycine max
  Clone ID: 700943060H1
ctcgagcgattgaatcggcggcggaaatgctttatggtatgattcatgctcgatatgtgatgaccagcaaaggaatggctgccatgcttgacaaatacaagagctatgattttggtagatgcccaagagtttactgctctggacagccctgccttccagttggtcaatcggacattcctaggtcaagtactgtgaaaatatactgccctaggtgtgaagatctttactatccgcgttccaagtatcaaggcaacattgatggagctt

SEQ ID NO: 39430 - DNA, 269 bp, Glycine max
  Clone ID: 700943061H1
agtgagaaagagagagagagagagagaaactgagagaaattcgcaaaccctaatttcggaaagatcggcgatggctgcctccaaggatcgcgagaagcttcgtctacatcgccaagctcgccgaacaggccgagcgatacgaagagatggtggaatcaatgaagaacgttgcgaatctcgacgttgaactgactgtggaggagcggaatttactttctgttgggtacaagaatgtgattggtgctcggagacatcgtggaggatcctgt

SEQ ID NO: 39431 - DNA, 257 bp, Glycine max
  Clone ID: 700943063H1
ccctcatggatcatggttcctcttgctctcttgctgtttttttccagttattacaaactggttggatttatgttcttctgctctctcctcttcacatccctagcactgcttttgtctacttttcttctcttcatgtggaagcgcaaggctgaggcaattggtttcagttttgaggagaagaagacaccacaccatggaagggagagtgttgttgctattgcaccaacccctatgcacaaggatgtggaaactattgt

SEQ ID NO: 39432 - DNA, 278 bp, Glycine max
  Clone ID: 700943065H1
cttgtattcacatttcaacaactatagccatggctttctccacctcaaaggcactacttgtccttgcctgctccttctgcctatttgcatcttttacttttggacgcgatttctccattgtgggctattcatcggaggacttaaagtccatggataagctcattgaactctttgaatcatggatatcaagacatggcaagatttaccaaagcattgaggagaagctgcataggttcgagattttcaaggacaacctaaagcacatagatgagagaaac

SEQ ID NO: 39433 - DNA, 189 bp, Glycine max
  Clone ID: 700943067H1
tggcagtgtttggttggcaaccttgtcctttcaggaaacataaaaataagctatggtgagtgagtgaatgagtgagtgagagagaaacaaaaaacaagtggtctaatggcagattcagaaaagtacaacaagaaaccctcttcatcatctttcttcagttctccgaggttgttcaccaatttcactccg

SEQ ID NO: 39434 - DNA, 274 bp, Glycine max
  Clone ID: 700943068H1
caagaatggcacttcgttgcttggtgatgtccctttctgttctcttcactcttggtcttgcgagagaaagccatgccagagacgaagatttttggcatgctgtttggccaaacactcccattccaagttcattgcgagatcttctaaagcctggccctgcaagtgttgaaatcgatgatcaccctatgcaaattgaagaaacacagtacccgaaaaccttcttctataaagaagaccttcatccaggcaaaacaatgaaagtacaattcagcaa

SEQ ID NO: 39435 - DNA, 271 bp, Glycine max
  Clone ID: 700943069H1
ggttgaaatacaggctcctgaacaagctcttggtggaatctacagtgttcttaaccagaagcgtggacacgtgttcgaggaaatgcagaggccaggtaccccactatacaacatcaaggcatacctccctgtcatcgagtcctttggtttctcgagcacattgagggctgcaacatcaggccaggccttcccacaatgtgtgtttgatcactgggacatgatgtcttctgacccattggaggctggatcacaagctgcacagcttgtcact

SEQ ID NO: 39436 - DNA, 86 bp, Glycine max
  Clone ID: 700943071H1
gtaagtaggagttaatgacttttacctacacacggtacatgctaggggaaacctatagtgacagacaattagccgtcattatatgg

SEQ ID NO: 39437 - DNA, 272 bp, Glycine max
  Clone ID: 700943072H1
gcatcccttgcagcgaggtcagtgctacaacttctggggggcaatagttcctgttggtgctcacttgaaatgatttagttgttactccattcttgacattttttcaaggttttgctaccagcagtgcagcagcctagacactgataaattcagaagacatcctttcattccatcgaataataatttcactacatttcaaaatcactgtgattttgttctggtggcacaggcttaccctcatatattgtctcaagattgatagctagatcttc

SEQ ID NO: 39438 - DNA, 268 bp, Glycine max
  Clone ID: 700943073H1
tggttctagatcgcgatctagaactagcaagtttaaattatactcatagtaatcaatctgggagtattgatcagtgttccagaccttgagaaggagtaatagagagtggatcatctgcttctgctgtctattccaatttaaagcctgatctttcaatgtcagatggagaaatatgcttggacaagctatcaatcagagaactgcatgaactgtttaaggtaacatttggtcgggaaaccactgttaaagacaaacagtggctgaaaag

SEQ ID NO: 39439 - DNA, 269 bp, Glycine max
  Clone ID: 700943075H1
cgttatctgaagatgatgcatttgcctttctgaagggtgacaactatgctgattctgtgacatattttagcttctccgaagcacttcggcaggtgaagttaattggtgtgccttatggactacgttttcaacagttgcaagatctatggaatcaagcagatgctgatggaaatggtgtcatagactttgaagaattcaagcagaaaatatggaattctacatgtccagagcatgtgttggaaaatctgaatggttgcacggaagattgt

SEQ ID NO: 39440 - DNA, 269 bp, Glycine max
  Clone ID: 700943077H1
ggctcgagccgaatcggctcgactgggatttggactgaatgaaaatataaagaaagagaagagagaaataattttccgggaaaattcaagttccaatcggaaccggaaatgaatagggtttggtttctactattccttctgctgatctcgaaatgcgatcatgtgtggagctcttacgcgggttccgctagctccgtcatcaacccttccaaggtcaaacagatttcctggaagccaagagctttcgtttatgaaggtttcctcacgga

SEQ ID NO: 39441 - DNA, 272 bp, Glycine max
  Clone ID: 700943041H1
gcacccgatctgtgtagcaaagattattggtgagtgtttgcaaggcatcagcagcactctttgctacacatatgctcggtgcacccgatctgtttcaattgtgcctcctgcatactatgctcaccttgctgcattccgtgcaaggttttacatggaacccgagacttcggatagtggctctatgacaagtggtgctgttgcaggccgtgggatgggtggcggcggtggtggtggtgtagggcgtacacccgggcacctggtgctaatgctgc

SEQ ID NO: 39442 - DNA, 279 bp, Glycine max
  Clone ID: 700943005H1
gtatccttgcgtccatctcaacatgtttgtcccagaaaaagatctgagttcagccatttagtgctgctgtcctcttctgcaaaggactaaccaggtccggcgggatatttggtggtgcgtctgtttttgtaattctttgattttgttaagttacttgttttatgtcagatgccatccttcttcggtggcgggtgtactatagtcctaaataggtctcaaatttcttagaaatctttgtgggagggagggatgtcatcaagtcgtttttagttgaccgtt

SEQ ID NO: 39443 - DNA, 281 bp, Glycine max
  Clone ID: 700943006H1
gtatgaggcaatctacagcttctactttggggactacggtcacatttcagtgcagggttcatacctgacctatgaggacacttatcttgctgtgactggtggatctggcatctttgaaggggcttatggtcaggtcaagctgcatcaaattgtgttcccctttaaactattctacacattttatcttaagggcatcaaggacttgcctcaggagcttctttcccagcctgttgagcccagcccagctattgagcccagcccatctgccaaggcctgtgaac

SEQ ID NO: 39444 - DNA, 282 bp, Glycine max
  Clone ID: 700943007H1
gttcttcacatcatcctcatcatcttcttcaatcagttgactcttcgttcctccctctattctttcggatggagcccatggacatcgttgggaaggccaaggaagacgcttctcttcctaaagcgacaatgacgaaaattattaaagagatgttgcccccggacgtgcgtgtcgccagagatgcacaggatttattgatcgagtgttgtgtcgagtttataaaccttgtctcgtcagagtccaatgaagtctgtaacaaagaagaaagaaggacgattgcac

SEQ ID NO: 39445 - DNA, 282 bp, Glycine max
  Clone ID: 700943008H1
cttgattccgctctgccacgactgagaaaatagcgacgcggaaacacgctcgtcatcacgatcctgccatccagcgcggcgtgtccagcgattccgctctccgatgagtctgcgcaggttgaagaatcgcgaggccagctgccggtgaagaatcgcgcgatttgtctggaagtcgcgattcatccccgatacagagattcaaccacgattcaggaacaaaaacgagacaacctcctattcgtatcggtagcagctggaatcgtatcgaatcgtgtgaatacg

SEQ ID NO: 39446 - DNA, 281 bp, Glycine max
  Clone ID: 700943009H1
gcagaaggaaaaagtgactgcagagaggtatcgaaaaaagtaactcggaaatagtttcactctgatcaaaatcaaactgaggtagtgttcaatttctctcatcgctataatagatcatcgaattacagatctttgaagattccatttagtgtcgaataacaacggaatcaaatcaaatcaaatcaaatcaatctcgattggaattttaggaatcgaggaaggaattagggttagggtaaggattgagaaggcatataggagaagaagtagtagaagaagaa

SEQ ID NO: 39447 - DNA, 276 bp, Glycine max
  Clone ID: 700943014H1
ctcgtgtgacaacatcaaataatgggaaaagggaacatggaactcgagacaaacaaggtctatgactacgaggatgcacgaggggacgttgaagtcccagataccgctcatcagataagcactgattcatggtttcaagtggcttttatcctcacaaccggaatcaacagtgcctttgttcttggatatccagggaccgtcatggttcccctgggttggatcgggggtgtgattggtctaattcttgctaccatggtgtcactctatgcaaatgct

SEQ ID NO: 39448 - DNA, 276 bp, Glycine max
  Clone ID: 700943015H1
aattaacgaatgcagagttttcaattggagaagcggactgggaacaagtgttacatgctttccgctagagatctgagcattatatggggtgacactactcattattgggagtggacaaccctaccagagtccaggttcgaagaagttgctaggcttcgagctgtgtgttggtttgacattactgggaggatgaacacccgcgttttgtcgccaaatactaattatgcagcttttcttgtgttcaagatgatcgatgccggtggatttcactacgat

SEQ ID NO: 39449 - DNA, 283 bp, Glycine max
  Clone ID: 700943016H1
ccgagggcatgcccggcaaccgctactacggcggcaacgaattcatcgaccagatcgaaaacctctgccgctcacgcgccctccaggccttccacctcgacgcccaatgctggggcgtcaatgtgcagccctactccggctcccctgccaacttcgccgcctacaccgccgtcctcaacccccacgaccgcatcatggggctggatctcccctccggcggccacctcacccacggctactacacctccggcggcaagaagatctccgccacctccatttactt

SEQ ID NO: 39450 - DNA, 279 bp, Glycine max
  Clone ID: 700943019H1
gaactctgtcccagccattacatttctcatggcagtcatactcaggatagagcaagtgaggctgaacagaaaggatgggatagcgaaggtggcgggaacgatattctgtgtggctggggcgacggtgattacactatacaagggtccaacaatatatagcccaagtccacctctacagagtgagagctcagtagtagttgagtttgggacactctcatcactgggagatgcaaaggggaagaactggacgcgtgggtgcctctacctcatagggcattg

SEQ ID NO: 39451 - DNA, 279 bp, Glycine max
  Clone ID: 700943020H1
cagaattttcgcagtccaagaggacacgcatcccaaaccgttttgatttggaacgtgtcacgctctaaatttacatggcatattgtctttaactgagtcaatttcgcttaataaaacctctcttcactcctctgctttagcaacccaaccccctgttcctgtgtgtgtgagtgaccgagtgagtttgtttttctcagctgatatatatggcgcttgatcgctccattatgagcaaaacgacgtggtacagcgtcgtattatggatgatggtggtgctgg

SEQ ID NO: 39452 - DNA, 276 bp, Glycine max
  Clone ID: 700943022H1
gcgagacgtgctttctttttccatcttttgcgttacggcactcaacattttacactcttttcttcttctcgttgttgcttcgttgttgaatcatggatcagaaggtcgatttcagcgctccccattccatgggtaccactatcatcggcgttacttacaacggcggtgtcgttctcggagccgactctcgaaccagcaccggagtgtatgttgccaaccgagcatcggacaaaatcactcagctcactgataatgtatacgtgtgtcgctctgggt

SEQ ID NO: 39453 - DNA, 278 bp, Glycine max
  Clone ID: 700943024H1
aaaaaagatgcgagtttgttcaagggctgttgctgtccaccatacttgatgacaatttataaaggaaattcatggaggtggctgcttcagtagtgggcgaattcatatgcggtacctgctatgtatggtttgcctgatgaaattgtctatgtatttgatcagagtggaataataagtagtagaaaatgaatgtaatttatgttatatgtgaactgatgtttttagttcaagagtttcatcatctcctttaatctcagatcataaagcttaaatgaaaa

SEQ ID NO: 39454 - DNA, 277 bp, Glycine max
  Clone ID: 700943026H1
cacacaaacccgtccctcacactctccaaaccctagcggcactacacactagttctatcgctatctccccaagatgtcgagcgccgatcccgagcacagagaagaggaggaggcacccgccgttggcgacgacgaggacaccggagctcacgtcgctccaatcgtcaagctcgaggaggttgctgtcaccaccggcgaggaggacgaagatgcaatcctggatctcaaatcgaagctttaccggttcgacaaggacgggaaccagtggaaggagcgt

SEQ ID NO: 39455 - DNA, 273 bp, Glycine max
  Clone ID: 700943028H1
ccattggctgttctggaaacctttcaattgcaatttttgcaatggattccttgcgtcagttgtcaatgaaatttctggagcgggaggagttggctaattataattttcaaaatgaatttatgaagcctttcgtcattgttatgcgcaagagtagtgctgttgaaattagagaacttatcattagatgtgtctctcagatggttttatctcgtgtcaacaatgtaaaatcaggatggaagagcatgttcatggtattcacaacagcggcatatg

SEQ ID NO: 39456 - DNA, 272 bp, Glycine max
  Clone ID: 700943029H1
cgaactattgatcggaagcaagaagtacctcatgatggtgccatgtgtgaccttctatggtcagatcctgaagatattgtggataactggggtcttagtccccgcggtgctggttacttatttggtggcagtgttgttacttcctttaaccactcaaataacattgactatatatgtcgtgcacatcagttggtaatggaaggatataaatggatgttcaataaccagatagttactgtctggtcagctccaaattattgctacagatgtgg

SEQ ID NO: 39457 - DNA, 275 bp, Glycine max
  Clone ID: 700943031H1
tccctcatggatcatggttcctcttgctctcttgctgtttttttccagttattacaaactggttggatttatgttcttctcctctctcctcttcacatccctagcactgcttttgtctacttttcttctcttcatgtggaagcacaaggctgaaggaattggtttcagttttgaggagaagaagacaccacaccatggaagggaaagtgttgttgctattgcaccaacccctatgcacaagaatgttgaaactattgtgacacaagcaaagggaa

SEQ ID NO: 39458 - DNA, 283 bp, Glycine max
  Clone ID: 700943033H1
caacaacccaccatagttttaaggccatttaattggttcttattgtgtttgtgagtgtgctataaatccttcgtggtttttggtgaccctttgggttctatagtgagtgcaaggtaacccactttggattggaaggttgtcgcaatggggaaggttgtgttgttgtttctttgcatggtgttggtggtggtgtctttggcttgtgctgattcaattgagaagcttgaggttcagaagcacttgaagaacttgaatagacctcctgttaggtccatcaagagtc

SEQ ID NO: 39459 - DNA, 280 bp, Glycine max
  Clone ID: 700943034H1
gtttcgttcgtcaccatgactttcaagcgcaggaatggaggtcgcaacaaacacggccgcggccacgtcaagttcattcgatgctccaactgcggcaaatgctgccctaaggacaaggctatcaagaggtttctggtgaggaacattgttgaacaggctgcagtcagagatgtgcaggaggcttgtgtctacgaacaatacacgcttccgaagctgtatgtgaagatgcagtattgtgtttcctgtgctatccactctcatgttgtgagggttcgatccc

SEQ ID NO: 39460 - DNA, 280 bp, Glycine max
  Clone ID: 700943035H1
ttgcaatcaaattagttcattctctttgcgcagttccctacctctcctttcaagatgcagatgttcgtcaagaccctcaccggaaagaccatcacccttgaggtggaaagctctgacaccatcgacaacgtcaaggccaagatccaggacaaggaaggaattcccccggatcagcaacgtctcatcttcgccggaaagcagctcgaggacggccgtaccctcgccgactacaacatccagaaggagtcaactcttcaccttgtccttcgtctccgtggtg

SEQ ID NO: 39461 - DNA, 275 bp, Glycine max
  Clone ID: 700943036H1
gttgctgagaatgttggggccaaaatcggttcttccagtcaaaatttagaaaacagtgtagtatcatcggactcgggcgaggttgagaaatcaaaacccagaagtgggtccatcaacgacgatcagaagctgaacaacggtgtcttcaaccaccaagatagagttcctggcactatgccagtgcccaatagcaattataactacaatgcccaaatgggtcagatgcacgcaaatggggtgaacaatgatgggtatgggatgaatggggtcatgag

SEQ ID NO: 39462 - DNA, 277 bp, Glycine max
  Clone ID: 700943037H1
aatttctctctcctctctctctctctctgagttctcctttctctctcttgagttaccatttctcattcattcataatgcactaatcataacaacaccgttcagctcaacaacaaaaaataaaataaatcataacaccgttcgttcatcaatggcggttccgctgcattcctagattgctctctttttcaccaattttcattcgttgcgtgtgtatgttcgctgagtgcgttagttattacagcaatggagttcgagcaccccaccgcgacgcctctc

SEQ ID NO: 39463 - DNA, 276 bp, Glycine max
  Clone ID: 700943038H1
cgccaccgccatacgcggcgccatcattctcgcaaagctctctgttattcctgtgaggagaggctattggggtaacaagatcggaaagccccacaccgttccctgcaaggttaccggaaagtgtggctccgtcaccgtccgcatggtccccgcccctcgtgggtccggaatcgtcgccgctagggtccccaagaaggtcttgcagttcgctggaatcgatgacgtcttcacttcctccaggggttccaccaaaaccctcggaaatttcgtcaaggc

SEQ ID NO: 39464 - DNA, 278 bp, Glycine max
  Clone ID: 700943003H1
agcaaacaagtctccttacatctgcgcccagtccatattccaattccgtgtgcccattcacttcatcagaccgaccacgcctaaatcccaatttccccccattagggtttctctctctccaattcatgttctctttttcttaattcattctcttctattcgattcgattcttctatggaaccgcagcttcagcccaagctggagcccgcgccagagcttgtgagcgctggcgctgaggattccgagaagtcgcatgtcagtgatgtcacggaggttcg

SEQ ID NO: 39465 - DNA, 254 bp, Glycine max
  Clone ID: 700942964H1
gcaggcagtgatagcaaagagaagatcatttcataatcagactcaccgtacttcgccatggctgctgttccctctactttcgctctaaccaaatctgcattgtccataaacaagctggaccactctctggtcaagatcaaaccatacagcttctctctgaatctaaaccgtctagggaggatggaaacatctttaaccagaaggcctctaacaattcaagccacatatagtgatggtggaaggcccagcagtgc

SEQ ID NO: 39466 - DNA, 214 bp, Glycine max
  Clone ID: 700942965H1
attgtattggagaaggaatgaatacatacaaatgccaacaaaggtttctattattacatttggggaagaataaatcagggaaagagagtaatattcaataaaaacctttgttggcatttgtatgtatttattgtattggagaaggaatgaattacttaaagaatgatatatagttcaagaattggacgagagaaaaagagaaaaaaggggggcg

SEQ ID NO: 39467 - DNA, 260 bp, Glycine max
  Clone ID: 700942968H1
attttattctccaccacttttcttctcagtttttgtagccaagattgtttttccgttttcacaaagacccttgtagagagatccattttgaaagtgcattcattccgaatttgatgttgttggttaaagttgtcaagttggacttagtttccttaccaccacaaaattcattagcaagtgtaataatcctcctggaataatttttccatctgctattagttttccacccaaaaacaaatcaggttcaatatgtgatggaa

SEQ ID NO: 39468 - DNA, 67 bp, Glycine max
  Clone ID: 700942969H1
cgaaaatctttgtttctctgttgttatggctgtgaatttacatcaatggattgtatttggtcttcac

SEQ ID NO: 39469 - DNA, 260 bp, Glycine max
  Clone ID: 700942970H1
gtttcagaaggaatgggacacaagctatgtaggattcacagttgatggagctaagtggctagtggataacacggatatcaaacttgttggaattgattacctatctgttgcttcttatgattacttgattccatctcaccttgtttttctaaaagacagggagatcattctcgtggaaggcttgaagcttgatgatgttccagcaggattatattcagtccattgcttacctcttaggttggctggtgctgagggatcac

SEQ ID NO: 39470 - DNA, 263 bp, Glycine max
  Clone ID: 700942972H1
cgcataaaagacacagagacagtgttcttagcgccgccgttgccctaccatcttcatattattctattgcctttctttcacgtttttctggtttttaagcccttccagtgccctatttacgcttatacccttctggttatgatagcttccattcggcgtcaccagagagccgaagctcttggcttccacacatactttcggtcccgtcgattgagatacaaagcctccaagccagccgagccaatcctcaaattccaacttta

SEQ ID NO: 39471 - DNA, 258 bp, Glycine max
  unsure (1)..(258): unsure at all n locations
  Clone ID: 700942973H1
accttgggaacttggcgttgctactggacctgacttcgccgcggttatgattctggagaggtaagcgcgtcccgccggatccgacgtcgtttcgtgcgcgncgtcgtccaagagggactacccctcctcctcctcctacgcggtggtggcgcgtcggaattcgaactcggagaagaacggcgttgatttcgacagtgacgaggaggaggaggatgctcagtagggggtagccagctgagtagggttcttagactgcta

SEQ ID NO: 39472 - DNA, 256 bp, Glycine max
  Clone ID: 700942974H1
cgagaggctgctcgtaagactcggttgaggaaaaaggcctatgtgcagcagttagaatcaagtcgtttgaagttgatgcagttggagcaagagcttgaacgtgcaatacagcagggaatgtatatagtcggtgggttggattctaatcatctgggctttgctggatcagtaaattcaggaattacaaccttcgagatggaggtatgacattgggtaaatcactaaagtagtccaatcagagctctgggttatgttt

SEQ ID NO: 39473 - DNA, 250 bp, Glycine max
  Clone ID: 700942975H1
cggctcgagctcgagccgttctgatggaaattggcatagagctaacaaaggggctcctgagcagataatcaccctttgcaactgcaaagaggatgtcataagaaaggtccatgctgtaattgataagtttgctgagcgtggacttcggtctgtaggtgtcgcaagacaggaagtacctgagaagtcggaagatagtcccggtggaccatggcaattggttggttctctacgattgtttgatcctcccagg

SEQ ID NO: 39474 - DNA, 256 bp, Glycine max
  Clone ID: 700942976H1
ctattactcagcagctgcgccttatggagaaaggtgttgatatattggttgcaactcctgggcgtttggtggatattattgaaagagaaagggtttcgttgacaaagataaagtatcttgctttggatgaggctgatcgtatgttggacatgggttttgaacaccaaatacgcaagattgtggagcaaatgcagatgccctcgccaggtattaggcaaacattgttaggttaaagccacgtttcctaatgatatac

SEQ ID NO: 39475 - DNA, 257 bp, Glycine max
  Clone ID: 700942977H1
ctttgtttgaggaaattttcaagtgcagatgcatttgttgaagctcatcagtggggatgatggttctttgtgattgattggcttgccaatcttggagaaggctgtgctatgttaaaaattcaatagtacgatatgaagtgtgcatgacaccaatcaggtagactacttcactgatctgggataccacatgtggtcttgtgacatgccatggtatttgcatggtctatgtgtatagtgaaagttgaaacatttgttgc

SEQ ID NO: 39476 - DNA, 254 bp, Glycine max
  Clone ID: 700942980H1
ttttacgcgacactggaaagtacttctgtcttcttgctaggtctacttgaaggcatattgaatgataatgattaatgagcttgtttactaatttgttgtgtcaaggacatgctttatgatttgttaaattgcatttgggattaataccttgtatgttttttgtaagaggaattctcagccaattttaacaaaagatgcaggaatccccagagccaagacatgaattttggggtggccaacgagtacatgcatct

SEQ ID NO: 39477 - DNA, 257 bp, Glycine max
  Clone ID: 700942981H1
tcaaactagtgatgcagttgatgtttactccgtgctacagcctggaattattgatccatatacagaagatcacaatcctggtggaaatccgaccttgggagtttttaataatcccagtgaagatgattttgggatgccccccctctggccattgcaatctggaactccggcagtctcaggattccaattattcagttctgaagtggaggatgtttcagatgcattgattgatttgcatcatggcaatattaattgtt

SEQ ID NO: 39478 - DNA, 253 bp, Glycine max
  Clone ID: 700942982H1
taggtaggaaccacaatttgtatggtaggagggaaggtgggagaatggcttctggtgagatgagcaatgtgggacttgttgatcatcttgatcgtcctgggccaccggcccggagtcacctccattcgggttcggggaatgagaccagtggcattggtgaagttggtggtagtgatagtaagcacaagggaaatgggccattgtggatgggaggtgtttcctgagtctggtggaagggttgctgatgttcgag

SEQ ID NO: 39479 - DNA, 253 bp, Glycine max
  Clone ID: 700942986H1
gaaggaacaaaagtgaacagtgatcagataaacaagaaggctgaggcagagttgactgtgaatggcaatcttgggagctgaactggtgaggtcaaatgcctggagcagggaatagattaataagctctcagcatctctcttctcattctggcccctttaaatctgtttgaaaatgactagtttttgttaatgttatttatctgattgtttattaaaacaacaatatacgtgtatagagcatagccctatcgtg

SEQ ID NO: 39480 - DNA, 257 bp, Glycine max
  Clone ID: 700942988H1
cgctaaattactttctttccattttccttcgttttctctctctttctcagtttctcagtttctcagtcatcaccatcgcagcagcaagatgtggaaccaaccattcggaaaaaccgatttggaaagcggttctcggcctctgtatccgatgatgctcgagagccctgaactgcggtggtcgttcatcagaaaagtgtactccataatcgccatccagttgctcgtaaccatcgtcgtcggcgccgtcgtcgtcaccg

SEQ ID NO: 39481 - DNA, 258 bp, Glycine max
  Clone ID: 700942989H1
gattgctagaatggaatttcgatgctcagtcatctcttttaccattctcttctctcttgctcttgcaggagagagccatgtccatgcatcgctacctgaggaagattattgggaagctgtttggccaaacactcccattcccactgcactgcgagagcttctaaagcctctccctgcaggtgttgaaatcgatgaactccctaagcaaattgatgatacacagtacccaaaaacattcttctataaagaagaccttca

SEQ ID NO: 39482 - DNA, 248 bp, Glycine max
  Clone ID: 700942990H1
acagtctgtcaaacatctatgtttctgcttttttgtgtggaaaactagttgttctgatcttcctaaaagttgaactggcttttcttcttttcctggagttgttgccaaccaaattattcctctcttcacttactactactttcttctttctttctccacctgaagtagttctccacaacttggaaggtgatcatctccaattttccatcatggctactgagacttctgcatctgatcatggctctatt

SEQ ID NO: 39483 - DNA, 257 bp, Glycine max
  Clone ID: 700942992H1
gaactctataacagcatggtagaggaagagggcccaaatggtaaaaaagatgcctttaaggcatataaagctgcccgagaggaacatgaacacactaatgagttggatgaaggggataaggtgtcatcagcactcattgggagagttgatgctatgcttcaaaatcttgagaaggaaatagatgacgtcgatgcaaaaattggtgaccgttggaggctgctggacagagattatgatgggaaagtaactcctgaggg

SEQ ID NO: 39484 - DNA, 254 bp, Glycine max
  Clone ID: 700942994H1
caaattacggtcccttcttctaattgtgtgcgagtagctgttcttctgcttctgctttacaagttttgttgccatggaagcagagttggataccgagcagcagcagcaaatgacggaaggaagctattcccaaactatgcaaattgatccaaaaagggctcgatttccatgctccgttgtgtggtcaccacttcctgtaatctcgtggttcattccttgcattggtcacattggcatctgcagagaggatgggg

SEQ ID NO: 39485 - DNA, 248 bp, Glycine max
  Clone ID: 700942995H1
cagtgttgatgatcatcagaagaactgcctaaagtggtttccatctgttcatcgaattttagtccttgatgggattcaggatcctggtaatcttggtacattgctcagatcagccgtggccttcagatgggatggagttttccttctccccggctgctgtgatccattcaatgagaaagctcttcgggctagccggggtgcctcgtttcagctccctgttgtttctggcagttggaatcacctggagt

SEQ ID NO: 39486 - DNA, 252 bp, Glycine max
  Clone ID: 700942996H1
agaaaaatgcgcttaaactcgaatgttttatagcaaaaaaaaaaaaaaaaagtagttaaaattgaaccccacaagcggaaaaagagaaaaaaaaatttgggtatcagattcagaagcccacgcgaaactggggggctttggactaaacggcggggaggttctcccagcggaagggctcaaggtcttcggaaacggggcaatacccggcgagcgtgaccttgtcgttggaggcggccacggagccaaactcga

SEQ ID NO: 39487 - DNA, 291 bp, Glycine max
  Clone ID: 700943001H1
ggaacctcaaccgtgacttcgattctgccactctcaacgatttcgatgtcctggaagtggaggagatggagaaagtggtgaggcgcatgtgggatgtgtatactcaaagcaagagtggcaggggaagtggcttacctcgtttttggagtgatgcttttcatgcggcttacgaccacttggtcagtgatgttcagagcgtccgagatgctgctgtctccgaaattgccaagatatccctccattctcttcctctgcaccacctcaaatcacattccattgtgcagaatatca

SEQ ID NO: 39488 - DNA, 289 bp, Glycine max
  Clone ID: 700943002H1
cagaacctttcaatttctctctcttctgctctcactctctcacttgggagtattttgaagttgattatttcatctagaaaaggactctcatgttactcaaatgcttagcagcaatcagcagcagctacaccaccacgtccaattcgcttttagtgtttgcttcctcttccctctccagtcctgccaaaaccaagttcctgccctcactttctagattttctgtcaagcgtctctgcttcctttcccaaactcgtccgcacatttccgtgaacaagccctccatgaacct

SEQ ID NO: 39489 - DNA, 262 bp, Glycine max
  Clone ID: 700942963H1
gtgggtaatgaatgttgttccatctcacaagccaataactcttgatgcaatctttgacagaggtcttattggagtttatcatgattggtgtgaacctttctcaacatatcctcgcacctatgacctgatacatgtggcaagcatggaatcacttgtaaaggatccagcctctggcagaaacagatgtacccttcttgatttgatggtggaactcgatcgaattttacgcccagaaggcactgttgtggtgagggatacccct

SEQ ID NO: 39490 - DNA, 234 bp, Glycine max
  Clone ID: 700942925H1
cagaaagcaagctcatcctagagttttaaaaatggcagcagcctcctccatggctctctcttccccatccttggctggcaaggccgtgaagctgggcccatcagcccccgaagtcgggagggtcagcatgaggaagaccgtcaccaagcaggcctcctccggaagcccatggtacggctcagaccgcgtcaagtacttgggcccattctctggcgagcccccgtcctacctgag

SEQ ID NO: 39491 - DNA, 255 bp, Glycine max
  Clone ID: 700942926H1
ggcccggacatttggaacaagagctggtatccaaaagctgcagatcatgtgaatacagaaaaaacatggtatgttgttgatgctacagacaaagttcttggaagactagcatcgacgattgctattcacatccgagggaaaaacttggcaacctacacacccagtgtggacatgggtgcgtttgtaattgtggtaaatgcagaaaaggttgctgtatctgggaaaaagaggagcgtaaagcaaaacaggaggcac

SEQ ID NO: 39492 - DNA, 164 bp, Glycine max
  Clone ID: 700942927H1
cctcgagccgattcggctcgaggaaaagcggccgaagcagctgctacctatgatttcttctgaccaacaatggaaagtttgtgcgaacgaacaggttcacttgacagtagctacaattctgttactgccaagatcagctcagcttattcagaagacacagatga

SEQ ID NO: 39493 - DNA, 270 bp, Glycine max
  Clone ID: 700942928H1
tttagggagagaatttcctgcagaagaagaatcgttggtaaccaacgcgctggggaagcacgtggaatacagtttcggttcgtcacctctgtggcacagcactataaataatcctcaagtttctacactttacctctcccaggaggaacagcgcagaacctaaccctcacgaaagcccttttcgattccgataactctcgttgttccgaaaccctaaccctaaccgggttttttcgtgggggtggattgaattggcatctgatttttttt

SEQ ID NO: 39494 - DNA, 189 bp, Glycine max
  Clone ID: 700942929H1
cttcgcaacacaacaccaaatgacaacccagagagcgcgtcttaattaacgctcttctctgaaaacccccatttcttttcttctttcttcttctctttcgcttcttcgatcttcgatcttcgtcgctgagaatgagagagtgcattgcaatccacatcggccaggccgggattcaggttggaaacgcct

SEQ ID NO: 39495 - DNA, 264 bp, Glycine max
  Clone ID: 700942931H1
accggagcagtttgatgtcatggtaacccccaatctttatggaaatcttgttgcaaatacagcggcaggtattgctggaggcactggagtcatgccgggaggtaatgttggggctgatcacgctgtgtttgaacaaggtgcttcagcaggaaatgttggcaatgataaagtagtagaacaacagaaagcgaacccagtggcactccttctctcgtcggccatgatgcttagacatctccagtttcctgcatttgctgaccgatt

SEQ ID NO: 39496 - DNA, 88 bp, Glycine max
  Clone ID: 700942933H1
tagacgcggctggagtcaaatcttagcagatcctaaagcagagctcaaaggatcgaacttgggtttgagatttcagcactgattggga

SEQ ID NO: 39497 - DNA, 267 bp, Glycine max
  Clone ID: 700942934H1
aaaattgccattaatatatgttatggtaggcaccatcctttaaattggttagcctttggcttgaatggtgcagagattgttttcaacccttctgccactgttggtgaactaagtgaaccaatgtggccaatagaggcacgtaatgctgcaatagctaatagttactttgttgcttcaatcaaccgtgttggaactgagacattccccaatcaatttacttctggcgatggaaagccggcacatgcagatttcgggcacttctatgga

SEQ ID NO: 39498 - DNA, 260 bp, Glycine max
  Clone ID: 700942937H1
ctaaaacgccgcaagatgtggccaagtccatcaaggagagtctcatggccctcgataccaaaaccgttgttgaagttaaagcccttgagaaggctttagaggaagttgaaaagaattttgtaacaatgagaaccatgctttctggagacggagagtcagaaccaaatttggaccaggtttcacagttagtggaggaaatctgcaaggaggatgttctcactcttctaattcacaagctgcctatactaggatgggaagca

SEQ ID NO: 39499 - DNA, 230 bp, Glycine max
  Clone ID: 700942938H1
tgtattttttgatttgatcatttcaatcttcaatttgtggttatatatccaccagtccgcaaagtgcaaatttctaatctttcacgtattgggttcttctctgttccctcttcgtctccgatcgatccaattctcttcccatggcgacgatcggacacaacaatctcaatgccaagttggttcttctcggggacatgggtgctgggaaatccagcctcgttttgcgcttt

SEQ ID NO: 39500 - DNA, 271 bp, Glycine max
  Clone ID: 700942939H1
ccagcatatgtctaaggatgatttggataagaatattagaaaacttatgaatgagcttgagtgtgcaaatcggaagtgtgaaatttatcggtccaacctgctttccgttttgaaagctgttgaggatcacaagctagagttatcagttaaggtggaaaacatcaagataagcatgaaagatggcatctaaagactatggagaattaacattgaaactgataggaaaacaaattctattttggcaatccagtcgcgcatcaataatgatccc

SEQ ID NO: 39501 - DNA, 270 bp, Glycine max
  Clone ID: 700942940H1
gagagagcgagcagtttcagacacagagagaggggtttgggattggagggattgacgctgcgtctcttcctcttctctttcgatccatccctcattcctaatcctccaatccaaccacctcagcctcacactcacatatacacatatctgaacgcgtatcgtccctcctatggcttcaaagcgcatcctcaaggagctcaaggacttgcagaaagacccaccaacttcttgcagcgctggtccagtagctgaggacatgttccattggca

SEQ ID NO: 39502 - DNA, 270 bp, Glycine max
  Clone ID: 700942942H1
ccaaactccaacccttgagtccccaattcagacgcaaccgtattgccttttccttttcttcccccaccttctctccgtggaagcgtttcgctgtaaacgacaacaacaaggagagtgacaacggcgatgttttgactgggttggatgaagtggagaaagaggcgcgtggaaatagcaccatgcccgaacgctttaggtacctcgccaaagaagttccgagtcttcctgttaggtggccatggcttgtggtactggcttttctggtctatt

SEQ ID NO: 39503 - DNA, 268 bp, Glycine max
  Clone ID: 700942946H1
tccagcagcaatggtgtacgtcaaggctcagaaatcaaaagcctacttcaagagatatcaagtcaagttcaagagaagaagagagggaaaaaccgattaccgtgccaggattcggttgattaatcaggacaagaacaaatataacactccgaaataccgatttgtggttcgctttagcaacaaggacattgttgcacaaataatatctgctagcattgccggcgatttagttcttgctacagcatattcacatgagctgccacgatat

SEQ ID NO: 39504 - DNA, 266 bp, Glycine max
  Clone ID: 700942947H1
attctaaaaggatagaacagctgagctggtcagaaaatcaatggcatcatccttgggttttgagttcctgacgaagaagccttacagtcctccatcctgggcatcccatctccaccctttaccttcccacttcttctctcttgcccatcttcccactccaattcacagatggaaccttcccaatctgcccaccaataccgagctgtggatcaagcgagacgacctttccggaatgcagctgagtggtaacagagtgaggaaattgg

SEQ ID NO: 39505 - DNA, 267 bp, Glycine max
  Clone ID: 700942948H1
attctctctcctactgttaacgttttctgtttttctttaagatggcgatgacgacaacgacggagtccgatctcgattacgagcttcgctatctcagtctcgccgtaaccgataccttcactgctttccaaaacctcttaccggatgcgatgacttccttttcagcttgtggactaatagaccctctttgttctcaaaacctcactcccaagcattccaccatcactgcaaccattgattctcagtcatcgatttgcgccactagta

SEQ ID NO: 39506 - DNA, 266 bp, Glycine max
  Clone ID: 700942951H1
ggcaagatgtcgaagagaggacgcggtggttcggcggggaacaagttccggatgtcgctgggtctgccggtggcggcgacggtgaactgcgccgacaatacgggggcgaagaacctctacatcatatcggtgaaagggatcaaagggcgtttgaaccgtctcccctcggcttgcgttggcgacatggtgatggccaccgtgaagaaggggaaacccgatctgaggaagaaggttttgccagctgtcattgttcgccagcgcaacca

SEQ ID NO: 39507 - DNA, 265 bp, Glycine max
  Clone ID: 700942952H1
cggtaggacagtaggatatatacatggatgtatggttcgtgcctcaattcatccagaacagtatatttatcatacggaactcatcgatggtgtgaagtttgctgctcccgatgattggagttccattgcaatcgaaagtgattccaaaaaggtaggtaacattaatagaaatgtaacagattggtctgaactaggtgttatttatgagggcataagattagcagtcattgtttgatgaatgtatttccaactttgttcctaggaa

SEQ ID NO: 39508 - DNA, 264 bp, Glycine max
  Clone ID: 700942953H1
aagagcccaataagaactatgaggggcatactttgtattgtcagaaggctgttgatggtcctaaggggagcaaggggtatcatcatcaacagcattctcattctcatcatcaccatcaccaccatcagcctcattatcagaggaaggagaagaacaagtattcctccggtggtggtggaccatcacatggaagtggtcatttgatggcgccctcgggctctgctgtggggggtttcaaccctggtgtgccggcccaggggttga

SEQ ID NO: 39509 - DNA, 149 bp, Glycine max
  Clone ID: 700942954H1
ttgaatgttctggacaaggcatgattgttctacttgctatcttgctagtggtctgtccctttgaatctataggacttgaaaacactttaacccctgggagtgagaatctgcatcatcgaattttacaatcacaagccacaatcctcgga

SEQ ID NO: 39510 - DNA, 264 bp, Glycine max
  Clone ID: 700942956H1
caaacatttttctttcatcacctttggaagattttggagaaagcatttacaatttccatttgggttcaattgaatcaacatgagcaacagaaaagataatactgatgatgagtctagtgaaagaggtatattttcacatctaggctatccaagtgcaccaccctaccctcctccacatggatacccaccatcaggctatccacctccaggagggtatcccccaacagcctatccaccaacagcatatccgcctcccggagtata

SEQ ID NO: 39511 - DNA, 264 bp, Glycine max
  Clone ID: 700942957H1
cggcaacctctccatcttcgacgccgacggctttgtccacctcacgacgctctccgtccaccgcaattccgccatcaatgacctcgccctccacccctccggcgagcgggccctcactgtcggccgcgacgagtgcctcgccgtggtgaacctcgtccgggggcgccggaactgctgcctgcgcctaggcaaggaggcgagtctggtcaagtttgatgcctctggggatcagttcttcatggcggtgaaggagaaggtctccgt

SEQ ID NO: 39512 - DNA, 263 bp, Glycine max
  Clone ID: 700942959H1
atcattttttgcctctggttctgttgctatatacatctttttgtactccgtaaactatcttgtatttgatctcaagaatctgagtgggcctgtttctgcaactctttacttgggatattccctcttcatggttctagcaatcatgttggctacaggcacagttgggttcctttcctcattctggttcgtgtattacttgttctcttcagtcaagttggattgaagactcttcacagttaaaaaaattagctctacagagaaca

SEQ ID NO: 39513 - DNA, 264 bp, Glycine max
  Clone ID: 700942961H1
ctactggccaagttccaaattcaggtccatgagtttttacaaagggtttagaaacctctggggccctcagcaccaaagcctagaccaaaatgcattaacaatctggcttgatagaacctcaggaagtggattcaagtcagtaaggccatttcgatccgggtactttggtgcttccattaaggttcaacctggatacactgcaggtgttataacagctttctatctctcaaacaatgaagcacatcccggtttccatgatgaagt

SEQ ID NO: 39514 - DNA, 269 bp, Glycine max
  unsure (1)..(269): unsure at all n locations
  Clone ID: 700942962H1
ggaattgggatggaggtttttatgtatgatgagattggatttaatggggaaaagtgaaggtttggagtcatgattaagaaaggagatggaggtgatgtgtataaaggagtcgnaaaggattagaggggtgaagatgttaatgttgataagttttttgctggtttagttggaaataagtgagcactgagtggtggcagtgggaaggttgtggagagtggtgatgatgatgatatatttgtatagtatactgacgatggaggtggtggggt

SEQ ID NO: 39515 - DNA, 249 bp, Glycine max
  Clone ID: 700942924H1
ggctgtcggagtcatcaagagtgttgagaagaaagaccccaccggagccaaggtcaccaaggccgctgccaagaagaagtgattgcatttgggcaattttgctagcacatgtgatcatcatcgtggttactcctttatagtagttttatccttgcagagtcttaggtgttttgcttaagttatatgtttaagtttctgccgatttcatgtagccggaactttcaaaactagggtcttgatcggcggtgg

SEQ ID NO: 39516 - DNA, 157 bp, Glycine max
  Clone ID: 700942890H1
gtcttgcaggccacaatgcaaaactttgcagaatctcatcaactttcagttatgtgttcttcttattcatctaatgttgatgtctttgacactggcaagtacaccgccaagctgctaagggttgaatctgaatcagaatcatatacacacaacaaca

SEQ ID NO: 39517 - DNA, 255 bp, Glycine max
  Clone ID: 700942891H1
ttggaaatgtacttgttgatacattggctcttggacctgtggccccctttgatgctgcttcatgttttcttgctattggtatggccatcatactatcttcatggtcagagaatttcggggatccttcagagaacaaggacttgcttacccaatttaggggtgctgctgtggccattgcttctgatgaaaagatagccttgctgggtgccatacagtctctctttgaaggttcaatgtacacctttgtgtttctat

SEQ ID NO: 39518 - DNA, 258 bp, Glycine max
  Clone ID: 700942892H1
agagcagacaccaacaccaaaccttaaaattattttgcccctctgcttctctctctgtctttctcagaagacaactcaaaaaaaccatggacgtgggtcagatgcagagacagtggatcgactacaccaaatccctcttccttgagggcttcctggatggtcagtttctgcaacttcagcagcttcaagatgagaacaaccctgactttgtggtcgaagttgtctctctcttctttgaagattctgaaaggcttctca

SEQ ID NO: 39519 - DNA, 139 bp, Glycine max
  Clone ID: 700942893H1
gcttttggaccatttcaagcattctggtcccaatggacagcatgtttgtatggtgtttgagtaccttggggacaatcttttgactcttattaagtactctgattatcgggggttgcctattgtcatggttaaggagatt

SEQ ID NO: 39520 - DNA, 140 bp, Glycine max
  Clone ID: 700942894H1
ctttgtcgcaaagagaagagatctgcctcctttttatcaaatctatctcttcttcaagaatagttgaaaatggggctgtctttcaccaagttgttcagccgactgtttgccaagaaagagatgcgtatccggaggggggg

SEQ ID NO: 39521 - DNA, 258 bp, Glycine max
  Clone ID: 700942895H1
ctaacactcattaattgcaagaatggcacttcgttgcttggtgatgtccctttctgttctcttcactcttggtcttgcgagagaaagccatgccagagacgaagatttttggcatgctgtttggccaacactcccattccaagttcattgcgagatcttctaaagcctggccctgcaagtgttgaaatcgatgatcaccctatgcaaattgaagaaacacagtacccgaaaaccttcttctataaagaagaccttcat

SEQ ID NO: 39522 - DNA, 260 bp, Glycine max
  Clone ID: 700942896H1
tgtttataaaggagttccaaaggattacaccggtgaagatgttactgttgataacttttttgctgctttacttggaaataagtcagcactgactggtggcagtgggaaggttgtggacagtggtcctgatgatcatatatttgtatactatactgaccatggaggtcctggggtgctcgggatgcctgctggtccttacttatacgcggatgatctgattgaagtcttgaagaaaaagcatgcttctggaacatataaaa

SEQ ID NO: 39523 - DNA, 279 bp, Glycine max
  Clone ID: 700942901H1
atcggcggtacgctaaccccaccatcaacagccagggcaaccgttacacggctcccggagaccctgatgccaaggaggtgacgaagcgcgtggacacagacgatagagagtggagtggttggaattggaggacggaaggggacataatggtaaatggagcgttctttgtaccatcgggtgctgcggggcagagtggccagtaccaagaggccaccagtgtgcaagccaaatccgccgtgcaaattgaccagctcactatgtactccggtgtcttgggtg

SEQ ID NO: 39524 - DNA, 271 bp, Glycine max
  Clone ID: 700942902H1
ataaggacagcttggaagaacttgctgatccaaggattgggggaaggtacccaaaggaagattttgtacgtgtttgcactattgctgcagcctgtgttgctcctgaagcaagccaacgacctgcaatgggtgaagtggtacaatcacttaaaatggtgcagcgggtcacagaatctcatgatcctgtgttagcgtcatccaatacacggcccaacctgagacagtcctctaccacttacgattctgatgggacatcttcaatgttttcttc

SEQ ID NO: 39525 - DNA, 277 bp, Glycine max
  Clone ID: 700942904H1
acaaatcagaattcacacccacataccaacacaatctctctgaattgaaacccaccatgttgattaaagggcatcaaattaaggcaccaattttggtcctcaatttgttccttgtcctaatttgttccacagcttcttccgtcaacgttgttgaatcaaggaaacttgatgagaccactccagtgcctgccacaaacggtactgaagaaaagtgtggatcatgtggtggtaccacttatccgtcgccaccgccaccgttactaccaccaccgtcgcc

SEQ ID NO: 39526 - DNA, 229 bp, Glycine max
  Clone ID: 700942905H1
cacaaattcatctcctccaaacgcaccttccgctcctcgcctaccccaatctccgccacccgccgcctcctcgccaccgccctcctcgacgacccctccaacgcctacttcgccctcctctcccagcactgcatccctctccactccttctcctacacctacaagtccctcttcctctcccccaccttcgactcccaagatcccgaatcttcttcttccacccggttcg

SEQ ID NO: 39527 - DNA, 265 bp, Glycine max
  Clone ID: 700942906H1
cacaaacacacgtattctcttgcaaaactaagaatgaaggaggagttggtggttgaagaagggtaccttttcaaagaagagactcacttcacagtgctcaaaacctctctcttcttcaacggtgatggcttcgctgtctacgattgcaaaggccaactcgttttccgcttcgactcctacggtccccgcgcgcgtgacaaggacgagctcgttctcatggatccccatggccgttctcttctcactctccgccgaaagaaagcga

SEQ ID NO: 39528 - DNA, 279 bp, Glycine max
  Clone ID: 700942907H1
atcgctcatagagagttcgacgcggcggttgcagaagaagattgcaagatgaagttcaacatcgcgagtcccaccactggatgccagaagaagctcgagatcgacgacgatcagaaactacgagcattttgggacaagaggatctcacaggaggtcagcggagatgcacttggtgaggaatttaagggctatgtcttcaaaattactggaggttgtgacaaacaaggattcccgatgaaacagggagtgcttactcctggtcgtgttcgacttttgctt

SEQ ID NO: 39529 - DNA, 275 bp, Glycine max
  Clone ID: 700942908H1
tgttggtattatcctgtcttctcgtgctggtcagtctagagctgattaagaaatgatgtgctgcaaaatattctttgatctcccacctgttttaaaaccttcttattgtgagggcaaggggggtaaattgttagttgtgaggttagtgatgttgggatggcacttgcaaggtttaacaaatacatgtgaaatcagtagctgcaccagtcatttttatgtttgtttaactagtctttctttgcttaataaagcttcttaagcgtttttttccctat

SEQ ID NO: 39530 - DNA, 275 bp, Glycine max
  Clone ID: 700942910H1
tgctattaaagctcaacaagacaaacagatcaataatgcactgttagccgagggtcggttttactctgatctcgagctcacagaaaaggaaattgaacgcatggtgattgaagtttctcgagctgagtaccttgcagatagtacatttaagcaacagcttggagacagagagtcctctacctcaaacgcagaaccatcatcttctggagcaaccggttcatctggcactgatcgcaagacggaacatgcgaaagagcatggttctgatcttagta

SEQ ID NO: 39531 - DNA, 276 bp, Glycine max
  Clone ID: 700942911H1
taagctcccaagcagtgggaggaagctcgggactctgaccgcgtgcctgttgaagaatgagccggcgactcataggcagtggcttggttaagggaaaccaccggagccgtagcgaaagcgagtcttcacagggcaattgtcactgcttatggacccgaacctgggtgatctatccatgaccaggatgaagcttgggtgaaactaagtggaggtccgaaccgactgatgttgaagaatcagcggatgagttgtggttaggggtgaaatgccactcgt

SEQ ID NO: 39532 - DNA, 271 bp, Glycine max
  Clone ID: 700942912H1
attgatgcttcgcttggggattctgatgtgcccaaagatactgctttgaagagaagggctagatgtgattcaagtactgcttctagctctaaagcgtgtcgggagaagttgcggagggataggcttaatgacaaatttgttgaattgggctccatcttggagcctggaaggcctcccaaaacagacaaggctgccattctgattgatgctgcccgaatggtaacacagctgcgggatgaagaggctaagttgagagactcaaatacgagtc

SEQ ID NO: 39533 - DNA, 140 bp, Glycine max
  Clone ID: 700942913H1
gtccttcgtaagcaagtcgatgggtggtctcaggggcggaagcaaccttgcttcttgggtcgtcgccggaaccctagcttacttcctctggatcaaaccctcccaagacctcaagcgtggtgagcatgagaaggccgctc

SEQ ID NO: 39534 - DNA, 272 bp, Glycine max
  Clone ID: 700942914H1
gagaccctgaagcctaccctcttccttgtttatatgcccagattgatacaggagaagcagatgatgaccactctgattctgaatccaatcatatccaacaagatttgtcccacatcacagagatgaggctcattccctctgatcctactcaattggattctctctttgcaatattctgccagtgtgcagagcttaatccagaacctaacgatgaggaaggagaaggacatggttgggtttttagtgctgatgagatgggagatggagaagct

SEQ ID NO: 39535 - DNA, 240 bp, Glycine max
  Clone ID: 700942915H1
ccctctgctggggcatttgcggcaatggcaatattgggaaagatggatcagttattggcaccaaaaggactctcaatcgcatttgcgccatttggggctgtttctactatcctctttgccacacccacagctcctgctgcccggaagtacaatgtgtttatggcccaaataggctgtgctgcaattggtgttctggcattgacaatatttggacccggatggctggccaggagtgctagt

SEQ ID NO: 39536 - DNA, 265 bp, Glycine max
  Clone ID: 700942916H1
agaaaagaggagtttgagaatggcaacgatcagcgcggttcaggtggagttcctggagtttccagcggtggttacttcaccagcctccggcaagacctatttcctcggcggcgcaggggagagaggattgacgattgaggggaagttcataaagttcacaggcataggagtatacttggaggataaggcggtgccatcactcgccgctaagtggaagggtaaaacttcagaggagttagttcacaccctccacttctacagggat

SEQ ID NO: 39537 - DNA, 285 bp, Glycine max
  Clone ID: 700942917H1
cggaacgacggactactctatgggatacatataagagtgattttgagaatgagaaggcctctgggaaatctttgggtgaaaaagcagcagaagatctgaggcaaagaataattgaacataatattcttgttgtatcaaaatactatgcaagaattacattgaagagacttgcagagcttttgtgcctcagtatacaggatgctgagaagcatctctcagatatggttgtgtctaaggcgctggtggcaaagattgataggccaatggggatagtctgtttccaaa

SEQ ID NO: 39538 - DNA, 272 bp, Glycine max
  Clone ID: 700942918H1
attcaaagaagataccgagagtttggatttaaacgcaaaagcaattaatacaagactaagtgatttgaagattgaagggataaacgatttgaagattgaaaggatgcaggaactggaagcagtgacaagtgagatcgttaggttgattgacacagcaacagtgcctattttggccgttgatgttgatgggctggtcaatgggtggaacataaaaattgctgagttgacgggtcttccaattggtgaagctactggaaagcatttactcacac

SEQ ID NO: 39539 - DNA, 275 bp, Glycine max
  Clone ID: 700942921H1
cattctcatctttctctcttctctctccacccaaaccctaactcgcgaccctgttcccctctcgtatccgtcatgaaaggaggaaagtccaagaccgaatctaagatagccgatcccaaacttgctgtgaataagaagggagccgccaccaaggctaggaaacccgccggcaaggggaaggcagcgaaagaccctaacaagccaaagaggcctccaagtgctttcttcggtttcatggaggagttcaggaaggtattcaacatagaacatcctgt

SEQ ID NO: 39540 - DNA, 266 bp, Glycine max
  Clone ID: 700942923H1
attctctttgctcagttccctacctctcctttcaagatgcagatcttcgtcaagaccctcaccggaaagaccatcacccttgaggtggaaagctctgacaccatcgacaacgtcaaggccaagatccaggacaaggaaggaattcccccggatcagcaacgtctcatcttcgccggaaagcagctcgaggacggccgtaccctcgccgactacaacatccagaaggagtcaacccttcacctggtcctgcgtctccggggaggtat

SEQ ID NO: 39541 - DNA, 254 bp, Glycine max
  Clone ID: 700942889H1
ttccaccgatccttactacttaagtttcattttataagcttgttaatagtttatagtacttatgttgttagagtgagctacaattgtaatggttctggcgagatggtttcattctgaagattgcgttccagattttaacaatctgatgatgagaaggcaatcagcttgtatgactctatctgcattatgatacatgtttatcgggtttcttaactacgtttaaacattgtagctatatattgtgagtttttctg

SEQ ID NO: 39542 - DNA, 99 bp, Glycine max
  Clone ID: 700942843H1
cagcgtgttcatgggtcacactcacacccgcaacctaaagaaataagtcagtttcattgagaaggagcaattgttgcccaaaatgttcggtgtcccaat

SEQ ID NO: 39543 - DNA, 176 bp, Glycine max
  unsure (1)..(176): unsure at all n locations
  Clone ID: 700942845H1
gtgaactaatggaagttcttgaaccttttatgaaaagtcctttctcaaccccttctccttcaaattcttgttttctttctacctcttactctccttcccccaacaactactccccctngctatactcaaacgggttatcatccatacccaacaccacccaaaacttaattgggttt

SEQ ID NO: 39544 - DNA, 266 bp, Glycine max
  Clone ID: 700942847H1
tcctacccttttgatttgtgaaaggcaagcaaacatgcttgatcaggtccaacaccctacaatcatggacaacgttgctggccagctccatctccgttctggtgtttcttgtattaggagttatgaaggagcctactgccaccccacaatgtaccaaacgccctctgttgggaattactcgaatgctgcattgcggcatcctggtgatgccctcatgcaaagctactcagggatttgtcggcggctgcaacaatggcctccccggt

SEQ ID NO: 39545 - DNA, 248 bp, Glycine max
  Clone ID: 700942848H1
ggctcgagctcgagccgttagcaatggccaactggatctcatttgctcctctttttgcaatacttttcctactcatctctcctgagcttgcaagtgctgcccaacctagtcttattcttcaactcggccgaaaacttttccaatgcggcagcgccgccgtccctgttcgtggaaataccccatccaatggccgctcctagaggatataccccaccaccaaaacacccactctatggctgaatatttga

SEQ ID NO: 39546 - DNA, 159 bp, Glycine max
  Clone ID: 700942849H1
ctcgagccgattcggctcgagaactgatgcacagtcaggtggcaatgctcctacaaagaaatctggggtttggtctagttggttcagggaaaagaacatctgtccgttctgttttccatgaagaggatgataatgaggccaaaaaaatgaggcaatggg

SEQ ID NO: 39547 - DNA, 251 bp, Glycine max
  Clone ID: 700942851H1
ggaatgaagtaactgttgttagctgcttctaccggctgaagaacttgcctgatgaaactgtggatgtgaagtctccaagagatgccgtgttgaagttgataaggaggatcaatccaaacatgttcatccatggggtggtcaatggcacttacaatgcaccctttttcctgactcggtttagggaggcactctaccacttctcatcactgtttgatatgtttgaagctaatgtgcctcgtgaagacccggaa

SEQ ID NO: 39548 - DNA, 257 bp, Glycine max
  Clone ID: 700942852H1
atacattatagtatggcatgaaatcatcgttccatgctagttggatcttcctgacatagatgaaagtaatttatgacacgatgccattacagagatagggtgtactgtaccttattcttttcggcctgcttggctatgattcttgtttttttcgttgtagttgggtttttacaagagtactaggcattgtttgcctgttgcctctgtctcagacacgcctttatttatatcgtcatgtggttataacttgcgatttc

SEQ ID NO: 39549 - DNA, 258 bp, Glycine max
  Clone ID: 700942853H1
catggttgttgcatttactctcttccatcaaacattcaaaccagaaattggctcagtgagtcatatttggaagtggagtgagtaaacaggactatgtgattagtgcatacaatgtagtagtaatgtgcatggtgtaaagaaacagatttgatatgaacttggtggggtttctgtatgcggaaatgttgtgtagtcagacagtaacacagttttgttctgttaaatgattttttctttagttattattcacttttaact

SEQ ID NO: 39550 - DNA, 256 bp, Glycine max
  Clone ID: 700942855H1
ccaatctgcgctgcctacgacaactacctccgcctccctgagctcagagctctctgggcctccaacgacttccctaattgggccaacgagcccatcttaaagcccaccttacatgccctcgaaatcacttccgcttactcgcaaccgttttatccgacccgaggccgtacataaacaagctcgagtggacccggcgggtggagtctctcgccacggcccaaattcagatcatagctatgctgtgtgaagatgaaga

SEQ ID NO: 39551 - DNA, 257 bp, Glycine max
  Clone ID: 700942856H1
ctcgagccggtcaacgaactcgatcagacggcgagctctctccggcgttggatccatgatctacggcaaagattgcctccccaggacatctcccagagcctcccacacctccacgcccactccctggcctccaacgccgccctcgccctccaattaaactcccactccaccacgcgccaacaggcccaacttagagaggtgacgttgaaggaagagaatgctgcgttcgaaaatgcaatatccgattgtgagaataa

SEQ ID NO: 39552 - DNA, 273 bp, Glycine max
  Clone ID: 700942859H1
ggaattctgctcgagcaagaaaggaaataaacaaacaagaggtttggtttggttttcgaggcaaatatggaaatgtcatcgtcctctctgggcatattgccggttcggtattgtttttttagttgctagatcttcttcacgttgccaatgcggtgggtagttaattagtagatatgggtttgagatttgagaacaattatgtgttactagagctatagtctccaatcctcttattattattattattattatgttcttttatctcattcccgt

SEQ ID NO: 39553 - DNA, 257 bp, Glycine max
  Clone ID: 700942860H1
tgatgacgtaggaggaattatttcttctaaagcaggcctgcaatatcttggccctgacttggatgctatgaaagctgttgctgatgcacattctaagcggtcccttaagttgtttgaaattgctttgagggactacaaggcacagttggaggaagacccaattgtacacaggcacctttcatccttgtacgatacccttatggagcagaatctttgcagattgatcgagcctttctcaagggttgagattgcacata

SEQ ID NO: 39554 - DNA, 264 bp, Glycine max
  Clone ID: 700942864H1
ttcaggaacaatgaagcctcccagaggaaagcttcctctgccaatcattatcaccacaatctgtgttcttctcttcatagcagtcttgtatgctgagagactaagtttccttaactccagctccattttcaagtccaaaacatgtcctagaaagcacaacaaatcaaagtctaatgataaaaaatctgaggaagtgtttgcaaatgcctcgtggatcgatgataggttcgattttgacccagaagagtgcaatgttgcaaatgg

SEQ ID NO: 39555 - DNA, 137 bp, Glycine max
  Clone ID: 700942865H1
ggaaagagaagggttctgggaagtatgagaagaaggtgtatgtgttgcccaagcaccttgacgagaaagtggcttctctccaccttggccagcttggagctaggctcaccaagctttccaaagaccagctgattaca

SEQ ID NO: 39556 - DNA, 221 bp, Glycine max
  Clone ID: 700942868H1
agaaagtggaagatcacgattcaggtgaccgaagatcatgcaacatgtccaattcaagtgtatgtgatggcagtcaaatgtctcccacatctgtaacttctgtaaccacagatcttgggttaggaatatgctcttctcctacctgcaataaattgaagaaacctgctgttcaatatactatggagcctccaaaggaaatccctagtcgattttctccacac

SEQ ID NO: 39557 - DNA, 255 bp, Glycine max
  Clone ID: 700942872H1
gagtgagtgtttcttttttttctctctctctctgaacttgaactcaacccttccttcgttccgcgacaacgatgacccactacggcacaattccaacctcctcctcgccttcgaccaacctcgacttcatctcacgcgccaagcagcgcgtcaaggagggcctcggaacccgccgtccatggaagctcatgttcaatttccgatccttcggtctccccgccggggtcggagacgccgtcgcgcgtgtgagggaga

SEQ ID NO: 39558 - DNA, 255 bp, Glycine max
  Clone ID: 700942873H1
tagaacaaagaagaagagcaatccaaaacccgggttcagatcacaccgccacaacgttttcctacctagacacactttttgatctcaaagttgaagggaagaaatcagcaccttctgatgcagacattggtttcactgtgctcagagtttctcaacggtggcacagacacaacagcaacagcggttgagtggggcatagcacagctcatagcaaaccctcacgttcagaaaaagctctatgaagaaataaagagg

SEQ ID NO: 39559 - DNA, 240 bp, Glycine max
  Clone ID: 700942874H1
atctcctttccaaatggccagcgttgcggttgcacagcaaacaccaacaacagttccagaaaatgaaacaaccgaggtaagcaagacccaggaaacaaccccagtcactgaggctcctgcaacagaacaacccgcagctgaggttcctgcaacagaacaacccgccgctgaggctcctgccccagaatcaaccaccgaagcaccaaaggaagaaaccaccgaggcaccaacagatacagt

SEQ ID NO: 39560 - DNA, 148 bp, Glycine max
  Clone ID: 700942876H1
atttttcccaccttaacttgaatctttagaatatccattccagtactgccattgatagacagatgagttaggatcctgtacaaattacttgcaacatatggaaatgatgcacatttttatgaaatgtgaaaatcagatatttgttgtt

SEQ ID NO: 39561 - DNA, 262 bp, Glycine max
  Clone ID: 700942879H1
tgcttttcacattattgattggtaacattcaggtattcttacatgcagtcatggcaaagaagagaaagatgcagctgagatgtcgtgacatggaatggtggatgaggaggaggcagttgccatcgcgattaggccagagtgttcgccatttggaacgtcagagatgggcagcaatgggaggagaagatgagatggaaatgatcaaagacttgccagaggggctgaggagggacatcaagcgccatctttgcctcgatctcat

SEQ ID NO: 39562 - DNA, 226 bp, Glycine max
  Clone ID: 700942880H1
ttgttagtttgcttaatgtttacagaattttattcttagcaatcaaagaagttaagctgttttaatttcctacaaaatgattgcttgaccatttttgtagtggtctgccattgtaggtgaacatatctagatgggaacttaatttttgaaggtgagtttcagtgatatcttgtacaaaaaaaaaaagacaaaaaaaaaaaaaaaaaaagaaaagaaaaaaaaggaa

SEQ ID NO: 39563 - DNA, 170 bp, Glycine max
  Clone ID: 700942881H1
ccgttcgcaacacgatcactatttctgcgacgatggtggcacattcgagttgttggggcagggcactcgtggccatctcgccctataccttctctgccatcggcatcgccgtcgctatcggcgtctccgttctcggcgccgcctgggggatctacatcaccggtagtagc

SEQ ID NO: 39564 - DNA, 255 bp, Glycine max
  Clone ID: 700942883H1
gttcctcgatggtcatacaaatttattgacgaattggaacaactggagggaaatgaagcagagaattatcaaattcgttctagaaaagccaaacgtgtagtaattttgactaataaatctaaattttttaagaagtacgatacttataatcctacaggagatactgataacgctgaaaaaaaaaaaaatgaattggctttaatacgttattcccaacaatcggattttcggcgagacttaatcaaaggatctata

SEQ ID NO: 39565 - DNA, 249 bp, Glycine max
  Clone ID: 700942884H1
gaagaagttgcaaatcgctcgatcgaaggccagagagcacttcgatcaatccccaagaccttaattcaaaactcacaaaagctgttcctaaagtacatgaggatttttctgagctttgacaagtttcttccccaacatgctccattcattagtcgagaggttggcccggcctggttcactgactattttcctgctgtcgatccggacaatgaagcagaagtgaccgaaatatggtcattttacttgaat

SEQ ID NO: 39566 - DNA, 252 bp, Glycine max
  Clone ID: 700942886H1
gccaagtggaaatttattggttgtgtctgaggaattgggtggggatccgaacgggatctttttggttagaagggatatagatagtgtatgtgctgacatctatgagtggcagccaaatcttgtaagttatgagatgcaagcttctggcaaagtcagaagtcctgtgagaccaaaagcacatttgtcatgtggacctggacaaaaaatatcatcaatcaagtttgctagctttggcactccagtagggtcttg

SEQ ID NO: 39567 - DNA, 106 bp, Glycine max
  Clone ID: 700942887H1
ctgaaatccctaacctaaaattcccctccctgatggctttaccagaggttgggttgagactgctcctttcacccgtgacttccaaccttcttctccacacaacata

SEQ ID NO: 39568 - DNA, 141 bp, Glycine max
  Clone ID: 700942888H1
ctctgccactttctgagtacaatacaacactgccatggctggctcagtctccactacttggagctgtgcgacagatgctccatctgagcttagaacagtctcttgaacgctggacgatgtcggttgcccacgttgcagcct

SEQ ID NO: 39569 - DNA, 255 bp, Glycine max
  Clone ID: 700942842H1
gcaagtcctggggtatttggtagggttgtaaaactgcgtaatgtaggcattgtttctcaaatcaagaagatggtcaacgatccttgcatggatgttaagcttcgtgcaagacaagcacttgggcagattattacttttggtgataggtaattgtaatcagttactccattcaaagcccctgggctgcaggcaaagagaaatcttgatagaatttattttctcccagttcccaccttattatatgtcaaggtgtat

SEQ ID NO: 39570 - DNA, 221 bp, Glycine max
  Clone ID: 700942808H1
gtcgtgcctctcattgttctcgccatttccaaatcatccgatcgccacaagtacgatctgtcttccatcagagtcttgtcgtcctggggatcccctctgggtaaagaactcgaagacggtgtcacagctaaattccccaacgtcaaactttgccacggatacggcatgactgaggcagagcctctgctaacaatctctttagcttttgctaaagaatcgat

SEQ ID NO: 39571 - DNA, 262 bp, Glycine max
  Clone ID: 700942809H1
ggcatctttgactgagctctcgttcaactgggtcggcttcataagtgctatgatttcaaacatctccttcacataccgaagcatctattcaaagaaagccatgactgatatggacagtaccaatatctatgcctacatttccatcattgctctaattgtctgtataccacctgccgtaattttggaagggcctacactgttgaagcacggcttcaatgatgccattgctaaagtaggtttggtcaagttcgtctcagatctc

SEQ ID NO: 39572 - DNA, 263 bp, Glycine max
  Clone ID: 700942810H1
catccaaatacagaaatatcattttccgagacaatcccatcttccatttccatcttcaatatttctactcatcgagaagcttcgcgaacgaaaacaaagaaccctagacagatccattccatagccatgtcaggtgttggccctctatctcaggattgggaacccgtcgtcctccgcaagaaggctcccaccgccgccgccaagaaggacgagaaagccgtcaacgccgcccggcgctccggcgcggaaattgaaaccctaaa

SEQ ID NO: 39573 - DNA, 262 bp, Glycine max
  Clone ID: 700942811H1
caggaatcttactggtacaaaggcactggttcagtggttgctgttgatcaggaccccaacactcgctaccctgttgtggttcgattcaacaaagtcaactatgccaatgtatcaacaaacaactatgctttggatgagattgtggaagtggaatgagtctaatttatttgtaattttgattctggccatgctatgccagttactagcctaaggtttttttatgtcaaaaacaaaaaagaatttgtatcatattctctctgtt

SEQ ID NO: 39574 - DNA, 224 bp, Glycine max
  Clone ID: 700942812H1
ttctcttttggagtataaccaccatgggattgtacaatgtttgcattcgttttgtcattcgaaggataaatgaaaaatatgactaaccgatagccacagcacaaagcattaaatcataaaattaaatcaacatggatggataggattgtaaatccactcttacataataaatttgagtatttattcttgaaaataggataatatctataggtgttttctttctc

SEQ ID NO: 39575 - DNA, 236 bp, Glycine max
  Clone ID: 700942813H1
ctcgaagctattacaggtgtacccattcatattgttgtgctaagcagattaaattttgcgaccattcaggacatgtgatagagattgtttataaaagtcaacatagtcatgatcccccgcataaaattgataccgctaaggaaagtaagctcctgccttccagtgaactaaagttggaagcagttgtttcaaagcattctaccaatgtttggaatgattctgatccatcatcttct

SEQ ID NO: 39576 - DNA, 148 bp, Glycine max
  Clone ID: 700942814H1
ctctaatactttctcttctctttctctcctaattggtcgagagatagaaagagataggtatagaaaaacgaagagtctctctcttctttatgtcagggcacaaatctttcacctcttcttctttctgctgaccatttcagaaggaacc

SEQ ID NO: 39577 - DNA, 263 bp, Glycine max
  Clone ID: 700942815H1
gcacaaagctttccaggggaacatttctgattataatccacatacagattcatctacttctactgttgaggttgtccgtttggtggcaggcaacatgactactggacaattttacagtcatctaatacccctcacactacttctcgttgatggtagcagtccaattaaggtacctgattcacagtgggagctgtatgttttgtgtcagaagaaaactgatccgcagggagagatccattgtaggttgattggtttcactgctg

SEQ ID NO: 39578 - DNA, 168 bp, Glycine max
  Clone ID: 700942817H1
cggctcgagctctcagtagttttgaattcaagtattgcaaaatatgatctccataatctcaagccttccagaactgaatagttggcaaaggattttactttgtttgttctttgaattctcctgaacagagatatgatctctttatataaactacaagtatacaacaga

SEQ ID NO: 39579 - DNA, 198 bp, Glycine max
  Clone ID: 700942819H1
cccatcacatcatcattgttttcatcactcccaacccaagggtctcacacacgcaaaacaattaaacaaagagcttccaccgtcgacttgcatctcttcaaaacgccaccgtactgctcacaagccaatgccttgctcttccatcacttccaccgccgatgacagcagcagcaacaacaacaacaagaagaaggatgg

SEQ ID NO: 39580 - DNA, 261 bp, Glycine max
  Clone ID: 700942820H1
gttagaccggttacccggaccggtcagaacggtgcgaaagttgttgtcaagcacaggagaggaaaattactggaaacagcatgctggatgcttggaacttttggacagcattctagattcgcctcttgtcaatgaagaagcccacgtttttgttgctagcaagatttctcaaagcaatgaaatccaatggaaatctcttcgatgtaaaaagtctaaagtgaaggccatctttgcttgaatgggatgtagccagctgctatg

SEQ ID NO: 39581 - DNA, 261 bp, Glycine max
  Clone ID: 700942822H1
actgattggcgttgccaaatttcctttggcttcttcttctccgaatctttcagaatctctctctcatttatttttgaattgaagtttctttctcattatctacaatatcctcgcgcgtgttattagcgatgccggaggaagaagtagtggagctcaagttccgtctctacgatggatccgacatcggtcccttccgttactcccctgcctccaccatcgccatgctccaggaccgcatttttgcagactggcccaaagaca

SEQ ID NO: 39582 - DNA, 258 bp, Glycine max
  unsure (1)..(258): unsure at all n locations
  Clone ID: 700942823H1
gagcatataaataacatagtcctcctcctttgtttttccacataacataagatttggnanananaganatccatcgatcaattaatttccaattgccgatcagctcaccgacgaacagatctctgagttcaggaagcctttagcctcttcgacaaggacggcgatggttgtattaccaccaaggaacttgggactgtgatgcggtcgcttgggcagaacccaactgatgctgaactgcaggacatgataaatgaggtt

SEQ ID NO: 39583 - DNA, 257 bp, Glycine max; identical to SEQ ID NO: 27514
  Clone ID: 700942825H1

SEQ ID NO: 39584 - DNA, 259 bp, Glycine max
  Clone ID: 700942826H1
caggtgtatgtgcatgtagacagaaataataggcctgcacagatattgtaccaaaagatgggctttgagatggttgaaatggcaaactcccggttggtagaagaaacatacttactacgtttacagacataaaatacgaaagattacttacgcttcaattggatagctttggaacaattgcgaatttcaaaatttgaatacgttcctgtaatcttagaggtataagcttttagtttatgtacatgcatgtaggtgtcca

SEQ ID NO: 39585 - DNA, 175 bp, Glycine max
  unsure (1)..(175): unsure at all n locations
  Clone ID: 700942828H1
gttgagcacagtatacagtcggttatgtcangatgacatgcctatggttagaaggtcggctgtatcaaatcttgggaaatttgctgcaactgttgaatatgctcatgtgaaggctgatctcatggcaatttatgatgatctgactcaagatgatcaagattctgtcgattgttgg

SEQ ID NO: 39586 - DNA, 197 bp, Glycine max
  Clone ID: 700942830H1
ctcacaaacatggttgccgcagcaaaactcatccgtaacgaacttgccaagtgaatggtataagaaagtagaatctacaagttcattggttctgcttttataatacaccaaagaaaaattttctatattgggttgtttcaataaccgggtgggggatagttagatgttttagcatgctctgggagcaattgattctt

SEQ ID NO: 39587 - DNA, 267 bp, Glycine max
  unsure (1)..(267): unsure at all n locations
  Clone ID: 700942831H1
catttccattcattcattcgttgttcttctttccaccaacaagacagactgtangagagaaactttcatttcatagattttcatcatctcagcaaaggaatcaatcaatcaagccatggcaggcttcagtggcgacgaaaccgctcctttcttcggcttcctcggtgccgctgcggccctcgtcttctcctgtatgggagcggcgtatggaacggcgaagagtggggtgggggtggcgtcgatgggagtgatgaggccggagctggt

SEQ ID NO: 39588 - DNA, 274 bp, Glycine max
  Clone ID: 700942832H1
tcggctcgagcacagtactgattaacgatctctctctctgtctctacaagacttagctcttgttgttaattattccttgcattctcttgagttcagatggaagcaactaatggccaccaaaatggttcgttttgcttgtccagtactaagggaagtgatccgttaaactggggagcggcggcggaggcgatgaaggggagccacctggacgaggtgaagcgcatggtgtccgagtaccggaagccggtggtccggctcggcggcgagacgctca

SEQ ID NO: 39589 - DNA, 175 bp, Glycine max
  Clone ID: 700942833H1
gtcacctgaagaactttgccattggttaatactagcagacatgtatggtgtttgcaagattcgggaatattgtctagacacaattgcttgtaatttcgaaacatttgctgatactaaagaatttcgggcatgttgttgactttgcctccaccatctggagactcgtctcttggta

SEQ ID NO: 39590 - DNA, 242 bp, Glycine max
  Clone ID: 700942834H1
cttctccacccaaagcgcaacttgcaaaaattacataaattcctagcccaaaaacttgatcagtaaacaaacatgggaagttccgtgcgtgtaaaagaagcatctgtggttacaccttctgagcccactccatcgagtgtgttggctctatcagctcttgattcgcaactcttccttcgtttcaccatagagtatctcttggtctacaacccttgccctggcctgggacaggctgccaccac

SEQ ID NO: 39591 - DNA, 257 bp, Glycine max
  Clone ID: 700942835H1
gaaagagaatccgaggcgaagagaagagaaaaattaagatggaggggaaggagcaggatgtgtcgctgggagcgaacaagttcccggagagacagccgattgggacggcggcgcagagccaagacgacggcaaggactaccaggagccggcgccggcgccactggttgacccgacggagtttacgtcatggtccttttacagagcagggatagcagagtttgttggccacttttctgtttctatacatcactgtctt

SEQ ID NO: 39592 - DNA, 140 bp, Glycine max
  Clone ID: 700942836H1
tgcctgggcaacagatacggatagtcacccttgttaagggaatgttgtatagtcagtttttttatacgtattcatgcttggagagatccaaagaatattctggctgagtctgttgacaatatagggtttttttcctcccc

SEQ ID NO: 39593 - DNA, 242 bp, Glycine max
  unsure (1)..(242): unsure at all n locations
  Clone ID: 700942837H1
cgactttcctaagccaggaattttgtgtcaggacataaccacgctgctttttnatacaaaggctttcaaagacaccattgacttgtttgttgagaggtacagagatcaaaacatcaatgttgtcgcaggagttgaagctagaggctttatatttggtccacccattgcattagtcantngagcaaaatttgtccccatgaggaaacccaataaattgcctggggaggttatctcagaagggt

SEQ ID NO: 39594 - DNA, 238 bp, Glycine max
  Clone ID: 700942807H1
acttgaaatgactgaaaaagcgagtgatgatgataaagaagaggaggaggaggaggaggaggaggaagaaggagccattgaagatagcaaaaatggtttttttgttcctgggcctcttctttctctcaaggaacagatcgaacgggacaaggaggacgaaagcctaaggagatggaaagagaagctgttgggttgcttggaaagtgatatagatggtcaattggatcctgaagtgaaa

SEQ ID NO: 39595 - DNA, 259 bp, Glycine max
  Clone ID: 700942838H1
ctctgccactttctgagtacaatacaacactgccatggctgcctcagtctccactattggagctgtcaacagagctccactgagcttgaacagctctgaagctggagattcggttcccagttcagccttctttggcacaagcttgaagaaggttactgcctcaagggtccctaacgtcaagatttcttctggaagtttcaaaatcgttgcggcggagaaagagattgatgagcaacaacagacaaacaaggacagatgg

SEQ ID NO: 39596 - DNA, 248 bp, Glycine max
  unsure (1)..(248): unsure at all n locations
  Clone ID: 700942841H1
cagcagaccagcatccagcgcacatccaccacgtccgcaaaactcccacaccgcttgcttccccggcncctcncctctctcacatcaaatccatttcgccaaatttcacatcactcttcacacantagaaaatagtcctccgcggccggctatcctaggtttcctgtgacgatgctcccctactcttccatcccggaagccgtagcggcgctgggccgcaacctcaccttcgcggagaccctctggtt

SEQ ID NO: 39597 - DNA, 263 bp, Glycine max
  Clone ID: 700942763H1
ccggtttcgctctctctctctctctcatggcgaatctagcacacttctccaagagagccctaagaagcgcacacgcgctcgcaaggcaccacgtgcagccgcggttgtggcagcggaaccgcttttgcgacggagcggcgaaatcgatatccccgtcggcggatcgcgtgaagtgggactaccgagggcagaggaagataatcccgttagggcagtggctccccaaagtggccgtggatgcttacgtagcacccaacgtggtc

SEQ ID NO: 39598 - DNA, 263 bp, Glycine max
  Clone ID: 700942764H1
gtccagtgtgtgtgatattccacccaggaatttgaagatgtcatccacctttattgggaactcgacatcaattcaagagatgtttaggagggtcagtgagcagttcactgctatgtaccggcgcaaagccttcttgcttggtacactggggagggtatggacgagatggagttcactgaggcagagagtaatatgaatgatttggtagcagagtaccagcagtaccaggatgcaacccagaggaggatgatgaatacgaggat

SEQ ID NO: 39599 - DNA, 237 bp, Glycine max
  Clone ID: 700942765H1
tcggctcgagattcttcaatttaaacacagaaacaaaatcaccaccttcaaagtcttctctctcgagaatcatcgaataaaactagggtttccgatcgtcgtcgaggagaatgccgaagaacaagggaaagggaggaaaaaccggaagcgcgggaagaacgatgcggacgacgagaagcgggagcttgtgttcaaggatgacggccatgcactagctcaggtgctccggatgctggg

SEQ ID NO: 39600 - DNA, 252 bp, Glycine max
  Clone ID: 700942771H1
gcgtcaaataacatcaaaagtcttggtttccgaagatggaatgtctaatgtttttttgcccggtgaactaattggattgttgcgagccgaacgagcagggcgttccttagaagaggcgatttgctatcggttctattattggggataacaaaaacatctctgaatactcaaagtttcatatctgaagcaagttttcaagaaactgctagagttttatcaaaagccgctctccgggggcgcatagattggttg

SEQ ID NO: 39601 - DNA, 253 bp, Glycine max
  Clone ID: 700942772H1
caaaaacatggctctaacacttcgttcttcaacttcttttattaatcagaaggaaaccaaagtcctcaaaacttctgacaatgcccctgcaatagttagtttttcaaaattcaagccatcatcatcattttccggctccgggcaaaaaattccatgcaagaagctcatcacactcgtgagaaatgggagaaggtgctggctccgtcggtcgcacatagccacaatgattcaaagagagtacctgtgtatgtga

SEQ ID NO: 39602 - DNA, 238 bp, Glycine max
  Clone ID: 700942773H1
ataatgaaaataaaagaatgtcacagatcgaagtgaaagcaatatcttgtgggctatttcttgttttttgaggaaacttgtgattcatgtgttttcagttatgatactgtggccttttcatgtctttgagcagtgaatttgagtgatttgtgaaaatgggccacccggagaatataaatgcccttgcattttccagacaacataaaaattaaaaagttaaagtccacatgggtgacga

SEQ ID NO: 39603 - DNA, 255 bp, Glycine max
  Clone ID: 700942774H1
gttgtacctaaatagaatcttttcggttagactagaatgtcatgaaaggagagagggagtaattggtattttaagactatatttgatttttattttcaaaaaatatttttaatttttaaaatacaattaaagaggttgctcaaacatagttggtaggggtataaggcataaatgagagtttaaacaagaaaatggaaaaaacatctcttttgaattggttgttgagtaatataaaattattttttaaacaaaatt

SEQ ID NO: 39604 - DNA, 258 bp, Glycine max
  Clone ID: 700942776H1
gcttcccagaggagaccaaataacatctgcactttccaaggcaattcaagagtccaggattgctattactgtgctttctcaaaactatgcttcttcctcgttttgtttagatgaacttgtaaccatccttcatgcaagaggaaagggttgttggttataccggtcttttacaaaatagatccttctgatgtcagacaccagaaaggtagttatggagaagcaatggctaagcatcagaagagcttcaaagctaagaag

SEQ ID NO: 39605 - DNA, 260 bp, Glycine max
  Clone ID: 700942777H1
ttcaagtcaagaagaccacaaccacgagcactagtagcattctttctcattctgtccatcttctcactaccggcttcatcatcatcatcttcttcttcttccattgatgacgtgaaatcaagcaccatcattctcaattcaaggaagcccccgaattctacaactccccagaatgcgcctccctcaccgacaacgaggtagacagtagcgacaggtacatatgttcggaggaagcggtacacgtggcaatgacgctggac

SEQ ID NO: 39606 - DNA, 262 bp, Glycine max
  Clone ID: 700942780H1
ctctgctgcagtgaggtgaggggaggtttgtttgttgtttcgtttttcctttcctttccgccagaatccgttgagaatggcgttgccggtagtcgtcgatgcagagtacctcaaggaggtcgacaaggctcgccggatctccgcgcactcatcgctaacaggaactgcgctcctctcatgctccgattagcctggcacgatgccggaacttacgatgctaagaccaagaccggtggacctaacggttcgatccggaacgagg

SEQ ID NO: 39607 - DNA, 248 bp, Glycine max
  Clone ID: 700942781H1
aattcttgagacctacacaggctttgagggacttaaatccctggttgatgttggtggaggaactggagctgtagtcaacatgattgtctcaaagtatcccactattaagggcattaattttgattgccccatgtcattgaagatgccccatcttatccaggagtggaacatgttggtggagatatgtttgtcagtgttccaaaagctgatgctatttttatgaagtggatttgccacgattggagtga

SEQ ID NO: 39608 - DNA, 247 bp, Glycine max
  Clone ID: 700942784H1
gaaaacactcacaaagacacagagtgcgttcgttgacgacaaacacacacaaacacacaacaaaagctcgccggaaaatctttctccggcgacctggaattccgacgaaggtagttgcggctccttctcccgaaactgaggccctcaaagtataaactttggtggtggtgggtaggatctggcggtgtatgatgggatcttgcatatgccagttggagactccggcgaggttgctttggaccacaag

SEQ ID NO: 39609 - DNA, 246 bp, Glycine max
  Clone ID: 700942787H1
caaaacactcataacacaaagcacaaagcaaagctcatccttgagttaaaaaatggcagcagcttcttccatggctctctcatccccatctttggctggcaaggccgtgaagctgggcccatcagcccagaagtgggaagggtgagcatgaggaagaccgtcaccaagcaggtctcctcaggaagcccatggtacggcccagaccgagtcaagtacttgggcccattctctggcgagccccgtcct

SEQ ID NO: 39610 - DNA, 252 bp, Glycine max
  Clone ID: 700942788H1
aattcctatcatttcctatatcatctaaaccttcttttaacaaaaaccaaaatgatgaacaagcaatctgtcttgcccttctcactagcattgctagtttcatttttgaattgcaccaccaccttagccaattatcaccagcttctgcccctctcaaaccaccccaacctgtccctaccataccagctgctgctcctcaacaaccattggttccttcattgccacaatcaccaagtgattccacccctgaca

SEQ ID NO: 39611 - DNA, 253 bp, Glycine max
  Clone ID: 700942790H1
gtcttcatcctaacgacgagatttttgggtaaaaggaagaagaagctgttctggttggcatcaatctctcctcttgtatccgttgttctgtcaactctaattgtgtttctcacaagagctgataaaaatgagttaaaattgtgaaacatgtcaaaggggggttgaatccaagctccctccatcagttagacttcaataacccctacattggagaagtggccaaaattggactagtggttgctgtcgttgccct

SEQ ID NO: 39612 - DNA, 255 bp, Glycine max
  Clone ID: 700942791H1
gctgctggctctaatattactcttcttgctgaccagattaaaacatttaagcctgaagttgttggtcttagaaatgagtctttaattgatgaactcaaagaggctttggctgatgtggatcacaaacccaaatcatccctggagagcaaggagtcattgaggccgctcgtcaccctgatgccaccactgtagttacaggcatagttggttgtgcaggattaaagccaacagttgcagcaattgaagcagggaaag

SEQ ID NO: 39613 - DNA, 257 bp, Glycine max
  Clone ID: 700942792H1
aaaaggttaggaatttgaagcagaagtaagaactaggaagagatgggagtggatttgagacaagtggtggcaggtgtcctcaccctcacaatgtttgtcatgcttggaaatatgatcaaaagagaccactcgataattcacttcaagaaaagcttccaggaggatcggaagatgccaactttgagactgctacgtttgatgctactcatgtaagaaagaatatagggctttggaagggagatgtggatgacctaaaa

SEQ ID NO: 39614 - DNA, 82 bp, Glycine max
  Clone ID: 700942793H1
tgcagaagtaggaaggagagatgaatctgcattaaacaattctggcagcaatgttggcggaaatctggagcgtcgggaagtt

SEQ ID NO: 39615 - DNA, 259 bp, Glycine max
  Clone ID: 700942794H1
ttgcaatcagagagtgaagagaagagaagaggttgatgggtcggcgaaagaacaacagcaacaacaatcagtgctcctcaagcaaggaagacgctgacatgaatagcaaccaccttcggtttgaagaagctgcgaggctgtcgacgagagttccaacctcgaccaatccatgtgcgacatcgaagaatccgatgataaaaccagcgccgactattacttcgattcctactctcattttggaattcacgaagaaatgttg

SEQ ID NO: 39616 - DNA, 260 bp, Glycine max
  Clone ID: 700942796H1
ttccgggaactgatttgttctgcgatgtctatcagtatcctatggcagttaaggttcccggggttatgataatacgagtcaagtctgcgttgctttgctttgcaaatgccaatttcgttagagaaaggatcataaatgggtcactgaggaagaatcagaagatgacaagggaaattcaagaagcaccattcaactccaaattcttgacacctccaatttggtgaacattgacaccgctggaatcactgctctagaggaac

SEQ ID NO: 39617 - DNA, 206 bp, Glycine max
  Clone ID: 700942801H1
caagattttgttcaacactactccattggtgttggatacttcttggtgttcatgtatgaagggaattcatccttcattgttcatatttttaatttgagtacctctgaggtaaactatcaatcggccattagaaaccgtaatgaaggatcttgcttggccaattatcatcatatttttgatgaaatggaagatgtagactccctgga

SEQ ID NO: 39618 - DNA, 224 bp, Glycine max
  Clone ID: 700942802H1
cggctcgagccggtctcatgatcttcactattactgcgacgatggttgatcaggctggataccctaggctctcttgttttggactcatgaaaaacagcagagctggcagaagctatagtacaaatttagctttcaccccacctgagtatttgaggacaggaagaatcacccgagaaagtgtaatatacagttttggcacactcttccttgatcttctgagtggc

SEQ ID NO: 39619 - DNA, 258 bp, Glycine max
  Clone ID: 700942803H1
tgggttcaacaggtgagactcagattactccaacccatgtatctgatgaagaggcaaaccttttcgccatgcaactagccagtgcctcagtactccctatggttctcaaatcagctcttgagcttgatctgttggaaatcatagccaaggctggccctggtgttcacctttccccctccgacattgcttctcggctcccaacacacaaccctgatgcacccgttatgttggaccgtatattgcgcctcttggcttgct

SEQ ID NO: 39620 - DNA, 263 bp, Glycine max
  Clone ID: 700942804H1
gtttaccacttttgagtgccacagagttctgagtttcataggagaaaaacaatgacagaagaacaaaccaaaacggttgagtcagaatcagtaacaccaccacctgctgctgctgctccttcacaggttcctcctgctgctgaggctgaacatgttcctgaggctccaaaggatgtgactgaggagaaatctgtaattccagtgccttcttctgatgacaagcctgatgaatccaaggctcttgtcttggttgagaagactca

SEQ ID NO: 39621 - DNA, 262 bp, Glycine max
  Clone ID: 700942806H1
tttgggctttcagtttcacataacaaaccgttcgcagaacatcccataaaagcttagcttgtattcagtttctcttctcccaacgtttttgtcgctagtaacagaatattacaaagtaacggctttctcagtggagcgcttgatttgggttggtgggtcaacttcaagtttcaatttttttttcatttttgtctggtcgattgagaaggctcagttgcagagacggtgggggtgggaaggttatggctttttgcccaatttt

SEQ ID NO: 39622 - DNA, 260 bp, Glycine max
  Clone ID: 700942759H1
ggagattagatgacaagcttcttcttgttgacatagatttgctggaaagcaagctgcacttctcattaagaaaccttccaaaggcaaaagctgcactcacggctgcaagaaccgctgcaaatgctatatatgtgccccagctcaacaatgtgccatagatctgcagagtggaatacttcatgctgaagagaaggattataaaactgcttatagttatttctttgaagcttttgaatcattcaatgctcttgatgacccca

SEQ ID NO: 39623 - DNA, 267 bp, Glycine max
  Clone ID: 700942715H1
taattgtataatttagggttgtgaaatcccaatttgtgttattgaaactagtttggcagaatttaggtgagtgatcacgaatctggtttgacttgccgtttacggatcagaggtgacacgtgtacaggaatgacatccatgacagcgggtgagggtggtaataataacgtcaactttggcctcaacgcgctacactgagtagattgctcttgtccgtagattgggtcccattcacaattattatgcaatcgggaccgtagatagggc

SEQ ID NO: 39624 - DNA, 254 bp, Glycine max
  Clone ID: 700942716H1
ctagaaaggaatacattaagggcctgactgagaaatttggagtgccacttgcaactcattagggccctgaaatacactagtaaatcttgtttcagatattacagcttaaggtttgtgatgtaattgttagtatattatttgtgtagttttatcataagagaagacttgtctatgaacctgaaacataccaagcatgagatgaaacagacccaagagcttatgatatatgtttatatactactagttcttgtctc

SEQ ID NO: 39625 - DNA, 264 bp, Glycine max
  Clone ID: 700942717H1
attcggctcgagactcaacctcgatatgactaataccaaacaaattcaaaaagactatgttgcttctttatttttattttttgtgactatgttgcttctttatagtataccgtaggaagtattgtgaaacataataacaccgtgctttcttgtactcccttacagcttatgatacttttgatgacatgaaatttaaagctttacaattgtatgtaaaaaaaaaaaaaaaaaaaacaaaaaagaaagaaaagaaatgatagcagg

SEQ ID NO: 39626 - DNA, 255 bp, Glycine max
  Clone ID: 700942719H1
cactcataacacaaagcacacagcaaagctcatccttgagttaaaaaatggcagcagcttcttccatggctctctcatccccatccttggctggcaaggccgtgaagctgggcccatcagccccagaagtgggaaggtgagcatgaggaagaccgtcaccaagcaggtctcctcaggaagcccatggtacggcccagaccgagtcaagtacttgggcccattctctggcgagcccccgtcctacctaaccggtga

SEQ ID NO: 39627 - DNA, 260 bp, Glycine max
  Clone ID: 700942721H1
tgggcagcatgaaggtgcatcagttcacacgtggattaatctgggagcacgaacctttcctcacacttggctatacaagattacgccctcttgctcccaagcttcccaacaccaaaactatcactacccctttcgattcaagagcttcatcaggcccgaaagtggccccagaaaacccgtttcctctgacgacactaagaaggatccaccttcaccccaaggccagattgaaacgcacccaggagggacacggtggaatc

SEQ ID NO: 39628 - DNA, 259 bp, Glycine max
  Clone ID: 700942722H1
gccatatctagtttgcacaggagcaagattttaaggatcgagtggaatggatacccttccagtcactgaggaacttcggagacaagatgagatcaggcacttgttgtcctgtttctgcttccaaaagccttcatttctgtaattgtggacaaattttagaccagcgttttaacccttctgatattagtggggtgccaaagaagagaaggttggacatgattgtggatactacatctcttgtgaacaaggaatcaaggaa

SEQ ID NO: 39629 - DNA, 243 bp, Glycine max
  Clone ID: 700942724H1
gaaattctgggttgttttctaatttagtagtatttaagtgtttttcctatgtactgagatttaggaactcggagtaatgtaattgctagtagcacatgtaaaaggctgcaagcctattatgcaataacatttgatactgcatttcaattatctccagtaaaatgtcattggttaaagcttaaaaagagatataaatgggtgcccgcaactaggacgctcgtcaacccggttattattccggac

SEQ ID NO: 39630 - DNA, 262 bp, Glycine max
  Clone ID: 700942725H1
attgagtcttggcgtggccaaagtagcagaaaataaaagtttcaaaggaagcctgatgggaattagcattggcacagtaacacaagccggaacagtcactagcacacagaaaatatggaggagtttacaagctctcgggcaatggcctttgcatactccttttccattatcctcatcgaaattcaggacaccataaaatctcctcctgcagagcacaagaccatgagaaaggccacaactttgagcatcgcagttactacag

SEQ ID NO: 39631 - DNA, 257 bp, Glycine max
  Clone ID: 700942726H1
ctcgaccgaatcggctcgagtttttttttttttttacgtttactactatggaaatttacctcacaaaccgcaattgcacagactcgctggagtgagaaaaagccagttggccagcggtaacgatcattttgaagaaactcagaggcagcacagcccgctataggaggatcacttggggtgcatacaagagccctttgctgtagatggctcagactctgttccagactgacttggcttgattcagccagcatcttctt

SEQ ID NO: 39632 - DNA, 261 bp, Glycine max
  Clone ID: 700942727H1
gtgacagtgtggaaggtcttctcttgtcttgctcgcgatcggagactttgaaaccctcccttccttctcctttcacttcttcatcccaagcattcgactatgtctccgttctcgaagctcttgtttctgatactgatgtgttcgtctcatccgcgatcgcctccgacgacgaaagagtgcgcgaattggtgtccctgcaatcgagatccaaatcgggcctaatccggctgaacgaccaatccctggcccgcttcctcaccg

SEQ ID NO: 39633 - DNA, 266 bp, Glycine max
  Clone ID: 700942728H1
gggagtggatgggagagaagtacttgttgcatttctttgactatgatatcgggcataaaaaatacatcatatggggtttaactgctgggatcttgattagggctgcatcagttgtgtaccaacggcagccagcttttgtggagcagaaccctaaattcaagcttccacaggatgtatccaatgacactacaataccttgagttcattgtttattgtattttgtccttgatacttgtccttaatcgtgcaaaaaaactcgtagcagc

SEQ ID NO: 39634 - DNA, 263 bp, Glycine max
  Clone ID: 700942729H1
gttactagcagctatgggatttgacaacagcactcgtttatatcttgcctctcataaggtctatggtggagaggcaaggatttcaactttgagggaattatttcctcggatggaagacaagaagagccttgcttcatctgagagcgttctgagataaagggaaaagcttctctactagctgcacttgactactatgttggcttgcatagtgacatatttatctctgcttccccaggaaacatgcacaatgcattggttggaca

SEQ ID NO: 39635 - DNA, 267 bp, Glycine max
  Clone ID: 700942730H1
cttcaagcagagatagcccttaattaggaataatgataaactattaatgtgtagctaaaaacttatgtattatgtctgtgatggttttcgtgcactctggtgttttgtgttaaacaaacatccttagaataaagtggtcatgtcttgcctttcagcaagttcaagtgttttggacttgtgatgggtgtgttaagctcatggttgcttctttttttttttttttaaatgtttggaaattggccgcttctgtataaagttcggctaatc

SEQ ID NO: 39636 - DNA, 270 bp, Glycine max
  Clone ID: 700942731H1
aaaccgacgtcaatggcagcctcatcctccttctccaccctcttctccttcctcctccctccaaagccacaccctcctcccatcatcactcgcttcccactccagaagctacgtgccatgcatcaggaccaggaccaccactgtcggcggactgtccgccgtggcgaacccgtcccacgcgcatgcgaatacactcttcttccggtcggcgtacaacgtgcaggtggtggtggacgagaacgagccggaggagaggctcctcaaccggtt

SEQ ID NO: 39637 - DNA, 196 bp, Glycine max
  Clone ID: 700942732H1
gagaatggctcccaagggtttaacctttctggctgtgttaatatgcgtttcagcactgtcactgagtccttctgttgcgggggaagggcaaaataatggccttgttatgaacttctacaaggaatcatgccctcaggctgaaacatcatcacagaacaagtcaagcttctctacaagcgccacaagaacactgctt

SEQ ID NO: 39638 - DNA, 255 bp, Glycine max
  Clone ID: 700942735H1
cgaaaacacttggttgatccaacactcctccgccttatcaagaaagttaatcaaaagaaaaagatgaaagtgaaagatcttcggcgttcccgcaaatgcttgaggaagagaaagttgaagggagaagaagagtggagattttgatggcactcatagacctcaaagtggtgtcaagggttttgagaatgagtgagttaagtgaggaacagttgcattggtgtgaagagaagatgagcaaagtgagggtattggacg

SEQ ID NO: 39639 - DNA, 258 bp, Glycine max
  Clone ID: 700942737H1
aaagaatggcaatgagcataggcattgcaagaggagttcaattcttacacacaggagttgctcctggcatatatggcaacaatttaaagattgagaacattctgttggatgatagtctcaatgcaaaagtcagagatacaacattccattgccatccaagattgcacatattgaacaaaatgccaccaatcatattggcagcacaaacgatgcagaaaaggaagatatctatcagttgggtattattctacttgaagt

SEQ ID NO: 39640 - DNA, 260 bp, Glycine max
  Clone ID: 700942738H1
tttggtttttgcttccctatccgctctctcttcttcacttcagtatagctgagtggtaccttacaccaccggttctgcacctcttctttctcctccttctacttctagtgttgccacaaagctctactccggattgaacttcaagctgcgagtcctttcggagctgcaaaacctaacgtaaccgctgagttttatggaaaagttcacaacactcttcactgtcggtatgctaaccacaatacatcaatggcacgtattcg

SEQ ID NO: 39641 - DNA, 71 bp, Glycine max
  Clone ID: 700942741H1
gtcatgttttttacatgcacaaaagatgttttccctgaaaaggaaaagaagaaaaaagaaagaaaagaaaa

SEQ ID NO: 39642 - DNA, 253 bp, Glycine max
  Clone ID: 700942742H1
ctaagcttcccctttctttcactctcatcagatccataacgtcgttgcgcgaaaccctatctctgaaccagcaaacatgtctgcagccatggatatgtcgctcgacgacataatcaagaacaacaaaaagtctggaccggaagttcacgtggccggacccgaccctccggatccggacctattcgccggctccccaaccgtgcggccaaccgggccgaaccttatgccccggttagggcgccgaagcaacgtg

SEQ ID NO: 39643 - DNA, 262 bp, Glycine max
  Clone ID: 700942743H1
caatagcattcgtttatatcttgcctctcacaaggtctatggtggagaggcaaagatttcaactttgagggaattatttcctctgatggaagacaagaagagccttacttcatctgaagagcgttctcagataaaggaaaagcttctctattagctgcacttgactactatgttggcttgcatagtgacatcttcatctctgctcccccaggaaatatgcacaatgcattggttggacaccggacatacttgaacttaaaga

SEQ ID NO: 39644 - DNA, 268 bp, Glycine max
  Clone ID: 700942748H1
cttcgtttcttttcgtgaaacaaaagaaaacaaaagattaggttttgtgatgtcgggcatggagaggcttcagaggatgttcgcgggtgcaggtggagcgctgggccatcccccaccggattcccccaccctcgattcctcgagcaggtctacatctcctccctcgcccttctcaaaatgctcaaacacggaagagctggggtacccatggaagtgatgggtctgatgttgggggagttcgtggatgagtacaccgttcgcgttgtgg

SEQ ID NO: 39645 - DNA, 253 bp, Glycine max
  Clone ID: 700942752H1
aatcctcaagcttcaatttgctttgtgctcactcatctatctattataaccaaacactcttcttcatattcttcttcttcttcttgttcttgttctatctgtgacgagcatcatggcctcgagagcagtgcattgttggctatgtgtgtgcttccggccatggttgtggccattcgcccagcaaagaaccctttttgcgtgaagggtcgcgtctactgtgacccttgccgtgctggttttgagacctcagcaa

SEQ ID NO: 39646 - DNA, 256 bp, Glycine max
  Clone ID: 700942756H1
ctatttcttcatcggttgttcaagtaaatggccttcgtcaccactgctgaagtgtgtgatgcgaacccccagttaattttgagtggggagcttcgtgcccttcagccagtttttcagatttacggtcgtcgacaggtcttctctggacctatagttaccttgaaggtgtttgaagacaatgttttggttcgtgagttccttgaagagaaaggcaatggaagagtgcttgttgttgatggaggcgcgagtttacgct

SEQ ID NO: 39647 - DNA, 249 bp, Glycine max
  Clone ID: 700942714H1
aaagatttgccttgaccatggggcaagagcatttagtgacggtgtgctgtttatgggctgtaacatgttcccgtcttccatctgtctccttggggagtctgagaattggtttgaagaagagacctctagatcgtgatagtagaatgcggctagaaaggcaagagaaggtctaagatctgtgagagcaatgatgggtgcacatgagcagtttagtggtaagtcagaaggtgaagatataggacctttgaa

SEQ ID NO: 39648 - DNA, 273 bp, Glycine max
  Clone ID: 700942680H1
gaagctagtagttcatcttgaatttctatgtacaaagtggtccaatcccgtcattcataagaattcaagagaagctaatagttcatcttcaactacgattggatatcttgactggaacagtggtttagtggtttctacagacgaaaatcaatcccaagggaaaatctggaagcttcatggaattgccaattattgtaatccaaggtcctccttggatgcatctagagggaacacctgcttgtgctggatatataccggttccagttattttct

SEQ ID NO: 39649 - DNA, 276 bp, Glycine max
  Clone ID: 700942681H1
taagggttctgctcctatcaatctttctgatcgtctcaatcaggtgcttcggtgggccttgggttcaattgagatctttctaagcaggcattgtcccttgtggtatggctacaatgggaagttgaagcctctgatgaggcttgcttatattaacaccattgtctacccgtttacctcaatcccattgattgcttactgtacgcttcctgcattttgtcttctcacaaataaatttattattcctgagataagcaactttgccagtatgtggttcat

SEQ ID NO: 39650 - DNA, 274 bp, Glycine max
  Clone ID: 700942682H1
ttccaccgatccttactacttaagtttcattttataagcttgttaataaaatatagtacttatgttgttagagtgagcaacaattgtaatggttctgtattgatggtttcattctgaagattgccttccagattttaacaatctgatgatgagaaggcaatcagcttgtatgactctatctgcattatgatacatgtttatcgggtttcttaactacgtttaaacattgtagctatatattgtgagtttttctgtggaaaattattgtcttttc

SEQ ID NO: 39651 - DNA, 266 bp, Glycine max
  unsure (1)..(266): unsure at all n locations
  Clone ID: 700942683H1
gaatacataaacatcaagatttcagttccacacaacatacgaccccatctcatatactgnttcaggtctatacatnacaataccacatnncctannanannaattattcacaaaatctcttcacctctgtgatgaccatggaatacagaaccttagaactcaacatcatatccgcaaaggacatcaagcacgttaacctcttctccaagatggacgtatacgccgtcgttacgctctccggcgaccctctccaccctcagggcgcc

SEQ ID NO: 39652 - DNA, 276 bp, Glycine max
  unsure (1)..(276): unsure at all n locations
  Clone ID: 700942684H1
ctcatccccccttcctcaaagccccgccnctcgncctcnctccacgtctgncnctccctcctctcctccctcgacctcaacggcgtcgttcgctgcgccgtctgcaaagaccaaattaccccccacgccgaagccaaacaattaccctgcaaacacttataccactccgattgcatcacgccgtggctcgaactccacgcctcgtgtccgctatgcaggtttcggttggaagaagaggaggaagaaggcggtgacggcgttatgacgaagatcagg

SEQ ID NO: 39653 - DNA, 275 bp, Glycine max
  Clone ID: 700942686H1
gtttgggattggagggattgacgctgcgtctcttcctcttctctttcgatccatccctcattcctcatcctccaatccaaccacctcagcctcacactcacatatacacatatctgaacgcgtatcgtccctcctatggcttcaaagcgcatcctcaaggagctcaaggacttgcagaaagacccaccaacttcttgcagcgctggtccagtagctgaggacatgttccattggcaagcaacaataatgggtcctgctgatagtccttatgctgg

SEQ ID NO: 39654 - DNA, 275 bp, Glycine max
  Clone ID: 700942687H1
caaaaaacacacacgacacactcccatacacacacgttgtttcgcacacattccttcattccgcagcagcaaacatctataccttaaacgacaacaatggccgatgccgaggatattcaacccctcgtttgcgataatggaaccggaatggtcaaggctggttttgccggagatgatgcgccgagggcggtgttccccagcattgtggggcgtccacgtcacacgggagtgatggttgggatggggcagaaggatgcgtatgttggggacgaggc

SEQ ID NO: 39655 - DNA, 103 bp, Glycine max
  Clone ID: 700942688H1
cttttacagctttcggaacacttgaagaaataccttggtaccaaacatgaactagaagcaggattttcatggtgtctcattcatagattagagaaaccagagg

SEQ ID NO: 39656 - DNA, 274 bp, Glycine max
  Clone ID: 700942690H1
gtcctcttccatctcctccgccacgcccttcacctcttcaacgaatcgtagtcctccaaagacacgccgtggttttcgggtggagtcgttgaagcggagttcgaaaccagcgtctgcggagttggtgaaggaccccaataaggacttgtcccgcattctccgaaccgaagccgccatcagaggcgttcataacaaggccaagtcttcctcccacaaacagctcccgcccaaggcccttctcgaatccctcgacgacgccatcaaacgctgtcgt

SEQ ID NO: 39657 - DNA, 271 bp, Glycine max
  Clone ID: 700942691H1
caagaattcatctattcatttcagcccatcagcatggcgaaggagaagaaaaacttgtccaacaagaacaagaagccaagcaatgcagacgaggttcacttccgcggagtccggaagcgcccctggggccgctatgccgccgagatccgcgaccctggaaagaagacccgcgtctggctcggcaccttcgacaccgccgaggatgccgcccgcgcctacgacgtcgccgcccgaaacttccgtggccccaaagccaaaaccaacttcccct

SEQ ID NO: 39658 - DNA, 271 bp, Glycine max
  Clone ID: 700942692H1
cgagtggggagagtttgtaaattgcttcttccaatggcgagttgcgaataaagcgaagatagaaaaagtgcggcaaaggatgtgtgtgcttgcttcattgtttgcgttgtgaagtaggtgatcgaagtcgttgaatgctatattcgtttacgaaatgaaggaggacgcggagaaagataaaggcaaagacaacaataggatttggggagctattctcttcggcttaattggcgccaccgtcactacctttgcggtcggtcagctgcggagg

SEQ ID NO: 39659 - DNA, 271 bp, Glycine max
  Clone ID: 700942693H1
ccacccgtcggtgttcctcctccccaaggttacccaccgccggattcttacggaaaggacgcgtaccctccgccagggtacccgccgcaaggaggataccctccgcaggcgtatccagcacaggggtaccctccaccctacgcgcctcctcagtacgctcagcctccgccgcaacaacaccagaattcatctggcgcaggttgcttagaaggatgtttggctgctctctgctgctgctgtctgttggatgcgtgcttctgagaggagaaga

SEQ ID NO: 39660 - DNA, 273 bp, Glycine max
  Clone ID: 700942694H1
gcaaggaccactcttccattcagtcattcaacttctcactcactgtttctcagaacacaaaagatggtgatgatgatgcagaaacaccttctcttctcactttcacttctcctaatggttctcttcacttcagctcaaaccaccccagcaccatcaccttcctctgccccaacagacttcatcagaatcctcaaaaaagccggaggattcaccacccttatccgtctcctcaccacaacacaagtctcaacccaaatcaacgcccagcttttg

SEQ ID NO: 39661 - DNA, 259 bp, Glycine max
  Clone ID: 700942702H1
ctactatataagttgtggacaattggaaatcagcatcacctatcacttatttagtacgttatctttgtgttttggtttgtagaataaacaaggtatgagtgtgaaacgaatcctttgaagcccttgctcaattataagttggaagaaaatagagaaatcaggtgggctttgagtaatggtagtagtttgtgtgtgaagaaagagggtgaggtatttcagcgtattatgccgcaataaaggaaataacaaaaataccaag

SEQ ID NO: 39662 - DNA, 255 bp, Glycine max
  Clone ID: 700942703H1
cgaaaatgagcggactaggggaagaagaagggacgagcttcgtgatcgattgcgcgaagcggtggaggataagattatggacattgcttctctggagaagttccttcaggagaggattaaggtcggcggcaagccggtgcactcggcgactccattaccgtcaccagggacaagagcaagatcaccgtcacctccgacagcaacttctctaaacggtatctgaaatatttgaccacgaagtacttgaaaaagcac

SEQ ID NO: 39663 - DNA, 236 bp, Glycine max
  Clone ID: 700942704H1
aaaaaaaaaaaagaaaaaaaaaaaaaaaaactaagaaaaagaaatgaatgcagcattcagagagagtgcagacaatgagctccaggaatcctctcgtgtgtgatgagccacttgtgtctgttgacttcagtgcactgtgtgtcctcaaccgttgactcatcgttgaccatggtcatggggagatgacatggttaaggtgattgccttggtatgacaatttgtctgggctattccca

SEQ ID NO: 39664 - DNA, 260 bp, Glycine max
  Clone ID: 700942705H1
gggaaactaagatcaaattttcttggaacaaagttcacaatctatgatggccagccacctcatgcaggagcaaagattatgaaaagtcgctccacaaggctggtgaatctaaagcaagtttcacccaaggtccctacagaaactatccagtggcccatatttcatatgaattgaatgtgcttggctcaagggggcctaggagaatgcattgtgtcatggattccattcctgccgctgcaattgaacctggaggtgtagct

SEQ ID NO: 39665 - DNA, 263 bp, Glycine max
  Clone ID: 700942706H1
ctcaagctgaatttagtaaacctgctaagcaacatgctaattcagatgattcaaatcacaatagaggtgcaagtgctggaagaagtcctaccagggattctggggagctaaaccaaggacgtgctttgttgttggctatcctggcaaaaaaagtcctggccaaaaagcatctgaacctcctgcccccaaacatggtcagggattttcaaaaagcccttcaccaaatagcatgcctaagcgtattaaaaaagggcgtggcttta

SEQ ID NO: 39666 - DNA, 258 bp, Glycine max
  Clone ID: 700942707H1
gttggaatggtctgcgtgtaacaacaacagtaccaacttccaacttgaaatagatgtgctttgcaaattacagcctcactttaacattgaatcgttgagaataaaaggctataaaggaaccagatctcctgattggatggaaattcttcctactagaatatgatctgtctaaaattgcgtgattgtgacaactgtagtatgcttccttcacttggacgactttcttctctcaaagtccttaagattgcacgattgaat

SEQ ID NO: 39667 - DNA, 226 bp, Glycine max
  Clone ID: 700942708H1
cgcggattaagacccgcaaacggaatattgctgcgccgctggaccctgcagcattctcggatgcagtggtccagatttatttggataatgctggtgatctggaacttattgctaagagcattgaatcttcagaccttacttttcaagatacggcgatacgttgttttgatgttgatttcactgggggtcgtacacaacctggaactaccaaggctaatgaggggga

SEQ ID NO: 39668 - DNA, 267 bp, Glycine max
  Clone ID: 700942710H1
agcaattcctggagagggcctacaacaatgcaaaaactattctgaccactcacaacaaggagcttcatgcacttgcaaatgcccttctggagcacgagacactttcaggaactcagataaagacattgcttgcccaagttagatctcagatgctgcagcagcagcagcagcagccaccccaaacaattgaagctcagagcagtttacaatccaacacggtgcctccatcatccagcaacccggcatctgctgctgccgctgctgctg

SEQ ID NO: 39669 - DNA, 266 bp, Glycine max
  Clone ID: 700942711H1
ccagcggcaacatttgtgttgaataatttactttatttgtggtttgaggagtgagtgagtgagtgatgtctgagtgtggctgttccgagtcagacccttcgtgtggttgttggtcgagcagcagcagcagatctgtggcccaactgaactgaagctgtaccgagcattcatcttctgtgttcccatcttcttcactctcattctcctctttctcttctatctcttctacctccgaccgcgaactaggctccattggatttcacact

SEQ ID NO: 39670 - DNA, 265 bp, Glycine max
  Clone ID: 700942712H1
gaaacaaacaaaccaacgaggctctctctctcattcattattgatttcgagtgaagagagagattcgagatttgcgattccgcaatggcttcttcttccacgacaatgcggttatacgcggcctccaccggcgccgaggcgcgcttcctcgccggagctccgtcgccggattcatcggcgtcgcggccagatcctccgccaaatcgaggctccgcttcatcggaaggaacgcgaacttgagcctccggatgaggaggatgagctc

SEQ ID NO: 39671 - DNA, 267 bp, Glycine max
  Clone ID: 700942713H1
tacagctgctgcttcacactgggtaggcatctgtaggatttgagcaatctgctttggctcatagtagaggtcatgcatccaaggctaatgacaatggagctgttaatcctgatcctggcagataacattgtgtgatcgacagaccgtgctcaatggaagttttaaaaaatgagtccaaaatctcttgcagattagcacacaggctatattttagagtcattgaggttaaccgcatcaaaataactactgaatcctaatttcaggact

SEQ ID NO: 39672 - DNA, 272 bp, Glycine max
  Clone ID: 700942679H1
gcggattattttcgatttgtcgattaatagaagttcatcttgttcattgacatctcgtaaatatctttcgcttcgtccaagcaggatctgaagtatctgccttattgggtcgattgccttctgctgtgggttatcaacccactcttagtactgaaatgggttctttacaagaaagaatcacttctaccaaagaggggtccttaacttctattcaagcagtttatgtacccgcagacgatttaaccgatcctgcgcctgctacgacatttgca

SEQ ID NO: 39673 - DNA, 279 bp, Glycine max
  Clone ID: 700942643H1
agcagatctgaggtgtaccacggggacgtcatgtgccaagtgaagtccaaggagcttctcaaggatatcgccctccccaactgccttcttcccctcaaggacatggatgagtgcggctacgactgacaaaccggcttcgtctggctcaaacaaaagaagagttacacccacaagttcgacaagatcggaaagcttgtctcctacgcgcccgaggtaactgctcatgtccaacaaggtaaaattaccaaactcaccggggttaagaccaaggagctcttg

SEQ ID NO: 39674 - DNA, 275 bp, Glycine max
  Clone ID: 700942645H1
ccctaaacgactctatctctcttcgttttgtttgtccttgcgctcctcctcgttcgttcgttctccctcgcgtagatcggcaatggcggagaccgagacgtttgctttccaggctgagatcaaccagctcctcagtctcatcatcaacaccttctactccaacaaggaaatcttccttcgtgaactcatcagcaacgcctctgatgctttggacaagattagatttgagagtttgacggacaagagcaagctcgatgctcagccagagttgttca

SEQ ID NO: 39675 - DNA, 275 bp, Glycine max
  Clone ID: 700942646H1
tgcttaatgataaggggaatactgctgtttatttgctgtatgcacatgctaggatctgtgccattatcaggaaatctggtaaagacatagaagaagtaaagagaaacgggaaaatagtgttggatcatgaagatgaacgtgcattggggcttcatttgctacaatttcctgaggtttatgaggaggcatgcacctatttgttgcccaatttcttgtgtgaatacctttacaatttggcagaaatctttacaaaaaaattttatgctaattgtcag

SEQ ID NO: 39676 - DNA, 93 bp, Glycine max
  Clone ID: 700942647H1
ttggaatagtaagtccagtatactgtaaaaagtgaaatttagaaactttcaatgagacaatgttacattgttttatccaacaacttttttctt

SEQ ID NO: 39677 - DNA, 278 bp, Glycine max
  Clone ID: 700942648H1
ctattattgtattgtagtagtagccatggggactttcaatcactatgtgattgttaagttcaaagatggtgtggcagttgatgatctcattcaagggttggagaagatggtctttgggattgaccatgtcaagtcctttgaatggggaaaggacattgaaagtcatgatatgctaagacaaggtttcactcatgctttcttgatgacattcaatgggaaagaggagttcaacgcatttcagactcacccaaatcatcttgagttctcgggagtgtttt

SEQ ID NO: 39678 - DNA, 283 bp, Glycine max
  Clone ID: 700942649H1
gctggtgcaagtgaagcaatggctcaaaccatgttgctcatgtctagtgtctctagcagttattccgtggatttgaagaaagaccttttcctccaattccagagtcaaagtttaaggcctaagttctctcaactctcattcaacccacttccaccatcaacttcttcctattcttcaccccgtacattcacaaccctggctctcttcaaatctaagacaaaagccgctcctgctaagactaaggttacaaagccaaagcaaaaggttgaagatggtatctttg

SEQ ID NO: 39679 - DNA, 277 bp, Glycine max
  Clone ID: 700942652H1
gaaaattgtatcaagtaaaaatgaagagcagtagaggtttcaaccaattattactgggcatgccaaagtcatagtatagtattcctattcattttcctggagagaggacgcaatatcctatacatcgatgtaacataggatattgcgtcctctctccaggagaatgaataggagaaattcattaataacaaaaaataaaaaaaaggggggccccccgattagtaacctcatcgcccgggaatttattccgggacggaaccctgagggcgtcccattt

SEQ ID NO: 39680 - DNA, 211 bp, Glycine max
  Clone ID: 700942653H1
gaaaattgtatcaagtaaaaatgaagagcagtagaggtttcaaccaattattactgggcatgccaaagttatagtatagtattcctattcattttcctggagagacgacgcaatatcctatacatcgatgtaacataggatattgcgtcctctctccaggaaaatgaataggagaatttcattattaccaaaaaagaaaaaaaaggggggc

SEQ ID NO: 39681 - DNA, 271 bp, Glycine max
  Clone ID: 700942655H1
gtagcatctcaacgaacacgtgatactcttgttggttagattattcaacccctgcaatatggagactatcccatttccatctagacaaatgcatgtgaaataattccggcctacacaaatcatgaatctaaacaagttaatggatcatttgacttcataggcgtaattcactacaccagtctcaatgtctcagacaattctgacgcccttaagaactagctgagagatttcagtgcagacatggcggcagatatctgttgagaagatctgt

SEQ ID NO: 39682 - DNA, 279 bp, Glycine max
  Clone ID: 700942656H1
gaaaattgtatcaagtaaaaatgaagagcagtagaggtttcaaccaattattactgggcatgccaaagtcatagtatagtattcctattcattttcctggagagacgacgcaatatcctatacatcgatgtaacataggatattgcgtcctctctccaggacaatgaataggagaaattcattaataacaaaaaataaaaaaaaggggggcccccgaattatagatctctttgccccggaatttaatccgggccgggacccttcaggcttacaagtttc

SEQ ID NO: 39683 - DNA, 278 bp, Glycine max
  Clone ID: 700942658H1
gcagcagagagtgcggtaggctcttccgagacccgaagcagccatggggatcgatctcaaggccggaggtaagagcaaaaagaccaaaagaacagcacccaagtccaatgatatctatctcaagctcttggtcaagctttatcgcttccttgttcggagaactggcagcaacttcaatgctgttatacttaagagattgttcatgagcaaggttaacaaacccccattgtctttgtcaaggttgattaagtatacgaaggggaaggaagataagattg

SEQ ID NO: 39684 - DNA, 155 bp, Glycine max
  unsure (1)..(155): unsure at all n locations
  Clone ID: 700942659H1
aaaatctgcagtttccccaaaccagcttcccggacaattcaattcaggaacttggagaaccattaagaatcagtcctcaggaaacctcttggatgagtccaaggaaagctctgcaccacacacagggcgaacacacatcncagagacacacagac

SEQ ID NO: 39685 - DNA, 276 bp, Glycine max
  Clone ID: 700942661H1
ctagtcaccaaccaaacctctgcattattctcttctctcactctctctaagctctcttttagtcttactcacaaacacttttttcactgcttccattacgaacatatatttattatatggctcctgaacttgtccccaccgttgtgaaatccagtgctgcgttcacgaaacccgcgacccttccatggcgtgcctacgtgacattcctcgccggaaacggtgactacgtgaaaggggtggttggcctcgccaaagggttgcgaaaggtgaaaaccg

SEQ ID NO: 39686 - DNA, 265 bp, Glycine max
  Clone ID: 700942662H1
caatgtaccatgacacccagcagctagcgccgcacggacctccgccgccgcaaggctacccgccggatgggtacggaaaggatcgatatccaccgccgcgatacccgtcagcgggatacccgccagccggataaccaccgccgggatatccgccacaacaaggctatcctccgccgccctccccgacgcaagggtatcctccgccctacgctcctcaatacgctcagccttcgacccgacaacaaaattcaactggccctggttg

SEQ ID NO: 39687 - DNA, 274 bp, Glycine max
  Clone ID: 700942663H1
cactgaacccttcattgatgagttttgcttgactgatatggatgaaacactgagggaagctggttttgtgaacataacatcaattcttacgagtcccagacacgctacaattacagcaacagcgcctcaatgaaacattatcttgagattttgtattttattttttatttttcttcgtacgtaaacatcttcttgggtttggcatcaagctagttagcccttggtagatgtatgtccaattgaatagcgtggtccaaaatcgattaaattatgt

SEQ ID NO: 39688 - DNA, 279 bp, Glycine max
  Clone ID: 700942664H1
caatgagttattacaaccagcagcaaccgccggtcggagttccgccgccgcaaggttatccgccggaggggtacggaaaggagggatatccaccgccgggatacccgccagcgggatacccgccagcgggatacccaccgccgggatatccgccacaacaaggctatcctccgccgccctacccggcgcaggggtatcctccgccctacgctcctcaatacgctcagcctccgccccgtcaacaaaattcaactggccctggttgtttggaaggctgtt

SEQ ID NO: 39689 - DNA, 277 bp, Glycine max
  Clone ID: 700942665H1
gctaaatcggaaaccagaagaagagaattgtggggagcttgtttttggtggtgctgatcctgctcactacaagggcaaacacacttatgtaccagttacacgaaaaggatattggcagtttgacatgggagatgtgcttatttctggtaaacccactggatatgctactaatgactgttcagcaattgcagactctggaacttctttgttagctggtccaacgactgtaattaccatgataaatcaagcaatcggagcagctggagttgtaagcaaa

SEQ ID NO: 39690 - DNA, 278 bp, Glycine max
  Clone ID: 700942666H1
gtgaattatgaaggagacaacacttgttgttacattgtatttggacagcacgtgccacgtatagcggaggaaaccatatattatcaaggatgggagagatagacgccacttaatttttttcatctattctcaatcgatgaaaagtgaccagtatatttctttctataaggtatctgcttgtctacgggatagtatccactcaattgttatgtaaattgtaagaaagtgacgttaataaaggctatgttaacataaaaaaaaaaaaaaaggggggccgc

SEQ ID NO: 39691 - DNA, 278 bp, Glycine max
  Clone ID: 700942667H1
ttccgattccagtatataaggctgttccaaagccatttccagtgtataaacctatggcagagccagttccagttccagtgtacaagcctattccaaagccagtgtataagcctattccaaagccagttccagtgtacaagcctataccaaagccagttccagttccagtgtctaagcctattccaaagccagtgtacaagcctattccgaagccagtgtataagcctattccaaagccagtaccagtgtacaagcctataccaaagccagttccagtt

SEQ ID NO: 39692 - DNA, 275 bp, Glycine max
  Clone ID: 700942669H1
gaggtctgtacgtggggtttcagagacagctgaaaagttgcgcaatttgtcagttaccaatcgaattcaatcatcaataggaatagggcaaccccgtcctcctccaccaatgaaggctggagggaattggatttctgaatctggaaacttcatccttgggcccgcacagcagatttcgactggaagaactttcgcaagaaaagttgccggatgagtaaatgtgggagatgattctataatgctcaatgttgtgaatgtgtgtcctaatataaaat

SEQ ID NO: 39693 - DNA, 130 bp, Glycine max
  unsure (1)..(130): unsure at all n locations
  Clone ID: 700942673H1
gntcttcttcgtcgttaacttcttcttttgttgtttgtgtgggtgttgggactctcagctgaaaatgtcaagctncnggggaaactgtggtgncgaaagcgcctgcaagggcggcaacggctgcggatgc

SEQ ID NO: 39694 - DNA, 275 bp, Glycine max
  Clone ID: 700942674H1
cagtggcattcaaaacgcgaggctctcgccgtttcgggtaatgcgcctcgaaattctggaatcgggagcctcgcggcgggtttggatctggaattgggggagggggaattgaatccaattgaaccgttagggtttggggcgcgggtgaggggggttgcatttatgaaggaagcggtgttgttaggagataagaagagcgagaggaaaagaggaggagggagggtggtttgggaagggttgatgatgatggggttgaagggacaaagtaataataa

SEQ ID NO: 39695 - DNA, 274 bp, Glycine max
  unsure (1)..(274): unsure at all n locations
  Clone ID: 700942676H1
ttagtcttctcttctggatttccacacacactacgattttcaatgacaaagcttttcaatttcctcagaatcctcttcctcaacctcttcatccttacaatatcagactttgnancaccggcactancggganccaccaacatcacccaagggcatgagaaagcaggacaaggcacaacctacaacaaactcctcaaagctaggcaaatagctgaaagaatcaattcacagctaaacaactcaaaccaaggcctaaccgtgtttgcaccactga

SEQ ID NO: 39696 - DNA, 273 bp, Glycine max
  Clone ID: 700942677H1
ctgaatgaatatccacaagttcatgaaattccagcattcaacaatatttacaatgacactggcatttttggtttccaagttacaacaggctcagattttgtatcaaaagccattgatatagctgctaatgagattcttgctgttgctactcctggacaagttgaccaggtacagctggatcgagccaaacaggctaccaaatctgcaattttgatgaatttggaatcaagaatggttgtttcagaagatataggaagacaaattttgacatat

SEQ ID NO: 39697 - DNA, 280 bp, Glycine max
  Clone ID: 700942642H1
gcttcttatgtatgtcaataggcatgatccttcagacaagtaccaccttctaagattgtatgattacttctattatagagaacatttgttaatagtatgtgaactacttaaagccaacttatatgagtttcacaaatttaatcgagtatcagggggtgaagtgtatttcacgatgccaaggttgcagtcaattaccattcagtgtttggatgcgcttcagtttttgcacagtcttggactaatacattgtgacttgaagccggagaatattttggttaag

SEQ ID NO: 39698 - DNA, 286 bp, Glycine max
  Clone ID: 700942606H1
gctgtgcccgtatggttcaaaatggtggagcaaaaacttatcagtgagaaggtgttctctttttggcttaatggggatccgaatgcgaaaaaaggtggtgaattagtttttggtggtgttgacccaaagcacttcaaaggaaaccacacttatgttccaattactgaaaaaggttactggcagattgaaatgggagattttttcgttggaggtgtttcaacaggtgtttgtgagggtggctgtgctgctattgtggattcaggaacatctttgcttgctggtccaa

SEQ ID NO: 39699 - DNA, 287 bp, Glycine max
  Clone ID: 700942607H1
ctcgagtcttttttatttttgtcttactgttctgaaaaatatcactcagtataaactcattgcatgtttacattatttcatgagtaaggcatgtgctttattagaatggttagtcatccttctttaaaatacctttccttttgttatacacattgttttaaaggaacttctatctcttaaagatttgtggtagtttctttttagtgttcatcgatattcaatcatgtttaacatttttgttgccctcttgagccactaaggcttactattaatatcttattcgcctc

SEQ ID NO: 39700 - DNA, 287 bp, Glycine max
  Clone ID: 700942608H1
ctcgagccgtgcgaggcttaagaaacctcgcagaaccaaagaaaactcactctcacacagtttggttcacaaaaacctttcacttctattttcactctttctagttccttctcccatattatagtacccttttatcccaagttacttaaatttaaaacctttattactgctcatacttgtttttcgctttgttaagttttaagaaaaatggaggcacattctccagttatagccaagaagctatggaatgtgttgaggatcaccttcttcatgatcaggaagggctt

SEQ ID NO: 39701 - DNA, 288 bp, Glycine max
  Clone ID: 700942609H1
aaatcctctgagagaaaaaaaaattagggttttgcatttcgggtcagacagactcagacatgggaggaggcaatgcccagaagtcaaagatggctcgcgagaagaacctcgagaagcagagggctgccgctaagggaagccagttggattcaaacaagaaagccatgtctattcagtgcaaggtgtgcatgcaaacatttatatgcaccacatcagaagtgaagtgcaaggagcatgctgaagccaaacaccccaaatctgatctccatgtttgttttcctcatctta

SEQ ID NO: 39702 - DNA, 275 bp, Glycine max
  Clone ID: 700942610H1
ctgatattctctctcttattgatggggttcttttcagttttctcagcctttcttcaaactctttctctgcgtgatagatgtgtttctcctgatcttcagctctggattctgggcttggttgcaaaaaggtcattttttattggcttatgatggtgcaggttttcagcagataagtagcttagcttcctttttcatatgccttgaaggtttttgatgctgtttatctgcactttttgaaccttattacctttgtgttgcatctgggtgttgttttg

SEQ ID NO: 39703 - DNA, 283 bp, Glycine max
  Clone ID: 700942611H1
ggaaatgaatgtgggccttgcctatgatttaaacacttccatgaagcaggcattaaatgatgacatgacattacctaaggacacacaagccccaagttcatcttcaaaaatcaaactcccggggacaaagagaaaagaaaacttgactggcaagaggaagaatgcgaggaaaaaaggatcgaatccgtctcctattcctccaacagaaatgacagaattgactgaagcaatgatacttgaatctaacatgtcatggagaagatccttaaattttgatatcgga

SEQ ID NO: 39704 - DNA, 281 bp, Glycine max
  Clone ID: 700942612H1
gaaggagctaaagccatgcttctgtggctacctcaaaaaccctagcttgaagcagtatgttaactctcctaatgccaaaaaaaccgttagttcttgtggtattgcctatccaacttgttaagcacctcttatatatatatataaaatgtgtgaacaatatatatatattgattaaaaaatatagtttaatttatatacacactttgatcctataaaaacatcttgacacaagcattcaatagaatttcaccactttatcatgacattttactataatgatg

SEQ ID NO: 39705 - DNA, 245 bp, Glycine max
  Clone ID: 700942615H1
gaagcccaactgcaatgtataaatatcacatgtttcctaatactgagatgaataatattatcgcttgtattatataaagaactttctagccttatgattagggtttaattattgatatgtttgcctttcctcatttctgaagctcttttcatatataatagcatgcacaaaagggatctaattcaattagttgaacatggtatgtgagtgatataaatcttttgataccgtcttcgatttccatc

SEQ ID NO: 39706 - DNA, 288 bp, Glycine max
  Clone ID: 700942617H1
ggtatctatggacatgcctccacatggtcatgcacttgcttctgatggagaaatggaactgaactcaaacccaggccctacaattccacaggttgaatgtcttgtcactggacatgaatctgtctcacctcaagaaaaactgactcaacctccaagtcccttactgatggagcatagttctgatgataaaacacttcatgcactgtatcaccaatgtggtgtctatggacagttctaatagacactaagatacctctgatggagaactggaacagagttctaccccag

SEQ ID NO: 39707 - DNA, 283 bp, Glycine max
  Clone ID: 700942620H1
tctgcattttgattgattccctcattcttcatccatagacatggccaccgtcacttctgcagccgttgctattccctcattcactggcctcaaggcaagcgcaggcaaagtgagtgccgcagttaaagtctcagctccccaagccacaaggttgggcatcaaggcttcgctgaaagacgttggagtcgctgttgtggccactgccgcgagtgcagtgctggctagcaacgccatggccattgaagtgttgctgggtggtgatgacgggtctctggctttcgtt

SEQ ID NO: 39708 - DNA, 70 bp, Glycine max
  Clone ID: 700942621H1
gagcatctatcacttgtcacaggactttgacttgattggcatccctttccatttttccacacaacatacg

SEQ ID NO: 39709 - DNA, 282 bp, Glycine max
  Clone ID: 700942624H1
tgattaccttgatctttacttgattcattggccatttagattgaaagatggtgccagcagaccccccaaagaaggagaagtattagagtttgacatggaaggggtgtggagagaaatggagaagcttgtcaaggaaaaccttgtcagagacattggaatatgcaatttcactcttacaaagctcgaaaagctgatgagcattgctcaaataatgccttctgtctgccagatggaaatgcatcctggatggagaaatgataagatgcttcaggcttgcaagaa

SEQ ID NO: 39710 - DNA, 282 bp, Glycine max
  Clone ID: 700942625H1
tgtctgagtccagtctctttgtttatgcctacaagatcatcatcaaaacctgtggtactacaaagctactgcttgcaatcccacccatattgaaatttgctgaaatgctttccctcaatgttagatctgtgaattacaccaggggaagtttcatctttcccggtgctcagccctatccccatcgcaacttttctgaggaagttgctattcttgatggctactttggcaagcttagtgcaggaagcaatgcttatattttgggtggccaagacaaatcacaga

SEQ ID NO: 39711 - DNA, 282 bp, Glycine max
  Clone ID: 700942626H1
gtgtcatttacgcttctcttctctgcagcaactatgcctcaccctaaggtcttcttcgacatgaccatcggcgctcaatctgctggccgcatcgtgatggagctctacgccgacgtcactccccgcaccgccgagaacttccgcgcgctttgcaccggcgagaagggcgtagggcggagcggcaagcccctccactacaagggctcgtccttccaccgcgtgatcccgagtttcatgtgtcagggtggcgacttcaccgccggaaacggaaccggcggcgag

SEQ ID NO: 39712 - DNA, 283 bp, Glycine max
  unsure (1)..(283): unsure at all n locations
  Clone ID: 700942627H1
agattatctcatcaccaccatcccgaaataaagtaacctcaaaccacaacttctttgcatcccacacaacatacgattttacnctctcctctctcntctctcnctgcgtttcactgcagaaccattacaagctccggagaaaccgcaacaaaaaaagaaaaaaacacacaaatttaacccaaaactgtaaccccagtatgccatgcttcacaccacaccattgctcctctcctcctccttctctctattttcttcttctctctctccgtcaccgctgcaagaa

SEQ ID NO: 39713 - DNA, 284 bp, Glycine max
  Clone ID: 700942632H1
ttcatttctaactttctttttctttgcagtttaccttgtagctcatacatatttcagtgtagagactagagacagacagatcctgtgtgcacttgttccgatccaacaccatatcgtatttctctggatgataagcttgagaaggggaaagaaatatcgccatcacttgttagagcaatggaagaatcattcatttcgttgatcatatactgaccggactatgcatcttcacgtttgtgcttagaagaactcgtgacaatacttgaatgcagagataaatatgg

SEQ ID NO: 39714 - DNA, 281 bp, Glycine max
  Clone ID: 700942635H1
gtcttcaagaggaggaagtcagagaacaaaattccacacggagcaaatggtgttaatggctacggttctaggccacaacaggtgtaggatatgaatatatgacgtgtagccagatagatatattggtttcttttgtaattttatgcatttttactcctatacgtgtgcattttattgttgctctcctttgtataatgttgagggtatttaatttaaggatactccagctgctcagagtctcagttttgaggcaattctttcttagggaagtgactcagagt

SEQ ID NO: 39715 - DNA, 281 bp, Glycine max
  Clone ID: 700942636H1
catcgcactccgctctccgcactccgctattgcttctccctcgacggcacctcaggcgcactcgttttcggttccgattgcattgaatcaaatctgagaaccattctcattgcccgtctgtaatcatgtcaggaaagtatatcatttctgctattcttggatcatttggagttgcatgggtttgtgattattatgtttcagagaaaaagctatttggaggttctacccctggcactattacgaacaatgagtgggcagaagagactgacaaaaaattgcag

SEQ ID NO: 39716 - DNA, 279 bp, Glycine max
  Clone ID: 700942637H1
cttgctcaaggttgttgatagggagtacacatttgcatacattgctgacccctgcagtggaacataccctttgatgcaaaagctaaggcaagtgcttgtggactatgcattggccaatggagagaacgagaagaacacaaacacatcaatcttccaaaagattgcaacatttgaggaagagttgaagacccttttgcctaaggaagtggaaggtgcaagagttgcatatgagaatgaccaatgtgcaattccaaacaagatcaaggtctgcaggtctta

SEQ ID NO: 39717 - DNA, 281 bp, Glycine max
  Clone ID: 700942638H1
tagaaaccctcttcatcttgttctatctgtgacgagcatcatggcctcaagagcagtgttattgttggctatgtgtatgcttccggcgatggttgtggccattcgcccagcaaagaaccctttttacgtgaagggtcgtgtctactgtgacccttgccgtgctggttttgagacctcagctaccacctacattgctggtgctgagattatgttgcaatgcaagagcagggttagcaacgaggttgtgtacacgaagaaggggtataccgactcaaccggag

SEQ ID NO: 39718 - DNA, 240 bp, Glycine max
  Clone ID: 700942639H1
cctcaactgccaaagacatcgtcgagcaggaattggcagccactgggtgactataacaacgaaaggacacgcacaacaggcaggccactgggatagtgaagatgataggcggcgagccagagagtacatctgggaaagatgtccagagtgtggggccaggacgccgagctcatgaggactttgggtcgtggcagatgcgagcgggcaagaggccaccagatttggcggtttgggagcaca

SEQ ID NO: 39719 - DNA, 283 bp, Glycine max
  Clone ID: 700942640H1
gtattgtctcacgcaaccatggcaatggcgccccaagcctctctcttaaccccacccctctccggtctcaaagccagcgaccgcgcctcctagccatggaagcaaaactccagcctctccttctccagcccgaagcccctcaagttctccagaacaatcagagtagcagccgccgacgagaccacagaggcaccagcaaaagtagaggctgcaccggtcgggttcaccccaccagaacttgacccaaacaccccttccccgatcttcgggggcagcaccggcg

SEQ ID NO: 39720 - DNA, 279 bp, Glycine max
  Clone ID: 700942641H1
gaatcgcgtttgggagaagaagagcaaaatcgctgtgaaaatgagcggaacggtgaagaaagttagcgatgtagcattcaaggtgggaaggaacatcgattgggatggaatggcgaagttctggtctccgatgaggctcgcagggagttctccaatctccgtcgcgctttcgacgaggttaactcccaactccaaaccaagtttagccaggaacctgagcccattgattgggattactatagaaagggaattggcactcgtttggtggatatgtacaag

SEQ ID NO: 39721 - DNA, 286 bp, Glycine max
  Clone ID: 700942604H1
gtcacaacgagagatggagcgtccaaagaaggtttttggttgggctgctcgggactcatctgggcttctctccccattcaacttctccagaagagaaacgggggagaaagatttggtattcaaagtgcaatactgtggaatatgccactcagatctacatatgttaaagaacgagtggggcaacacaacctatcctctggttcctgggcacgagattgctggtgtggtaacagaagttggaagcaaggtgcaaaagttcaaagttggagaccgggtaggtgtgggg

SEQ ID NO: 39722 - DNA, 212 bp, Glycine max
  Clone ID: 700942554H1
agggtttttcagtttgcttggtgaactgaaaacaggattaggatattattgctagtttatgacactgtcactttgtcaccaatattagttagcctttaatttgaaactatcgaggagtgattattacagaataaaaatgatacttcttacaaaaaaaaaaaaaaaaaaaaaaaaaaaaaagaggaaagaagggaaagtaggaggaaaaagag

SEQ ID NO: 39723 - DNA, 220 bp, Glycine max
  Clone ID: 700942556H1
atcgtttcgttcaactttcaacgccagttcacactctctgcttcgcgtgtaccaacaagtgcaagttcgaatcaatggccagcgctcagctcacagtaatagcgtcatcgatctctacggcgtcgtttgtagggcttcgatcttccgtctgttcaatttgctatccacggcgcatggattacaatcttggcaagtctctgcctcaaagagtaccttccgg

SEQ ID NO: 39724 - DNA, 237 bp, Glycine max
  Clone ID: 700942557H1
gaagatcggaaatggcataatcaaggggatgcaatgcaaaggaactattatatgcaaagaccaatcatggcataccctccatatcattcacatcacaccctttctccagctcctatatatcctatgtggggacaacctggcagtcaaacagccggtgtacagatttggggccatcctggttatcccatgtggcatcctacagaaagttggcactggaagccttatccgggggtgcat

SEQ ID NO: 39725 - DNA, 86 bp, Glycine max
  Clone ID: 700942558H1
cgaacgatgatgcattgtgcgagcattgtctcggctccgtcctacgcgttcccttttctctctggctccgcttccacacaacatac

SEQ ID NO: 39726 - DNA, 243 bp, Glycine max
  Clone ID: 700942564H1
cgagaagacagaggaaaaggtggcggtgggcgtgccagtgcaattgtattacggtggagagaatgaatatcaaaggggaatgatgcctcctaacacggtgtttggagatccaaagggcatccccatccagcagaccatttacagggacactcctgctcctttcaactgcccttactgcggtgacaccgctctcactaccgtcagatcaaagcccagtctagcagcatttgttggatgctttgt

SEQ ID NO: 39727 - DNA, 247 bp, Glycine max
  Clone ID: 700942565H1
agtcgtcgcgtgtactttcttgcgaaacagaagggcgaaggggcaaacacaacttttttgttttttcgtagagcgagagagaaaaaaatgttagggatcttcagcagttccgtggtgtcgccgccggaggagctggtggctgccggcagcagaacgccgtcgccgaagacgacagcggggatagctgctgaaccggttcgtggagaacaaggcgtcggcggtgtcgctgcaggtgggaggacacgtg

SEQ ID NO: 39728 - DNA, 252 bp, Glycine max
  Clone ID: 700942566H1
cgtgttgctgttcaatgtaaggttgcatcagatcttcccaagcttgttgaaggtcttaagcggttggctaagtcagatcctatggttgtttgtaccattgaggagtctggtgaacacattgttgctggtgcaggagagcttcatcttgagatctgtttgaaggacttgcaggaggattgcatgggtcgagctgagagtatcaaatctgaccctgttgtgtcattcagggagactgttttggagagatcatgc

SEQ ID NO: 39729 - DNA, 251 bp, Glycine max
  Clone ID: 700942567H1
gccgccacaagtagtagcaacaatgtgaacatgggagcagctaccgttaaggtgagcatggatggtgctccctatttacgcaaggtggatttgaagatgtacaagagccaccaagagctgttggatgcactggctaaaatgtgcagttcattcaccatcgacaagtgtagttcccaaggcatgacagacttcatgaacgagggcaaattgattgatcttctcaacggctctgattacgtaccaacctgtgg

SEQ ID NO: 39730 - DNA, 247 bp, Glycine max
  Clone ID: 700942568H1
cgctaacactcattaattgcaagaatggcacttcgttgcttggtgatgtccctttctgttctcttcactcttggtcttgcgagagaaagccatgccagagacgaagatttttggcatgctgtttggccaaacactcccattccaagttcattgcgagatcttctaaagcctggccctgcaagtgttgaaatcgatgatcaccctatgcaaattgaagaaacacagtacccggaaaccttcttctata

SEQ ID NO: 39731 - DNA, 236 bp, Glycine max
  Clone ID: 700942570H1
caacgcgaatatattccgttaatgaaaaagcggtatccgctagagcaggagattgaagggcgaaaaagaagactgagagaagagagatgggcgtgacgaaggaagaagttgaatcatccttgaaggccaaactgaacccttctcatcttgaagtgggtgatacatcttgagggtgcggtgcaagttttgtggtggagattgtatcagagcaatttgaaggcaaaaggctacttgag

SEQ ID NO: 39732 - DNA, 231 bp, Glycine max
  Clone ID: 700942572H1
gcagtttccaattgcacttttggtgtttgggtatgaagcagtgaagttgtacaaggagcacaaaaggagaatgatcacaaggaacctagaatgcatctgtgatgcttctatagaatgggctgctatgaaccttgcattttgcgcatcgtgtggcattgtagggggaattcttagaggtctgcttggttctggaggtggagttgtgtggggagctcttcttctagagactgg

SEQ ID NO: 39733 - DNA, 66 bp, Glycine max
  Clone ID: 700942573H1
ctagttctagatcgcgagcagccgcccttttttttttttctatttttatgaacaattagaaggggg

SEQ ID NO: 39734 - DNA, 237 bp, Glycine max
  Clone ID: 700942574H1
gctggaaaagctcagatgagttctgaaagggagaatgagttgatacaacgatgtgagcagagcatgatagaagctgctgataaatattaagtcgcaaacttgtatgtaaaagatgtagatgatagcattggtgatgaaaaacttaaggagctgttctcccctgttggtaccattacctcgtgcaaggttatgagagacccaaatggcttaagtcgtggatcgggtgtggttgcattc

SEQ ID NO: 39735 - DNA, 91 bp, Glycine max
  Clone ID: 700942576H1
caacatcaaactgtatgtccgccgtgttttcatcatggacaactgtgaggagttgatgccagaatatcttagctttgttaagggtattgtg

SEQ ID NO: 39736 - DNA, 241 bp, Glycine max
  Clone ID: 700942578H1
cagacccgatggagcctatgatgtccccggaagaggctacaaggagtacaggcttcacggcttctcctcctggttgaggaaccacgtcaccggtgccgggagttggcagaagataaggccctgtatggctgctgctgatgtctgctctaagctcacccaggattagatcactgctgatcaattcttcaattcccatatctgccccttacagtcaggatgttgcaagcctcccactgcttgt

SEQ ID NO: 39737 - DNA, 242 bp, Glycine max
  Clone ID: 700942579H1
gtaatctatggcccaagtttatcggtgtactgtgggtcgtgggtacgagatggtgagagcaattggcaagataggtgcagccctcagaaattgagtgggtctgggagaagaagcatcacctgcaaattcgagagtgtgagactcagtagagcatgcagtgtggcactgactaccttgctcacaaccgctgcggtgatagcgtctgtggcagcagctgatgaacccgagactctatccaacat

SEQ ID NO: 39738 - DNA, 257 bp, Glycine max
  Clone ID: 700942581H1
gaatttacagcaaaagctgaggaagcaggcacatctacccttgttggatcttctgaactggaaactgctccttgtcctgtcacaggaactgaaaaacatcattcttctgatacttcaaggctattgttacgtgacagtgattgccagcacaatgtagggactagtgctataaagattggtgaacctcaaggaacagcaaatgataaagttattcaggaatgtgcaaaagagactggtatgcctcaagttctatgtgc

SEQ ID NO: 39739 - DNA, 252 bp, Glycine max
  Clone ID: 700942582H1
cgcgtcgctccgcaccagtttcaccgcacgaatatcatcttgtttggagcgatccgagaaaaactctgtaaacatgttggtttaccaggacctccttacaggtgatgagcttctctctgactccttccgttacaaggaaattgagaatggaatgctgtgggaagttgaggggaagtggggtgttaaaggagcagttgatgtagacattggtgcagacccttctgctgagggtggaggagaagatgagggagt

SEQ ID NO: 39740 - DNA, 242 bp, Glycine max
  Clone ID: 700942584H1
ggttgggaaagactgcaatatattctctcatgcaaaagatagcaccaaaaaaagtaagggagaatttaattccttcccacccttcaacaaaaactggcatgagggggagcaacctttagaagagacagcattttcttttccacttctatttaattattactactttaaattcatctcttatatagctcaacctatatctcagtcttccccggtccatcttgttcggtttctgttccatttct

SEQ ID NO: 39741 - DNA, 244 bp, Glycine max
  Clone ID: 700942585H1
aaagagtcccagaattagaagcggaaaagaaagttgctactactgcaagaaatttcaaggaggctgcacgaatagctactgaggcaaagtcactgtgtgttgaaaaagagagcatccaaataaacatggatatggctacattaaatcttgagaagcttgaagaagagatcaatgacacccttaataaattacaggagactgaggggatgattgtattgaaggagaaagagttggcaatggtcag

SEQ ID NO: 39742 - DNA, 239 bp, Glycine max
  unsure (1)..(239): unsure at all n locations
  Clone ID: 700942586H1
gagcagaggggaggctggcaccgcgtcgagctctccagtggacagttcgttcagcgcctcactttgcctgagaattccatggtggatcatgttaaggcctatatggataacggagtgctcttaatcacggntcctaaacaccacagaggtgtcaataaccgtgttagaaacattaacatctcttctcgtccgtgagtgttgttgttgtgggtctcatgaaatgaaagaattgttaccta

SEQ ID NO: 39743 - DNA, 237 bp, Glycine max
  Clone ID: 700942588H1
aaaaaatctaagtccctttggtcttcatcttctgttctgatccaggtatggcttctaaacgcatcttgaaggagctcaaggatttgcagaaggatcctcctacctcatgcagtgcaggccctgtggctgaggacatgtttcactggcaagccacaatcatgggacctgctgatagcccatatgcaggtggtgttttcctagtttcaattcattgtcctcctgactatcccttcaagc

SEQ ID NO: 39744 - DNA, 236 bp, Glycine max
  Clone ID: 700942589H1
accatctatactcccagagactctcttgacaaaacaaaagctgaatctccagcactagcaccagacccagctcgagaaccagcatcagcagcaccagcaccagaaccaggcacagcaccaacaccagcaccctcagctgaacaagaaattgggtcaacaataccatctggaccagcaccagagcctgaatttgtcgacagtggagaggcttgtggcctctatgggagaggctctta

SEQ ID NO: 39745 - DNA, 238 bp, Glycine max
  Clone ID: 700942590H1
caattctatgccatcctccaagttgaaaagggattctgctgctactggttcatggagtattcaggatgaaatacgaagagtaagatccacggcaacagaggaattgcttagatcacttccatcctcaaaaattgactggtctgcatttgccatggagaataaaaataatgtaaactcttcagctattgaaaatattggagctagtttaggagagagagtacataattcaacaaattta

SEQ ID NO: 39746 - DNA, 240 bp, Glycine max; identical to SEQ ID NO: 375
  Clone ID: 700942593H1

SEQ ID NO: 39747 - DNA, 301 bp, Glycine max
  Clone ID: 700942602H1
attcggctcgagtgagaattaatcgtccagatgcaactatagtgctcaacacttctgatattcaactcctttgtattttgccaggttttcaatgagataaacagccgagaaatcgaaaagataaacatattcaaaggcatgtttgagagctggatattttttacggtgatcttctccacagtggtgttccaagtactcatagttgagttcctgggaacatttgccagtacagtgcctctaagctggcaattctgggtgctcagtgtcgtaatcggagcatttagcatgcctatatctgcta

SEQ ID NO: 39748 - DNA, 288 bp, Glycine max
  unsure (1)..(288): unsure at all n locations
  Clone ID: 700942603H1
caacaccggcaatgcagacgctacttctgccggcaacacgcgccggcagcttcactccnattcctctgtcagcctccgccgtcgcctcccctccactccctctaccatttctcagcccgaattccttcccctcactccttctcattcgggctcgttcatcttcctcttttagttcctccatcgctcgtcaaccatggaagaagcttcccttcaccgcaagcgcttcttcgcaagtgtctccggcattcactccctccaacgacgaatctgataaggccaaactcgagc

SEQ ID NO: 39749 - DNA, 244 bp, Glycine max
  Clone ID: 700942553H1
attatgtaacatcacctggattgtctgttgtactctgttgtaactaggtaacccataagcaagtgttgtaggtgttggagcaaacctgctagagagttccatcagttaatttccttaaggtggagattgaagaccatccatacttggcaaaatcagttggtgtgaactgcatcccagcctttaagttatacaagaatggatcgaggattagagaaattccaggatacaaccacgatgtgtttgt

SEQ ID NO: 39750 - DNA, 246 bp, Glycine max
  unsure (1)..(246): unsure at all n locations
  Clone ID: 700942519H1
atcgagcgaattcggctcgaggatcaatcaagtccaggacaactgactgtgctgctcccgtgtttcggtctactcaacgtacagaaggacggaagnagttttatgcaaaattagaggaagagcagcaagcaatggaagctgagaagaatcaaagtgaagctaggaccaaggaagagatggaggggatcatctancagctaaggaagagtctaacttgtaaagcaagccctatgccaagctttgacc

SEQ ID NO: 39751 - DNA, 250 bp, Glycine max
  Clone ID: 700942520H1
caaggatcttgaggactttctgcctgctgactttgattactttgagttcatgtccttaaatttgaccgacacaaaggacctagattatggctgctataagagttgtggccaaaatgagcaagaagttgaatctagttcaccaattcaaccaagaaattgccgaacaaacaggaagcggcgtgggaacgactttcaaagtgaaattctcccgagccttgcttctctgtcgcggtacgaggtaaccgaagat

SEQ ID NO: 39752 - DNA, 102 bp, Glycine max
  Clone ID: 700942521H1
cggggattcattaaagtagttaggaaaattgtatggtcacttttttctgcttctcattcccttccatgctctatattacaaggaaaactagtttgctactct

SEQ ID NO: 39753 - DNA, 57 bp, Glycine max
  Clone ID: 700942522H1
ctctgaaattctctaacacttctctagatcgtagaactgctagatctgtcagtctgt

SEQ ID NO: 39754 - DNA, 241 bp, Glycine max
  Clone ID: 700942523H1
ctcgagcgttttcctttcgggattggtttctatggcttctgaagtaatagagtagcgatgctttgtcggtgggcttgcttgggccaccgacagcgatgctctcgagaaagccttctctcattatggtgagatcgtcgaatcgaaggttatcatcgatcgtgaaactggaagatcgagagggtttggatttgtgaccttcgcctcggagcaggcgatcaaagacgcaatcgaaggaatgaac

SEQ ID NO: 39755 - DNA, 96 bp, Glycine max
  Clone ID: 700942524H1
cggttttaagaatttgtctgaggtgttgtgaaaaacaaaacaggtatggccctgaccgtcccaagtacttgggtccattctcggagcagattccat

SEQ ID NO: 39756 - DNA, 241 bp, Glycine max
  Clone ID: 700942525H1
caagagagtgaataaatccagcagcgttctgttctctgcaacattctccactctcaaccatggcttcaaagcttttactcatcactgtcttcgtttttgatttgattgcttttggacttgccgtggctgctgagcagagaagaagcaccgctagtgttgtgacggacaatgaaaagaattataattactgtgtctataactctgatatagcaactggctatggtgttggagcatttttgtt

SEQ ID NO: 39757 - DNA, 240 bp, Glycine max
  Clone ID: 700942526H1
cgtttgttgttgtaactcgttcttcttcttttgttgttctgtgtttgtgtttgttttttctctcacctgaaaatgtcttgctgcggtggtatctgtggttgcggaagctcctgcaagtgcggcaacggctgcggaggctgcaagatgtacccagacttgagctacactgagtcaaccaccaccgagaccttggtcatgggagtggcacctgctaaggctcaatttgagggtgctgaaatg

SEQ ID NO: 39758 - DNA, 242 bp, Glycine max
  Clone ID: 700942527H1
cggaatagataggaataaggtatcaggacaagcttctgctacaattcatgcatcaaagctctattatggtcctaattctagtgaaatatctgctaatggttcagttcaggcaacatccactgaaggtgacaaagaagacgttgaacaaaataattctcggttggacacgagggacctggacactaaatgtcacagtttggataatcaacatactcagactgtttcagatatgtctattaact

SEQ ID NO: 39759 - DNA, 94 bp, Glycine max
  Clone ID: 700942529H1
atcccgatggttgcgccgcagtagtgtcaggagcgcttctcttctctgcagcaactatgcgtgaccctaaggtcttcttcgacatgacgatcgg

SEQ ID NO: 39760 - DNA, 245 bp, Glycine max
  Clone ID: 700942530H1
tttaaacatttgagtttgttattcttttctttctgtttcactacattaattcacttcactctgtacattgttttctccttccatggcttcttcaattcgtccctcactttcttccttcatgttaccctccctccgctcttgcaacccttctgaaaagctctctctttttcatctcggtagcggtattagactgtatcataagtttggcctgaaatcttctaggcttttaagacatgatgataata

SEQ ID NO: 39761 - DNA, 248 bp, Glycine max
  Clone ID: 700942531H1
cgatgctgggaagtgaatcaacagctctacctttgcctaagcaacctttgctcactacttccatgaggtcacttgatgatggagaatcttatagcgaaggccttgatgtcaaatgatttgacagtttcaatggtgacaacagggagatagaagtgttaattacattttttggtttttcccattctgtttagctttgtttagactcttttcaatctacgtaagttcacagcaaaaagttttccttttaa

SEQ ID NO: 39762 - DNA, 262 bp, Glycine max
  Clone ID: 700942533H1
catcaccgcagtgctgaacttgatagctacgctggcctcaatcccgatcatagcctccggcatttggctggcatcgaagcccgacaacgagtgcgtggccaacttccggtggcccattgtcatcatcggcatcctcatcctcctcgtttccctggccggttttgtcggtgcctactggaacaaacagggtctcctcgccctctacctcttctgtatggctctcctcatcgccctcctcgtcctcggtctcgtcttcgcattc

SEQ ID NO: 39763 - DNA, 266 bp, Glycine max
  Clone ID: 700942534H1
tccaaagtttgtatagtgtaggatttgttggtattcgtgataaaaacacctcatcctattcattttgccatgacgggcgaactccagataaaggttttgaaagtaatgagaaattattaattcatccatgttactggcttggtttgaatctaaatcgtaatgcacttgctccagaggaagcagaggagataaatgacgaatatgatattaatattatttcagataattcagccattagaaataaaacaataggtcaaataactact

SEQ ID NO: 39764 - DNA, 248 bp, Glycine max
  Clone ID: 700942536H1
ctaatactaatctcttaattctctttggccatttctttagtaacattaagataatgtattctggtggaatggcaccttatggtagagtcattgctaacattttgatagctgtgatgtttgtttgcttgttttttgtgaccaacattgtggcacatgattcagagattgctcctacaggtcaattggaggctggaactgggtttgatttgcctgtttctaaggtgatgatgtgttcttcagtgttggca

SEQ ID NO: 39765 - DNA, 232 bp, Glycine max
  Clone ID: 700942537H1
agtctgttttaacaatcttgtgatcagtggtatgggcaggctgctctagtaggcgtcacttcagtatgttgttgtctgcatgggcagatatgtggagaatctgtgtgaatgaactatataagagtgaaaatatagaatctgaagtgcgtattgtgaataatatgtaccaagaagcgatagaatggaagatgaagagggtgaagatcgatgattaaccagtgtcgtgatggtg

SEQ ID NO: 39766 - DNA, 242 bp, Glycine max
  Clone ID: 700942539H1
cagaggtgttacattgagtgatgctctactaaggcatgacaaatggtttgagaagaagggaataaagaattccaactttgctgtggttacatggtccaactgggattgtcgggtgatgctttagtctgagtgccgattcaagaagatacggaagcctccttacttcaaccgctggatcaacttaaggattcctttccgtgaggtatttggtgctgtgaagtgcaatctaaaggtagctgttg

SEQ ID NO: 39767 - DNA, 238 bp, Glycine max
  Clone ID: 700942542H1
gttcaaggaatgctggattcacttcgggttaaggcaacaagcagctttgaattggcatacaacactgcttgttcattaattgcaaggaatgagtacacagatgcagaacaactcttattgtcaggccgaagaattggtcaagaggtcctgatggaagataacttggctgatgatgagatagaaattgaattgtctcctatagctgtacaattagcctatgttcagcagcttcttgggc

SEQ ID NO: 39768 - DNA, 240 bp, Glycine max
  Clone ID: 700942543H1
atttgtacgatccttactacgatctggatgtgaaggaggcgctgaatcggcttccgaaagaggtggtggacgctcgccacgcgcgtcttaaacgcgccatcgatctttccatgaagcacgagtacctccctgacaatctgcagtcaatgcaaacaccattcaggggctaccttcaggatatgctgactcttgtgaagagagagagagcagaacgtgaagcattgggaggttcccccctat

SEQ ID NO: 39769 - DNA, 239 bp, Glycine max
  Clone ID: 700942544H1
ctcctcagagcatttggtatggccctgagcgtcccaagtacttgggtccattctcggagcagattccatcatacctgaccggtgaattccctggtgactacggatgggacactgctggattatcggctgagccggaaaccttcgccaggaaccgggagctggaggtgattcacagcagatgggcaatgcttggtgcccttggctgcaccttcccagagatccttgagaagaatggtgtc

SEQ ID NO: 39770 - DNA, 238 bp, Glycine max
  Clone ID: 700942545H1
caattttctagggttttattcattttccgatggcttctgcagatgttgagtaccgttgctttgtcggtgggctcgcttgggccactgacgaccatgccctcgagagagccttctctcagtacggcgaaatcgttgaaacgcaggtctgtttgttgcaggcatcacatctgatctcacacgattcggactcggaattttctcgatcccgttctgatctgtgatctctgatctgtttgcg

SEQ ID NO: 39771 - DNA, 243 bp, Glycine max
  Clone ID: 700942546H1
gagaatttcacttcatcccttcatgattaaatcagctatggttcaaaaaggctcatcaaacataactgcttaagtattaggtggtgtgagtgatttgaaatagaaatttgaggttttgtcaagtttattgtctatcagaagctcacaagaccagcttatttgttaatgtcatacatttaaattgtattgtttttctttatgttcctgttctttgtatcaaatagtttgtatgtgattttgatt

SEQ ID NO: 39772 - DNA, 256 bp, Glycine max
  Clone ID: 700942547H1
ttcggcgcgagctaccaggccttcaccatgtaatccgcattggtgatggtgaacaacttcctgcggtagtcaaaagccaggtgtctcaagaagctggatatggaagaagtttgtttgagaggctggtatcattgggacacatgaagcatctgtgtaatgttcagtatagaatgcacccatccatcagcttattcccaaataaggagtgctatgataagcaactttctgagtcccctttggtcagagaagtgagcta

SEQ ID NO: 39773 - DNA, 242 bp, Glycine max
  Clone ID: 700942548H1
cggctcgagcggctcgagatatatgtggcatcctatcctccatgttcccctttctcattcctgcgccaaatctatagaaaaaaaatattcttgtttttttagcctgacattctaaagtattgtaatgcatttgaaagatataaatgtatagcatatcgaactggtttcccctgccccagcagatgctgagatagcaaagtttgatgttcttggtcctgtctgtgagtctgcagatttctttg

SEQ ID NO: 39774 - DNA, 258 bp, Glycine max
  Clone ID: 700942518H1
caataaaacaacaatcagttagcagtgttgagtaagatcaaaatatggcagacttgatgaaaagaatcctcgaaatgattgaggccgagcaagctaggaaagggtccaatcatggtacctcaaactcacataacacctatggcagcggaagccagaatggatcaaccatcaacagcggcaatcatcataacaacggcaactggtatgacgactcataccactatggtgaacgccctatttataacgacggtactttca

SEQ ID NO: 39775 - DNA, 259 bp, Glycine max
  Clone ID: 700942549H1
cagttcttagattcctcaaaggccatgtctcgagattttgggtcgattagagcgaactgggtaaggaaaagggatggagactgtgctctttgagtacagatatgaagtacacatgtgttggtcggtctggcttagaaagtgctagcaacttccctctgatagccaatgtgcttgtaaacccagcagcaggagaagtggctgtctcgtcagaacagaaggtctatgatgtggtgatgaagcaggcatctttggttaagag

SEQ ID NO: 39776 - DNA, 251 bp, Glycine max
  Clone ID: 700942550H1
attcagcattcagcattcaatggtcaaactgctctgaagcagctcaatgagttcgtccgcaataccggtggcgccggcaaaggccgcactaacatgcgccgcaccggcaagagtgatcctcagagcatttggtatggccctgaccgtcccaagtacttgggtccagtctcggagcagattccatcatacctgaccggtgaagtccctggtgactacggatgtgacactgctggagtatcagctgaccctga

SEQ ID NO: 39777 - DNA, 245 bp, Glycine max
  Clone ID: 700942552H1
ggatgacttaagctatgcaataatgtacgagacaaccaagttggcttatcgggtttcagaagatgatgtcacacgtgcttgtaatcagttgaaatcttcactcctgctccacatagatggaacaagtccagtagctgaagatattgggcgtcactactcacctacggcagaagaatcccatttgcagaattgtttgctagaattgacgctgttgatgcaagcacaataaaacgtgttgctaaccg

SEQ ID NO: 39778 - DNA, 264 bp, Glycine max
  Clone ID: 700942482H1
gtcagcaatagatttctactgctcggttgataaaattaaaggagtagatgggaaggatcgtgtggtattgacatttgatgggaaatatttgccacattcagaacagaaatctgagcacatggtttcaagaacaaggccactgggaaaacagtgagtatcttcattggaggaccaactacgcaatcttcaacaccagtctacctgcacatgaattatcattgatctgtaacaaccacaagttgtatttgatcagtgctattttgt

SEQ ID NO: 39779 - DNA, 266 bp, Glycine max
  Clone ID: 700942483H1
tagaaagaaatcttgctaacagcagatcaggcaagtgtggaattgcaattgagccatcttatccccttaagaatggtccaaatccccctaatcctggaccatcacccccttcacctgtgaagccgccaaatgtctgtgacaactactacagctgtgctgatagtgctacttgttgctgtatttttgagttcggaaatgcttgcttcgagtggggttgctgtcctcttgagggtgcttcctgctgtgatgaccactacagttgctgc

SEQ ID NO: 39780 - DNA, 84 bp, Glycine max
  Clone ID: 700942484H1
gcacaacacaacaattcactgagctaaaatcacttcatcatggcttcctcgtgtgcttcctctgccattgcagctgttgccatc

SEQ ID NO: 39781 - DNA, 55 bp, Glycine max
  Clone ID: 700942487H1
ttccaagttcaatttctcgtcgtccctcatcatggctcgtctcgcgatcgctgtc

SEQ ID NO: 39782 - DNA, 259 bp, Glycine max
  Clone ID: 700942488H1
gttgcttgcaggttatcatacagaagttaggatcatctgaaccaacaaagtatcatttcatgcagtatgctgaccaaataatgggtttatttttgagagtgtttgcttctcgaagtgcaacagctcatgaggaggctatgcttgccattggagctttggcctatgcaactggtgctgattttgcgaaatacatgacagaattttacaagtacttggagatgggtctccaaaattttgaggactaccaggtatgtgctat

SEQ ID NO: 39783 - DNA, 260 bp, Glycine max
  Clone ID: 700942489H1
aattcaagctacgtatagtgatggtggaaggcccagcagtgctagtgtatttgttggtgggcttctcttgggaggattaatagttggtactcttggttgcgtgtatgcacctcagatcagcaaggccctagctggagctgacaggaaggagttaatgagaaaattgccaaagtttatatatgatgaagaaaaggctttagagaaaacccggaaagtactggctgagaagattgaacaactgaatgctgccatagatgatg

SEQ ID NO: 39784 - DNA, 262 bp, Glycine max
  Clone ID: 700942490H1
aagaaaaccaagtcaagttctcactttgaagagaaaataacaacgtaaagatgtctgcatcaggaggcagaggaagccaagaggaagagaagaagccttctgatcaaggagcacatattaatctcaaagtcaagggccaggatggtaatgaggttttctttaggattaaaagaagcactcagctcaagaaacttatgaatgcatactgtgatcgtcaatctgtagattttaactcaattgctttcttgtttgatggaaggag

SEQ ID NO: 39785 - DNA, 261 bp, Glycine max
  Clone ID: 700942491H1
ttctctctctagcttggacgagtgaattagattcatcatcaagatgtcgtctctgatagcagaagatgtgaagagcagatcagaggtgtaccacggggacgaaatgtgccaagtgaagtccaaggagcttctcaaggaaatcgccctccccaacggccttcttcccctcaaggacatggaggagtgcggctacgacagacaaaccggcttcgtctggctcaaacaaaagaagagttacacccacaagttcgacaagatcgg

SEQ ID NO: 39786 - DNA, 260 bp, Glycine max
  Clone ID: 700942492H1
ccgctgcttgccgccccagagtagataatttgggtatgggaaactgctggattgaaggacgaagctgcagcacatcaaatagctgcgatgaagacaatgaagagtatacagcagagacattcccgtggagaaggcaaacaagggacctgtcccgaggcgactctttcagtcaaaagacaatgaccatggggaggaactcgatgaaatttggaatgattgataattcattttatgcctcagattaccagtatagtccacag

SEQ ID NO: 39787 - DNA, 179 bp, Glycine max
  Clone ID: 700942493H1
agtcaagcaagctgtattgctatcttcaacagaggcagctgagatgatccttagagttgatgaaatcatcacgtgtgctccgaggaggagagaagaccgaatgtaaaatatcctgagggtccaactttggatgattggggtgccagcattttttggcgtaatatgagtgctgtgatatt

SEQ ID NO: 39788 - DNA, 257 bp, Glycine max
  Clone ID: 700942494H1
ctatctggataaatccactccccatgccctctacagatggattgggactttcgtgattgcatccatctacgttctgcgtgttgtttatttgcaggggttttacattgtctcctacggcctcggaatctaccttctcaatctcttgattggctttctctcccctttggttgatccagagctcgatccctccaacgcccctatgcttccaaccaaaggctccgatgagttcaaacccttcattcgccgcctccctgagt

SEQ ID NO: 39789 - DNA, 126 bp, Glycine max
  Clone ID: 700942495H1
aaagactatgttagaaaagggtcagggtccatgtttgatcttgaagagattgaagaagggcttgaagggtatgaggatctagagaaatcatccctcatgtcccagaaaagttttgagacgcgattc

SEQ ID NO: 39790 - DNA, 126 bp, Glycine max
  Clone ID: 700942496H1
cccaagtcatcattgaaggcttatttggcagactcagatggcagagtctgggccttgttggctggtctactttgtgggtttgggaatggtcttgaatttatgggtggtcaagcagcaggatatgca

SEQ ID NO: 39791 - DNA, 266 bp, Glycine max
  Clone ID: 700942501H1
cgtgttttccttgtttcccctattattatctcgctctcacaaaatcatggcattctctagtgctttgattctgtggtcgttgctagcaatcaacatggccctgccaaccctcgcaaccgtctacaccgtgggagatacttcaggttgggcaattggtactgattatagcacttggactggcgacaagatcttttcagtgggtgatagtctcgcgttcaactatggagctgggcacacagtggatgaagttaaagagagcgattaca

SEQ ID NO: 39792 - DNA, 261 bp, Glycine max
  Clone ID: 700942502H1
atttcagttccaaacaaaacttatcaaaatctcatatactgattcagttctatacataaccatcgagatttactatcaaaccaaaaattctcaaaatctcttcacctctgtgatgaccatggaatacagaaccttagaactcaacatcatatccgcaaaggacatcaagaacgttaacctcttctccaagatggacgtatacgccgtcgttacgctctccggcgaccctctccaccctcagggcgccaccacccacgtcca

SEQ ID NO: 39793 - DNA, 255 bp, Glycine max
  Clone ID: 700942503H1
aggccatgacagctgatgtgattcacgcaacatacgatgagtgcgtgaaatgtgggatggacggatatgtctcaaagccttttgaggaagagaatctgtatcaagcagttgcaaagttttacaaccccaagcctacctcaatacaacaaaatgccagaactggaaaagcaacttaatgttaattgcaaagtttttcactctctcactactgccatttttcctagttggctgctaaatggtaatttcaatgtgctt

SEQ ID NO: 39794 - DNA, 253 bp, Glycine max
  Clone ID: 700942504H1
acttttgcagatgtttctgaggtggaagcatttgtcaaatggctagatggggaactatcttcattggtggatgaaaggtcagtgctaaaacattttcctcaatggccagaacaaaaagtagatgcactcagagaagcagcttgtaactacagagatctgaggaaccttgaatctgaagtttcatcctatgaggacaatcccaaagagtcattggctcagactttgagaaagatacaagcactgcaagacaggt

SEQ ID NO: 39795 - DNA, 245 bp, Glycine max
  Clone ID: 700942505H1
acggatgaagtatgaggggagtgctgctgggtctggtaaggtgtatgtgtatgatggggtgtataggattgttgattgctggtttgatgtggggaggtcgggttttggggtttataagtttaagctttggaggattgatgggcaggctaagatgggtagtgctattttgaaggaagctaggaatgttaggaggagtgagctggatttgaatcccacatctgctgatatggctaacaggaaggaga

SEQ ID NO: 39796 - DNA, 246 bp, Glycine max
  Clone ID: 700942506H1
ctggtacgatgctgtctcttctcaacttgctccaagctttcctggccacgctcaaggggtaagattcagtggcgctgctgctccagctgaagctgcacctgccaaagcggctgccactgctgaagaagatgatgatgatcttgatctctttggtgatgagacagaggaagataagaaggcagcagaggaaagggaggctgctaaaaagcctgccaagaaaaaagagagtggcaagtcttctgtcct

SEQ ID NO: 39797 - DNA, 241 bp, Glycine max
  Clone ID: 700942508H1
agtcgtccctcccattgttctcgccatttccaaatcacccgatctccacaagtacgacctgtcttccatcagagtcttgaagtccgggggagcccctctgggtaaggaactcgaagacactctcagagctaaattccccaacgccaaacttggccagggatacggaatgactgaggcagggcctgtgctaacaatgtctttagcttttgctagagaaccgatagacgtgagaccaggtgca

SEQ ID NO: 39798 - DNA, 240 bp, Glycine max
  Clone ID: 700942510H1
cgtggtgataccccttatagtttgatgtttggaccagatatatgtggttcacagacaaagaagctccatcttatactatcataccaggggcagaattaccccattagaaaagatctgcaatgtgaaacggataagttgactcatttctatacatttattctaaggcctgatgcctcttatagtatccttgttgataatcgggaaagagattctggaagcatgtacacagattgggacatc

SEQ ID NO: 39799 - DNA, 242 bp, Glycine max
  Clone ID: 700942511H1
caagaataggggatatgatgatgagtatgtttttgatacaagccgtatttacgatacattcaaatggaattatgaacctagcttattgatagaaataagctcaaatgtctctagtgaggattatgatataccgtctcctctaattatcagttctaagaaatttggaaatgtggctagatacatgaatcatagttgctccccaaatgttttctggcagccagtcttgtatgcagaaaataatc

SEQ ID NO: 39800 - DNA, 242 bp, Glycine max
  Clone ID: 700942512H1
agcatcctttggaaagaaggcatgctgaagcttctcgcattagagagaaatatcctgatagaatacctgtgattgtggagaaagctgaaagaagtgacattcctgatattgataagaaaaaataccttgtccctgctgatttgactgttggccagtttgtatatgttgtccgcaaaaggattaagctcagtgcagagaaggctatttttgttttcatcaataacactctgcctccaactgct

SEQ ID NO: 39801 - DNA, 243 bp, Glycine max
  Clone ID: 700942514H1
cgactagttctagatcgcgagccgccgccctttttttttttccttctcgacaaatataaatatatatcataagccgttttgttttaccgcacctttttatttaacacgaccattgtgattttggggtttgggccactgtaaaattggttggtgccggattatggcctccaaaattcttagctttgggtcattattaaagagattggtaggttggccttcaaaaaaaaagaagggggggccccc

SEQ ID NO: 39802 - DNA, 253 bp, Glycine max
  Clone ID: 700942480H1
aaaaaattttactccccaactttgtgacagaaccattttgttttaagcttttccattttgatgttatgtttgaccagcctcacgatagcgttgagtatattatacctgtggactgttgtccaagtagctcctaggaatcaatatacagccatttaacttttagtgttttctgaacaaattgttcactgattacacgatcgttcatagttaccccagatagacatggaatcaatatacttcttggatgaatagc

SEQ ID NO: 39803 - DNA, 75 bp, Glycine max
  Clone ID: 700942515H1
cgacaggaaatcctcgcctccctcgcatgatgttcctgagtttcaacatgattatcggcggcaacacactccaaa

SEQ ID NO: 39804 - DNA, 249 bp, Glycine max
  Clone ID: 700942516H1
caaattctgggaaatcagaagtctttcctcaacggttatcttgaagatgttttcatggctagattatcaaatctttctaaggatattgattggcgtgaatttacgtgccctcaatgcacgtctctccttggagcctacccatgtcgtgagggacagacacctgtagatgggggagtacgatttttcaaatgttatatttcaacttgtgtgccagttggaggatcaggggatatgttcagggtgatagag

SEQ ID NO: 39805 - DNA, 263 bp, Glycine max
  Clone ID: 700942517H1
ggaaaggtagagaagcaatgtgctcatttctttggtgtgacaataaatgagcagcaagctgagtcaggcattgtagtaagagttacttcaactgcacaaagcaaatttaagttgctctactttgaacaccgatgcgaatggaggctatggtttggcattgcaggaagacagtgagaagactggcaaggtgacatctgcaggaatgtatttcttacattttcaagtgtatagaatggattcaacggtgaatgcgttacgatggc

SEQ ID NO: 39806 - DNA, 247 bp, Glycine max
  Clone ID: 700942424H1
ttgagatctgatcatatccttcaataaagcagcaaagcagcaatgagatcctaatcaatccaattcacatgtaacttcaaggtagcccttctcagccttgcggttttctgcctcttcatcttggtattcaggtcatccatattctcattgtctcctcaactcacctcacaaaccaacatgtcaagctcagtcacaatagtaccagtgtcaccacaagatacaggaaatgcaggtacgccatcatcat

SEQ ID NO: 39807 - DNA, 235 bp, Glycine max
  Clone ID: 700942425H1
gttttggagccttctcttttgggaatccagcctgagccaccaagctggccagagagagatgagaatttgagacttacctttgagaggaaagtgaacagtgtgggaattcccttgtccattaggatgatcaagaagaagctacaattggaagagggtctcaaagaggctggtgagttgaatgaattaaccaactgttctgtgaacaagaccttctcctctatgatgtgtataatgc

SEQ ID NO: 39808 - DNA, 250 bp, Glycine max
  Clone ID: 700942430H1
ccttggtcatgggagtggcacctgttaaggctcaatttgagggtgctgaaatgggtgtgcccgctgagaacgatggctgcaaatgtggaccaaactgctcctgcaacccctgcacttgcaagtgaggtgttgggagagcaagcttcaagcagagatagcccttaattaggaataatgataaactattaatgtgtagctaaaaccttatgtattatgtctgtgatggtttcgcgcgccactcgggtgtttt

SEQ ID NO: 39809 - DNA, 226 bp, Glycine max
  Clone ID: 700942431H1
aagttaacaacacttttgtcttcgttccattatctagttctcaattctcttcaccctttgcctctgaaagaaatgggtagtcttgaagcggaaagaacaacagtaggattggcagcaagagacccttcagggattctctccccatacacctacaatctaagaaacacaggccctgatgatgtttacattacagtccactactgcaaaatttcccattagaaccaca

SEQ ID NO: 39810 - DNA, 115 bp, Glycine max
  Clone ID: 700942432H1
cttgaagttcttctgaatttgaagcatatatttgtccttgaatggaaacacgtgctggaagtgatatgaagatggccatagatgatgctttgaacgccttctctcctgtttccac

SEQ ID NO: 39811 - DNA, 230 bp, Glycine max
  Clone ID: 700942433H1
atcaaccttgcatcagggttagggaatggctgctatcttagctcggaaatcactccttgctcttcgtgcgcgccaattggctgtaagcggtcaagggctgcacagctcccaaaactatggccttcgattaagtgcacactcctactctaccaaaagagacgatgaagacagggagcaactcgcaaaggaaatttcgtaggattagagttctgtttccgaacgtagcatca

SEQ ID NO: 39812 - DNA, 265 bp, Glycine max
  Clone ID: 700942434H1
agctccatagctgcagcattagggtttttcatctgcttcaatggggaagggaacagggagttttggtaagagaaggaacaagactcacactctctgtgtgaggtgtggccgccgcagcttccatctccagcagagtcgttgcgccgcttgtgctttccccgccgcacgcactaggaaatataactggagcgtcaaggcaatccgcagaaagaccaccggaactggcaggatgaggtactatgcgtaacgtgcctcgccgattcaa

SEQ ID NO: 39813 - DNA, 254 bp, Glycine max
  unsure (1)..(254): unsure at all n locations
  Clone ID: 700942440H1
gcatcaaaactgaccctgattgcgttggttgttgcggccctgtgcgccgttgatctaacccagagagcatcatcatcattatcatcacctcacgcgctaggcncctccgtggactgctccaacctggttctcaccatggccgattgcttgttcttcgtcaccaacggcagcaccatcacaaagccagagggcacatgctgctctggtttgaagtctgttctcaaaaccgttccggcgtgtctctgcgaggcttt

SEQ ID NO: 39814 - DNA, 259 bp, Glycine max
  Clone ID: 700942441H1
gctgctacaaccgctacttgtagagcctcagcaaagtcacagaattcagaatcagtatcgaagaattcaatagttttctccaggattctctctgttagtttgaataaagagacatgtctaagacttaggtaaatccaactatcagcaagtcaactggattgcctcgaaagcgcttctatcgagcacgagcacacagcaatccgctgagtgactctcacttccctgtgccaatttcacccagccatgttgactattccct

SEQ ID NO: 39815 - DNA, 242 bp, Glycine max
  Clone ID: 700942442H1
gaaatcattacttatactagttttctacgattattcatagtgaggcaatagtagcagcaattcacactggtctttgcttctcgttactcatttctcacctaactttctattcttctcagtctcagatcagaaccttagccatggcagcgttccagaagatcaaggtcgccaaccccatcgtcgagatggacggagatgaaatgactagggttatctggaagtcaatcaaggacaagctcatt

SEQ ID NO: 39816 - DNA, 228 bp, Glycine max
  Clone ID: 700942443H1
tgtgacatgacactttctgaataattgacttgatatgtttagactttatatatatgctaaatattaattttggtcttttctattttcatcttttacatcttagtcttttttaaaatttaaaattaactatccacaagtaaaaagtatttgacagtacacatctcatgtttaatacaaattcaacactccatatcgcagcagttcaaaaaaaaaaaaagggcggccgcc

SEQ ID NO: 39817 - DNA, 77 bp, Glycine max
  Clone ID: 700942447H1
gcattttctgccctattcggccgcgggtccaccgtcgccgaagggtcgtcggagagtttacacgtgttgccgttcca

SEQ ID NO: 39818 - DNA, 79 bp, Glycine max
  Clone ID: 700942448H1
caaaatgattcttcagctgtggaagaagacaagatcagcactaataggacaagaagctggagatgtgcacacgagaatt

SEQ ID NO: 39819 - DNA, 114 bp, Glycine max
  Clone ID: 700942449H1
cggtatcgagcgcctcatcgtctcccgatccgtccaggaggatttcaaccgccgccgcaacctcgccgccatctccgccgtcctccccgagggagcgccggatgtcgatccccg

SEQ ID NO: 39820 - DNA, 126 bp, Glycine max
  Clone ID: 700942454H1
cacccagttcatcttcatgggttcaatttctttgttgttggaagaggagtaggaaatttcaaccccaaaattgaacctaagaactttaaccttgttgatcctgttgaaaggacaactattggagta

SEQ ID NO: 39821 - DNA, 264 bp, Glycine max
  Clone ID: 700942456H1
tgaaagtaagacttcaagttcaaacctttctcacaagagcaaggaagatttatgggctgtcaagtccagtggctttgatggtgacaatgatctagatgcggcgaaaattgcagccatgagagctgctgaattggttaataggaacttagttgggcctggatgcttgactactgaccaaaagaagaaactgttgtggggtggcaaaaagagtacaccgactgaagagtctggccatcgatgggataccgggatgttttctgatcg

SEQ ID NO: 39822 - DNA, 263 bp, Glycine max
  Clone ID: 700942457H1
gtctctctctccattcgtgctttcagctccggcaacctctcttccggcgccgcgctatctcggccgcgcaccaatcttcaatttgattacttgggtcaacgatttctgtcattctcaatcatggcaactagacttcagtttgaaaataattgtgaagttggagtcttctctaaacttaccaatgcctactgtttggttgccattggtggttctgaaagcttctacagtgtatttgaagccgagttagcaggtgttatccctgt

SEQ ID NO: 39823 - DNA, 262 bp, Glycine max
  Clone ID: 700942458H1
gtgcattattcaatggccactacagcagctctatccggaaccatggtgagcacctccttcatgtggaagcaacctatgacgaccaagagcctaaagacattccccaacgctctttttggtctgaaaggtggacgaggtggtcgtgtaacttgcatggcctcgtacaaggtgaagctcataaccccagcaggagaagtggagtttgaatgcccagatgatgttttcattgttgacaaggctgaggacgaaggcattaaacttc

SEQ ID NO: 39824 - DNA, 112 bp, Glycine max
  Clone ID: 700942464H1
gaaacgaggaagagaagatgagggcggcgattgccaagtttgggctgtcaggtaaagcgcaggtgatgccaatgaagaacttgtcagatggacagaggagccgagtgatatt

SEQ ID NO: 39825 - DNA, 258 bp, Glycine max
  Clone ID: 700942465H1
ctctttcagaacactactgtactttgttgtgatcatggagaagagctattaacgttgtttttggacagtacttcggagcttccttaacttgtttgttaattggtttcagtatgacgacatagtgcaattagaatggctgtccaattttgtcgaggactctttctctggtgggagcatcaccatgaagaaagaggaggagccacaatgcaccaccaccaccaaagtggacgtagctcatgcccaatttcagacagcaag

SEQ ID NO: 39826 - DNA, 190 bp, Glycine max
  Clone ID: 700942466H1
ctcgagccgaatcggctcgaggttcggtggagggagggagccgtagcagcggaagctctaggctgggtagcgaatcacaatggcgagaggattaaacgagcatctgaagaggcttaatgccccaaagcgttggatgcttgacaaactgggtggtgcatttgctcctaagccctcatctggaccacacaac

SEQ ID NO: 39827 - DNA, 261 bp, Glycine max
  Clone ID: 700942470H1
ctcgagccgctcgagccgttcagaacctttacgaccacgttgctgatcctgttgccaacaatgcttgggcttatgccactaactttgtccctggacaatgaggatgcctacatgcaatgcaatcttctgctcccttttgcagttcccttgtgtttaactccattttcactaatgtaactacacctgtgtagcagaaaaatctgtatgagaaccattatattttaatatataagatatgtgggtccccaaaaaaaaaagaaa

SEQ ID NO: 39828 - DNA, 81 bp, Glycine max
  Clone ID: 700942471H1
cggctcgagcggctcgagcggctcgagctctgagaagcgagtatttctccctcttcaatgttctacctcctccaatgactt

SEQ ID NO: 39829 - DNA, 235 bp, Glycine max
  Clone ID: 700942472H1
ctaccgaactcgtatgcgaaagaaattcaacatcaagggtagtgatcgttcgttggatgatttcgtgtaccattttgtctgtccttgttgtacgttatgtcaggagtcaagaacacttgagatgaacaatgttcaaaacggaacatggcatggtcggggtgacacaatatgtataggtggatttagagatgaaagtaaagctctctgtgagttacgtcctccttctgttgtgtcc

SEQ ID NO: 39830 - DNA, 260 bp, Glycine max
  Clone ID: 700942473H1
gctctatttatctccatcattttaactagcgtgctggagctccgatggagtggtgttaccatcgaagccctttggcgtaacgagcaattttgggtcattggaggtgtttctgctcaccttttcgccgtgttccaaggctctctcaaagttcttggtggagtagacaccaacttcactgtgacagcaaaagcagcagaggacactgaattcggagagctctatctcttcaagtggaccactcttctcatccctccaactac

SEQ ID NO: 39831 - DNA, 255 bp, Glycine max
  Clone ID: 700942474H1
ctgcactatcgttaagaaagtttgtgcatcaggaatgaaagctgcaatgcttgctgcacagagtattcaattaggcacaaatgatgttgttgtggctggtggtatggaaagcatgtctaatgtacccaagtacctggctgaagcaaggaaaggatcacgccttggacatgattcacttgttgatgggatgttgaaagatggtttgtgggatgtctataaggatgttggcatgggagtgtgtgctgagctatgtgc

SEQ ID NO: 39832 - DNA, 230 bp, Glycine max
  Clone ID: 700942475H1
ggagctcatggaggtggatacggtggcggcgcgggtgccgtcggaggaggagggtatggggctggtggagcacatggtggtggttctggaggaggtggtagaagtggtggtggccatggtggctatgttccctaagaactactcttcaatgcacaatagctgtggaagtgtcccctttcgcgtatcaagaatgatgagtatgctattaataacaggatcataataattaa

SEQ ID NO: 39833 - DNA, 268 bp, Glycine max
  Clone ID: 700942423H1
cacaaatcttagattgaaaaacataataataaagaatcagaaaaaatgggttctgagaacaaagaagccgcaggcggagaacttaacaattcgtctccttcgcccttttcttctcatgcttggaaaagtcgaatcgttattccaacccttctcgcaggagttgctggtgctggagctgggttgatttacaagcatcagagaactcttcagtcttacaactgtgtattctaactatgactatgaatttcacgattgtcagcgggtgcta

SEQ ID NO: 39834 - DNA, 110 bp, Glycine max
  Clone ID: 700942476H1
aaacatttaaagaaaccttggactccccagccagaagaagagccaacatggcacccacaatctataatttttcgtattctaaaaggttttcagagtcattcaattcttca

SEQ ID NO: 39835 - DNA, 236 bp, Glycine max
  Clone ID: 700942477H1
cctgaagaaataagcatgcttgctaaggtgaaagctcaggtttctgaagttaaagatgtcatgatggagaacattgaaaaggttctggaccggggggaaaagatagagcttctggttgacaaaactgaaaatcttcatcaccaggcacaagacttcaggaattctgggaccaaaattcgtagaaaaatgtggctgcaaaccatgaagataaacctgattgtgttggcgattttgat

SEQ ID NO: 39836 - DNA, 252 bp, Glycine max
  Clone ID: 700942390H1
cggaaaaggcatcagagcagtatagatgatgtggattctgaaaaggaagagaaggaagaatctaaaaaatcacgaaggcatggcagtgaacgcaagaagtctcggaagcatgcaaactctcctgaatcagacaatgaaaaccggcatagagacacaagagggaccactgggatggttccaggaaaactggggggcatgaggactttagacggggagctctcgggaatgatgctgagaactagttgttctttc

SEQ ID NO: 39837 - DNA, 185 bp, Glycine max
  Clone ID: 700942391H1
agggaagtgtcggaaaatttgcgtgtcacgtcgcgattttggttctacttttatcaattgtctcccgaagcattacctgtgccataattttaattcacgatgattgctctcttcctatatttaaattgataggatcgtgacggagagaaatccgatttttgcggtgttcgggaaaaaaaagattt

SEQ ID NO: 39838 - DNA, 255 bp, Glycine max
  Clone ID: 700942392H1
gttccgatagcagacacaaaacagtgtcctcaagtaggattaccctggtttacaagacatgccaatctcacatgagaggtatgtgacgaattgtggttttcattacacaccaatgcaatctaaacatgcagattgttatgtggagaatctcagaagaacccaaacttggacaatctttgtactagtgctgacactgccaaattcctgataagatcaatagtgtttgtagtgctttcatgttgccttaggctgtag

SEQ ID NO: 39839 - DNA, 148 bp, Glycine max
  Clone ID: 700942393H1
gtgttggattagctcctgagaacaacatgatcctggagtacaagtgaagttcaaagtcttaagagtaatggtttgggatactgtagttgaatgagatgaaaacttaactcatatcccataccctctttcctgtaatatatttatggca

SEQ ID NO: 39840 - DNA, 152 bp, Glycine max
  Clone ID: 700942394H1
ctgtggtgtgtgtgggtgagaggaagaagaagaagcaaatggagtttcaacgcagcgattcatcatcgtccccgcccacacacaacaacgcggatccgaagaaaaacacttgttctgacccaatgcatccatggtgggaatccgtctaaaaa

SEQ ID NO: 39841 - DNA, 134 bp, Glycine max
  Clone ID: 700942395H1
aaagctcacaagcattacgagttgaaatcgttggaacctcgtcgaacaaccgttcaaatcgtcaaagacaaacgagctctgactcgccggaatctcaccggaaagcaagtctttctgaacctgtcgtgctcgga

SEQ ID NO: 39842 - DNA, 138 bp, Glycine max
  Clone ID: 700942396H1
atccaaagttctccagggttttaactcaaattcagcttcatttcactttacctatgatttcctaaccatgaatcatactgagaggttagttactagttattgaaaaacagtgttacatgccattattccacacaacat

SEQ ID NO: 39843 - DNA, 269 bp, Glycine max
  Clone ID: 700942401H1
cccttctttaatcctagcatatatgggacaagctgcatatctttccagacatcattcccttgaaagtgactatagaattgggttctatgtatctgtacctgtaaaacttagatggcctgttcttgcaatagccatacttcaagctgtggttggaagtcaagctgtcatcacagggactttctccataatcaaacaatgttctgctatgggatgtttccccaaagttaaaataattcacacatcatcgcaaatgcatggccagatttaca

SEQ ID NO: 39844 - DNA, 116 bp, Glycine max
  Clone ID: 700942402H1
ttgagagagaggaaggagcgtgataagaccaaattgaccttggacttcgtctttcctctctctccctgtgaactctcgttccgattcgttttcgttggtcttctagaagcttcttc

SEQ ID NO: 39845 - DNA, 267 bp, Glycine max
  Clone ID: 700942403H1
atacttactagtctttgaaataaaattggaatgaatgaagtatggtgcaatattgttgacttcaaaaaagatttgtagacaccttatatgctatttgacacagataaaaggaataatagaggtatgataaatgatatgatgtgataggaagagagaaaagataggtgttgatggagcattagtaattaaagggtgtctaactatcattgttcgattaacttggaagtgaatgtaagttggcactagttaaaaatctggtcagttcga

SEQ ID NO: 39846 - DNA, 261 bp, Glycine max
  Clone ID: 700942404H1
agcagatgcggcatgagaagcattatagatatgtcagtacacatgatgttgcttattcgggcacgtagcttcttgcaggatctggaaagggcatgtagagatcatctgaggaggagatgctggggaattggttttggtttaggcttccgagtgattgctttggatccaaactttagaaagctatctgtggaacatattgtttcagcttataagaggaccaagcaccgagcaattcttttggattatgatggcactatggtg

SEQ ID NO: 39847 - DNA, 214 bp, Glycine max
  Clone ID: 700942405H1
tggcggtgctcctggaggaggtcctggcggcggtggtggcggtggtagcggtccacgaggccctcctcgtgggggtctcgacaatgttcgtgggctagatagtatttggggacgtgatcatagttcactgcctgcctgtggttcctgctgtggctgattgttagagatccaatgtgtgtatatgccttttatatgttacggtttgtatctagtg

SEQ ID NO: 39848 - DNA, 250 bp, Glycine max
  Clone ID: 700942406H1
catttccttgatatcttagttatctaattacctcaattaatcccttaattgcaagcatcatggctgaggagaaacaccaccaccacttccaccaccacaagggcgatgatgtgcctggcgaggttgattataagaaggaggagaagcaccacaagcatcttgagcaccttggggaacttggtgctgcggctgccggtgcttatgccttgcatgagaagcatgaggccaagaaagacccagagcctgctca

SEQ ID NO: 39849 - DNA, 254 bp, Glycine max
  Clone ID: 700942407H1
cctcagcctcaacttcaacctttcttcacttcccttcacatggcagctcttgtgaaaccaatttccaatgtcactcccaaatttgtcagcagccccagaatgggctcatcacactcctccaaattcagcaccataataagaatgtctgccactgccaccccaccaccatccacctccacaaagccagcaagcagcaagaagggcaatatcaaggagatcctcgtgactccaggattctacaccactgactttga

SEQ ID NO: 39850 - DNA, 261 bp, Glycine max
  Clone ID: 700942408H1
attctttcgcaccttcgaaaatcaattttctgtcttctctgcgtcttcttcctctatcaatacgtattccatggctacttccatgctaactgctcgcaaatccaccggtggaaaggctcctaggaagcaactcgccaccaaggctgcaaggaaatctgcaccgacaaccggtggagtcaagaagcctcatcgctatcgccctggaactgttgctcttcgtgagatccgaaaataccaaaagagcacagacttctgatccgc

SEQ ID NO: 39851 - DNA, 263 bp, Glycine max
  Clone ID: 700942409H1
gatctgcgctctccgttttcagatcgcgttttgtttcaattcgacactttcctcgctttaaagattatgcgaacaatatggttgtccttgctgcatccattgtgagcaaatctggcaaagtgctagtttctagacagtttgtggatatgactcgcataagaattgagggtcttctagcagcatttcccaagttggtagggactggaaaacagcacacgtatgttgaaactgagaatgtgcgctatgtttaccagccaatagaa

SEQ ID NO: 39852 - DNA, 235 bp, Glycine max
  Clone ID: 700942410H1
gaaagcgtggtctcaaagtttcagttgtaggtatccccaaaaccatagatagagatattccagttattgataagtcttttggctttgacactgctgttgaggaggctcaacgagctataaatgcagcacatgttgaagctgaaagtgtagaaaatggcataggtgttgtcaagttgatgggtagaaacagcggatttattgcaatgtatgctactcttgcgagtcgagacgtgga

SEQ ID NO: 39853 - DNA, 264 bp, Glycine max
  Clone ID: 700942411H1
cgaaacaatcattaccagaaggaccgagccatgaagaagcatttctctggaatgagtggttattaagggtacaagagaatcattccatatttcttacttgctaagataccatacttcagaatcttctcggtaactatttggcttttgcctaagaccttatattttgcagggttaaggttcaatgaggtgcatagatatggtgttacatagctcatacatagtggcattatcgagtgcacaatcagctctttgataccaaaattc

SEQ ID NO: 39854 - DNA, 264 bp, Glycine max
  Clone ID: 700942412H1
cacacacatggcagaaccaaatagctcattagtgagtttttgagttcgtgtggtctttctttgtgtgttgcaaggttacaagatggaggatcaaaatgcatcatctaatggattgggcaaggtgttccacaaagttaaatatataaaagctatgatgtcccttcagtttgggtactccggaatgtacatcatcaccatggtttctttcaagcatggcatgagccattgggtactctccgtgtaccgtcatatagttgccactct

SEQ ID NO: 39855 - DNA, 264 bp, Glycine max
  Clone ID: 700942413H1
tgattttattgaaggagaaagagttggcaatggtcagataccaaaagctacttttggcagctgctactgctagagctgaaaaagctgctgctgtagaaatgggtgatgtggaagaagctaatctcctacttgctgaagccgaggcagcagactgcgatgctgagaaacttaaatcaacttacaaatttgaggcagaagacttcactgatctacaaagacatttaatttcaatggatcttgtttcgcatcttgatcagaagcaac

SEQ ID NO: 39856 - DNA, 262 bp, Glycine max
  Clone ID: 700942414H1
gaacaacacaatccgacgagaccccaacaccagaaccatgttctcagatgacaagggccaaggacagcattcttttgctgacgactttcggagagattaaggagaggcttccagagacagaggagacgtgtgcggtgtgcctgagccagctgagcgtggaggacgaggttagggagctcatgaactgctaccacgtgttccacagagagtgcatagacagatggttagaaaacgaacacgagaatcaaggcgccacgtgtcc

SEQ ID NO: 39857 - DNA, 265 bp, Glycine max
  Clone ID: 700942415H1
agagcccggtatatcgcccagggtgtgcacggccacttcaccaagcgcccagaggaggttggtgctggtgaccagggtcacatgtttgggtatgccaccgatgaaacccccgagtacatgcccctcagccatgtccttgcaaccaaacttggtgctcgcctcacagaggttaggaagaatggcacctgtgcttggttgaggccagatggtaagacacaagtaaccgtcgagtactacaatgacaatggtgccatggttccagttc

SEQ ID NO: 39858 - DNA, 191 bp, Glycine max
  Clone ID: 700942416H1
cacagatcatagtgatcattttttaatttctcagatttatccgacgtcgctgcagatccaccaaccgttatggctgccttcagcggtgatgaaacggcaccgtttttcggcttccttggcgccgcagctgccctcgtcttctcctgtatgggagctgcctaatggcgcagcgatagatggcgtgggcgtca

SEQ ID NO: 39859 - DNA, 157 bp, Glycine max
  Clone ID: 700942389H1
gtcttgagacacctcatagtgtttgctttggaagtggggacaagcctgtcacagatctgcaacagttacgttatttccaggccaaatacgtatgtgttgatggagatggaacagttcctatagatcagcgaagctgatggcctcgagcaggtgctgc

SEQ ID NO: 39860 - DNA, 268 bp, Glycine max
  Clone ID: 700942417H1
aagcataatcaaatcaaccatggctaccctcattgctcccatcaccttttcgcctggtttagatgcagaagctcttagaaaagctttccaaggatgggggactgatgagaagaccgttatagcaatattgggtcacagaaatgttcatcagaggcaacaaatcagatagatttatgaggaaatttaccaagaggacctcatcaaacgcctagagtctgagctctctggtgactttgttaaagctgtgtaccgttggatgctggaacct

SEQ ID NO: 39861 - DNA, 265 bp, Glycine max
  Clone ID: 700942419H1
gctagctatgttgaaaatagtttggttttgtagtaagtgaggtgaggtgccaaaatggtgaagataactcttggtactttcgatgactcttttggtgttgcctctcttaaggcttatttggcagagttccatgcaactctgtttttagtgttcgctggtgttggttcagccatcgcttacaacgagcttacaaaagatgcagccttggatccaacggggctggtggcagtagctgtggcccatgcatttgcactgtttgtaggtg

SEQ ID NO: 39862 - DNA, 223 bp, Glycine max
  Clone ID: 700942421H1
gatatttctatattttggttctctgtgtctctacgatcaggattcaacggtccaaaatgttcggggcttgtgctgtttgttttcccaggttttagagctccaaaccttcagatccacctcattcgtctcctgatcttccttcctggataacgttttcgggttcgagaaggcacttgtgttgtttttcgtacgaaatggagactaaacagagttcggtgacggt

SEQ ID NO: 39863 - DNA, 115 bp, Glycine max
  Clone ID: 700942422H1
ctcttccttttctcttctctgtctaaggggtgccctgagatcacattgaacaatggtgaaggctgtggccgttcttggcagcagtgagggtgtcactggaactattcacttcgat

SEQ ID NO: 39864 - DNA, 96 bp, Glycine max
  Clone ID: 700942331H1
gtgttggtggatttccttgtgggggccggcatcaagccaacatctatagtgagttacaaccatctgggcaacaatgatggcatgaatctctcagcc

SEQ ID NO: 39865 - DNA, 66 bp, Glycine max
  Clone ID: 700942332H1
ggaattcggatcgaggtgttgttgttgccaaccgcacttcctcctccatgttccacacaacatacg

SEQ ID NO: 39866 - DNA, 189 bp, Glycine max
  Clone ID: 700942333H1
cgaaaaaaaaaagattcgatagaaactaagaaaataaacaaattgattcgccgagaaagaggagagatagggattcgaaccctcgatagttctttgttccgaactataccggttttcaagaccggggctatcaaccactcagccatctctccaaagctaatttatattttatctttattccacacaaca

SEQ ID NO: 39867 - DNA, 174 bp, Glycine max
  Clone ID: 700942334H1
agaatcttctgtttttggatctatatactttggtttatgatgatggtgtgtttgaatcagaagagtggataggtttttggtttggaatttggattgggttggttttgttctcattctctgtctctccccaattggcccttttatttgatagtttgatggcacttgatctggttt

SEQ ID NO: 39868 - DNA, 240 bp, Glycine max
  Clone ID: 700942336H1
aattcattctcatacattccttcttcttcttcttcttcttcttcttctttcacaatcacaatggtgcgagtggcgctggatggtaaccccatcaagccacttacgatctgcatgatcggcgctggcgggctcatcgggtcgcacctctgcggaagctcatgtccgaaacccctcacaccgtcctcgccctcgacgtctacagcgacaagatcaaacacctcctggatcccgccgattccc

SEQ ID NO: 39869 - DNA, 246 bp, Glycine max
  Clone ID: 700942339H1
gtagcaacaatgtcgaagcgtggtcgcggaggatcggcagggaacgcgctccgcatgtcactgggtctgccggtggcggcgacggtgaactgcgccgacaacaccggcgcgaagaatctctacatcatatcagtgaaggggatcaagggaggctgaaccggttgccgtcagcttgcgtgggtgacatggttatggccaccgtcaagaagggaaagcctgatctccgtaaaaaggtgctccccgccg

SEQ ID NO: 39870 - DNA, 252 bp, Glycine max
  Clone ID: 700942340H1
tggcaacaagcattttctttcatcacctttggaagattttggagaaagcatttacaatttccatttgcgttgaaccaacatgagcaacagaaaagacaagaatgatgatgagtctagtgagagaggtatattttcacatctaggatatccagtgcaccacccccctaccctcctccacatggatacccaccatcaggctatccacctccaggagggtatcccccaacagcctatccgccgctgggaggatat

SEQ ID NO: 39871 - DNA, 251 bp, Glycine max
  Clone ID: 700942341H1
ccacatgctaaggttatgatatgctctttggaaagaagcagggcccgaaggagaatcgaacatataaaaacatgaccaaaatggacatggaattctcatcatcttccccttaagtttatcttcattattatattggttaatttgaagctgcagtacagtggtaagtaacggaaaatggggttgcacatggtggctgtggcgaagttccacttgcgatgttgccagacacagtgtaggccctgtggtggctt

SEQ ID NO: 39872 - DNA, 211 bp, Glycine max
  Clone ID: 700942347H1
cttctaacgcatatactatccatctctctctcttattgtatggccgccaattccagtagccgcgtgtgtctgcccttagggaagcgagtcgccaaccggatctggacttccaacgcacctcctctctcttcaaggaggggagcatacagtagcgctcagtgtacgaccagaaccctgatgatgagatccagtctgggcaggtcccagacgt

SEQ ID NO: 39873 - DNA, 115 bp, Glycine max
  Clone ID: 700942348H1
aaaatttggatcatcaatagtatctacaaaggtagaattagtttgggcctctaattgcaacctgtatgatgattgcctttcaataagtttcacgcagtttgctcatgtgaaagat

SEQ ID NO: 39874 - DNA, 109 bp, Glycine max
  Clone ID: 700942351H1
atttattatcaaccctaagggtgaggtagctattagtcagcgtatcggcgcaaagtcgtatacatcattacataccctcgtcaatgacatgtttccacacaacatacga

SEQ ID NO: 39875 - DNA, 188 bp, Glycine max
  Clone ID: 700942355H1
ctcacatctttcgggaagccaattggggatgttttatagccaaggaagcgtatgggatgtctgaagatttttctctcttctctgttattcccaatgtatttacctgattctgttagcagactctggggagtctcgttttgtaggaggtctagttggggctctcggcccttttgctcacataaatataa

SEQ ID NO: 39876 - DNA, 257 bp, Glycine max
  Clone ID: 700942357H1
atcaactctttcaaaagggagatgaaaaggaaaggaaacaaaacgcacaaaggattattatagcaatggcagaacaaaaccaaaaccagacaactgaagctgcaaggcaccaagaggttggccacaagagccttctccagagtgatgctcttaccagtatattctggagaccagtgtctacccaagagaacctgaatccatgaaagaactgagagagttgacagcaaaacacccatggaacatcatgacaacctctg

SEQ ID NO: 39877 - DNA, 231 bp, Glycine max
  Clone ID: 700942358H1
agcaacgccgtcgtatccttgtcgacgtggcagaggggcttaactaccttcaccacggttgggaccaggttgttattcacagggacatcaaatcgagcaacattttgttggacgccgacatgagagggagattaggggactttggtttggcaagctttacacgcacggggaggttcccacaacaaacgtttgttgggaaccttgggcacttggcggcggatctggccacgg

SEQ ID NO: 39878 - DNA, 153 bp, Glycine max
  Clone ID: 700942359H1
gtttgcaatgaggatttgtattgtgagtttccacccgtaggaaacattgggaagagtaaaactggccaatcaagtaagtcaaatgctagaaaagagtccaaaaagacaagaggtcgcaactcgtgatccatcaaatagtgcctgttgagaaaa

SEQ ID NO: 39879 - DNA, 234 bp, Glycine max
  Clone ID: 700942360H1
agattatagagattcagctatggccttaaggacacatgatgatgccaatgatactcgaggtgagggttcgttgaaagtggcttctgagggagaagaaacagggagatccattccttatctatcatcaagcattgccagtacattttccttcaaatacaagattcgaagggcagaatgcacagtttcacatgtgataacccggagcatgctggaggttataacttcgaatcttca

SEQ ID NO: 39880 - DNA, 118 bp, Glycine max
  Clone ID: 700942363H1
ctcttccccatccttggctggcaaggccgtgaagctgggcccatcagcccccgaagtcgggagggtcagcatgaggaagaccgtcaccaagcaggcctcctccggaagcccatggtac

SEQ ID NO: 39881 - DNA, 187 bp, Glycine max
  Clone ID: 700942364H1
cgtcgtctcctcattctgcggctcgtagtaggttgaacgatatggctgttgcaatgactctaatgtgttgtagcagcagtcatgttacatgtaccttcacggtagcacatggttgtggttagtgaaaggacttctggggactttgcaaacatgcttgctgcagctcatgcattttcatgatcccaca

SEQ ID NO: 39882 - DNA, 101 bp, Glycine max
  unsure (1)..(101): unsure at all n locations
  Clone ID: 700942365H1
atacaggttcatatgtataatggtgngtataaaacttgtaaaatgtagtagtttctaactatgaacagtaaacgatgtattttttaacaaaaaccagaaaa

SEQ ID NO: 39883 - DNA, 106 bp, Glycine max
  Clone ID: 700942367H1
cccttttccctttttttttaatgaaaagccatcataagcaaatagttaccttaaaaccatacactgcatattcctcaaagcctcatcaaaccacactgcatccaaa

SEQ ID NO: 39884 - DNA, 249 bp, Glycine max
  Clone ID: 700942370H1
gcaagcattatcatccgtgacatctatggtactggacactgaacaatgtaggtaacataagcattatatacccagtaggactattgcactacatgaagcttactgtagcaggcacaatgttgtttgtcagcatgctggctgtggagttttcttaggattgaggagtccaagaaccacattcactgtgacagatgtgatcaggcgttccagcaggtagaattagaaaagcacatgaaagtttttcatgag

SEQ ID NO: 39885 - DNA, 251 bp, Glycine max
  unsure (1)..(251): unsure at all n locations
  Clone ID: 700942372H1
ttcctctcttccacacaagttactagaaatnatgctgnagaagtangagntggtcangtaaatgtcgagtccaatgacaaagtacataatgataataatcctgaagaagtgagagatggtacgagcaaatgttgattcgagggacaatcggccttgattgacaataacacggcacagagcctgactggtgaggatatagaagccatgcgaagacaaggtgcgggaggtaatgaaataaatgaagctctcat

SEQ ID NO: 39886 - DNA, 217 bp, Glycine max
  Clone ID: 700942373H1
cggaactatgatttacttctttgccataggcttcacattgttggtgaggtgcaattggctactaacctcgcccttctcgctctgcctggcgtcagaactgagtacctaaaacgggttctaagtcattcgcaggcatttgaattgagtgatatttcctgactaaattaggtgttgccagagagaacgttgatgacacagctaggtgactgctcagatt

SEQ ID NO: 39887 - DNA, 123 bp, Glycine max
  Clone ID: 700942329H1
cttcgttgcttggtgatgtccctttctgttctcttcactcttggtcttgcgagagttagccatgccagagacgaagatttttggcatgctgtttggccaaactctcccattccaagttcatta

SEQ ID NO: 39888 - DNA, 81 bp, Glycine max
  Clone ID: 700942374H1
aacacattctcttcatggtggaatacaatcagacttctgcaatgaaaaaaagacatctctgcatattctgtcttccacaca

SEQ ID NO: 39889 - DNA, 85 bp, Glycine max
  Clone ID: 700942376H1
gtgaatagaacttcgaaagattctagaggcagaggaattcacctatttttacagaatctatcctccctttacgatttgacttcgt

SEQ ID NO: 39890 - DNA, 165 bp, Glycine max
  Clone ID: 700942377H1
ggaagagaagcgggatttgagcaaatttaaatgggacgaattcttggccatgactcgccaagcaatcacacgcaaaaaacacaagagaaggcttagtcccggaccaggtaatagtcatgatatgcttccactgtccaaagatgattgggacctaagcaaggagta

SEQ ID NO: 39891 - DNA, 153 bp, Glycine max
  Clone ID: 700942378H1
cttgaagtccaacaagttgtccccatcggaatctaggtcatggatgatgagggggatctaagaagggcttttgagatgtttgtgtgggagaaagaagggagtggttgcatcaccccgaaagggttgcaaaggatgttgcatcgccttggtgag

SEQ ID NO: 39892 - DNA, 153 bp, Glycine max
  Clone ID: 700942380H1
cccctatttatgtttgacactagttcattagatcaagggacaacaactgtagacaccaccaataatgtacgagcagaactgttccaagattcattgggtttgagcagtagtgaaacgtggaacatgagccaccatcaagtccatgctcttcct

SEQ ID NO: 39893 - DNA, 195 bp, Glycine max
  Clone ID: 700942383H1
ctcgagccgttacaggcaaaacgaagttctgtcaagttggatatatataggaagttctcaaatgcattagcagtaactgtgatctcctcagttgcttggattggatatgcggtatacttcaaggctacagatcctttcaatgagcgctgcaaagtgcttggatcatcactgcattctgggacattctagcatttg

SEQ ID NO: 39894 - DNA, 250 bp, Glycine max
  Clone ID: 700942385H1
gcatgaggaaatgctgaagaactctgaagatttctacaaagcgttaaaccttccctatcaagttgtttccattgtatctggtgctttgaatgatgctgcagcaaagaagtatgatctagaagcatggtttccagcctctcaagcttacaagagctagtgtccggtccaaactgtacagattatacggccagaagattagaaatccgatatggtcaaaaaaagagcaatgagcaaatgaagcaatatgttc

SEQ ID NO: 39895 - DNA, 233 bp, Glycine max
  Clone ID: 700942386H1
tgagttctttaagaagtactattctgatattgctggcccagagtatgcaagcaagtacaagaccttgatctaccttgctggttcagcatctgctgaggttattgctgatattgctctttgcccatttgaggctgtgaaggtccgtgtcaaactcagcctggttttgcaaggggtttgtctgatgggctcccaaaatttgtcagatctgaaggaaccttagggctgtacaaggg

SEQ ID NO: 39896 - DNA, 248 bp, Glycine max
  Clone ID: 700942387H1
ctgccttccgtggtcatgttgggcctgtttaccagatcagctggtctgcggacagtagacttcttttaagcggcagcaaagattcaacacttaaggtttgggatattcgaactcgtaagttgaagcaagatcttcctggtcatgctgtgaagttttttctgtcgattggagtccagatggagagaaggtagcctctggtggtaaggataaagtgttgaagttgtggatgggctaggctaatttttgga

SEQ ID NO: 39897 - DNA, 253 bp, Glycine max
  Clone ID: 700942388H1
ctcgagccgtttttagttccaaggacagtacaattacagatgaggatattgacagaattattactaaaggagaggaagcaacagctgagcttgatgctaagatgaaaaaatttactgaagatgctatcaaatttaagatggatgacactgtgagttgtatgattttgacgatgagaatgaagagaacaaatttgatttcaaaaaaattgtgagtgaaaattgggtcgagccaccaagaagagaacggaagcgc

SEQ ID NO: 39898 - DNA, 87 bp, Glycine max
  Clone ID: 700942261H1
gctccggtctggaataatgatgttaggttcttctgtgtcaaggattcttctggtagtccaattgcgtattttgatgttgatccttat

SEQ ID NO: 39899 - DNA, 59 bp, Glycine max
  Clone ID: 700942263H1
gggtcttgcacttgaagttgaagtcttgcccttctctcttcaactccacacaacataca

SEQ ID NO: 39900 - DNA, 90 bp, Glycine max
  Clone ID: 700942264H1
tagaaggtggtccgttttgaccttggtggtgggacatttgagtgtgctttactcaccatttaggagggtatctttgaggtgaaagccact

SEQ ID NO: 39901 - DNA, 104 bp, Glycine max
  Clone ID: 700942265H1
ggctcgaggaggtgcaaacgaccacagcttacagaattggattgaagatttatattggaagcagcatgatataaattatccaggcatggatgatgcaatggtac

SEQ ID NO: 39902 - DNA, 90 bp, Glycine max
  Clone ID: 700942266H1
gcacctggtgactttggattcgaccctcttcgtcttggtgaagtaccagagaatcttgagaggttcaaagagtcagaactcattcactgc

SEQ ID NO: 39903 - DNA, 87 bp, Glycine max
  Clone ID: 700942270H1
caatttcggccgtacaagcccaactcaaaactgggttttacgcctcttcgtgcccaaacgcagaagccacagttcgagccactgtgg

SEQ ID NO: 39904 - DNA, 90 bp, Glycine max
  Clone ID: 700942273H1
ccagaatccagaaattgcaatagaaaagaaaaagagaggtttgagatgatttttcaatcttttatactggataatctagtattcttatgc

SEQ ID NO: 39905 - DNA, 84 bp, Glycine max
  Clone ID: 700942277H1
gcagtctctcaaggatgcccgagacttcactatgttctctacttttgccgtcaaatgaccaatgctgctgttgctactgctgtc

SEQ ID NO: 39906 - DNA, 87 bp, Glycine max
  Clone ID: 700942278H1
ctttcttgatgaccatcaaatcaaaaagggttaccttctgacatgtgtttcatacccgaaatcagattgtgtgattcacacccacaa

SEQ ID NO: 39907 - DNA, 86 bp, Glycine max
  Clone ID: 700942279H1
ggcagtacgaaatccaaatgcagaacaagcaacaagtagtgttagttctgtgtatgtagatgctgtagagccgtctgataaagatg

SEQ ID NO: 39908 - DNA, 88 bp, Glycine max
  Clone ID: 700942280H1
aaacggtccaaattctgtatctcgtaggcactcactcactctcttcccaaacacagcgtgttgttttcccggttcccgcccatagttc

SEQ ID NO: 39909 - DNA, 96 bp, Glycine max
  Clone ID: 700942281H1
catattgtcaacatttaaatgaaggataagtacatgcttaccaaactagattctgtgttgtatgcttggtagttgccgtttccttgtaatcttaaa

SEQ ID NO: 39910 - DNA, 109 bp, Glycine max
  Clone ID: 700942282H1
ctcagcattcggctcaagagcatggtgaaggtgctcatcatgaaggagaggccaaggagaagaaaggtatattagaaaagataaaagagaagcttcctggttatcactc

SEQ ID NO: 39911 - DNA, 89 bp, Glycine max
  Clone ID: 700942284H1
cagtaattggttttgccatttcaaagctgggaaagaacattcaagtactttcaagttcctttgtcaataagcaagagcaatacactgtg

SEQ ID NO: 39912 - DNA, 85 bp, Glycine max
  Clone ID: 700942289H1
ccaatatattccattctctctgtgtatgtccctacctctcccttcaagatgcagatcttcgtcaagaccctcaccggcaagacca

SEQ ID NO: 39913 - DNA, 85 bp, Glycine max
  Clone ID: 700942291H1
gcagtttcattccttgcaactgtacctttgggagaattattctttttccatatgatcctgatacgaaagggtatcacaacttacg

SEQ ID NO: 39914 - DNA, 86 bp, Glycine max
  Clone ID: 700942292H1
gcagacttaacaacagcacaaagcgggttactgtctgttcaagctaccatctctctctctctttcttagtgcctccttgccagaag

SEQ ID NO: 39915 - DNA, 86 bp, Glycine max
  Clone ID: 700942293H1
ttttcgtcgtgcatgccggttgcggttgatacgcgcgacggtatccgattagtatttcaggaaagattatcaatttgagacgattg

SEQ ID NO: 39916 - DNA, 85 bp, Glycine max
  Clone ID: 700942294H1
ttctttttgtgttagtgagagaaagttctctctctttgactcacaaccctattgcgtgctttgcaatcgaccccgcttatggcca

SEQ ID NO: 39917 - DNA, 87 bp, Glycine max
  Clone ID: 700942295H1
gaatcaacaatcatgtcggacgaagagcaccatttcgagtccaaggccgacgccggatcctccaaaacctaccctcagcaagccggt

SEQ ID NO: 39918 - DNA, 256 bp, Glycine max
  Clone ID: 700942301H1
tcttcttccttattttcttccctagtcaaggagattcatctctgcaggttgttttagaaaagaaaaaatggtgaagatttgctgcattggtgctggatatgtggggggtccaacaatggcagtcattgctctgaagtgcccctccattgaagtgctgttgttgacatctccaaatcccggattgcagcatggaacttcctccagcttcctatcaatgacccaggccttgatggtggcgtgaagcaatgtcgtggca

SEQ ID NO: 39919 - DNA, 248 bp, Glycine max
  unsure (1)..(248): unsure at all n locations
  Clone ID: 700942303H1
ctcgccttcgtcgtcgccgccgccggcgtcctcctctccacgctacgtgagcgggganngnngnggatgnggntctggctctgcggctacgccttcgagtgcgtgcttcacatggcgttcgtgtgcntcgaattccgaaccagaattggcgattcttctctcacactacctatagcgttntgangaggctagagcctatgagcactctggcaacatcggtttggtgggtgtttggattttattggatt

SEQ ID NO: 39920 - DNA, 255 bp, Glycine max
  Clone ID: 700942304H1
gtcgtccttggaagctgccaacttcacatcccaagtcattatcatgaaccatcctggccagattggtaatggatacgcaccagtccttgactgccacacttctcacattgctgtgaagttttctgaaatcttgaccaagattgacaggcgatcggtaaggagcttgagaaggagcccaaatttttgaagaatggtgatgttggtatggttaagatggttccaaccaagcccatggtggttagaactttctctgag

SEQ ID NO: 39921 - DNA, 89 bp, Glycine max
  Clone ID: 700942258H1
tgtgaatgctggatgcagggataaagatctggctcatattgaggagcatatgaaggcattcaaggccaaaggtggtgatgtgtcatggc

SEQ ID NO: 39922 - DNA, 251 bp, Glycine max
  Clone ID: 700942305H1
tactcgagccgaatcggctcgagaatttgtgaagtcagtccaaactacagtttcaaagatgccacgtggaacgcttgaagttgatctgatcagcgccaaaggaatcgatgacaatgattttctctccagcattgatccttatgtgattctcacatcagggcacaggagaaaaagagcactgtgcaagaagatgctggatccaagccacaatggaatgagagctttcttttcactgtctctgacagtgcatc

SEQ ID NO: 39923 - DNA, 253 bp, Glycine max
  Clone ID: 700942306H1
gcaccatggcgacactggattccgacgtgaccatggttccggccggcgaaccctccaccagcgccggtccttcttcgtccaccaagaagccgaagcgattcgagatcaagaagtggaatgccgtttctctctgggcttgggatattgttgtgataattgcgctatctgccgcaaccatatcatggatctctgtattgagtgccaggccaaccaggctagcgccactagcgaggaatgcactgtagcttgggga

SEQ ID NO: 39924 - DNA, 196 bp, Glycine max
  Clone ID: 700942307H1
caaaagtgaagatagaaggccaagctaaagttttgtctattcaggtgaaggaaggaaaatattcggacaaggaggaatgtgaggcattcaacaaaggcagaactccttccaaagtgcatgttagaaacttttaatatttaagaggccatgcttaaagaagagacatcaaagaaggttcattgagttgggcttttat

SEQ ID NO: 39925 - DNA, 256 bp, Glycine max
  Clone ID: 700942308H1
aagatgttgacatgaaggagatatttagcatactaaagcaagcattaatctccaaatctcctctaagtgaagtattcttcaaaaaagaaggatctaagtcatgctcttgcccatactcttgcccttgctcacgaaataccaacccaattcattgaaagattctataaaaatcaaggtaatggtgaacaaatcaaataataagattgtgttggccgaagcagatggagattttgttgattttcttttcagcttcctc

SEQ ID NO: 39926 - DNA, 257 bp, Glycine max
  Clone ID: 700942309H1
agcaaagtcaagcgagatcaatgtattggttcctggtgctgatcctgatggtgattgggtggagcattctttgccacaacaatacattcatttgttcaagaatgagcactttgaaacaactcctgctgctcattctggaggttaaattgattgcaatttggacttttggagtctctatttatatttaaatcgttttggaatactgtgggagtggcttcaatttgttgtttcgtcaattcatttacaaacacagtcat

SEQ ID NO: 39927 - DNA, 215 bp, Glycine max
  Clone ID: 700942310H1
ggcattcggctcgaggcgttgacggtatgctgctcatcgtggatgcggcgaaaatttcgataagcctgtcacaaatctcgagccgttacgccatgtgtaggtcatatacgtatgaggtgatcgagatcggtcagttcctatagaatcagcgaggctgatggtctcaatcgatggcaaaggttggcgtgcccgatgcgcatcagcgtattcttccg

SEQ ID NO: 39928 - DNA, 156 bp, Glycine max
  Clone ID: 700942315H1
tcgctacttgttaagggctgcagtataccagaatgtctcaggattgaggcagtgcatctttgcctattgtggtcactgtggtttcactactgtgccttttggaacgtgctaacgcagcatcttactccgttgcaggacctgggggatggcccttca

SEQ ID NO: 39929 - DNA, 119 bp, Glycine max
  Clone ID: 700942316H1
cttggatactgattgacacagtgccaaatgttaaaggactttgcgctttttcccctagtttggatgcatgttacttggctcttcctgccagtctacaaaggacgcatgcattatgcatg

SEQ ID NO: 39930 - DNA, 221 bp, Glycine max
  Clone ID: 700942318H1
caagtatgtgagctctgaggttgaggtccaggatcgtggtgtttttgactttctcggtaagaaaaaggatgaagaagacaagcctcatcctcaggaggaggtcatcgccaccgagtttcaaaaagtcactgtctcagaccaaggagagaacaagccagcctcttagaaaagcttcaccgatctgacagcagctcctagctctccaagtgaggaggagggag

SEQ ID NO: 39931 - DNA, 201 bp, Glycine max
  Clone ID: 700942319H1
tgtcactcaaagcacataacatagagaggaaatccatgctgtggaagaagatacagaaagccatggatggtaataattcagatacccttcagcataaagcagcagttaaggtatcaatgcttgaaaagagtccaccaaatgagagagtgcatacaattcagatttgctagaaacacctaaagttaaggaccgtccgtaaaa

SEQ ID NO: 39932 - DNA, 262 bp, Glycine max
  Clone ID: 700942321H1
ggctcgagaatgagacttcctattgttcttagagatttgaagtctccaaatcttttggttgatgattcatacactgttaaggtatgtgattttggcctttcacgtacaatggcaaacacatttctttcatctaaaaccgctaccggaactcctgaatggaggcacctgaagtcattcgaggagaactgtcaagcgacaaatgtgatgtattcagctttggtgtaatcttgtgggaactagtgaccctgcaacagccatggag

SEQ ID NO: 39933 - DNA, 253 bp, Glycine max
  Clone ID: 700942323H1
ctcctacctaaggtaaaaatggcaagggtgggaataatggtaaaaacactaatgacaagggtcatggtagcaataatggcaatgtgggccaccacatgggccccatgggtcagatgggcccaatggttcagagaggtccaatgaatcagatggcccaatggaccatatgaggaatatgaacatcaatatgccggcggtgcaaggattaccggcagccacggccgcagcagcgatgaacggtggttactaccaa

SEQ ID NO: 39934 - DNA, 257 bp, Glycine max
  Clone ID: 700942324H1
gcagacttaacaacagcacaaagcgggttactgtctgttcaagctaccatctctctctctctttcttagtgcctccttgccagaagttaaaatggcccaagaaactttcctattcacatctgaatcagtgaacgaggggcaccctgacaagcttgtgaccagatctccgatgctgtgctcgatgcatgcttggagcaggaccctgacagcaaggttgcctgtgaaacctgcaccaagaccaacatggtgatggtttt

SEQ ID NO: 39935 - DNA, 171 bp, Glycine max
  Clone ID: 700942325H1
ctcattgctttgttctcttctctcttctctctcacattcaacttcaaaggcgtagagtgagatccgaacgatgaagagagtattcggcgtcaagaagaacaaggatcctcctccttccattcaggatgcttccgataggattactaaacgaggtgctcggtggatgacaag

SEQ ID NO: 39936 - DNA, 233 bp, Glycine max
  Clone ID: 700942326H1
caggacttgttgtgggggagactgcagttattgggaataatgtgtcaattttgcataatgtgacattgggagggactggtaaggcaagtggggagagacaccctaagattggtgatggggtgttgataggtgcagggacttgtattttggggacattaagattggtgatggagctaagattggtgcttgttctgttgtgttgaaggaagtgccaccaaggactactgctgttg

SEQ ID NO: 39937 - DNA, 179 bp, Glycine max
  Clone ID: 700942328H1
ggaattccgctcgaggttgttgactaggtctttcaatgttgacgtattgaatcgccataaacagaccccgttgatgttggctgtgatgcatggaaagactggttgtgttgagaagcttattcatgccggagcaagtatattgatgtttgattctatacgtcggagaactgcttacacta

SEQ ID NO: 39938 - DNA, 255 bp, Glycine max
  Clone ID: 700942181H1
gtttggacgaggctgcggattcagcacccacgaccgcacagtgtctcgtcgccacgtgtccttcgaactcgaccattcacactcagaggatgctaatgctagggtttctttccaagtcatggggaagaaccccttttgggtgtacgacggagaagcgcttcggctcttcagaaagttcgacaagggtcacctgcaactcggacaccgtttctgcttctctcccaacacacccctctggttcactcttactaatat

SEQ ID NO: 39939 - DNA, 257 bp, Glycine max
  Clone ID: 700942182H1
gaaagaatccaatgtatacatatcgtgaatccattgttttagggaaaacaaactgttccattttcaaggtaaatcaaatactaagagaactcagtagagagtggccagggagttcatatgatctgctgtccaaaaactgcaatcacttttgtgatgaattctgtgaaaggcttggtgtaccaaaacttccaggctgggtgaataggtttgccaatgctggtgatactgccatggaagtggctggaaatacagcatta

SEQ ID NO: 39940 - DNA, 251 bp, Glycine max
  Clone ID: 700942183H1
ggtagatactgtatacctaacttgatggagctaaccccccaagttatcaaagcaattcaaaacattatgtatggtttatatatcaccactcaagtctcctcactcctgattttctttgtatggaggcattgctgtttcttttaattgttcctatgggatggtgtctaattattaactgtactcaacgacctgtttgattctaaccaataaagattgatgaactgttctaaaaaaaacaaataaaataaaaa

SEQ ID NO: 39941 - DNA, 124 bp, Glycine max
  Clone ID: 700942184H1
gtcttgtctgctccatctcctaaaccttggccgcactagcctcctaattgtagtgattgtgatccacttttcaagaaggcatatgaaatgcgtgatgctgatgctgttttccacacaacatacg

SEQ ID NO: 39942 - DNA, 250 bp, Glycine max
  Clone ID: 700942185H1
ctcaagtctctcgaagcctctttctctctcttctagaagctatctgtgtttggtgttactaagtctccaacaagcaaagtacagggttgatttggaaatccaggtccccaccccattcgacagaaataccgaggcgagagaatcggatgcccccggagcaaaggagtatgtgcatattcgaattcagcagaggaatgggaagaagagtctgaccacagtgcaagggctgaagaaggagttcagctacgag

SEQ ID NO: 39943 - DNA, 249 bp, Glycine max
  Clone ID: 700942188H1
atgaataacttggtcctatctcttgttcctaaattcgcaaaactgcaaactctaatcctccgtcaagacaagcctcaactagaggataatgctgttgagactattgcaaaatgctgtcatgaactgcagatcctggacctcagcaaaagtttcaagctaactgatcgttcactctatgagctcgcccttggttgtcgcgatcttacaaaactcaacatcagcgggtgttcagcatttagtgacaatgct

SEQ ID NO: 39944 - DNA, 251 bp, Glycine max
  Clone ID: 700942189H1
aaaagaagcactttactcaattcaatttctttcgttcctctcactcacaaactcaaacacaacatgatgtgggaatgggacgattaccaagacaccatccccaaacacgacctaccccaacccgattcccacctcaaattcgatttcttctccgccctctccaggcccaaggattattacaagatactggaagtggattacgacgccacggatgacgctattcgctccaattacattcgcctcgcgctgaa

SEQ ID NO: 39945 - DNA, 246 bp, Glycine max
  Clone ID: 700942190H1
ggtaatggagggtctatttcattacaaggtgtatcacaaagcatctgtaccctcctggtcttctccaagaacattaaatgaagcatctccttttgtgccaatgatgctttcacctactcaaggagtttctacccaaagttctgattggaatggatatcaggcatctgtctacttacctgagaggagcattcatccaccttctacatttgtcatgaacaacccagcaattgatacaaatgtttacat

SEQ ID NO: 39946 - DNA, 249 bp, Glycine max
  Clone ID: 700942191H1
tgaggcagcactggaacttgtaaggaaggacaagcttagagaagtgaaggcaggccacgatggaacttgggctgcacatcctggtctcattccatcctgcatggaggttttcaacaacaacatgggcattgctcccaaccagatagacacagtgaaacgcgatgatgctgcaaacttaactgaacaagacctcttgcagataccaacaggaacccggaccatggaaggtctcagattgaatacaagggt

SEQ ID NO: 39947 - DNA, 249 bp, Glycine max
  Clone ID: 700942192H1
gctgaaagagcaccttaaactggcaagagaatacgcggtggaagggctctacgacacctccgtgatcttcttcgacaacgccgttgcacagatcaacaagcaccttaacagcaacagcgtggaggaccctttggtgcgagccaaatggatgaaggtgaagaaagcgctgtgcgaggaaacggaagtggtgaagcagctagatgctgagagaagggcgtttaaggaaacaacacgatcgccatctcaatc

SEQ ID NO: 39948 - DNA, 247 bp, Glycine max
  Clone ID: 700942193H1
aaggaatcgttttgcctgacattatgcttgtggctttcatgatatcaaaattgcctccttcgtggactgattttgctcgaagcttgaaacataaacatgaaagttttacctttgatgatttgcttgtctgtctccgcattgaggataaacatcgttcatctcaaaaacacttgcaaaaatctgattctcactctaaggcctatcttgttgagagctctagcaaacctttctctaagtccttcaaaag

SEQ ID NO: 39949 - DNA, 129 bp, Glycine max
  Clone ID: 700942195H1
actctctccctctttcctatcacactttctagatagctagcctgtaagatatatatatagatatttcatatatatcctatggtccgtgagtgcccttgttctgtaccaaccctttcttccacacaacat

SEQ ID NO: 39950 - DNA, 254 bp, Glycine max
  Clone ID: 700942196H1
aagaaagagaagcaaggagaaagagaagggttagaaggcgaagaagcatggcttcactcaagaagaagaaaccctattacccgcttccgttaattcctatctattactacttcttattcaaagggtgatatgatcttcttcttccaagagtctcatgcatgctactttcttctctcttctcggggaattgaagcgttgtggtccgattgtttgctagatcaagcaaattaacctgtatactggtttatatatct

SEQ ID NO: 39951 - DNA, 95 bp, Glycine max
  Clone ID: 700942203H1
gagagagaaaagcgtgaatcatgtcggacgaagagcatcacttcgattctcaggcggatgcgggagcgtccaagacgtatcctcagcaggctggt

SEQ ID NO: 39952 - DNA, 103 bp, Glycine max
  Clone ID: 700942204H1
attcggctcgaggaagtagtgaatcccccaatagtggggcctgcgtcgtctgttacccagcctatgtaagatacgaatgagaatgaagaaacagacttgctct

SEQ ID NO: 39953 - DNA, 93 bp, Glycine max
  Clone ID: 700942205H1
caaatatcaagacaaagagaacagttcagtttgttgactggtgccctactggattcaagtgtggtatcaactaccagcctccaacagtggtac

SEQ ID NO: 39954 - DNA, 78 bp, Glycine max
  Clone ID: 700942206H1
gagcatctctctgctcttcgctgttctggtctgttctgttctgtgtctctctcctccccatatatgcctcttcttctg

SEQ ID NO: 39955 - DNA, 93 bp, Glycine max
  Clone ID: 700942207H1
cagatgatggagacgacggcgaagcgaaacgctgtcgttgcgccaatcgcggcgttgttgttggtggtgctactcgcggcgagtgtggtggtg

SEQ ID NO: 39956 - DNA, 92 bp, Glycine max
  Clone ID: 700942208H1
tgctttcggaggaggaaatcggtcgtctataccgaataaggaagacggtgatgcagatgctgagggacagaaattttctggttggtgacttc

SEQ ID NO: 39957 - DNA, 93 bp, Glycine max
  Clone ID: 700942209H1
gttgttgttgtgccattcccatattgtcccattcactaagacatggaagccagcgctggactggtcgctgggtcacataaccgcaatgagcta

SEQ ID NO: 39958 - DNA, 93 bp, Glycine max
  Clone ID: 700942210H1
agcaaacaccaacaacagttccagaaaatgaaacaactgaggtaagctagacccaggaaataaccccagtcactgaggctcctgcaacagaat

SEQ ID NO: 39959 - DNA, 89 bp, Glycine max
  Clone ID: 700942211H1
gccaaaacgttgaatgtcttgttcctgttcaaatcatccttttgaaattgtgaatccacataattgagatgcttaattcatttgtattt

SEQ ID NO: 39960 - DNA, 88 bp, Glycine max
  Clone ID: 700942212H1
ggccaattctcggcaaaacatcaggaacttggttaaggatgggtttatcatcaggaagccaaccaagattcactcccgctcacgtgct

SEQ ID NO: 39961 - DNA, 242 bp, Glycine max
  Clone ID: 700942180H1
gaaaggttgagctatagcctaaagggagagacacataaatagtttctactttctattcatagatagatggctggcccaattatgagacctcagattgtgctatttggctcctccataattcaaatgagcttcgacaatggtggttggggtgctattctagctaacttgtacgctaggaaggcggacatcatcttaagaggatactctggttggaattcaaggcgggctttggaggttttgga

SEQ ID NO: 39962 - DNA, 87 bp, Glycine max
  Clone ID: 700942213H1
agaaaactccccttaaacccccccccttcatgtgcttttcttttctctttttgctctaagcaaaaaccaccactccgcaccacataa

SEQ ID NO: 39963 - DNA, 110 bp, Glycine max
  Clone ID: 700942218H1
gcattcggctcgagctcaaatccaagctcgggaacagagaaggagaaagagaatggacgccattgattctgtgttcgatccgttgagcgaattcgcaaaggacagcgtga

SEQ ID NO: 39964 - DNA, 92 bp, Glycine max
  Clone ID: 700942221H1
ctaaggtatctctctgtatattcaaatacacagtatactatcacattcgcttcggtacttctctcttcattgtcgcagacacaaagcagcac

SEQ ID NO: 39965 - DNA, 92 bp, Glycine max
  Clone ID: 700942222H1
gtgaagtggttgcagctgagacatgaaatgaaatgaaatgcttgagttatgacaaatgaatattctcttcctcaagttccatatttctgtat

SEQ ID NO: 39966 - DNA, 93 bp, Glycine max
  Clone ID: 700942223H1
cccggatccgagatacccagaaggaaaagattaaaactttggtgttttcatcgatctctggggaaagatgtgttgtggggggtcaatttgcat

SEQ ID NO: 39967 - DNA, 93 bp, Glycine max
  Clone ID: 700942224H1
cactacttaactcaggagtgtgcatattttcgttgtatggatggatccttctagtggacaacaccagcaaatgtctagccagtcattggagaa

SEQ ID NO: 39968 - DNA, 92 bp, Glycine max
  Clone ID: 700942226H1
cactcatctcactcgcgccatcttagggtttctccttttgtttcgcaacatggttgccgctaagaaaactaagaagacccatgagagcatca

SEQ ID NO: 39969 - DNA, 91 bp, Glycine max
  Clone ID: 700942227H1
agacagtcgatgtcgataaccgaatctccctccgattctactaccgcatcgctgacaacatcctccgacaggctgatatctttcgtgcaga

SEQ ID NO: 39970 - DNA, 81 bp, Glycine max
  Clone ID: 700942230H1
gtaaattgcacaaaaaatccgagcgcaagactccgagactctggctggcaatggagacagtaccgctagagttgattcgga

SEQ ID NO: 39971 - DNA, 91 bp, Glycine max
  Clone ID: 700942231H1
gatcccatgagtgacatggtatctgattcaattgttgctctggttttaaatatcaaccgcgatctcccaaaaatagtgaatgaatctgatg

SEQ ID NO: 39972 - DNA, 79 bp, Glycine max
  Clone ID: 700942232H1
cgaaattctgtagctcgtaggcactcactcactctcttcccaaacacagcgtgttgttttcccggttcccgcccatagt

SEQ ID NO: 39973 - DNA, 98 bp, Glycine max
  Clone ID: 700942235H1
gctcgagaagcaattaacctagtagtcgtggcatctttccaaaagcagcgaagaaaaactgaggagtgccgatcagcaatgagatgattaagcgaatc

SEQ ID NO: 39974 - DNA, 89 bp, Glycine max
  Clone ID: 700942241H1
ggcatttgtggcaactcaattaggtggcccttcactgccaaagttgcattaaaatggctgggctatgactttctattaattaatacaca

SEQ ID NO: 39975 - DNA, 89 bp, Glycine max
  Clone ID: 700942243H1
cgctgccttatgttggaacttgtctgaatatatgtgttgatcatttacctatctaacaatttagaacgtgcttcagtcgttgactgaag

SEQ ID NO: 39976 - DNA, 97 bp, Glycine max
  Clone ID: 700942246H1
tgaattcggcgcgatagaagatcgaggagaaaatagagggtgatcatcagcagcacaaggatgaggagacaagtgcccctgtggagaaagttgaggt

SEQ ID NO: 39977 - DNA, 89 bp, Glycine max
  Clone ID: 700942248H1
gacaggttcccttgcgttggcaataatagtcacaggcttcactttacaggatgggacttctcactacatgaaaggccttgttctcctgc

SEQ ID NO: 39978 - DNA, 105 bp, Glycine max
  Clone ID: 700942249H1
ggtattctgctcgaggtatgttgtttccgtcctcaaggaacatggcatggaaatatataatgaagttcatgcagcatacattgatacgatgaacaaggttcttag

SEQ ID NO: 39979 - DNA, 92 bp, Glycine max
  Clone ID: 700942250H1
aaaatcaatggtgtaggagcgcagcattaaagagatgccaaggagaagaaaggtatattagagttgagtgaagagaggcttcctggttatca

SEQ ID NO: 39980 - DNA, 90 bp, Glycine max
  Clone ID: 700942255H1
gatgcgggaggtgataacatagcagcaatggagttagggttatacgaaaaattatcaatgaagaggtattctagatatctttcttccatg

SEQ ID NO: 39981 - DNA, 251 bp, Glycine max
  Clone ID: 700942115H1
acaacatcaccaacactcccatcaccaccactatcccaaccctccccgccgtctccggcactccactccccgccggcaaccgcgccggcgccggggttcaacactgtccctcttgtcccagtaaccccaagtggggcccctacacccaccaccatcatccctaagggccccaccattgacatagtccaaatcctaagaaaagccaaaaggttctcagtcctcactcgccttctcaaaaccacacaactcat

SEQ ID NO: 39982 - DNA, 212 bp, Glycine max
  Clone ID: 700942118H1
ctcgtcttcaatcctttcgttattctcttattcatccttctcttctgaataatccagttctctttctgcccttttctccgtcacgctgtgcgtgtccggatctttatggatttgatccagatctacacgccgatggtgcttttggccgggtctttcatagatctggtgcgtagttgctcagatctactgtaccgcggtgcaacagagtatcg

SEQ ID NO: 39983 - DNA, 266 bp, Glycine max
  Clone ID: 700942121H1
taagtttctcagattcctgaatgacaaggactaccacgggggatttgagcagggagagatcgagcaggtgttttcggcaatggaggcgaactacgaggcctgggtgaacggtttcgcgccgctgtcggtgggagcggatgttcccgcggcggtgcgggagttttcccggacgctgttcaacatgaggccggacatctcgctgttcgtgtcgcggacggtgttccacagcgacctgagggggattctgggtctggttaacgtcccct

SEQ ID NO: 39984 - DNA, 265 bp, Glycine max
  Clone ID: 700942122H1
cgtgtatactcattttagcatcaaggttgaatctcagagaaaaagaaacatcgacaagcatgtctggaagaggaaagggaggcaagggtctcggaaagggaggagccaaacgacaccgtaaggttctgagggataacattcagggaatcaccaagcccgcgattcgccgtctggccagacgtggtggcgtcaagcgtatcagtggtcttatctatgaagaaactcgcggtgttctcaagatctttctagagaacgtcattcgcga

SEQ ID NO: 39985 - DNA, 79 bp, Glycine max
  Clone ID: 700942123H1
cttctcagcacagctaaagcttgcaactttcaacctcttctgaatgccaaataacctttgtctgtttccacacaacata

SEQ ID NO: 39986 - DNA, 161 bp, Glycine max
  Clone ID: 700942124H1
agaattgagtgaatccatcagatatgcttctggggatcccattgaaagctggcgtaactctctactgtgcttagatgcttcaaagaccatccctaatattagcaggttacctccacctagcgagtgcgatatatactatgttaatcgggatacgctcttct

SEQ ID NO: 39987 - DNA, 61 bp, Glycine max
  Clone ID: 700942126H1
tgagagaaagagatatgacagagacgaagttttgtggtattctttttggacacactctcat

SEQ ID NO: 39988 - DNA, 263 bp, Glycine max
  Clone ID: 700942133H1
ttcttctcttgcggctagggttttagcgcacgtcttctagatttaaggaagatgggtaaggaaaaggttcacatcagtattgtggtcattggccatgtcgactctgggaaatccactaccactggtcacctgatttacaagcttggaggcattgacaagcgtgttattgagaggtttgagaaggaagctgctgagatgaacaagaggtctttcaagtatgcctgggtgctggacaaacttaaggctgagcgtgaaagaggaat

SEQ ID NO: 39989 - DNA, 264 bp, Glycine max
  Clone ID: 700942134H1
attttctgagcagccaaacactctctctctgtctctcgaaaattctcagtttgcagagaaaatctgaatcatgtcgtggcaagcgtatgtcgacgatcaccttctgtgtgacatcgaaggtaaccacctcactcacgctgctatcatcggccaagacggcagcgtttgggctcagagtaccgacttccctcagttcaaacctgaggagataactgccatcatgaatgactttaatgagcctggatcacttgctccaactggatt

SEQ ID NO: 39990 - DNA, 216 bp, Glycine max
  Clone ID: 700942135H1
ttcggctcgagctcgagcctcattggcctttgtgtccatcgagctttgctgtttaaagtgttggctgacttagtcaatctaccatgtgggattgcaaagggctgcgagtagtttaggaaggatgtgggtggctcatgtatagtgcaatttggttctgacagtgagtatatgagtgatttagttggaagacgtggggcaacatgccagcctgattct

SEQ ID NO: 39991 - DNA, 259 bp, Glycine max
  Clone ID: 700942138H1
actgcccagttcttaccacacaacatacaatataaaaaaaaagacgcttattgatctgcgaaaatgaaaaagtgcaacccgagccacacttgtcaggctggtatccaggtcggaaatgcttgctgggagctctactgcctcgagcacggcatcgggcccgatgggcaaatgccaagtgacaagacagttggcggtggtgatgatgctttcaatactttcttcagcgagactggtgctgtaaagcacgtgccacgtgcag

SEQ ID NO: 39992 - DNA, 259 bp, Glycine max
  Clone ID: 700942140H1
caacactattcttcttcgcagcaatggcgcgagtggatctggacgggaaccccatgaaggcacttacgatctgcatgatcggcgctggcggcttcataggctcgcatctctgcgagaagctcatgtccgaaacccctcacaccgtcctcgccctcgacgtctacaacgacaagatcaaacacctcctcgaaccctccgattccccctgggccggccgcatcaccttccaccgcctcaacatcatacacgactctcgcct

SEQ ID NO: 39993 - DNA, 251 bp, Glycine max
  Clone ID: 700942142H1
tcgagcacttatctataatcccaatctctttctaatctccgtttgtgttcttgcagttgatgactccgattccatttcgcaaaatcccgaacccgacaacaccgtaatccatacttcccccatacacgagggtgaaaacgagatttcaactgtccccgaacctaaacctgaacccgaacctgaacaattccaattacaaccaccccaagcagaagatccgagccgtttcatcactcctagtgacttaacgc

SEQ ID NO: 39994 - DNA, 204 bp, Glycine max
  Clone ID: 700942145H1
gctcgagatcgatttcggattgtggaaggtctgatcgccagtgtgcatggcagccgagctagtcagcagactgttgatggtctattcagacaaggactgcagtggtggaagagctgcttccttcgatatgagtcccaggaggactggagccgggaaggctgtaggtcggcttcgtcgagcgctgattgggaaatggactggcat

SEQ ID NO: 39995 - DNA, 257 bp, Glycine max
  Clone ID: 700942147H1
gcagtctcattccttgcaactgtacctttgggagaattattctttttccatatgatcctgataccaaagggtatcacaacttacgagtatgttgttgccatgagaactctaagtgaaccacctgggccttcagtttatgggggtgaacagcagagtctaccatcgtctcctactagttcagctgtcactgcaatgagtggaagaagctccgttggaatgagtatacagtacaaaggtgcctggtgtacaccgccaag

SEQ ID NO: 39996 - DNA, 263 bp, Glycine max
  Clone ID: 700942149H1
agacgaaaccctaggttttagtgagtggcgaaaatggcggtgattttttcaagtgcaataccaggaggggcagcaccagcagcaatcgagcaagtgcagtgcttcgggcggaagaagacggcggtggcagtgacctactgcaagcgcggccgaggcctcattaagatcaacggctgcccgatcgagctggtggagccggagatcctccgcttcaaggccttcgagccaatcctcctcctcggtcgccaccgcttcgccggcgt

SEQ ID NO: 39997 - DNA, 263 bp, Glycine max
  Clone ID: 700942150H1
cccaagtgtaaaaatggcagcattgaatatgtccactgtgagacttccaagagcttccttgtctggaacgacaccagctaggagatcttgtgctctcatcaagaatccatcatctttgaggtctgtgaagaacgtgtctaaagtatttggattgaaatcatcttcctttagagtgtcagcgatggcggtatataaagtgaagctgattggaccagacggtgaagagaatgaatttgaagcccctgatgacacttacattctgg

SEQ ID NO: 39998 - DNA, 263 bp, Glycine max
  Clone ID: 700942151H1
tgttcctccgctcaacaactataataacatctttctttctccgaacagatcacactatggccacctcaagcgccaaatcagtccatgatttcaccgttaaagatgccaagggaaatgatattaatcttggtgactacaaaggaaaggtccttatcattgtcaatgttgcctcacaatgtggcttgactaattcaaattacactgagctcagtcagttgtatgagaaatacaaacagaaaggtctggaaattctggcatttcca

SEQ ID NO: 39999 - DNA, 104 bp, Glycine max
  Clone ID: 700942152H1
ggggttgggctcgaggtcactcactgggagcgttgttgtgagtgagggagagggttcctgggctgagcgcgaagttgagacgtcttgagtctgtgcgtaggatt

SEQ ID NO: 40000 - DNA, 115 bp, Glycine max
  Clone ID: 700942155H1
gtgtgctcgggattgggctcgagcagtatttgataatgccaccagagttgagccagaacgacctcatcaatggggtgttgatgctgctgaagtagattgttttccacacgacata

SEQ ID NO: 40001 - DNA, 253 bp, Glycine max
  unsure (1)..(253): unsure at all n locations
  Clone ID: 700942158H1
tgcctctagttctctcactttaactattttcacaaaccatagaaaatgaaataattnntgntntcattgtaacatgtcttcctcagagggtgtctttgaacagggaattgagttctcagaagccaacaatgttcttctcatgtctctaatggaagaagaacaagaagaagagtactatggcgatgatagacttgtgagcatgattcaatcattggaggcagagatcactgacactgaaatgggtcaaatgtat

SEQ ID NO: 40002 - DNA, 269 bp, Glycine max
  Clone ID: 700942163H1
ggtattcggctcgagcaaaagctgatggagcatttgcaatttcagaagatacatggaatgaacctctagggcgtggaactgagattagattacacctacaaggaagaggctggggagtacttgcaggagtctaaactgaaagaattggtgaagagagactctgaatttattaacttccctatctatatttgggcaagcaaagaggttgatgtggaggttcccgctgatgaagatgattccagtgatgaagaggattcatctgaaagcag

SEQ ID NO: 40003 - DNA, 216 bp, Glycine max
  Clone ID: 700942164H1
caggagcagaaagtaccagtgtcgacgcatatgggaattcttttcatttcacaacaaagttcctgcacttagcatggcacccaactgagaattcaattgcttgtgctgctgcaaatagcttatacatgtactatgcttaaggcagatagatgattgcacagcatgtatttgctttcgttgacctgtttttaggttgctgtggagaaggcttcttta

SEQ ID NO: 40004 - DNA, 261 bp, Glycine max
  Clone ID: 700942165H1
gggatttctctgcggtgtatgcctcacctctctgttcatggctgctctcacttcctttggctcctttcagtttagtcccattttgttttcaaccatgtcgatggctagtaattcatcagggaattctacttttcctaatgatatcaacaaggttacacgttcggactgccagtttaagcttaaggaaactgagagattagaggattctaagagcagcagagagcaaaataacgatgagagagtctcattgctttattcagc

SEQ ID NO: 40005 - DNA, 228 bp, Glycine max
  Clone ID: 700942114H1
gttggcatataatcgaggaatgtctttttgtcatttattctttgaagaaagagttgtagaaggacctctactcatttgttgtttacattgcttacatttgtttattgatgataaaatttgtatctgggatgcgccaacaacatcatacacacgaattaatagattgatcttctccacctaaaaagaaaaaaactgatggtcaatgctaaaggccaatcttgtggagag

SEQ ID NO: 40006 - DNA, 239 bp, Glycine max
  Clone ID: 700942166H1
cagtcactgaacccaatgagatgactgaattcgctaaacctactggtgttgccattcctccaccagaatctgctgagtatgcgtctgtgtcggcccccaagttgaattcattggaagagacttcagtgaaggataatggtaactcttttaatgacgctaagcatgttgttggggtaatgtcaaactcgtcgttgttatctgatgatgctggagaaatcgtgcaaattccattggatgat

SEQ ID NO: 40007 - DNA, 252 bp, Glycine max
  Clone ID: 700942172H1
gaagattcgtttgagagctgaggatgttcaagggaaaaatgttctgacaaacttttggggaatggatttcacaactgataagttgaggtccttggtgcggaaatggcaaactttaattgtggctcatgtggatgtcaagaccactgataattatacgttgaggatgttctgcattggctttaccaagaggcgtagtaatcaggtgaagaggacctgttatgcacaatcaagccaagtcagacagattcgcag

SEQ ID NO: 40008 - DNA, 250 bp, Glycine max
  Clone ID: 700942179H1
ggttattggaagaatctgaaaggtactagctagctagctagtagctctacactgtgaggtagcctcatgaggaagcgccaagtagttgtgagaagagaggagcctcaaaggagcgctaggacggtgacgtacggcgagtgccagaagaatcacgccgcgaatgtgggagggtatgctgttgatggctgcagggagttcatggcgagtggcgccaccggagaaggaacaagtgctgctctcacttgtgccg

SEQ ID NO: 40009 - DNA, 137 bp, Glycine max
  Clone ID: 700942048H1
agactaaacagtaaacagccgtctacacgtagtacgatggaagtgctagaggctacaataaaggtagctcaaagacacttaaggcatctcgaacttgatgtgtgcgtcggtgggtacatttggattgtcatctatct

SEQ ID NO: 40010 - DNA, 239 bp, Glycine max
  Clone ID: 700942049H1
gcaccacatgcaaaaaaggctcatccctggccggatcacttttatccgctgcacgttgctattggtgctgctggtgaagatgcaaaggccaaacttatccacagcagtattgaattgggcagtctctcttatgcctcttacagtttacatcagccgctagctgaatttcttaatacagaatagcttctgttcagttgcataccctggctcaaaacacagttatccaatatgtatgaaga

SEQ ID NO: 40011 - DNA, 197 bp, Glycine max
  Clone ID: 700942065H1
aaggttgctccttcattcacgcccttgctctcttcaaatctattttcttcctctgctctatctatctcttgttattgttccctctcacgccaatcaccatgccttctccttcagatcaccaccgtccccaaccaaaacctaatccaacctcctttgctctgttcctcaaaccaatcatcatgctccttctcgactcc

SEQ ID NO: 40012 - DNA, 255 bp, Glycine max
  Clone ID: 700942066H1
gaacggcaccgttttgaagaggaagcgacccgctaggttggacattcccgtttcctctctcacctttgcggttccgcccacgccctccgcggcggcgcgtgacttggtcgaggctgaggaagatgggtttggggtgtatgcaagagaggcaggagggagtacatggaggatcgttacaccgctgggaataatcttcgcggagaacacaaactggctttttttggcatatttgatgggcacggtggtgcaaaagct

SEQ ID NO: 40013 - DNA, 256 bp, Glycine max
  Clone ID: 700942067H1
cttgcagatcagcacttcatggctactacagaccctgagaacaaatcaccaactctgccgctgtctccagccgaagtggattactctaaagttgatgtgatcctaagatttctgttgctggcagcatcggtggtggcgctgcagtgattgtctccagtgatcaaacagagcaagtgctcttccaagatgtgcttctaccgcagccagccaagttcaaatactcaccagctttggtatattttgtggctgcattcag

SEQ ID NO: 40014 - DNA, 252 bp, Glycine max
  Clone ID: 700942072H1
taaaaatctaaatcccttttggtcttcatctttgcctctgacccaggtatggcttcgaaacgcatcctgaaggagctcaaggatttgcagaaggatcctcctacgtcatgcagcgcaggtcctgtggctgaagacatgttcactggcaagccacaatcatgggacctgctgatagcccatatgcaggtggtgttttcttagtttcaattcattttcctcctgactatcccttcaagccaccaaaggttgctt

SEQ ID NO: 40015 - DNA, 251 bp, Glycine max
  Clone ID: 700942076H1
gtgcttggatgtactttgctactggaaattcgtcgtaccttaagcttgctacggctcctggcctggccaagcatgctggtgccttctggggaggccctgattatggagtactcagctgggataacaagcttgctgggctcaggttcttctgagtcgtttgaggttattcttgagtcccgggtatccatatgaagaaattttaaagacctttcacaaccagacaagcataatcatgtgctcctatctaccag

SEQ ID NO: 40016 - DNA, 252 bp, Glycine max
  Clone ID: 700942077H1
cgacagaataacgacttcgaagtagttgatgaagggcttctgataatttggggaaatcagatgtgatttttaagatagttggatcagattattgtggtttcattacacgtctcatttgattgatattaggttatgcatgctatgcgagatgtatatggcagcactgcagctagatggatttgccgaaatatactagggacatttgaatcttgcaagccttttctggcttatctctaactgatgtcaattggg

SEQ ID NO: 40017 - DNA, 189 bp, Glycine max
  Clone ID: 700942081H1
ctagttctagatcgcgagcggcgccctttttttttttttttgaaacaaggcttgggaggcgagagctttcaacgttacaaggggtaaaattcccatttggccctttttttatacaaaaacttgaaactctctctaggcttcatattcagatatctccataaataggcagggcttccagtgacgggtttt

SEQ ID NO: 40018 - DNA, 72 bp, Glycine max
  Clone ID: 700942082H1
gagagagccaggagggagatcgttgacgctccatcaagatgggtatttctagggattccacacaacatacga

SEQ ID NO: 40019 - DNA, 256 bp, Glycine max
  Clone ID: 700942088H1
attgaattgcagcagaaaatgaaggattttccttcttgttttggtgaaaatggagttcaagtggcggattcttcgtcttcaagcgctaataaaagtgcccagaatgtggttacctgtgtttatcaatgcaggattggggtatttcctgcctgattactgtcacgtggagtaagaatttgatggggcaaggccttggcgttgggatcgacgattcatcaagccagagtctttgtaaggtggatatcaaaccgtgggg

SEQ ID NO: 40020 - DNA, 250 bp, Glycine max
  Clone ID: 700942089H1
aaacctctcattttctctctctctctctctaaacacagatttcatttccaattctctatctctagaaaatgggaacaacaattcttcgttcccacgattgcctccaaggccggttcctccacaacgaagcctttgcattgccgcatcacgtgtcgcatcgcgaagaaactctaatcctaacaataatagcttcgcctcctccgccaaaccaaaccgctgccggaagcggagtcctgtcattaatcgagac

SEQ ID NO: 40021 - DNA, 251 bp, Glycine max
  Clone ID: 700942092H1
aaaaacttgttcctttacagtagtttatctttgcagtgtcttaggtgtttgttttaccagttatattttgaagtgtccgccgatttcatgtagccgtagccttcaaaactgggttcttgatcggttgtaacatttcgttgctgtttgtttttgatgagtactgttttttgttttgatggtaaaagtctgagattttcaaattcacaagcagccatagggttttagtccatatcctttgctgctgaggaggg

SEQ ID NO: 40022 - DNA, 253 bp, Glycine max
  Clone ID: 700942095H1
ggcgccgggaccgggaggcccgaagcaccacttcaacggcgagcgccaggttaaggacttcatccacacactcttacatttccggaggttacaacgaaatggctgatattctcgtaaacctaacgtctctggccacgaaatgggaaggctagtttcagaaggttacgttctcaccgttttggctccaaacgacgaagccatggcgaagttaacgacggatcagttgagcgaacctggcgcaccggaacagata

SEQ ID NO: 40023 - DNA, 245 bp, Glycine max
  Clone ID: 700942096H1
attggctcttgttggtgtgtttgatccgtacaatcgaggggcactgtttactgcactggttgtcatatatgcacttacttcggggattgctggatacaccgcaacttcattctattgtcagttggaaggaacaactgggttaggaatctgctgttgactggatgccttttctgtggacctctgtttctgactttctgctttctaaacactgttgcaattgcttacaaagctactgctgccctccc

SEQ ID NO: 40024 - DNA, 274 bp, Glycine max
  Clone ID: 700942101H1
ggccaattctcggcaaaacatcaggaagttggttaaggatgggtttatcatcaggaagccaaccaagattcactcccgctcacgtgctcgtaggatgaaggaggcaaagaggaagggccgccactccggttatggtaaacgtaagggtacaagggaggcaaggcttcccaccaagatactctggatgagaaggatgcgtgtgctcagacggttgcttcgtaagtacagggaatcaaagaaaattgacaagcacatgtaccatgatatgtacatg

SEQ ID NO: 40025 - DNA, 270 bp, Glycine max
  Clone ID: 700942103H1
ctcgagccgctcgagccgttgagattctgagtaacaatcaaagtttggaaaaaagttttgagggaagaagagaccacgatgctgggtgtgaccactcttactctgggttcgtccaccacattggtggctcagaaccatgctcaacaacatgccaccactcttgcctcagccaatggaaacagaagggacagtgtttccaacaggactcaccccttgcctatgagtttggtatcttccaccgaccaaagtttcagctttctctcttccttc

SEQ ID NO: 40026 - DNA, 208 bp, Glycine max
  Clone ID: 700942104H1
gtgaattggactcagttacactaccagtgaagtctggtagccgtattgggtctgggaattactgtgtggttgttggtcttggaacacgcaagagggacttgtcactcatcgtttgacactggcagtggatctcacttggactcagtgtgatccatgtactcgttcttggtacaagcaacacgatgctatctgtgatccatcaaggtct

SEQ ID NO: 40027 - DNA, 269 bp, Glycine max
  Clone ID: 700942105H1
gtgcgtgacacatgcaggaacattggttttgtctctgatgatgttggtcttgatgctgacaactgcaaggtcctcgtcaacattgagcaacagagtcctgatattgctcaaggtgtgcacggccacctcacaaagaggccttaggagattggtgctggtgaccaaggtcatatgttcggctatgccactgacgagactcccgagctcatgcccttgagccatgtccttgccacgaagctcggtgccaagctcaccgaggttcggaagaa

SEQ ID NO: 40028 - DNA, 267 bp, Glycine max
  Clone ID: 700942106H1
ggcgtcttcataaacgcctttcttctccgtttccgtttcctcgttcgaattcgctttttgatctgcgaaaatgagagagtgcatctcgatccacattggtcaggctggtatccaggtcggaaatgcttgctgggagctctactgcctcgagcacggcatcgggcccgatgggcaaatgccaagtgacaagacagttggcggtggtgatgatgctttcaatactttcttcagcgagactggtgctggaaagcacgtgccacgtgcagt

SEQ ID NO: 40029 - DNA, 266 bp, Glycine max
  Clone ID: 700942108H1
aagattttaatttgtttgtcttggtgcaaggagagagagaggagagtgagagatggaacgcagctcaaggcttcaagaaagagagaaccacaaccacatccatagccataaccacccttctcctatgaactctccaacaagcaatgtgagcaactgcatgagcagcagcaacagcaatggcatccaaatcccaacaccaccactcactcccaaaaccattcccagatctgattccaacccttaccctaccacttttgtccaagctg

SEQ ID NO: 40030 - DNA, 263 bp, Glycine max
  Clone ID: 700942109H1
gtcaggactcggtatcgctcgccaacgtcaagccattgtggatggactgagggacagtgtgcttgctttctctgagaacgtgcctgggacaacagctaaagatgtcatggacatggtgctggtgactcaatactttgacaccatgaaagagattggagcatcttcaaagtcctcatctgttttcataccacatggtcctggcgcagttaaggacattgccatgcagattcgggatggtctgcttcaggccaccacttcacaga

SEQ ID NO: 40031 - DNA, 260 bp, Glycine max
  Clone ID: 700942110H1
tcaagattcaggcatatctttgcaaacggttttggaacttggaccaactgtgccattgtttggtgtgtgcatgggtttgcaatgcattggagaggcttttggagggaagattgttcgttctcctcatggtgttatgcatggaaaaagctctatggtttactatgatgagaaaggagaagatggattacttgctggactatcaaatcctttcttggctggtagatatcacagccttgtaattgaaaaagagagctttcctc

SEQ ID NO: 40032 - DNA, 263 bp, Glycine max
  Clone ID: 700942111H1
tgcaggaaaaatggtttcgctgaaactgcagaagcggctcgccgcgagcgtgctcaagtgtggcagaggaaaggtttggcttgaccccaatgaagtcaacgaaatctccatggccaattctcgccaaaacataaggaagctggttaaggatgggtttatcatcaggaagcccaccaagattcactctcgctcacgtgctcgtcgaatgaaggaagccaagaggaaaggacgtcactctggatacggtaagcgtaagggtacaa

SEQ ID NO: 40033 - DNA, 261 bp, Glycine max
  Clone ID: 700942112H1
gaacaattccgtgcaggggaatattcctgattcaagctatgaagcaggacttgaattgtcggttcaatcttcaggtttgggtaaccaggaatcggcaatcgaacctgccaaggagtgccttaagatgacaaggaggatgggtccttcaccaaccaagaatgctgctaacttatcaattacattatcaaagtttgtgccttataggaccgaaatagaatggtacaaagcttggtgtcaccagcaagttgatcaaatgggata

SEQ ID NO: 40034 - DNA, 241 bp, Glycine max
  Clone ID: 700942113H1
cttttcagtggcaaagagttaaagaaagccacaaacgacttctccagtgaccggcatctaggtgttggaggctatggtgaagtctacaagggcattcttcaagatggcactgttgtggctgtcaagtgtgccaagcttggcaaccccaaaggcactgaccaagtcctcaatgaggttcgcatattatgccaagttaaccaccgcaaccttgttggttgacttggttgctgcgtggaattgg

SEQ ID NO: 40035 - DNA, 164 bp, Glycine max
  Clone ID: 700942044H1
gtggatttgttttgttataccatgtaaacagtgaagagatgaattttgttgcatagagtgctctcttttagtaactatgtagatttcatgtaacatggaatacacactctgcgtgttgacaaatacgaagttttgcttattttggactccaattgaatgttgga

SEQ ID NO: 40036 - DNA, 243 bp, Glycine max
  Clone ID: 700941990H1
gtgataattgactttccaggtcgtattgtgataggtctttttggaaaggctgttccaaaaactgcagaaaactttcgagctctttgcactggtgagcttgtttcttctgcttctatgcattgttattttcatataattagagaacttctttcaatccttgtattgggtttcatcttcagctgtgttacagaaataagtgaataaatagattcactcaatgtaagaactgatgagtaacatttg

SEQ ID NO: 40037 - DNA, 243 bp, Glycine max
  Clone ID: 700941991H1
cctaaacctatctttcttctctctctgtgtgtgcgcttcaacggcaaccagaagcagccatggccactgcaaggactgtgaaggatgtttcacctcatgagttcgttaaggcgtactcctctcacctcaagcgatccggcaagatggagctgccagagtggactgatattgtgaaaactgcaagatttaaggagttggctccttatgatcctgactggtactatgtcagagctgcttccatgg

SEQ ID NO: 40038 - DNA, 243 bp, Glycine max
  Clone ID: 700941993H1
tctctatattccattgccacccagttttgaatatatttttattccttctttgtttcttcactttcttccatacacataaccatgacttctcagactgttgtcctcaaagttggtatgtcatgtcaagggtgtgctggagcagtgaacagggttttgggaaaaatggaaggtgttgagtcatttgacattgatctgaaggagcagaaggtgacagtgaaaggaaatgtggagcagatgaagttc

SEQ ID NO: 40039 - DNA, 165 bp, Glycine max
  Clone ID: 700941995H1
aaacacacacacctcttcttccccttctctctctctctctctctctctaaaccaataattcatattcactcaaaaaattaaaacaccatgcaacaagcaattccttataggtcatggcaacctctcatcacacacacctccaccaccaccacaactcaccttcac

SEQ ID NO: 40040 - DNA, 272 bp, Glycine max
  Clone ID: 700942001H1
atttgaatagtgccttccaaatatacaggaatccaactttggatgagttgcttgccatctgcagacagatgcatctagcgtgggcagagttttggttcaataccaattttaatgcaccaccatgatgtctcctttccgagctttgtatgggcaggaccctctattatttaaaggaaccacagttctttccaagattgaggaaattgatcagctgactcaactaagagatagccttctgcaggagctgcatgagaatttactaagagtgtagg

SEQ ID NO: 40041 - DNA, 226 bp, Glycine max
  Clone ID: 700942002H1
atgacgtgtcatgatatgcttgagttatgacaaatgaatattctcttcctcaagttccatatttctgtatcatgtgtttgtgctatatctcctgctttatcattatggagtccataatgctcttgaaaaatatggtaatccctttttttttgtggtcggggacttggggtgtttgaaaatcggtcatttggttttccgttcctgtaaggttggggatcctaaaatt

SEQ ID NO: 40042 - DNA, 265 bp, Glycine max
  Clone ID: 700942004H1
aaaagttattaagagcttttgcttttctttctgcgcgcttttcccaattaagtagttcttccttttctcaaagcaaaaaaaatgttcatcgagagtttcaaggttgagagtcctaacgtgaagtacacagagactgagattcagtcctgtacaactatgaaaccactgaacttgttcacgagaacaataatggcacttatcagtgggttgtcaagcccaaaactgtcaaatatgaatttaaaaccaacacccatgtccctaaact

SEQ ID NO: 40043 - DNA, 266 bp, Glycine max
  Clone ID: 700942005H1
caccaaagccaccccaccaaattcctcctcatcaaaccaagacatagcaaacgatccaaactcttttttcatttgcagcatcaaaatgagtggtagcaacgatggtagcggcagctggagctctaggtttttgaaggtggctagtgcactgccgctacagccgccgttgccggcggtttatatgccattctttcatcctcaacctctgctagctctgagatggaattgccgtttggcagcgcacggcgtgagagcaaagaacgtga

SEQ ID NO: 40044 - DNA, 109 bp, Glycine max
  Clone ID: 700942006H1
cttacctcttggcatggccattcaaatgtcttcttttgtcttagtgtctcttacaattgtattttgcttctcttccttggagaagagttttgccttccacacaacatac

SEQ ID NO: 40045 - DNA, 224 bp, Glycine max
  Clone ID: 700942007H1
ggagaacatgtacatgtgggttttcaaggagaggccggagaacgcacttggtaagatgcagctgaggagttacatgaatgggcattctcgccaaggggagcgcccgtttccgttcagtgttgacaagggttttgctcggtcccacaggtgcagcgaaacattatagaggactatcaaaccctcagtgcgtgcatggtgttgaggttgtttccgcacccagtctg

SEQ ID NO: 40046 - DNA, 268 bp, Glycine max
  Clone ID: 700942008H1
gttcgtattctccactccaatagcaacatcaattccaattctgatttggttcggaaagaagtgaagtcataagtaatctctcctctcttgtaaacatggcagccgaaacggaaccaaagaagatcataattgataccgaccctggcatgatgatgctatggcaatattccttgctctacaatcacccgaggttgaagttattggactcacaaccatctttggaaatgtgtacaccactctggcaaccagaaatgccttgcatttgttg

SEQ ID NO: 40047 - DNA, 216 bp, Glycine max
  Clone ID: 700942009H1
tgctgaactcatgaccaagattgacaggcgatccggcaaagagcttgagaaggagcccaagtttttgaagaacggtgatgctggttttgttaagatgattccaaccaaacccatggttgttgaaactttctccgagtatcctccactggtaggtttgctgttagggacatgcgtcaaactgttgctgtgggagtcatcaagaacgttgagaagaag

SEQ ID NO: 40048 - DNA, 263 bp, Glycine max
  Clone ID: 700942010H1
ctgctgggctttcggccgacccagaaaccttcgccagaaaccgtgagctcgaagtgatccactccaggtgggccatgctcggggccttgggctgcgtcttccccgaactgttgtcccgcaacggggtcaagtttggagaagctgttggttcaaggccgggtcccagatcttcagcgagggtgggctggactacttgggcaacccaagccttgtccacgcccagagcatcctcgccatctgggccacccaagttatcctaatgg

SEQ ID NO: 40049 - DNA, 261 bp, Glycine max
  Clone ID: 700942011H1
gttgtccccagcttctaaggttttgaacaactggtttgagacagatgttctgaaggcaacccttgcaactgatgctgtgataggcagtacagtaagacaggccagtgtccacaccccaggaagtggctatgtgctgctacatcattgatgggcgaaactgatggggaacgaggaatttggtcgtatatatgttgaaggtggaatgggctcaatatccaaggctattggtaatgctgctattgaagctggagctcatgttgt

SEQ ID NO: 40050 - DNA, 129 bp, Glycine max
  Clone ID: 700942013H1
cggtggttgtcctgtgtactgccaacacagagaggtacagcaacgtagtgtgggactagacgacaccatggaaaacctctttgcttccttggacaggaatgaggctgagatttccccttccacacaaca

SEQ ID NO: 40051 - DNA, 262 bp, Glycine max
  Clone ID: 700942015H1
gatggtttatgggagcacctgagtaatgatcaagcagtggatattgttcacagcagtccatgcgcgggtagtgcgaagaaacttgtcaaggctgccctacaagaagcagcaagaaaacgtgaaatgcgatattcagacctttacagattgacaagaaggttcgtcgccattttcacgacgatataactgttattgttttattcttaaaccacaaccttatatccaggggtgcagttctaaatacaccacttacaattcgtag

SEQ ID NO: 40052 - DNA, 267 bp, Glycine max
  Clone ID: 700942018H1
gctcgagggtattcctcgatgccttcctctcccaattccaattgcacaccgacgttaggctcaggtggtgaaatcgtgtcaccaaaacgagagctctgcttcggctcacacagaccactcctcaaatccaaaggaactccgagtaacagtttcaggcgtaattgtctctcatgtttgtgctctactatagttcggattagtgattgcgccatgcctatttttttaccaaaggcatccgctgctgatggaaatggaatcatggaaaaa

SEQ ID NO: 40053 - DNA, 264 bp, Glycine max
  Clone ID: 700942020H1
ctagttctagatcgcgagcggccgcccttggtttggttgatagcaatgatagggatcgagtggttgagggcagggatgagttgcacaggatgttgaatgaggatgaacttagagatgctgttttgcttgtttttgccaacaagcagatcttcctaatgcaatgaatgctgcagacataactgacaagcttggacttcattcactccgtcaacgccactggtatatccatagcacttgtgcaacttctggagagggactctatga

SEQ ID NO: 40054 - DNA, 262 bp, Glycine max
  Clone ID: 700942021H1
gtagattcccaattggtgaaggattttatgaatttctgtagttatatgcttctcaacaaaagttctttacatcctcataattgttggtttaaaaaatgcttggttttactgttggaaagaagagatttatccagccaaatatgttttcaccaatttgatccatcaagataaatcaactctgtcataaagcaatcattggatattccctgaggcactgaataaagattatagccccattctacctgggctacctgatgatgtg

SEQ ID NO: 40055 - DNA, 256 bp, Glycine max
  Clone ID: 700942024H1
cggctcgaggttgttacaaccaagtgggagacctttgatcatcctccatcctcaaccacgtgggaattattcgattgagtttgcttctccctcccccaatctttctcttttccccttctttaccccaatttcttctcctttgtctaacgtacaagcttcttgtttcggaactctgtcaataagtcttgctatcacactttttgtctaaaatacttcttcaaaatggaaattaaatagaagtcagaaatgttaatat

SEQ ID NO: 40056 - DNA, 261 bp, Glycine max
  Clone ID: 700942026H1
caaccaaagacagcacatgggagtagaagctgtgtgctgagttgcaaagccatcatcaatccaatcttgtgttactataagtatttaacagcatagacacacaccctttggttctggccaccctcaggtgtgaatacaatacctagcatgaaattcaactttgtgggactacatgttgaagtttgattggtgaacgagatctgatctcttgatccacaaaaccatggctgaaaaggtgaccatcatgaaactcaaggttga

SEQ ID NO: 40057 - DNA, 258 bp, Glycine max
  Clone ID: 700942029H1
ctcattaattgcaagaatggcacttcgttgcttggtgatgtcgctttctgttctcttcactcttggtcttgcgagagaaagccatgccagagacgaagatttttggcatgctgtttggccttacactcccattccaagttcatgcgagatcttctaaagcctagccctgcaagtgttgaaatcgatgatcacctcctgcaaattgaagaaacacagtacccgaaaaccttcttctatagagaagacctgtcatccggg

SEQ ID NO: 40058 - DNA, 152 bp, Glycine max
  Clone ID: 700942032H1
ttgacttgcctcatgtggttgccactgctcctaagttgatggaatcacccatgttggaggtgacatgttcgtgtccattccagatgctgatgctatttacatgaagtggattctgcatgactggagcgacgagcactgcgtcaagatcttga

SEQ ID NO: 40059 - DNA, 242 bp, Glycine max
  Clone ID: 700941989H1
aagtctctctctctctctcaacgttcttttggagtgtgtgtgcacccattgatgacaagcaacttcattgcatggaagcctaagaggtggagaagacgaagaggacaagggtaactgaatcgccgcttctgcagcttcgttctttcgtttttgtgtcatctttttagcttcagtgggtaaataaaaaatggaggttttggtgggtcccgctttcaccatcgacgttccctcgtctccgccgc

SEQ ID NO: 40060 - DNA, 263 bp, Glycine max
  Clone ID: 700942033H1
gtgaatgcgtagaaaaggaaaataaagaaattagcgtgaaaaatgttgggtgtgttcagcagctccatagtgtcgccgccggaggagctcgttgccgccggcagccgtacaccgtcgccgaagatgacggcggcggcgctgcggagtggttcgaggagaagaacccctccgcagtgtcggtggaggtcggagagcatgtccagctcgcttatacccaccagaacgagtcgccgtttcagccaagatcctttgctgtgaaggat

SEQ ID NO: 40061 - DNA, 263 bp, Glycine max
  Clone ID: 700942034H1
gcaacttccaattcatttgcaatttagcggcaaagcaatctacagccttcaattaccaacaagaatatgaagcaaactctcttcttctccttccttctactcaccaccattttctcaatcaccactttagctcagtcaccagtgcagcccctaaagccccagcaaaacctgcccctgccacaccggctccagcgccggcaaaacctttagtcccttcattaccccagtcaccatcttcaggtgttgattcttctggaagccaa

SEQ ID NO: 40062 - DNA, 261 bp, Glycine max
  Clone ID: 700942039H1
gcaagagacatatcctttcagaacacagcagggcccgagaagcaccaagcagtggcactaagatcagactctgacctttccgtgttcttccgatgtgggattttcggttaccaagacagtctctacacccacacaatgcgccattcttcagagactgcacaatcagcggcacagttgattacatcttcggtgacgccactgcagtgttccaaaactgcttcctaagagtaaaaaaaggcttaccaaaccaaaagaacacaa

SEQ ID NO: 40063 - DNA, 259 bp, Glycine max
  Clone ID: 700941903H1
ggggaatgttggtttgagaagcagttctaaaagtggtaatcttgctgtacgtgttgcctcctgaagaatttacccacttccactttacaaattgaggaggcatttcaggttccagcataaaatgctgtggaatgaataccgccactacacagatattaaggcatattgcacattgaggtagtagcatttcttgtatttttttcatgatattcatttcatggtatagctgaggcaagttatagtacaacatgatccatgt

SEQ ID NO: 40064 - DNA, 259 bp, Glycine max
  Clone ID: 700941904H1
gtgatatacggaatattagatcaaccccttggcaaagaggaattagagggaaggtctgatattcctcagacattagaagatttcatgacccaattgaaggaaggtggttatgatgccaagacatttgcaattaaactaagagaaatggtaacgcttatggaacaaagaaccagagaagccatagttcaagaatatttatatcgccatgtcgcctcaagtggcataccgaaacagcttcactgccttgccttaaggctgg

SEQ ID NO: 40065 - DNA, 257 bp, Glycine max
  Clone ID: 700941905H1
atttcctttattttattcatttaattatttgttcctagtctttatcttataataattttcgcattgcttgcccggtaattcaagatcaacttggaaaatttgcaagatttgggatgaaatctggtcggatcttgctttgtgggatggggattttagtgggtcttatttcaatacaaagctcttcctcttcctcttccaaaaatcccatctctttctcttttttttcatcataacacaaaacacaaaacataaacctt

SEQ ID NO: 40066 - DNA, 238 bp, Glycine max
  Clone ID: 700941906H1
gacaattgcaaaagaaggtgagcttactattggcactattgatgatatacaaaaacttcatattcgctctattccgctgggggagcacgcaaaacgtatctgacaccaggagcaatctaggacttttgctatttgtagtttgaaatacaacccagctcagtggtgaagactcagaaatgcactttgtccgcttgctggatgaccagacttttgagttcatatcaacttattctcttga

SEQ ID NO: 40067 - DNA, 255 bp, Glycine max
  Clone ID: 700941907H1
atcgagcgattcggctcgagagcgtcttgaagagtttcaaaaccaaaataatgtgttatagggtggactgtaaaacctgtgggaagtatacatgggggggatgtggtgatcacttgaccaccctctacgccagcattgatgagggaatgcactgtacgtgccgctcctggccgggtgttgttacacgcacacgcacaaccaccactcagcaacctactcaatccaataatcccaaccaagggaataggaattctc

SEQ ID NO: 40068 - DNA, 222 bp, Glycine max
  Clone ID: 700941908H1
gtattattggtgccaaacatgtgctcacttacggtactagataacaatcaaacatgaccagtgtgggcttgaacatgtaatttcgtgaactccgagctgtctctagctattctacaaaataacatctttgtagcttgggtgaaataatttaaaaaaaaaaaaaaaaaaaaaaaaaaaaaaaaaaaaaaaaaaaaaaaaaaaaaaaaaaaataaaaataaaaa

SEQ ID NO: 40069 - DNA, 259 bp, Glycine max
  Clone ID: 700941909H1
gcaaacggatggcataaggcccttcacaatgcctcttatgagacttgcttgcactgccttggaaagagttccactcacaaggagcattgttattgagaatttgatgaagaaatttaatcaagatttagtattttgccgtgcacctgatgacgatgagctgacaagctatgtacatgctcctcaggtggagaaaattgatccattgcttcgttgggtggagtcagaatttggctttaagccagttctttacaccagcttt

SEQ ID NO: 40070 - DNA, 262 bp, Glycine max
  Clone ID: 700941917H1
gcaggagagacagacagagaagagaatggacgctattgattctgtgttcgatccgctcagggaattcgccaaggacagcgtcaggctcgtcaagcgatgccacaagcccaatcgcaaagaattctccaaggttgctgtgcgtaccgcgatcggtatcgttgtgatgggattcgtgggttttttcgttaagctcatcttcattccaattaacaacatcatcgtcggatctggttaggatgaggggaatcgcaatcgcctcagg

SEQ ID NO: 40071 - DNA, 123 bp, Glycine max
  Clone ID: 700941921H1
ggaattcagctcgagagttactgcagccaatgtggataaaattccaggactcaacacattgggagtgtaattctcaagaatagactacaaagctgggggacttaacccacctctagacaacat

SEQ ID NO: 40072 - DNA, 254 bp, Glycine max
  Clone ID: 700941923H1
caataatgaggcattgttgtttaatgtgtacccttacttagcttacattgaaaaccctagggacattagtcttgactatgcactctttaggtctccttcggtggtagtgcaagatggttcacttggttaccgtaacctttttgatgctatggttgatgctgtttatgctgcgttggagatatctggaggatggtcactgaacatagttgtgtctgagagtggatggccttcttctggtggaactgcaacttcac

SEQ ID NO: 40073 - DNA, 143 bp, Glycine max
  Clone ID: 700941924H1
tagagcttggtcgattccggcatcgtgctctgctctgcacacctttctctttctctctgtctgaggctctgagcactgagcacaccacaaactgaaacaaatccctttgagcattcagcaagatgagccacgagctgttggag

SEQ ID NO: 40074 - DNA, 115 bp, Glycine max
  Clone ID: 700941931H1
gcaagagacatatcctttcagaacacagcagggcccgagaagcaccaagcagtggcactaagatcagactctgacctttccgtgttcttccgatgtgggattttcggttaccaag

SEQ ID NO: 40075 - DNA, 261 bp, Glycine max
  Clone ID: 700941933H1
accgaattggaaggacagggcgggcaggaaagaaaggccttgcaactgcgttctttaatgacaacaatgcatccctggcaagggccttagcagatctgatgcaagaagcaaatcaagaactacctgattggctctcacggtttgctgctcgcacttcctttggtgggggaaggaaccgtcgatcaggaggaggccgttttggtggccgtgactttcgaagagagggttcttttagtaggggtggttctgattactacagtg

SEQ ID NO: 40076 - DNA, 254 bp, Glycine max
  Clone ID: 700941941H1
ctcgaccgctcgagccgattcggctccagtcggcggtgacgaaaggaaagaagaagaaacagcgttcactcggagagttcgaacatgtcgggcgttaccaacaacaacgaggaagacaagaagccaaccgaacagggagcacacatcaaccttaaggttaaggggcaggatgggaatgaagtttttttcaggatcaagagaagcactcaattgaagaagcttatgaatgcttactgtgaccgacagtcggtgga

SEQ ID NO: 40077 - DNA, 151 bp, Glycine max
  Clone ID: 700941943H1
ataacgacgtgcaacttgtatttaggattcagccagctcttagttaagagcttcacctccgagttccctcacgtcgagaggtacttttggacattggtcaaccagcctaacttccgaaagatattaggtcaggttaagcaaactgagtctg

SEQ ID NO: 40078 - DNA, 149 bp, Glycine max
  Clone ID: 700941948H1
gacttgcaatgggcattgctggaactgaggtagcaaaagaaagcgctgatgtaataattctagatgataacttttcgactattgtgactgtagctaaatggggccgctcggtctacgtaaacattcagaaatttgtgcagtttcagcta

SEQ ID NO: 40079 - DNA, 256 bp, Glycine max
  Clone ID: 700941949H1
gtcatcattgatgacaaatgtgggagaagtggagtgcaaagcctaatccactgatgcatagtgtgtttggattaccatatgaatcaccaaaaacgtttatttgcacatttcaagagagaaaacggagaagcaacaccagtgtttcgttgaatataatgtatgtttgcgttggaacgaaccattttccaaacatacactatcactctatcagctaccttctttattaagttgtttctagtaatatttatttggtaaa

SEQ ID NO: 40080 - DNA, 248 bp, Glycine max
  Clone ID: 700941956H1
gggtcaacagtgtggactcagattactccaacccatgtatctgatgaagaggcaaaccttttcgccatgcaactagccagtgcctcagtactccctatggttctcaaatcagctcttgagcttgatctgttggaaatcatagccaaggctggccctggggtgtcacctttccccctccgacattgcgtctcggctcccaacacacaaccctgatgcacccgttatgttggaccgtatattgcgcctct

SEQ ID NO: 40081 - DNA, 249 bp, Glycine max
  Clone ID: 700941958H1
gcatactccactctctctacctcagagacttattaagatgaagcccaagacttgcgagctttgtcatcaactagcttctctctattgtccctccgattccgcatttctctgcttccactgcgacgccgccgcccacgccgccaacttcctcgtagctcgccacctccgccgcctcctctgctccaaatgcaaccgtttcgccgcaattcacatctccggtgctatatcccgccacctctcctccacctg

SEQ ID NO: 40082 - DNA, 253 bp, Glycine max
  Clone ID: 700941967H1
gcaatttaactagtgacttttcaatctctgatactccacaaatttcttccctcaggtctctctctctcctctcacaccgcgtcaccgcccccccactgtcgccgccgccgccgccaccccccctcacagttccattctcttctcgttttcccttcgtctcactctcacacgaaaaccagttctcgtcgcggcggcgctctcgtcagtcgctgccgtcgccgcctccgttgacgtcggaggttccttcaacacc

SEQ ID NO: 40083 - DNA, 250 bp, Glycine max
  Clone ID: 700941970H1
tttctattcctcactaggagctcctatccactggttcttcatctgcatgcacacagttgcatagttttggaaaccaagaattcctgaagaagggtagcatcaacaagcagttctgaaaatggagatcaccaatgtcagtgagtatgaggctattgcaaagcagaagttgccaaagatggcgtttgactactacgcatctggtgcagaggaccagtggactctgcaagagaacagaaatgccttttccaga

SEQ ID NO: 40084 - DNA, 244 bp, Glycine max
  Clone ID: 700941974H1
tcctcagagcggtggatagggatttttcactctgcagcgttccgttccattgtgatttgttgaagtttctgatggagcagcgaaagttgtggttttggggattccgtgggatatcgatactgagggattgagggaatatatgagcaagtttggtgagctggaagattgcattgtcatgaaggagcggtcaactggacggtctcgtggttttggatatgttacatttgcttcagtggatgatgct

SEQ ID NO: 40085 - DNA, 246 bp, Glycine max
  Clone ID: 700941976H1
actactactactgcacacactctctctctctctctcattgtatggccgccaattcgagtagccgagggatcaccgccttggggaagcgagtcgccaaccagatctggacttccaaccccccctcagctcctctcacttccaggaggggagcaatagcagctgcatacagtagcagcggcgggtcagtgtatgacaagaaccctgatgatcagatccactctggggcggtcccagacgatgtgatcc

SEQ ID NO: 40086 - DNA, 118 bp, Glycine max
  Clone ID: 700941979H1
caactattctagttaccttttctcttaatccaaatatcatcatctgaaacgatggctgccatggcaaccacaaccctctcttcaaacccgaaactctcatttttccacacaacatacg

SEQ ID NO: 40087 - DNA, 116 bp, Glycine max
  Clone ID: 700941901H1
gtttttgaaatgttgtcacctcttcttctatttctatgcctaactcttcctttgtttttgttgtccttcttcaaataccgtaaaaccttcaagaatccaccacttccacacaacat

SEQ ID NO: 40088 - DNA, 247 bp, Glycine max
  Clone ID: 700941981H1
agaaggaagagaaaactgactcaaggtggaagaaatctctagagctattaatgaacctgttagagaaacattggcatctaaatttgaagaggaaactgttgaacctggagcggataaggtagagaaagaacaaactgtggagcctgagaaaactgaggaggttcaagccaccaaggaaagtgatgcaacaaaaacatccaaggaccttccaaaagaaactccagcaaaaccagctcaaaagcaatca

SEQ ID NO: 40089 - DNA, 230 bp, Glycine max
  Clone ID: 700941982H1
ggcatagtttattttcttaaatgatgtgggtaaagctcgatgtttaatcctttgtcatatatgtacagtaacaacggattctccccactcccctttatttttttcttttcctttcatttatggaccgttgtactgtaattgtaaagcatattctcccccttgaatttcttttcatttagttgagaattcaaaattgttcccaaaaaaaaaaaaaaaaaaaaggggggccc

SEQ ID NO: 40090 - DNA, 247 bp, Glycine max
  Clone ID: 700941983H1
gtttgttgttgtaactcgttcttcttcttttgttgttctgtgtttgtgtttgtactttctctcacctgaaaatgtcttgctgcggtggtaactgtggttgcggaagctcctgcaagtgcggcaacggctgcggaggctgcaagatgtacccagacttgagctacactgagtcaaccaccaccgagaccttggtcatgggagtggcacctgttaaggctcaatttgagggtgctgaaatgggtgtgcc

SEQ ID NO: 40091 - DNA, 192 bp, Glycine max
  Clone ID: 700941818H1
ccattttccacttgaacccttcaggccgttttgtcattggtggccctcatggcgatgctggtctcaccggccgcaagatcattatcgatacttatggagtatggggtgtccttgttgttgttgctttcttcggggaggacctaccaaggttgataggagtggtgcttacattgtgagacaggtgctaagagc

SEQ ID NO: 40092 - DNA, 251 bp, Glycine max
  Clone ID: 700941824H1
tactgaacttgacattcaggagttggagaatgtattaaaggttttattgccacttccttcaaggatcctttatcgttttcactctgggcaagaaatcgcaaaaccagatccagaaactactacatatggcagtctttgggtttaattggtggctactccttctatagtcatttggtgaatgtttatctattacctatacgtcagataatcctagagacaaagcaaactaggcgtcacttgagctttttaag

SEQ ID NO: 40093 - DNA, 99 bp, Glycine max
  Clone ID: 700941825H1
ttgtaaagaaggcaagagatgcaagctttaaaaacttgatagatcattgagtgaaatagtgaattatcacaggctaaagagcttgtgagtctatattgc

SEQ ID NO: 40094 - DNA, 97 bp, Glycine max
  Clone ID: 700941826H1
aacccattaccatgatatcttagttatcaacattagctcaattaatcccttaattgcaagcatcatggctgaggagaaacaccaccaccacatccac

SEQ ID NO: 40095 - DNA, 185 bp, Glycine max
  Clone ID: 700941832H1
gattcggctcgagtcactctcaactttactcctcttcaatcagttgcatattctttgctatcccaatggccactgttgaggttgtgtcagccaaggttgccctcccagaggacacaatagaggcatcattgaaggttgacgaggagagaacacagaagaagttgttgagactccatcaccaggaa

SEQ ID NO: 40096 - DNA, 255 bp, Glycine max
  Clone ID: 700941833H1
ctactttgacgatgcccctaccagtcctcacacttctctttaatgagtactgccgaaaacgattcctgcccatatttgttgcatattctgcagagagtttgaaaaagagggataggcaagatcaaaatgatgctcaatgacacagttttatgagaatttggtaaatgcttataaagaccctgcattgcttccaattcagcattcattcgacaatgacaatcttcgcagtccccttatatctcaggcttaatgcta

SEQ ID NO: 40097 - DNA, 128 bp, Glycine max
  Clone ID: 700941834H1
gagcaaaagtggtgattattctaaccagtggagactttgcaccgtgacacaagtagaggaattgaaaatcttgattcgaatgtttccagtttgggctactgggattgtttttgctgctgtttatgctc

SEQ ID NO: 40098 - DNA, 171 bp, Glycine max
  Clone ID: 700941839H1
agcactttggttggagtgagccctgaatttgaaattgctttgtataccctgtgtttctatgttggtagggaggataaccacattcagcttggtccatatggggttaatatcaagtgctatcgattgggtgacgaattggatctgttttctccattgcagattcttgaattt

SEQ ID NO: 40099 - DNA, 210 bp, Glycine max
  Clone ID: 700941846H1
tctcgagccgaatcggctcgaggaacactattcctatgatcccttccaggatttgagtcacaaatcattcttgtctttacttcctttttctgctctttcagaaattctgtaaaatatatattaccctcttttacactcctttgaagatgaacgtactttctactttcagctttaatgcattgcttccgttattgtcctgtatatcaaaat

SEQ ID NO: 40100 - DNA, 202 bp, Glycine max
  Clone ID: 700941850H1
actactactactactgcacacactctctctctctctctcattgtatggccgccaattcgagtagccgagggatcaccgccttggggaaccgattcgcaaaccgtctcgagttttcaaacccccttaaagctctgaagtctcgaagggggacaatagcaggtgcatacagtagcacggcgggtcagtgtatgacaagaacctg

SEQ ID NO: 40101 - DNA, 90 bp, Glycine max
  Clone ID: 700941857H1
tctgtctcaactttccttcagtttctctcttcctctcaccgagtcacggactcggcttgactcgtacgaactccgatccccccccgagtc

SEQ ID NO: 40102 - DNA, 246 bp, Glycine max
  Clone ID: 700941860H1
tgaaccctcgatgggttgggctcggtatgctcataccatgagaatatgggtttataactctggtttcttttatataaggcctactcttccttcaattgagctcttggatcgtgttgcaactcggctttcaatgacccaaaatcatgggatcaggcagtttttaatgaggagctctttttcccttcacatcctggttatgatggacttcacgctgcaaaaaggacgatggatatgtacctttttatg

SEQ ID NO: 40103 - DNA, 201 bp, Glycine max
  Clone ID: 700941865H1
ggccattgggtttctagaagccttgggcttggtttccggaatgtcagctgcagccgtacttcctggaccagtcatacccatattgaatcagacttttttggtttggcagctaatgttttctactcttctcgtgagaagaagatactcaatcaatcaattggttgggtgcttacttgtagctgttggtgttgtggtggctat

SEQ ID NO: 40104 - DNA, 84 bp, Glycine max
  Clone ID: 700941866H1
accaactccagcatatgtagaggcaaatctcctttcctcaatgatgaaaaggttaggtgagcttgaagtgaaggttgacacact

SEQ ID NO: 40105 - DNA, 249 bp, Glycine max
  Clone ID: 700941867H1
gtcaatttttctcaggataagtcatggcgtgttcgttacatggttgctaatctgctatatgagctatgtgaagctgttggtcctgaccccaccaggtcagaattggtccctgcatatgttcgtctgctggtgataatgaggctgaagtacgtattgctgctgctgggaaagtaactaagttttcccgcattttaaatcctgaccttgccattcagcatattctaccatgtgtgaaggagttatcaacag

SEQ ID NO: 40106 - DNA, 198 bp, Glycine max
  Clone ID: 700941870H1
attgggacctaccctctgaaaaatcttgtcctaggaagcacaactaatgtattactctaaatagaaactgctttttagtattttacttcagaaagccgcgttgtatttattgtgttggatgtgcttgggaaaggatctaagttatccttctaaataacttacacaaagcatcatatatatgcaatggggcatcatggg

SEQ ID NO: 40107 - DNA, 106 bp, Glycine max
  Clone ID: 700941873H1
ctcgccgactcggttgctatcagcgagtgagagtgagtgagtggttctgcttgcagcgaacaaggtattagtcgacaccaagactagacggtgaaatcgaggtcgt

SEQ ID NO: 40108 - DNA, 201 bp, Glycine max
  Clone ID: 700941874H1
gctagtattgcctttggccccctggagatggtagaatgcaatcgaaagttgatgctttgggctggaaactgcaagtgattaggaacatgtagctatgtgcgttttagtggacaagtctggcaccatgtttggcatttcttttccctgtagagtttatacttgagctagaaaggcccatgaagacattggaatttcaattta

SEQ ID NO: 40109 - DNA, 180 bp, Glycine max
  Clone ID: 700941880H1
aataccaccaactgaagaaattgctgacagaatcaacaagatgctggcagtgctcgagaagaacatcttgtgggtgaaccctgactgtgggctcaagacccgtaagtacactgaggtgaagccagccctcacaaacatggttgccgcagcaaaactcatccgcaacgaacttgccaagtg

SEQ ID NO: 40110 - DNA, 171 bp, Glycine max
  Clone ID: 700941881H1
ctttgttcaagacaagaataaaggaagaatacaagtgatatcttcatttgttcaagacaagaataaaggaagatatcacttgtattacttcgattgggttgcttgatttcttttagagaggattctttgtgatgcttttgccaaaaaaaaaaaaaaaggggggcccgcgga

SEQ ID NO: 40111 - DNA, 84 bp, Glycine max
  Clone ID: 700941882H1
attgcaatttctcaattactacatcgtattctgcaaattcaaactggcgtcttgagttttcttgaaagatggggaggtcggcaa

SEQ ID NO: 40112 - DNA, 250 bp, Glycine max
  Clone ID: 700941883H1
taaacccctaaaatcactatgcaaaattccaaagtagctagagtctaagcttcgatcgttaaacagctctgcacaaggaattgtaatctcctgtgtggagtaggatctattcgaagcgcaagatatcattacaagcaacctctgtttcaacatcattcatttactaagttatacaagggagccatgatagaaaagcataatttcctttcaacaatgactactaacaacactaccaaggaaaggagtgaac

SEQ ID NO: 40113 - DNA, 240 bp, Glycine max
  Clone ID: 700941884H1
ctcttttgagcacaattgtgccctataccaccactcagctttccatctataactctttctagacatcttttgaagatgctgctgtggctatgaacatcaccagagtggcctcggtggcaccctttgagcttgtttcagttccaggggctcgcaagtggggcccagtatgccggttattgagttggtgctgcagagtgagatggtgaagtggaccatacattgaagaaactccatggtgag

SEQ ID NO: 40114 - DNA, 196 bp, Glycine max
  Clone ID: 700941885H1
gatgaggaggaagaggatggtgaagcagacgaccatatgtgaagagactaaaatgtgaagatgcctgtgtcttacttatgctatgtgatgcgtaagtgtgtttgctctgcactccaacgtgaagaagatttaattactaatagtgtatgtacggtttgcgggataatactttaatggtagtgagattggagtttgg

SEQ ID NO: 40115 - DNA, 189 bp, Glycine max
  Clone ID: 700941817H1
ctggagctcaaccttctgctatgaaagaaacaccaagcaaattgtcagaacgtccttgctcaactaataatggaaccggtcataaccatacaggtgcttctatcagtggcagcgcaccggcttctaaggcacaggtgttggttggcctcctattagatcatttaggaaaaactcaatggctaccaccac

SEQ ID NO: 40116 - DNA, 248 bp, Glycine max
  Clone ID: 700941887H1
aaagaaacttgggacggtgaaattggagggttttccgggatcccaaggccgaatcttgattcaatttacgaaaagagaacaccatccgttgctgaatcttgaagccgaatcaaatcgtagagagagagaagacacccagataggcgaatagcgtttagagagagaaaggtgaagtggggttgtctaaagtttgggtcttgtgtttgttgtgtgtggtgggtgaaagggaaagatgacggatgtggtac

SEQ ID NO: 40117 - DNA, 88 bp, Glycine max
  Clone ID: 700941888H1
cattcttcagcgactgcgtttttggatcggaacctcttctgcggcgtagcaatcgggacactccaacgtttcggaactgctcacccaa

SEQ ID NO: 40118 - DNA, 104 bp, Glycine max
  Clone ID: 700941889H1
cattttctggctaaccaaccctgacactccttcttctccgcttcctgttcgatcatgcgttcagaatgccgccgaagttcgacccctcccagatcgtcgacgtc

SEQ ID NO: 40119 - DNA, 242 bp, Glycine max
  Clone ID: 700941891H1
gggtattgcaaaatgaacagcacaatgatgaagttggtggctcaacatgccaagaaccacatagggtcagtaactgaggccaagaagctggcttctccttctccttctccttctacttcttcttcttcgtaacttcaaataacctgagagatgatgagaagagaaggatggcagaggagtctctcagaacagttatgtatttgagcacatgggggtcctaattcttgagagttagaaaacat

SEQ ID NO: 40120 - DNA, 243 bp, Glycine max
  Clone ID: 700941892H1
cacacgcatagagagagagagaaagagaagcagaggaagaaggagaagaaggagatcttgagagatcaggtcgcaactcgtcatggggagagaagttacaggaatgcaagttgtggacaagaagccaatggtgttataccagcttcaaatggtagttctaatgataaagtatgcttttctcctaaaatggaagcagctaaggttcaggcgaaggatcacaaggtaaatgaatgtaccaaaact

SEQ ID NO: 40121 - DNA, 181 bp, Glycine max
  Clone ID: 700941893H1
cgccaaaactagggttttgcattgatggcactgtgcaaccgcgtcagatcgggaatctctctcttcaccaaatccacgttccttacttcccagcgatgccagtctccaacgatccctcgttgcccctttcatttccctcgcctccagaaattacgccaacgtgccggggcaaaaggaaacc

SEQ ID NO: 40122 - DNA, 227 bp, Glycine max
  Clone ID: 700941894H1
tgggaattaacccttgtccatcttgcaaagctgcaaatgggagcagggtggtggctgctatcaacaatgttacatttattatgccaaccattgccttacttcaagcacattatttcaacatcaaaggggtgttcaccactgatttccctgccaatccaccccatgttttcaactactcagggcctggaccagccaatttgaacaccgaaaccggcacaaaggtttac

SEQ ID NO: 40123 - DNA, 109 bp, Glycine max
  Clone ID: 700941895H1
gttttgagttaacaaatgatttgcttgagtaggatcttttccatctaaagactacgctagtacatctgcgcagctgctcgtggagcttagggcattgcaaatggaactc

SEQ ID NO: 40124 - DNA, 223 bp, Glycine max
  unsure (1)..(223): unsure at all n locations
  Clone ID: 700941896H1
ttcaaacaggaattatctggagcatcttccgagcttgttaataagttgatacctgaccatgtgaagcggcaaatggggatacagtttatgcatctgggaggatcgtgacgataagnagcttaggggacatagtgtatactagctggtaagttaaaaaataatggtgccatgttctgtgacctggcgaatgtagtttcaagctgaaaccggactgtgattcgcg

SEQ ID NO: 40125 - DNA, 251 bp, Glycine max
  Clone ID: 700941749H1
ggcaattctcttttctgtgattcttgccaatgctattgtcatatgcaacatggcactggctctatctggcatggagggccatggtggatacttggcaattctgaaagcatgtcttctcctaaggggaaggacttcaatggctttgttcctggcacttcctgtcaatgtggccttggctgctattgaggccttgttccaattcagggttgtgaggccctatcatgttgctggaataacaaggccttgtgtgg

SEQ ID NO: 40126 - DNA, 250 bp, Glycine max
  Clone ID: 700941753H1
tccacggcataggggagagtctgccagtactataatgtttgggcagagggctatgaaggtggaaaacatggtaaagctaaaggaggaatttgattacaaaagcttatctaggaggttagatatagaattagataaactcattgtggaacatgaaaggcaacagaagacatttgaggatgagattgaaaggtcagccactgaagcacaacatcggatatctgaggctgaaagaaactatgtagattcattg

SEQ ID NO: 40127 - DNA, 249 bp, Glycine max
  Clone ID: 700941765H1
atcatctgttcctctgattccaaagcatgtatgtgatgatatctttatggattatgatgcattaaaggctgttgggacagggttggggactgcagctgtaattgtaatggataaatctacggatgttgtggatgctattgcaaggctttcctacttctacaagcacgaaagttgtgggcagtgcacaccatgcagggagggaactggttggctttggacaatcatggaaagaatgaaagttgggaatgc

SEQ ID NO: 40128 - DNA, 245 bp, Glycine max
  Clone ID: 700941766H1
ctttagtctgtacaaggataaatgcaaggccgaagatatacttctggagatggaccggattttgcgaccagaaggtgctgtcatattccgcgacgaagtagatgtgataattaaggtaaagaaaatagttggaggaatgagatgggacactaaaatggttgaccatgaggatggtcctacttgttcctgagaaggtgactgttgctgtcaagcagtattgggttactaattccacacaacatacg

SEQ ID NO: 40129 - DNA, 79 bp, Glycine max
  Clone ID: 700941769H1
ataaaatttccttcctgtctttctactagtctctatgttctgtgccagccagcatctatcatactccacacaacatagg

SEQ ID NO: 40130 - DNA, 243 bp, Glycine max
  Clone ID: 700941774H1
gcggtaggctcatccgagaccggaagcagcaatggggatcgatctcaaggccggaggtaaaagcaaaaaaaccaaaagaacagcacccaagtccaatgatatctatcttaagctcttggtcaagctttatcgcttccttgttcggagaactggcagcaaattcaatgccgttatactcaagagattgttcatgagcaaggttaacaagcccccattgtctttgtcaaggttgattaagtatac

SEQ ID NO: 40131 - DNA, 244 bp, Glycine max
  Clone ID: 700941778H1
tattcttctaactcggactttcgatatcagcatcacgtatgattaatattatcaaataccacgagtatggcttactgggtatgacgagtcaaggatgctcttgcaaccagaacttgttcttgaagatgttagtcaagaccatgcacgcaaaacggtaactcttgaggaccatcctcacttgccagggaagcatgcatctattcatccatgtcgacatggagctgtgatgaagaaaatcattgat

SEQ ID NO: 40132 - DNA, 246 bp, Glycine max
  Clone ID: 700941782H1
ggcaatagtagcaacaacaataatataagtaaaagaatctctgtgttgtcatcacacttcgctagatccagccccatcatggcttcagagaagcaagcggctcttgccgtcactccctctgatgctgatgctcctaccatatttgacaagatcatcaataaggagattccttctactgtggtttatgaggatgacaaggtgcttgccttcagggacataactcctcaagctcctacacatattctt

SEQ ID NO: 40133 - DNA, 247 bp, Glycine max
  Clone ID: 700941783H1
ggtccaagaaggagcaggtttgctttcaattgtgatccaagaggctgaagaggttgagggggaccatcacaacaacccatttgcagtgctgacctttagaggcgaaaagaaaaggacaaagacgatgaagaaaactcgacacccgcgttggaatgaagaattccaattcatgctagaggagcctacctctacatgagaagatacatattgaggttatgagcaagaggaagaactttagttttctgcc

SEQ ID NO: 40134 - DNA, 246 bp, Glycine max
  Clone ID: 700941785H1
aaaaaggctctttatgaagcactaatgaggcaagaagagctgcttgcttacattgatagtcaagaaaaagctaggttacggaagaagttttgctggtgagttttggttgctgatagaaagggactctgggagagggtgttttcgaatcatggtgtttctagtgctgaccttgcacatgatgttaaactctgaatactgattcagtttaatgagtaaacttgagaattgtttcaaacttgtgtatag

SEQ ID NO: 40135 - DNA, 242 bp, Glycine max
  Clone ID: 700941788H1
ctttgtctcaacctcgttttcccccctattttctgattaactctttacacgatcttatctacgaataataaaaaattaattcctcaattgattctttgtggcggtgttcgatcggtacctgcatctcttcttttccaggtttggagaatgagttctgtgcaaggaccagttgtgtgcccttctgtccgtgccaaacaagtagggttctgcagcattccaatgattggggcagtgacaatgaa

SEQ ID NO: 40136 - DNA, 243 bp, Glycine max
  Clone ID: 700941789H1
caccggtctcagcaagttcgtcaagtggtacctcggttattacggcctccagccaagcctgaaaaaggataatcaccttcacaatattgaatgaccatttctataattatctctcctctattttgttctttttacggcaagaaaaaaaaaacaaaaaaaccttccccttgctcatggatcatttctcttgtttttgttgaatcattattattattattattgttattgttgtggtggtgtagc

SEQ ID NO: 40137 - DNA, 243 bp, Glycine max
  Clone ID: 700941791H1
tccttcccataatcatttcctacattcataaacgacgtcgtcatcgctcttccgccctaatctctatctagccccctctcttcctcgcctccgccctcatcggactcctcaccggcctcgacgactacctctacgcctgcggcgtggctcgccttccggtctccactttctctctaatccaagcctcccacctcgccttcaccgccgtcttcgccttcctcctcgtccgccacaggttcacgc

SEQ ID NO: 40138 - DNA, 242 bp, Glycine max
  Clone ID: 700941793H1
tctctatattccattgccacccagttttgaatatatttttattccttctttgtttcttcactttcttccatacacattaccatgtcttctcagactgttgtcctcaaagttggtatgtcatgtcaagggtgtgctggagcagtgaacagggttttgggaaaaatggaaggtgttgagtcatttgacattgatctgaaggagcagaaggtgacagtgaaaggaaatgtggagccagatgaagt

SEQ ID NO: 40139 - DNA, 67 bp, Glycine max
  Clone ID: 700941794H1
ctcgagccgaatcggctcgagaccttgctgcggttgctccatcaccgaatcacttgcacacaacata

SEQ ID NO: 40140 - DNA, 244 bp, Glycine max
  Clone ID: 700941795H1
cactgcaacaataacaatcaaagaaaagaaaccttctcagacacacaacaaaaataacatggaaatggaatcgaaagactatgcctacagcggcaagataatgctaatcgccattgtggttctcttcatcgttatcatcataatgctttgcctccacgtctacgtccggcggcgcctcgtaaacgctcgccgccggccacagctccgccgcagtaaccgcccgcagttcgtgttctacatggac

SEQ ID NO: 40141 - DNA, 243 bp, Glycine max
  Clone ID: 700941796H1
gggctttacagtgtttctcttccttcttcttcttcttcttcttcttcttcgttgaatcgcgattgttctgtgcgagagaaagaagagagagatcgaaaatggcgttggctttcgacgagttcggaaggccgttcataatcctgatggagcaggagcagaagagcagactccgaggattggacgctcagaaagccaacatctccgccggcaaagccgtggctcgcatcctccgaacctccctcg

SEQ ID NO: 40142 - DNA, 257 bp, Glycine max
  Clone ID: 700941801H1
tttctctctcaagaaccatcaaatctcgatcctcccctctccctgcaagatccggtggtggttccgattgcgcagtagggtttggtctagggtcggccaaggctggcgagtatttgggtgaagtaaatggcggatcgagtggtgcgagcgtggtgttgcggcagcggcggcggcgttgatagtgttacagtgcggtggcgattaatgttgtcttcaattttaattttgatttgagtgctatactcccactgcagacc

SEQ ID NO: 40143 - DNA, 190 bp, Glycine max
  Clone ID: 700941802H1
aaacttctcacgttcagttccattttgtggctcaaaagtgtccgaactgcaaatcctacaatacacgacaaacatgaggctgagcaagtggccacgattattcattggtttcgtcaaaagccttcacttgagtttcttgatgttgttgtgattcgtgaaggctgtgaaaatgcatgtgtgtccattgggt

SEQ ID NO: 40144 - DNA, 254 bp, Glycine max
  Clone ID: 700941803H1
gcgaaattgaaggtcttcatcgtgttctattcgatgtacggacacgtggaggggctgtcgaagaggttgaagaaaggcgtggacggagtggagggtgtggaaggtgttctgtatagggttccggagacattgccgattgaggtgctgaatcagatgagggcgccgcccaaggacgacgccataccagagattacggcggcggagttgacggccgccgatggggtactgtttgggtttccgacgaggtacgggtc

SEQ ID NO: 40145 - DNA, 251 bp, Glycine max
  Clone ID: 700941804H1
caaggagatagtattcaactatgtaaatcagctgtgcgagagcttgccaagtccaaatggagagtcagtagtagactgtaatagcatttatggattgccaaacatcacgtttactgttggagacaaacctttcccctcacccctgagcagtatattctgaaaactggagaaggcattgcagaagtttgccttagtgggtttattgcttttgacattcctcctcctcgaggtcctctctggattcttggcga

SEQ ID NO: 40146 - DNA, 231 bp, Glycine max
  Clone ID: 700941805H1
caagaagcccaccattacttccagggagatccaaacggcggtgcgtttggtcctccctggggagttggccaagcatgccgtttctgaaggcaccaaggccgtcaccaaattcaccagctcttgattggtttcggtgtttatgtcagggttttctgttagcccgatttaattagggtttcttttccttgtaatttctgtgagtatgtagatgtaaaattaaaccttttattt

SEQ ID NO: 40147 - DNA, 235 bp, Glycine max
  Clone ID: 700941806H1
ctttgaaggaaataagagtcaagaaaggtcttacagatgatcttggtgcagaggctctgatgatagatgcattggacaaaattgaaaaggatttaaaaaaacctttactgagaaatgataagaaaggaatggacttctcttggcagagtttgataagattaataagaaaattggaattcgaaaggaagatctaccaaagtatgaagaggagctagaacttaaagtagccaagcac

SEQ ID NO: 40148 - DNA, 252 bp, Glycine max
  Clone ID: 700941807H1
ggagacaattgtgagcatgattcctgctgatagagggtcagtttcagctggcttcttgtaaaggcttctcagcatttcaagccctcttggtgtctccccagtgaccaaaacagaactgataaagagagccagctacagtttgaggaggcaacagtgagtgacctcctttatccttcaacatcccctttggaccaaaacttttatgacacggagttagtcctagcagtgttggaaattacttgaagttttgga

SEQ ID NO: 40149 - DNA, 248 bp, Glycine max
  Clone ID: 700941743H1
tctatctcttctctctctctctctctctctatctctctctctcttattaaacaaattgatacccctttaattagtattcttaattactctttccatttccatatcctagctagctacaaatatatattatggttttagttctttaaggcatcaatctgcagcatagtcatgaacaagaagaagaagaagaagaggttcgtggatggcactagtggtgagaaaaatgccattgcaactcatgtggggtc

SEQ ID NO: 40150 - DNA, 251 bp, Glycine max
  Clone ID: 700941809H1
attggtgttgccggtcagatcattccttagaacttccctcttctcatgtttgcctggaaggttggaccggcattggcctgtggcaacaccattgttctcaaaacagctgagcagacaccgttatctgctttatatgcagcaaaactatttcatgaggctggacttcctgctggtgttttaaatgtagtatctggctttggtccaactgctggtgctgctcttgctagccacatggaagttgacaagcttgc

SEQ ID NO: 40151 - DNA, 260 bp, Glycine max
  Clone ID: 700941814H1
ttcggctcgaggaaaagatgaattggaggttttaagaggagatggagcagggaatagagaggactttgacagaatctatgattatgatgtctataatgatttgggcaatccagatggtggtgatcctcgtccaatccttggtgggtctagcatctatccctaccctcgcagggttagaacaggaagagaaaggaccaggacagatcccaacagtgagaaaccgggcgaggtttatgttccaagagatgaaaattttggtc

SEQ ID NO: 40152 - DNA, 156 bp, Glycine max
  Clone ID: 700941816H1
ctcgagccgctcgagccgctcgagccgaatcggctcgagtttaatttgaatacttcttatgcaactatagtgaggctaagagattggtccataattattcaaaatgttggctatattccacaaagcttttgtgctccacctgaagagctcaacagc

SEQ ID NO: 40153 - DNA, 257 bp, Glycine max
  Clone ID: 700941694H1
atgagcaccacagtgcaaagtactccaagatccagcaggcattctttatttttccaggatttggcttcacttgtttctgcccgtagaggataattttcgtgtccaggtcaagcagctgcagtatcttcactatggcgtgagaactttggtagttcagaccttcctccgcctcctgttttcaccttggaagacagatccgatttttctcctgaatcaggcatactagattatcaaatatcccctgaggctaagtcaga

SEQ ID NO: 40154 - DNA, 258 bp, Glycine max
  Clone ID: 700941695H1
ctccggagagctcgcaggttgacatcgtgtccatcgacgttgaccatgaaaacagtgtgaagaggttgaccctggacggaaaaaacaacgcgtttccgtcaccctcgccagacggtaaatggatcgtgtttcggtcgggtcgatcggggcataagaacctttacataatggacgcattgatggtgagaagaaggagcttcgaagattaacggagggtccgtggactgataccatgtgcaactggtcaccggatggaga

SEQ ID NO: 40155 - DNA, 254 bp, Glycine max
  Clone ID: 700941696H1
ggttcgcgctgctcttcgttgtcggattgttaacgattctcaaattggctttcgatgttttcagatgggtctacgtcaatttcctccgaccaccggagattctcaaaaagtacggatcttgggcagtggttactggacccactgacggcattggaaagagcttcgctttcgagctcgctcgcaagggcctgaacctcgtccttgtcggaaagaaccccgacaagctcaaagacgtgtcggattcgatcgcggcg

SEQ ID NO: 40156 - DNA, 257 bp, Glycine max
  Clone ID: 700941701H1
cacttcgttaatcctcgcatatatgggacaagctgcatatctttccagacatcatacccttgaaagtgagtatagaattaggttctatgtatctgtacctgtaaaacttagatggcctgtacctgcaatagccatacttcaagctgtggttggaagtcaagctgtcatcacagggactttctccataatcaaacaatgtactgctatgggatgtatccccaaagtgaaactattcacactcatccaaaatgcatggc

SEQ ID NO: 40157 - DNA, 263 bp, Glycine max
  Clone ID: 700941702H1
ggctcgagcatatttatgagagtaaaagagtgagcttgaatgcttgatatctgttatgaactgctgggtttgggctcatgtaagcttaagggctctactattggtacttaaaaaaagaaaactcccatctttttacaaaaagtagtcaaaacttgaaatcaaatcaggagcgggggaaaaagaaaagagagagaagtagggttcgaaaatggcagcagaatcatcagagggcgaagaagaaaccaagttaagcggagggagct

SEQ ID NO: 40158 - DNA, 255 bp, Glycine max
  Clone ID: 700941703H1
atatattagtgtagcattgtgaagaaatagatggattcaattgtggtcttgtcatggtttttgtgcgttttggtagtagctgcccgtggaggtttaggggcagtttctagggacatatttattctggcaggacagagcaacatggcaggacgaggaggggttttcgggggaaaatgggacggtgatgtcccagaggagtgcaggcccagcccgtgggttttcaggctgagcgcgggcctggagtgggaggaggcg

SEQ ID NO: 40159 - DNA, 254 bp, Glycine max
  Clone ID: 700941704H1
ttcagaaataagcacttatttaatttcatcgtttctaaaatggatgtccattgccaaaaaggcaagagaacaaaagtatgtcactacatgatgatcctagatccaagtcttgcataacatcaacaacagcaactctttaaagctgttcatattctcagcatttaacaaataaatgttgcttgacatgatgtgaacaccagtgatgcaattgatgaatcatggatcattatcattatagtctttagttccaaagt

SEQ ID NO: 40160 - DNA, 257 bp, Glycine max
  Clone ID: 700941705H1
tgtttctttctttctccctccctctctcaaatctcatcaatttcacatatattattataggcacattcacgattaatattggcatagacaatattaattacttacacaccaccatgctaatgtgtttttaaatttggtagaagggcttatttatcattactttaaacacatgcactacttaaggaatcagtaataaaataacattttttaaaaaaattcattaggaatgtattaaaaatcacaatgacaatgcatta

SEQ ID NO: 40161 - DNA, 254 bp, Glycine max
  Clone ID: 700941706H1
aagcatcccacaagtacacgcatacatgagataagccaattgtgataagccattcactcaggtgaaaagaaaaaaaaaacatatagtaacaaaaccatggtgattcacagactcgaattgtgcataaacatggttcaactcgccatagagttcgtcgtgagcgtcgcggaaacagtggtcatagttcagcagagaaccgtggagcctctcggaatgttgaatcgcgcaagtacacctcttcctttctatggcta

SEQ ID NO: 40162 - DNA, 148 bp, Glycine max
  Clone ID: 700941707H1
ggtgaggaaaactttggacagaaaatggagtgctagacaaggccagacaggagtgacaagaacctctcagcagagggagaagccaccatagaagcaaagaccagagagtactttgatggagtcgcaccacaacgccacacaaagcctc

SEQ ID NO: 40163 - DNA, 188 bp, Glycine max
  Clone ID: 700941708H1
atactcatcttgttcacatctgctcactccttccttcatcttcctgcagctcttctgccacaaggtccctaaagaaaagcatcattagaagtggtacacaaacatgggccatgctcccaactgaataatcatgatggcaaagcaaagtctacaacaccacacagtgagattctgaaccaagacaaaga

SEQ ID NO: 40164 - DNA, 253 bp, Glycine max
  Clone ID: 700941709H1
aaactcttttgaatgttgtgggtaatgctgtcaaattcactaaggagggctatgtttctataagagtatcggttgcaaaaccagaatctttacaggattggcgacctccagagttttatccagcatctagtgatggccatttctacatacgagtccaggttaaggactctggatgtggcattcccccacaagaaattccgcatctctttaccaagtttgcccagtctcggagtggaccagctcgacctagcag

SEQ ID NO: 40165 - DNA, 253 bp, Glycine max
  Clone ID: 700941710H1
ctcactcacaaacgcacactgaattcaaaatcatcgaaagagagaggcatggccgagcaaaccttcatcatgatcaagccagatggcgttcaaagaggccttattggcgagattattagcagatttgagaggaagggtttttacttgaaagggttgaaactcgttactgtggaccgtccttttgctgagaagcactatgctgatttgtctgcaaagcctttctttagtggtttggtggattacattgtctctg

SEQ ID NO: 40166 - DNA, 252 bp, Glycine max
  Clone ID: 700941714H1
aactcttctacacccccctctcactaaccttcaaggagaagtagtaacaatttgttgcttctcacaaaatggtgcttggaaacgtgtgtccacggaatgaaacggttaaacaaacataacctttgtatctgttattctgtaggtactttggaatagagtgtaatggtaatccaaacatgttacaattggagaaactctggtttattgatgcagcaaccatgctttacatgcttttggtgtaagcttggtttg

SEQ ID NO: 40167 - DNA, 254 bp, Glycine max
  Clone ID: 700941715H1
gtgcaaaagagcgtcgtagtcgcaaccctaatcagaagaagcgcagcttcaagcgagtgacagccaccagccatgggtcgtatgcacagccgcggtaagggtatattctcttctgctttgccctacaaaaggacacctcctagctggctcaagatctcttcgcaagatgtcgaagaaaatatctgcaagtttgcgaagaaaggtttgaccccgtctcagattggtgtcattctcagagattctcacggtattgc

SEQ ID NO: 40168 - DNA, 91 bp, Glycine max
  Clone ID: 700941716H1
atcgaaatggcttcggagactgagacgtttgcttttcaggccgagatcaaccagctcctcagtctaatcatcaacaccttccacacaacat

SEQ ID NO: 40169 - DNA, 251 bp, Glycine max
  Clone ID: 700941718H1
cgttttgccccttttgttgccctaatttcaaccatgcctcgccgtagctccggtggaagatctgcccgtcctgctcctcgggcagctcctcgtcctgctctagttcaccatgctcctcctcctgcccctgctcagagtggtggtggatctatgcttggtggcattggttcaaccatagctcaaggtatggcttttggcaccggaagtgcagtggcacacagggctgtggatgcagtcatgggtcctcgtac

SEQ ID NO: 40170 - DNA, 253 bp, Glycine max
  Clone ID: 700941719H1
ctctcgaagcctctttctctctcttctagaagctatctgtgtttggtgttactaagtctccaacaagcaaagtacatggttgatttggaaatccaggtccccaccccattcgacatctttgccgaggcgagagaatcggatgcccccggagcaaaggagtatgtgcatattcgaattcagcagaggaatgggaagaagagtctgaccacagtgcaagggctgaagaaggagttcagctacgagaagatcctca

SEQ ID NO: 40171 - DNA, 254 bp, Glycine max
  Clone ID: 700941723H1
cgctcgagccgattcggctgagcatcagcccatcatggatggaattggcaaactatagtaattggagcttcctttctggcttttcttgtgtatgctaagtatattggatagaagaacccgaaattcttttgggtgccagcaattgccccattgatatctgttattctctctaccctttttgtattcttaatccgtgcagacaagcatggtgttgcaattgtaaaacatatagacaaagggctcaatccttcatc

SEQ ID NO: 40172 - DNA, 134 bp, Glycine max
  Clone ID: 700941724H1
tcaacttcacccattcatacgtggggttgttactgctgctcttttctctttgcttttctctttagtactctcttcccctttcttttactttatcttcttcttctgagcttgtttaagcttttcttccataaaca

SEQ ID NO: 40173 - DNA, 250 bp, Glycine max
  Clone ID: 700941725H1
cttacattgaactaaatgctcagggaagagccaggccaactatagctaaactttacaattggagatacagagatttgggagaccttccttctgtaaaggaggaagtcatattcaatagggcaaatgctgtgtttgcttatgattatcagttagtggatgttccagattaccttggtaacggggagacaacttcatctccttggttttaccaaaatgagggagaagcagaatatgttgtcagtgtctatat

SEQ ID NO: 40174 - DNA, 250 bp, Glycine max
  Clone ID: 700941726H1
cggagatgcagtcatgaacaggacaaagttcagattcttcttctgagcaaaattttggggcagcaactaactaaatcctcaaaacagtgcaatctagtgaagattgttgggtcagttatggcagcgttgatttccaaaaggatcctacgttgttcttctgggtccttgcattcactaggacgatgttactttgattcacctgggtttgcctctatttataaaccacgtgatgtatgcggcggtttatctg

SEQ ID NO: 40175 - DNA, 248 bp, Glycine max
  Clone ID: 700941728H1
attccacaaggttatggattatccaacagaggaagagatcaaagacctttgcacctcatgtggtcttaccaattattcaagcaaaattcagtaggcttttattatgttcacagctcagaagccgtaaaattgggtctgatctatttataacattcattcttccctgcattttatcaattccttcagtatgtatgtataatgtattgtatcacttgtttcatctgtaaagaaattgtaaataaatgaga

SEQ ID NO: 40176 - DNA, 251 bp, Glycine max
  Clone ID: 700941732H1
gagcattccattgttgttatgttgtattgtagccggagaagaagagaagagatagcggcgaagaaagaaagatgacggaggcatatataaggaagaagcccgggatggcgagcgtgaaggacatgccgtttctccaggacggtccaccaccaggcgggttcgctccggtccggttcgcccggcgcatccccaacaagggccccagcgccgttgccatcttcctcactgctttcggcttaaactcttggggc

SEQ ID NO: 40177 - DNA, 115 bp, Glycine max
  Clone ID: 700941733H1
gatatacttcaccggcgcataaaacacatcggcattgtcattgaattatcattttggtcttgtatttgatggtcagaactgccaagtaccaagagataaatgagtcattcattac

SEQ ID NO: 40178 - DNA, 254 bp, Glycine max
  Clone ID: 700941692H1
ccttgaggtggaaagctctgacaccatcgacaacgtcatggccaagatccaggacaaggaaggaatccccccggaccagcaacgtctcattttcgccggaaagcaacttgaggacggccgtacccttgctgactacaacattcagaaggagtctactcttcacctcgtcctccgtctccgtggtggcatgcagatcttcgttaagacactcaccggcaagaccataagcctagaggtcgatagctccgacacca

SEQ ID NO: 40179 - DNA, 233 bp, Glycine max
  Clone ID: 700941739H1
tttattgctctcatggcttttagtcttgcgtggctagttattgaagctggagttggtgttgctgtttttgtgcgtttctttgttaacaagagaggaatggagtctgaaatcattgatagactcggaaatggattctctcggcccccatttgcagccgttgtggttgtatgtactgtagtttctatcttggcttgtgtgcctttgggtgagcttttctttttccacacaacata

SEQ ID NO: 40180 - DNA, 207 bp, Glycine max
  Clone ID: 700941651H1
ctgagagaagcagagcagaagaggtgaagtgaagatgatgtccacacgacatacgaccttgcgaaagcaggacgtcctcgaagccaagcccccccaactgcagcccacgccgacaaggcgtcaagagaacgctgcgagggggaccacacctgagcgcaagacacccaggcgcgcctaccccgattctgacagagtgcctgtcaaacc

SEQ ID NO: 40181 - DNA, 145 bp, Glycine max
  Clone ID: 700941656H1
cacaaaccgtaacagaaccaaacaatgataacccaacggcttaaccatctacttcactccctcttcctcttcgcagccgcattctccatcctcaacacaacatacatctttgcaaacggcggttatgccggtaatggctccagtg

SEQ ID NO: 40182 - DNA, 263 bp, Glycine max
  Clone ID: 700941657H1
cggagacatcttcagcacatcaaattcaaatgattcaagcaccggaattgccaaaggaagaaaagccagtggaagaagcacctgtcgtcaagaaggcaaatggaactcgtaagaaaagacaggggcccaaggttcccaaatctcccaaggctaagaagccaaagagggtgcctcgtgcgccaaaggatgagaatgctcctgcagttcaacgtgcaagggttccgaagaaaactactgaaattgtaataaatgggattgatatg

SEQ ID NO: 40183 - DNA, 261 bp, Glycine max
  Clone ID: 700941658H1
tggctagatgtggcaccttatattgatgtaaacctcttcatcagagtcatcattcagccatctagtgatgctagaatcaagactcagagaaccatcgcaacttcttactatgctctcttccttggtgggtccagaacactcctccaagtcatgaagacaagttttcctgaattggggttgacaataaaggattgcttggaaactagttggatcaaatctgtgctctatattgcatgctttccaagtgacacccccccagaa

SEQ ID NO: 40184 - DNA, 255 bp, Glycine max
  unsure (1)..(255): unsure at all n locations
  Clone ID: 700941660H1
gttgaaatcgagtgtagtgatcattgattaatgttggagaaattagcaattctgggtcattggtggtgtgtcagcacatctctttgctgttatacatggtcttctgatggttttgtctggaattgacaccaacttcactgtgacatccaaggcagcagttgatgaagaatttggagaattatacacctttaagtggactactctcctgattcctccaacagngatcacttctatcaacattgttggggttgtagc

SEQ ID NO: 40185 - DNA, 128 bp, Glycine max
  Clone ID: 700941662H1
ctcaaagtggaatgaaagagcatacttcagcacaagaaaagtgaagctcgaccacgaatatctttccatggcagtcctggttcaggaagtgataaatgctgactatgcttttgtcatccacacaacat

SEQ ID NO: 40186 - DNA, 264 bp, Glycine max
  Clone ID: 700941664H1
actcgagccgaatcggctcgagtgaacaagcaggggaaaactccacctatctttattctgacccaagtaattaggtgctactgtcatgcaggagatattgagcgtggtcttcaaaattttgagaaccacctaaggcaggacaggtctgttcctgcagaacgtattgtgactcttgcagaaggggcaatggttgggtacactgaaaaaggaatgcaaatggctcaagatattctggtaaggatgaacgagagaaacatttttttg

SEQ ID NO: 40187 - DNA, 259 bp, Glycine max
  unsure (1)..(259): unsure at all n locations
  Clone ID: 700941667H1
tccatacgtcggatctgctataatacgcttgatccatatgggcctcctcgaccacttgtgggacgacaccgtcgccggcccaaggccggaaaacggtctcggcaagctccggaaacaccacaccttcactttccgacctagctccggcaagggtacgccctgcctcagtgcctcgttaatcacactcatataagtcatcaacgattttcgtttaactacaagtccacacaacatacccagtcgctataggtngatgtgc

SEQ ID NO: 40188 - DNA, 86 bp, Glycine max
  Clone ID: 700941668H1
ctagttctagatcgcgagcggccgtcctttttttttttttttttacttagtaaaagatccctttcatacagacaccagaggggttt

SEQ ID NO: 40189 - DNA, 140 bp, Glycine max
  Clone ID: 700941669H1
gttcatcctttgcttcccaaagaaagattaaataaaaagtaatgggtagctttgaagcggaaagaacaacagtaggattggcagcaagagacccttcagggattctctccccacacaacatacgattttgctataggggg

SEQ ID NO: 40190 - DNA, 260 bp, Glycine max
  Clone ID: 700941670H1
aagcagtgtatgttaactggggctttgcaagaataaagggtatgggatggggttgggctggtgtaatctggctgtacagtgtggtaacctatatccctcttgatttactcaaatttgctatccgctatattcttagtgggaaggcttgggataatcttttggagaacaagactgccttcactacaaagaaagactatggtaaagaagagagggaagctcaatgggcggctgcacagaggacacttcacggtcttcagcct

SEQ ID NO: 40191 - DNA, 92 bp, Glycine max
  Clone ID: 700941671H1
agtatcctctcatagtgctcttcttcttgttcattgtcattatcaagatgtctttgctttcggatctcatcaacctcgatctctcagaatcc

SEQ ID NO: 40192 - DNA, 257 bp, Glycine max
  Clone ID: 700941672H1
gttacaaccatcttgcctcctcaacattttcttcatcacttggaccctagtgcttctcctactcatgacaagtctatctcttcacccaaaagtgaatgttggcattttaagtccagggttgatggggctctatgttgtcttcctttgctggtgtgcaattagaagtgaacctgagggagctgaatgcatcaggaagtcagaatctgcagacaaaacagactggcaaagcatccttaagcttgttgttgcaatactag

SEQ ID NO: 40193 - DNA, 260 bp, Glycine max
  Clone ID: 700941673H1
ccaacttttgagagattggataaattaggactgattgaagaagatgatggtgctcgtgtgatatttgttgagggtgcaaatataccaattatttctgtgaaaagagatggtggcttcaactattcttcaactgatctagcagcactttggtatcgtctaaatgtggaaaacgttgagtggaatatatacgttacagatgttgggcagtggcaacaccttgatatggtttttaaggcctttaggcgtgcaggatggctgcc

SEQ ID NO: 40194 - DNA, 158 bp, Glycine max
  Clone ID: 700941674H1
gtccgaaacccctcacaccgtcctcgccctcgacgtctacaacgacaagatcaaacacctcctcgaaccctccgattccccctgggccggccgcatcaccttccacacaacatacgagcgagcgaaagtgggacgtgcaggcagaagcaagaaggcag

SEQ ID NO: 40195 - DNA, 253 bp, Glycine max
  Clone ID: 700941676H1
gctgaaattgtcacgaccatgttgtcattattcaccaacttgctcctcttcctatccctgctaatcggtctatgcaattgcagggttacaacatcaaatgaagaggtgcaaaccctaaacacaatcactcacttcaacccacaagtttcacttttccgaaccctttcttccctgaagcggttccagggttcctcggagttcgtgaagctcaaataccacatgggacttgtgctatcgtctccacacatcatac

SEQ ID NO: 40196 - DNA, 110 bp, Glycine max
  Clone ID: 700941678H1
ggttatggttcttaaccatatcggcctccgtgttgtcttggatgttgtctacaatcatttgtaatgaagtgggccttttgatgaacattctgtccttgataagattgttc

SEQ ID NO: 40197 - DNA, 257 bp, Glycine max
  Clone ID: 700941679H1
gattcttcatggtcttcttcagtttaattatggcttttttggctctatgaaacacccacatggattatggagtgtcgctactatacacttgtttcaattaagattcttttctttctttaatatatgtcaaggaaataaaacgctgccaccgacatgtaggaggccatgtgtacttttttttattataggttttgtatttgttgtttgtctgttttccgaattattttattggcctctttttttcagtgtgggtagat

SEQ ID NO: 40198 - DNA, 260 bp, Glycine max
  unsure (1)..(260): unsure at all n locations
  Clone ID: 700941680H1
gcaagctagctaggttgaaaatagtttggttttgtagtaagtgaggtgaggtgccaaaatggtgaagataactcttggtactttcgatgactcttttggtgttgcctctcttaaggcttatttggcagagttccattcaactctgattctcgtgntcgctggtgttggttcagccatcgcttacaacgagcttacaaaagatgcagccttggatccaacggggctggtggcagtagctgtggcccatgcatttgcactgt

SEQ ID NO: 40199 - DNA, 266 bp, Glycine max
  Clone ID: 700941682H1
gaaagaacaagttcaacaaatcatcaaagacattaaggagtttaaggaaagcactaaggttgacaaggtggttgtcctgtggacagccaacatagagaggtacagcaacctagttgtgggactaaacgacaccatggaaaacctctttgcttccttggacaggaacgaggctgagatttccccttccaccttgtatgccattgcttgtgttatggaaaatgttcctttcatcaatggaagccctcagaacacctttgtcccagggc

SEQ ID NO: 40200 - DNA, 260 bp, Glycine max
  Clone ID: 700941684H1
cagaaactgagattgggaggaaaagaaagcaataccatcggcttcttcagcactctcttgtttttgcctcagttgggactgctatggcatttgttggtttggcagcatgtcgtgcatatgcagttaaaaagaattcctctggttagtcatcaagaaaatttataatggcagagctgacttaaattaactgttgaattcgtgttcagtattgggcacactaatcttggtaactttaagttagaatatattttttgtacagt

SEQ ID NO: 40201 - DNA, 259 bp, Glycine max
  Clone ID: 700941685H1
attaaaataaacatttttaatcaaataatttttttattgttttagtgtgtttattaaaactgttttagtttttttttttaaataatttttgtttattttaagaagtaaattttatgtgtttcttgaaaaaaaaaacttatataaaagtatttattttaaaattactttaaattttaaatttaaataaactcaccctaaactatgtcaattttgcaggaaaattaaaaggggtcgttggatttcgttttcgtggatgctg

SEQ ID NO: 40202 - DNA, 253 bp, Glycine max
  Clone ID: 700941686H1
agatctcaagaggggtgggaataacaggttcttgaagactgctgcatatggacacttcggcagagaggaccctgacttcacatgggaagtggtcaagcccctcaagtggaatgaatgggagttttttagcgttgcccttataatgtctattatccataactttccacgtcccttgctctgtgtttttctctcgtcgtcctcctcctatattgtttctccagcctttcatttgtaattttttacatgatcaact

SEQ ID NO: 40203 - DNA, 259 bp, Glycine max
  Clone ID: 700941687H1
gttaattaaatccgaggaaaaaagtttggtgactgagaaagggaaaatagaaagtgagagagaggaattgctcacacataaggctgtagttgagaaaataagagctaacaatgaagaagagtcgttgaggataaatgaagagattgatcgacttaaagtgactgaggaggagaggtctgaatatctgcgcttgcagtcacaattgaagcatgaagttgatcagtacagacaccagaaagaactacttctgaaggaagct

SEQ ID NO: 40204 - DNA, 259 bp, Glycine max
  Clone ID: 700941688H1
aagtgaccaagttttgccggattttaaatccagatcttgcaattcagcatattcttccttgtgtgaaggaattgtcatcagattcttcacagcatgtgcgctttggctaggcttcagtaataatgggaatggctccagtgttgggaaaggtagcaacaattgagcagcttcttcctattttcctttcccttttgaaggatgaatttcctgacgtacgcctaaacattatcagcaagcttgatcaagtgaatcaggttat

SEQ ID NO: 40205 - DNA, 218 bp, Glycine max
  Clone ID: 700941650H1
actctgtctcgtttacacatctctccaacccttcacgttcgtttctcagtcttattcgaatccctctctcaatctcctgtccacacggccttcgccctggcggcacaggaaacaccgacgagaggcccacacgacccacgagctcgcgcgagggggacctgcgaaggccccggggcctcgggcgcccgtccgacaggcgagcctggggccgggcgagg

SEQ ID NO: 40206 - DNA, 255 bp, Glycine max
  Clone ID: 700941690H1
agggatgtgaggtttgcgccgtgtgggaactgcagtgggagtaggaaggtgtttgatgaggatgaagaggtgttgaagaggtgtttggagtgcaatgagaatggcttgattcggtgtcctaattgttgctcttcttgaagtttgcaaaaaataaaaataaaacagaaaaaaaagaaataaaaaagaagaaaaatttgttgatgttttgcatgaaacttagatgcgattccttttggttctggtgttgttgtccag

SEQ ID NO: 40207 - DNA, 257 bp, Glycine max
  Clone ID: 700941691H1
agaaaagaaaatcctcaattttctgagcagccaaacactctctctctgtctctcgaaaattctcagtttgcagagaaaatctgaatcatgtcgtggcaagcgtatgtcgacgatcaccttctgtgtgacatcgaaggtaaccacctcactcacgctgctatcatcggccaagacggcagcgtttgggctcagagtaccgacttccctcagttcaaatctgaggagataactgccatcatgaatgactttaatgagct

SEQ ID NO: 40208 - DNA, 122 bp, Glycine max
  Clone ID: 700941611H1
gaatggcacttcgttgcttggtgatgtccctttctgttctcttcactcttggtcttgcgaaagaaagccatgccagagacgaagatttttggcatgctgcatggccaaacactcccatacca

SEQ ID NO: 40209 - DNA, 218 bp, Glycine max
  Clone ID: 700941612H1
cacacaacaaacgagcttgcgaaagggagaataacgaataacaacacaggcatacacgaacaacctaaaagcctagaagcccaggtcatagaagaaatctgaaacaaggcataacaagcggacatcgccacacaacgacggaatgacagcgaaggaaaacacgtcactcacgctgccatgatcggcgaagaagagtcgcggtcggctcagagtaccga

SEQ ID NO: 40210 - DNA, 171 bp, Glycine max
  Clone ID: 700941613H1
caattacacatgtgctgtacttgtaaatctgattacctagatctttggataaggcgcctctagaataagcaagtatgagggtattcacgcttaaatcaaattacgtaagatgagaaaatttagtaggcagaaagtaggaaggtggaaaacttgaaaggaaggtattctaca

SEQ ID NO: 40211 - DNA, 268 bp, Glycine max
  Clone ID: 700941614H1
aaaacctttgtgaaggtttacaagtcagggtcctttggaagatccttggacatcactaaattcaccagctactctgatctacgcagtgagcttgctcgtatgtttggcctaaaaggtgacttggaggaccctgtgagatcaggctgccagcttgtagtcgttgactacgataatgacgttcttctccttggtgatggcctgtggccggaatttgtaaatagtgaccggtgcatcaagatactttcccctcaggcagtgcagcaaatgg

SEQ ID NO: 40212 - DNA, 271 bp, Glycine max
  Clone ID: 700941615H1
ggaaaccctagctggataggtcaaacatcatcatgtcggacgaagagcaccatttcgagtccaaggcagacgccggtgcctccaaaacctaccctcagcaagccggtaccattcgcaagaacggctacatcgtcatcaaaggacgcccctgcaaggttgtggaagtttcgacttccaaaactggaaagcacggtcacgccaagtgccactttgttggaattgatattttcactgccaagaaacttgaggatattgtgccctcttctcacaa

SEQ ID NO: 40213 - DNA, 262 bp, Glycine max
  Clone ID: 700941617H1
tagggagatgttgtcacaaacctatatttcatccggaagagtaagatttctagtgacttcaacatgatgatggatcagaaaatattcacatgtgagcatccccaatgcccttatagcgaagttcgccttggtttccatgataggtctgctatggacaatcatcagttgaattgtgcgtacagaaacagttctgcagattatggtggtggtcccagtttccatgctactgaggactggccagtcatattcccccagtcgcggg

SEQ ID NO: 40214 - DNA, 275 bp, Glycine max
  Clone ID: 700941618H1
gggaataatgctcttagcctctctgaattggatcagcagagaaacattgaagaatcaagtgtgtacaggacttcacatttgatagtcaaatgccgtagttctctagagctttttcttgccatatggttcgtgatgggcaatgtatgggcctttgactcacgttttggatccttcccacaagcctcaaaatttcaagtgctctgcatcatcttgctttcttggaatgcaatatgctactctttccctttcctattgtttttgcttttgtgttgtgg

SEQ ID NO: 40215 - DNA, 272 bp, Glycine max
  Clone ID: 700941619H1
gggacacaagtgcttgtgaatgtgtggactattgggagagacccttcaatttgggacaaccctacagagttccaaccagagaggtttcttactaaggagattgatgttaaaggacattactatgagctattgacatttggtgctgggagaaggatgtgccctggctaccctcttggccttaaggtcattcaagcaagtttggccaatttgttgcatggatttaactggagactgcctgataatgttatgaatgaggatttgaatatggatga

SEQ ID NO: 40216 - DNA, 263 bp, Glycine max
  Clone ID: 700941622H1
agattccatagacatcctcctcttacaatagaaggaaaagaccgcgtccaacgcagcgaatccaaatgacgagttgattggggtatctaaggggagaaagaggattaagaccgtgaaaagtttcaaaactactttatgtacaaatttggatggccaaagaactagatatgtgtgtgtctgtggggggtgtgtgcgtgttaactttggagtggttttggtccttggaagtcacttcagaagagaacctaatcaagttattatag

SEQ ID NO: 40217 - DNA, 267 bp, Glycine max
  Clone ID: 700941623H1
aattgcaattaagtggcatagatcttgaagctgagaatcgcgtgcgccatgaatagaggtgaaagttcaggtggtggacagagctcgttggggtacctatttgggtcagaagagtagccaaatcagcctctgcccatcaaggacagctccattaccaccctatggcattgacatcgataactccatgccccatcacggttctaactgccaacttgttgtctcaaacaaccgatctcaaggccaccacttgggaaacattgtaactga

SEQ ID NO: 40218 - DNA, 251 bp, Glycine max
  Clone ID: 700941624H1
tgaaaaggaggtatgtaatgtgtgggtgtggtgtgagtgacttaagcccacatgagccaatgagcagcgtccaggtcatgattgggtgcgtgctgtgaacgtggcgcacgttagccctttcccccagcaaatcggtggtgccctccctccctccctggtcctagccactatgttacccactttccctcaagcctctctcccatggcctcctttaagcctcctcccgatgcccccactgccgtccccctcgc

SEQ ID NO: 40219 - DNA, 268 bp, Glycine max
  Clone ID: 700941625H1
gtgcaatgttacagggaatggatgataaagtggttcctccatcgatgactgattttgtgcaccgcttgctgcccggagctgctgtacataaactcccatatgaaggtcatttcacctatatctacttttgtcatgaatgccacagacagatatttaccacactttttggaaccccacaaggcccactcagcatttctatagaagtagatcaagctaccctagaagagaccaatattgaacagtaataagtagtaaaagatggtgatta

SEQ ID NO: 40220 - DNA, 264 bp, Glycine max
  unsure (1)..(264): unsure at all n locations
  Clone ID: 700941626H1
ctccaagctttggggatcttaaccaactaatttcagccaccatgagtggtgtgacatgttgtcatcgtttccctgggcaactcaacttagattttcgcaaacttgctgtgaatctcattcccttctttcgtctgtacttngtcatggngggttttgccccactcacatctcgtggttcccaacagtatagagcttttactgtacccgaattgacccaacaaatgtgggatgctaagaatatgatgtgtgcagctgatcctcgcc

SEQ ID NO: 40221 - DNA, 266 bp, Glycine max
  Clone ID: 700941627H1
taccaacgtaccaatcttaatccttgtctttctcatttgtcccaaacaaaattaatttttgtggaacattttttccacacacccgactacctagctgcagagggtctctatcaattttcagctaactgatggtggaagctcaagataaggattgggacggtagatagggctaggagtccctgggatgtatatgcctgtagcgacctctgccacgctgcgctacgctttggctactgacagcggggacgcttttgtggcattagacc

SEQ ID NO: 40222 - DNA, 205 bp, Glycine max
  Clone ID: 700941631H1
ctatggactttttactagctgagcttcacaaggcttgaatacatactagctcacatcacctgttttacaacaagtctgcctatcaatcaatagacgcatacttcagaattattggctatcgagatgatgttggtcagatggatagtatggtacaatagacatggtggttagcatcagacctgatgatgaatatagcacttgtaca

SEQ ID NO: 40223 - DNA, 269 bp, Glycine max
  Clone ID: 700941632H1
tgggaccagtgttgaaaatgcaaaggcctataacgggaacctgatttctcatcttagatcattggttgggacacctttgatgcctgggaagtctgtggacacttacatttttgcactctatgatgaggatctcaaacaaggcccaggatctgagcgtttatttggtatgttcaaaactgatcgcaccgtgtcgtacgacgttggattaaccaagtctagccagcagactccatcaactagtccaacaactccagcacctaaaactgctg

SEQ ID NO: 40224 - DNA, 280 bp, Glycine max
  Clone ID: 700941633H1
agtaagaggaagatctctggtgactttaacatgataatggatcagaagatttacacatgtgaacaacctcagtgcccttacagtgaaactcgccatggttttgctgacagaaattccagggacaatcatcaattgagttgtccttatagaggtgctgcttcagattatggggcttcaaattttcaggttaacgaggtaaagccggtcatattcccccagtcctttgttcagccaaaacctactactcagtctgttaacttggttccatctgttattgatc

SEQ ID NO: 40225 - DNA, 268 bp, Glycine max
  unsure (1)..(268): unsure at all n locations
  Clone ID: 700941637H1
catgatgaacaatttcaaagaccaagaccatctctactcctcatggagcttctcaaagctcatggctttcttcttcctcttaatctccatcttctacctcttctactccctaaggttcgttagccactccttcgattgtgatcaaacccctcacattcccaccatcactcatcgtttttcttccaacaccccatctgcgtagnagtccacacccccctttgaataagttaccaacatttcccacatagtcttggggtgaggagcctca

SEQ ID NO: 40226 - DNA, 266 bp, Glycine max
  Clone ID: 700941639H1
ctcccaagtggcatggtcctgtcgagcaagacatccgttggtttgaaccaatcaagtggaagaacttctcccatgtaagcactgcaccaattgagtacactgaaactagcatttgggacctgtctggtgttcacatcgtcacaggtgcccagcttggtgtttgggactttggtgccaaaaatgtgttacaccttaagctccttttctctaaggtaccaggatgtacattacgccgctccgtgtgggatcacaatccctccactcct

SEQ ID NO: 40227 - DNA, 267 bp, Glycine max
  Clone ID: 700941641H1
tatcgaccgattcggctcgagaaccatacaggtgcttctatcagtggcagcgcaccggcttctaaggcacaggttagcggttggcctcctattagatcatttaggaaaaactcaatggctaccaccactaacaggaacaatgatgaagtcgatggaaaaccaggtgttggcgcaatctttgtcaaggtcagcatggatggtgctccgtatcttaggaaagcagatctaagggtttatacgacatatcggggactatcttctgccctt

SEQ ID NO: 40228 - DNA, 264 bp, Glycine max
  Clone ID: 700941642H1
gtactggttcatactatatattttcaaagtggggtgccgaagcagcgtgcggccaatctgctgtgtcaatgtgtttttcttttttatcgtttccaatttgtttttgaagtacttctccaattattggtcaccaaatggggggccaaggattcttctatttgtagggtagtggcactttcaaagaaggccaaggattctatttgtagggtagtggcactttcaaagagtttctttctcttttaaaaactcgttaatcttttatgt

SEQ ID NO: 40229 - DNA, 143 bp, Glycine max
  Clone ID: 700941643H1
ggaaaaggcgtcttcataaacgccgcccaaaacttctcatacccttttattcattccattcgtttctagggttttcttttctttgccgagaaaatgagagagtgcatttcgatccacacaacatacgagcttgcgaaaggggg

SEQ ID NO: 40230 - DNA, 261 bp, Glycine max
  Clone ID: 700941647H1
tatcagcttgtaccctatcatttgttctaatatagttgaaggtatacatttattttttctacataattatatgaatgcttgtgtacaatgtaacacgcttatgagatgttggcatggctgtgacgtgtttcgatgctaaaaaaaaaaaaaaaaaagaaaagaaaaaaaaaaaggggggtccccgtaattatagggtttgtacccggggtttatctgcgttccggattattggaggggccgttttttcccaaggggggagat

SEQ ID NO: 40231 - DNA, 184 bp, Glycine max
  Clone ID: 700941648H1
acgcctcactcactggttctcaaaaactcaaaagatggtgatgttgtaaaaccttctcttctcactttcacttctcctaatggttctcttcacttcatctcaaatcaccccagcaccatcaccttcctcaacacatacagacttgttcagaatcctcagaaaagccggaggattcaccacccta

SEQ ID NO: 40232 - DNA, 267 bp, Glycine max
  Clone ID: 700941610H1
cacatgtgaggattcactgttagctgctcctattatcttggacttggtccttcttgctgagctcagcactcgaatcgagtttaaagctgaaaatgagggaatattccactcattccacccagttgctaccatccttagttacctgaccaaggcccctctggttccaccgggtacaccagtggtgaatgcgttgtcaaagcagcgagctatgctggaaaacatcctgagggcttgtgttggattagctcctgagaacaacatgatcct

SEQ ID NO: 40233 - DNA, 261 bp, Glycine max
  Clone ID: 700941649H1
atttcttgtaagttgttatgcttggagtgctgatgggattaagactgatgacattggtgctttgcatctgataccgagggagctttcacttaagattgttagcaagattgaagcttgggaaaggttcagtgtttatattgtggttccaatgtggccagagggttacccagaaaaaggaacggttcaagcaatattggattggcagaggagaacaatggatatgatgtacaaggatgttgttggagactaacagtcgagggt

SEQ ID NO: 40234 - DNA, 162 bp, Glycine max
  Clone ID: 700941561H1
ggagtatttcagaagctcgctgcttcgctgattttgaggcatgcaagaagagagaggagtcgtactgcacaaatttcacacttcctctcatatactttacttcatttgggactcttcactcttctcgacatcttcatctctgtcaagtttccacacaacata

SEQ ID NO: 40235 - DNA, 239 bp, Glycine max
  Clone ID: 700941565H1
ctttgcaagactgaggctgagttgaaagaagcttggcgtcctggagatcttggttacggaactagagttcctggtgacatgctgattgtcacaattgtcttctgttactctgttattgctcctgtgataatcccatttggtgctctatattttggcctaggatggcttgttttgcgaaatcaggcactcaaagtctatgtaccaacatttgaaagttatggaagaatgtggccacacat

SEQ ID NO: 40236 - DNA, 228 bp, Glycine max
  Clone ID: 700941569H1
cgggttcgaagcctattttcgtaaaaaaaatagtcgtttttctgagctcgtcgttttggtcttcgtgttgttgaagtgcaaggccatggatccagatcagggctcttcaaaagcccggaagctcaagtttaaacacaggaatctcaaaccagtccgaactcccaaaaccgaagcggatgataagcagaaggaagatagcgcagtgcctcgagctctctcgcgtcgaca

SEQ ID NO: 40237 - DNA, 103 bp, Glycine max
  Clone ID: 700941571H1
ccttcaaagtccaaagctctctcccattttctctctctttctgttcagcgttagataagaaaaaagaaaagagaagagtaaccaacgcaccacaccacaccac

SEQ ID NO: 40238 - DNA, 229 bp, Glycine max
  Clone ID: 700941574H1
gttctagaaggaagagcaaaggcttcacaagcacacgatcacaagcatcaaccactaatatttggaccggctagccttgtaaatggaaacataacaactgagagagaaagaatggcagctcaggtacttccaacctagtcataggatgccaactatgagcattgaggaagctgggctaaaagaaatggaaataatgaacaaatggcaagagagaaatgtcagactcatg

SEQ ID NO: 40239 - DNA, 228 bp, Glycine max
  Clone ID: 700941575H1
cacacaccaccaccaccgttttcatcaatttcttatcttttctcattcccttctcttcttcctcaacacacacaaaatatctcttccaatttcaatttctcgtcgtccctcatcatggctcgtctcgcgatcgctgtcgccgccgtgctcctcgtggccctctccgcctccaccgcgacggcgcgtccctgcaggaccttcataatctcctcctactcgttccgcaac

SEQ ID NO: 40240 - DNA, 68 bp, Glycine max
  Clone ID: 700941578H1
atttccctagaaagctcaaaattgttcatgaaagcttcgtatccgattaacaattctacgaataatag

SEQ ID NO: 40241 - DNA, 88 bp, Glycine max
  Clone ID: 700941579H1
gcgtacattctgaaatgtatgtagtggagagcaaggtgggcgccatagggtgcatgctggtgtccctcttcttcctcgggacatggcc

SEQ ID NO: 40242 - DNA, 227 bp, Glycine max
  Clone ID: 700941580H1
gatccaagtgatagacactcgtcgcgatggaacgtgtagctgaatccgagcgaactctgtacccatacgtgactggatcctctgtagtcgctatcaaatacaaagatgggattctaatggccgctgacatgggaggttcgtatggatctaccctgcggtacaagagtgttgagcgtatcaagcctattggaaagcattctcttcttggtgctagcggggagataagt

SEQ ID NO: 40243 - DNA, 236 bp, Glycine max
  Clone ID: 700941581H1
tgcacacactctctctctctctctcattgtatggccgccaattcgagtagccgagggatcaccgccttggggaagcgagtcgccaaccagatctggacttccaaccccccctcagctcctctcacttccaggaggggagcaatagcagctgcatacagtagcagcggcgggtcagtgtatgacaagaaccctgatgatcagatccactctggggcggtcccagacgatgtgatcca

SEQ ID NO: 40244 - DNA, 229 bp, Glycine max
  Clone ID: 700941584H1
ccccaaccattcagaaatgatctagagagctattctttagaattgggaaaacttagcatcgcaatcattaaacttatttcaaaagctcttgagatcaacactaatgaattgctagagttatttgaagatttaagtcagtcaatgaggaagaattgctaccctccatgtccccaaccagaacatgtcattggccttaatcctcattctgatgctggtgctctcaccatcc

SEQ ID NO: 40245 - DNA, 228 bp, Glycine max
  Clone ID: 700941587H1
cttgtttgtttccatttcttgcttctattatttatttgtttttctctagtattcatggtgctcgctggtaaacttagtactgaacttggggtgaaagcatccgctaccaaatggttcaacctcttaaccacgcaacttcagcattttcagaacctttgtgaaagagtgcatgaaaccaagctgcatgatggtgatgactggcacggtgttggtaattcggttaaacac

SEQ ID NO: 40246 - DNA, 226 bp, Glycine max
  Clone ID: 700941589H1
accaactgaagaaattgctgacagaatcaacaagatgctggcagtgctcgagaagaacatcttgtgagtgaaccctgactgtgggctcaagacccgtaagtacactgaggtgaagccagccctcacaaacatggttgccgcagcaaaactcatccgcaacgaacttgccaagtgaatggtataagaaagtagaatcatccaagtcatttggttctgctttatatta

SEQ ID NO: 40247 - DNA, 219 bp, Glycine max
  Clone ID: 700941590H1
caaaaccttaccagcccttgacatatgaacaacaaaaccagtccttaacgggatggtactgactttcatacaggtgctgcatggctgtcgtcagctcgtgtcgtgagatgtttggtcaagtcctataacgagcgaaaccctcgttttgtgttgctgagacatgcgcctaaggagaaagtctttgcaaccgaagtgagccgaggagccgagtgacgcgcc

SEQ ID NO: 40248 - DNA, 214 bp, Glycine max
  Clone ID: 700941591H1
gaggaaatatccttgcagtgaatcaagacacggaggagtgagtggtccttggtgctgatttagcaacaacaaccacagatgagagtttgagtgtgagtgaatccagatccgagtttcgcacttttgcggagaatagaacaatggagtcggcaacggcatcatcatcggaatcggagatggcgcttcctcttcctctggcgtcggagtcacaaca

SEQ ID NO: 40249 - DNA, 221 bp, Glycine max
  Clone ID: 700941592H1
aaatttcagaactacagtattttactgcaataaagtccgtgaaacaacagctttcatggttccattggtggctggtgatggaaccaaaactcaggcacttgctgtttgccactcagatacttctggaatgaatcatcacatgcttcatgaactcatgggagttgatcctggaactaaccctgtttgccatttccttggaagcaaggccattttatgggtac

SEQ ID NO: 40250 - DNA, 160 bp, Glycine max
  Clone ID: 700941593H1
gtaccaaagaaaaatgagacttccatattagattccctttaggatggtatctataattatgaatttcagtcttcatggcaataagaatcgtcttatcttgtactcatgtgtgcatgctccatgttctgtgtgctgcaagttccacagaatcaagtattat

SEQ ID NO: 40251 - DNA, 227 bp, Glycine max
  Clone ID: 700941595H1
gagagaaaccctagggtttggaagaagctgatcggagaagatggtgcagcgtctcacctaccgcaagcgccacccctatgccaccaaatccaaccagcacagagtcgtcaagactcccggtggcaagcttgtttatcagaccacgaagaagagggccagcggacccaagtgccctgtcactggaaagaggattcaagggattccacatttaaggccaacagaatata

SEQ ID NO: 40252 - DNA, 121 bp, Glycine max
  Clone ID: 700941596H1
gagagagcgagcgagcgagcagtttcaaagagaggatttgggattgggaaggcgagggattgcgctgcgtctcttcctcttctctttcgattcatccctcattcataatcttccactccac

SEQ ID NO: 40253 - DNA, 235 bp, Glycine max
  Clone ID: 700941601H1
attgaaattctttagttgtaactgacaaagttttctgagaaaataaggattattattgagagaatggctggctcatcggaagagggacaagtcattagctgccacaccgttgaagaatggaacgatcaactccagaagggcaacgaatccaagaaactcattgttgtggattttactgcttcttggtgtggaccatgcggtttaattgaacaatcctgggctgactgggcaaaaa

SEQ ID NO: 40254 - DNA, 288 bp, Glycine max
  Clone ID: 700941602H1
ggctcgagattcgcccagttctctttcgccctcgtttccctctccgtcatggctaccacctccgatttcccttctgttactgccttccgctaccttgttgctgctgtcagcctgcaaagcttgtggagcctctctttgggagttgctgatatgtatgccattttagtaaggcgtggctacagttatgtgagaattgtccgcttattctctatcggtgatgggattacttcaacacttacattttctgcagcctgtgcttctgctggtattacagtcctcattggcaat

SEQ ID NO: 40255 - DNA, 274 bp, Glycine max
  Clone ID: 700941603H1
aaggaattagaggcttaagtggtaagaaagatttcttggatgaagatgatattcaaaagttttcctacttaagggcagtgataaaagagacacttagattgcacttaccagcaccactacttataccaagagaaacagataaaaaatgcatgttagatggctacgaaattccagccaagacattattatatgtgaatgcttgggcaattcatagagatcctaaggcttggaaagatccagaagagtttatacctgagaggtttttaaattgcga

SEQ ID NO: 40256 - DNA, 273 bp, Glycine max
  Clone ID: 700941604H1
atcgagccggtccagtatagaggaaaattggagagaactgctgtactcaaggctgtatactctggatttaaggagactactgaaccttcagtttgtgtaagtggagatgttgagactaatgagtgtcttgaaagaaatggaggatgttggcaagacaaacatgctaacataactgcttgcaaggatactttcaggggaagagtttgcgagtgccctgttgtgaacggtgttcagtataagggttacggttatacgacatgtgaaggttttgga

SEQ ID NO: 40257 - DNA, 269 bp, Glycine max
  Clone ID: 700941605H1
gcagtggagaggtccaacaagcaattccccttttacagaaagcatatggagatagcatgcataaagttttgcatgttggtcctgatacttgttatgtggtctctaaattgctgaaggaggatgaaactgacgccttgggaatagaaccatatgatatagaggatgctgataataattgcaaagcacttatacgtagaggcagtgtgcgtgtgtctgatatcaagtttcctcttccatacaggccaaaatctttctctcttgtaattgtt

SEQ ID NO: 40258 - DNA, 274 bp, Glycine max
  Clone ID: 700941606H1
gattcaacccatcgagaaccaactcctgaaggttaggacaacattcaatattggctatcgaaactttatcacccataaggttggcctcccaacaatagcttctacggatacgaagttctcttaaaaggttgcaaccctccaaaactgcaacaagtccttcgtcactgcacatgccattcatctcaagatgcaaaacttctaagctggaacgttttgaaatcgcttttgagatagaaaaatcgacgccctccaaataaagggctttgagcgatga

SEQ ID NO: 40259 - DNA, 269 bp, Glycine max
  Clone ID: 700941607H1
agttcacaacattggttttggttgtggggaggacaatgaaggtgatggatttgaacaagcttcagggttggttggtcttggacgtggagctttgtccttggtttctcaactcaaggaaccgagattttcttattgtttgaccccaatggatgacacaaaagaaagtattttgttgttggggtctttgggtaaagtgaaagatgcaaaagaagtggtgacaacacctcttctcaaaaaccctttgcaaccttctttgtactatctttctc

SEQ ID NO: 40260 - DNA, 210 bp, Glycine max
  Clone ID: 700941559H1
atgaattctgatttcgacattgtaacagctacactgaagggatctcaaagaattcatgatgttccaaattcagcagatcctttcatgaatttggctacagcagagattaaggcaacactagttgagaaatataggcgttcaacatatgccagaagggcaaaaaacagaattcaagaactgtctaccgatgaagggcttcaacctccacac

SEQ ID NO: 40261 - DNA, 268 bp, Glycine max
  Clone ID: 700941608H1
agtcgctccgcaccagtttcaacgcacggatatcttgttgtttggagcgatccgagaaaaactctgtaaacatgttggtttaccaggacctccttacaggtgatgagcttctctctgactccttccgttacaaggaaattgagaatggaatgctgtgggaagttgaggggaagtgggttgttaaaggagcagttgatgtagacattggtgcaaacccttctgctgagggtggaggagaagatgagggagttgatgatgcagctgttaa

SEQ ID NO: 40262 - DNA, 270 bp, Glycine max
  unsure (1)..(270): unsure at all n locations
  Clone ID: 700941609H1
taaagaanagaccatcaaagtttcacttcagccttatccggtttagggtttcggtttttgacccaacctttgacgtatcgaaaccttaagtttcggatcaggtctgagcaatctggttggtagaacctttggtcttagagagtcaagttttatgtctgaattagacgatcaaattcctactgccttcgatccttttgctgatgcaaatgctgatgactcgggtgctgggtcaaaggagtatgtgcatattcgcgtacagcagcgaaatgg

SEQ ID NO: 40263 - DNA, 240 bp, Glycine max
  Clone ID: 700941492H1
aagaagaagaagaagcgttctttcggagagttcgaagatgtcgggcgttaccaacaacaacgaggaagacaagaagccaaccgaacagggagcacacatcaaccttaaggttaaggggcaggatgggaatgaagtttttttcaggatcaagagaagcactcaattgaagaagcctatgaatgcttactgtgaccgacagtcggtggatttcaactccattgcttttccggttgatggacg

SEQ ID NO: 40264 - DNA, 242 bp, Glycine max
  Clone ID: 700941493H1
ctttcgaaagattttatccaattgaaattttaaaaatgactgggataaacttaagaattcaattattgaaattgaataagtaaacaatttaattggattggtcgaatggtatcaaaaaaatggagtactaactcccatttcttatttattattgaattaaccgatcaacttgctttgttatcgaacatttctttttgatttcaaaaattttccggaaaaaatttgaatctatttttatatgc

SEQ ID NO: 40265 - DNA, 244 bp, Glycine max
  Clone ID: 700941494H1
aggcagaaagcaagctcatcctagagattgaaaaatggcagcagcctcctccatggctctctcttccccatccttggctggcaaggccgtgaagctgggcccatcagcccccgaagtcgggagggtcagcatgaggaagaccgtcaccaagcaggcctcctccggaagcccatggtacggcccagaccgcgtcaagtacttgggcccattctctggcgagcccccgtcctacctcactggcgag

SEQ ID NO: 40266 - DNA, 244 bp, Glycine max
  Clone ID: 700941496H1
gttcatggatctggggtttgttttctcagaggaagataaggactcaagtttggcttcaatcattcctggcttgcaaaggctagggaaaagtgatgaggaagaagaggattctgaattagggtcctcagtccaaagaccttacctctctgaagcatggaaggctcaagaaaggagaaagaaagagaaccctctcgtgaattggaagattcctgctctgaacaatgaaattgacataaaagatagt

SEQ ID NO: 40267 - DNA, 249 bp, Glycine max
  Clone ID: 700941501H1
caagaatggcacttcgttgcttggtgatgtccctttctgttctcttcactcttggtcttgcgagagaaagccatgccagagacgaagatttttggcatgctgtttggccaaacactcccattccaagttcattgcgagatcttctaaagcctggccctgcaagtgttgaaatcgatgatcaccctatgcaaattgagaaacacagtacccgaaaacgttcttctataaagaagaccttcatccaggcaa

SEQ ID NO: 40268 - DNA, 215 bp, Glycine max
  Clone ID: 700941504H1
cagatgagcatggagatggcgaagcaaacgctgtcgttgcggcactcgcggcgttggtgctactcgcggcgagtgtggcggtggatgctcaggagaactcggacgtgaagacgctggtgaagcacaagcacgcgaagaagtactgcgacaaaggatgggaatgtaagggctggtcaatttactgttgtaacctcaccattaccgattatttccac

SEQ ID NO: 40269 - DNA, 240 bp, Glycine max
  Clone ID: 700941505H1
agattggttatgttggaccacatgatgcctctggtggatgaaagttggcgagtcaaatttgagagagtgagagaggatggtttctccaggctgcaaggtctttgggtccttcgggagatcgtacttcctatcataatgaagctgttgacagcattatgtgtaccctacgttttggccaaaggtgtatttccagtgcttgggtatcccttggtgataaattctgccgtctatcggtttgca

SEQ ID NO: 40270 - DNA, 143 bp, Glycine max
  Clone ID: 700941506H1
ggcacacgcacaagcacgatgaaagtaaatcaaatcataggcagttaaatctctgcctgcaacattctgagttcgacagacagtgataacctcaaatcatatatcatttgctgtttcagttcccctcttccactcttatcgtc

SEQ ID NO: 40271 - DNA, 240 bp, Glycine max
  Clone ID: 700941509H1
attttctcctccaatttcaatttctcgtcgtccctcattatggctcgtctctcgatcgtcgccatcgtcgccgccgtgctcctcctggccctctccgccacccccgcgacggcgcgtccctgcaggagcttcataatctcctcctactccttccgcaaccctaactccaacacgttcgccaccatcaccgagaaccgatccttcacccctctctacatcaccgacaaacccccctcctat

SEQ ID NO: 40272 - DNA, 236 bp, Glycine max
  Clone ID: 700941510H1
cccaacttgagagctgcattctgcttccgattctcaaactcaaaggagacgagacatggcttatgctgcaatgaaacccactaagcccggcttggaggagtcacaggagcaaatccataagattagaatcaccctttcctctaagaacgtcaagaatctcgagaaggtttgtgctgacctggttcgtggtgccaaggacaagcatctcagggtgaagggacctgttaggatgccaa

SEQ ID NO: 40273 - DNA, 235 bp, Glycine max
  Clone ID: 700941511H1
tccactaaagaggagcaatgtcctgccattttgtatttgacaaaatggcttatttgggattgagttttgaatgctgatctaatgagaagttttcgtagcctcgcagggattgcaagtttaagtagcaataagtattttgtatgtacagtatagcaacagatgtaaacacagaataagcctttaatcagtgagtgacttgaacagcattcataaccccaaagatgccccatgcagt

SEQ ID NO: 40274 - DNA, 232 bp, Glycine max
  Clone ID: 700941514H1
aacggaaccggcgttggatttggtttcggcgtaggttgcggtttcggtataggatggggtttcggaggtatgccattgaacttattgggtctcggtgctcgtggaggttgtggcgttggagtagggcttggttgggggtttggtactgcctttggtagcaagtatcgttcctcacgggtcacatttcaaggagtggattttcatagcaaggagaaagttaacagcacggagt

SEQ ID NO: 40275 - DNA, 236 bp, Glycine max
  Clone ID: 700941515H1
cacaaggcggaaagcaagctcatcctagagttttaaaaatggcagcagcctcctccatggctctctcttccccatccttggctggcaaggccgtgaagctgggcccatcagcccccgaagtcgggagggtcagcatgaggaagaccgtcaccaagcaggcctcctccggaagcccatggtacggcccagaccgcgtcaagtacttgggcccattctctggcgagcccccgtcctac

SEQ ID NO: 40276 - DNA, 122 bp, Glycine max
  Clone ID: 700941516H1
ggaattcggatcgagccaagcctaccttgatcgccgtctcagtgtctgtgatagagtgatgtttggtcacagaacgagcgactatgatcccaattatcgatggggttcctcagatgaagaaa

SEQ ID NO: 40277 - DNA, 171 bp, Glycine max
  Clone ID: 700941519H1
gtgttgatgtacgtatgtagaaggagtgaacgggaaccagagctgtcctcaatgcaacactcgctataagcgccacaaaggttgtcctagagtagctggagacgaagaggacaactttgatgcagatgagtttgatgatgagtgtccggtgaagaatcatcttgaagatct

SEQ ID NO: 40278 - DNA, 220 bp, Glycine max
  Clone ID: 700941524H1
catgaagagacaacaaaaaaacatgtcatcttcactcatcttaccattaaccattttgacagtactttcttttctctccttggccattggccaccgtgctcaaccctgcagtgaagaattcctcaagctagcccaacaaaagaacctctcagactgcaagacactgcgcactctgggggcagagtttgcttggtcctaccacaatgtcacgaataaatcc

SEQ ID NO: 40279 - DNA, 80 bp, Glycine max
  Clone ID: 700941526H1
tgaaacgctgcttagtttgatttaattgcttttgttcatcatggtgtattgctaaatttgaaactttccgtttactcgaa

SEQ ID NO: 40280 - DNA, 232 bp, Glycine max
  Clone ID: 700941527H1
cgagcatcatggcctcgagagcagtgctattgttggctatgtgtgtgcttccggccatggttgtggccattcgcccagcaaagaaccctttttgcgtgaagggtcgcgtctactgtgacccttgccgtgctggttttgagacctcagcaaccacctacattgccggtgctgagattatgttgcaatgcaagagcagggttagcaacgaggttgtgtacacctttaaggggta

SEQ ID NO: 40281 - DNA, 233 bp, Glycine max
  Clone ID: 700941531H1
tttgaatctttcaagaatgttccagaacccttcaaaaccctctcttctctctttcttcgatcgcttcgcctgatattctttatggctgagatcaagcaaaaatgagcgtggttggatttgattttggtaatgagagctgtattgttgctgtcgcaagacaaagggggattgacgttgtgctcaacgatgagtcaaagcgtgaaacacctgcaattgtatgctttggtgacaaa

SEQ ID NO: 40282 - DNA, 247 bp, Glycine max
  Clone ID: 700941532H1
tcggctcgagcttttacttcgttaataccaaacatgtcattatgtttagtttttcttctaaccaaatgcttcctacagtaccttgtttgagtcttggtaatttgccaaaagttgggaaagagtttggatgaataaatgataaaagttgacgcaagtaaattgccaaaattaaaactttagccaggtaatttgacaaaaagtctaaaggttaaagcaggtaccttctttttaatgctagaaaagaatc

SEQ ID NO: 40283 - DNA, 242 bp, Glycine max
  Clone ID: 700941533H1
atcgacacctatggaggatgaggtgcacatggtggtggtgccttctctgggaaggatcctaccaaggttgataggagtggtgcctacattgtgaggcaagctgcaaagagcattgttgcaaatggacttgctaggagggcaattgtgcaagtttcctatgccattggtgtgcctgagcccttgtctgtgtttgttgacacttatggcactgggaagatccctgacagggaatcctcagcatt

SEQ ID NO: 40284 - DNA, 236 bp, Glycine max
  Clone ID: 700941537H1
gtttcaatgggagacaaaggctttatcaagcctttgcttgaaaagcgaggtaaagtacatttcgataaggtgtgtattaaaccaggcaagccatttacatttgcagagattgactttcaatctacagagagcacaattctagcttttgggctacctggaaatcctgtcagctctttagtttgcttccatctctgtgggggtccctgcaatacgctaccctgcagggtggacaaatc

SEQ ID NO: 40285 - DNA, 236 bp, Glycine max
  Clone ID: 700941540H1
ctcgagccgttcgttccaatcggttacacattcggtgccggcatgtttgagatggagaaagtgacaggtggaagtccatatggtgctggaacttacgccggtgatggctcaagacagccaagtgagcttgagttacaacaagcattccaccaagggaagtacatctgctggcatcacaaagaagctcaagcaagctgcataatgttgccttgccttcatattagatcatactatta

SEQ ID NO: 40286 - DNA, 224 bp, Glycine max
  Clone ID: 700941541H1
caggatcaagagaagcactcaattgaagaagcttatgaatgcttactgtgaccgacagtcggtggatttcaactccattgcttttctgtttgatggacgccgcctccgagctgagcagactccagatgagttggaaatggaggacggggacgagattgatgccatgcttcaccagacaggaggttctgttgtctgaaggatgtgattacctttgctcctcatta

SEQ ID NO: 40287 - DNA, 246 bp, Glycine max
  Clone ID: 700941490H1
ggcattggtttctctctctagcttggacgagtgaattagattcatcatcaagatgtcgtctctgatagcagaagatgtgaagagcagatcagaggtgtaccacggggacgaaatgtgccaagtgaagtccaaggagcttctcaaggaaatcgccctccccaacggccttcttcccctcaaggacatggaggagtgcggctacgacagacaaaccggcttcgtctggctcaaacaaaagaagagtta

SEQ ID NO: 40288 - DNA, 78 bp, Glycine max
  Clone ID: 700941542H1
atcttaccagtgaatttgagaagaaatacgaaccgaccattggagtggaggttcacccattggatttccacacaacat

SEQ ID NO: 40289 - DNA, 82 bp, Glycine max
  Clone ID: 700941546H1
tcgcagaggaaaaccctagctagtagtctcagttcgtttgagagagaaaaaatggcagagggtctcgttctccgcacaacat

SEQ ID NO: 40290 - DNA, 232 bp, Glycine max
  Clone ID: 700941548H1
gttacaccgtccatgccaccttccaagatatcaaggatgaaaatgagacgaaacatttggaggaaatggaaggagcaaagagtcatctccatttttttgaaatggatcttcttgacatcgactccattgccgctgccataaatagttgttccggcgtaatccaccttgcatgtcctaacatcattggtcaagtcgaagatcccgagaaacagatattggaaccggcgataaa

SEQ ID NO: 40291 - DNA, 234 bp, Glycine max
  Clone ID: 700941555H1
ggatcttcatccactacctttccgcaacggctaatgaataatgtaaggagtctaagaggcagattatcaatgttgaggatgttttcaaagctcttgaggaaactgagttccctgagtttcttcgtcctctgaaagcttcccttgaagagtttaggaagaagaatgctggaaagaaagctgcagtgtcaaagggaaaggatgatgagccgagaaagaaaaggaagttggaaggtg

SEQ ID NO: 40292 - DNA, 229 bp, Glycine max
  Clone ID: 700941556H1
ggtgaatgcgtagaaaaggaaaataaagaaattagcgtgaaaaatgttgggtgtgttcagcagctccatagtgtcgccgccggaggagctcgttgccgccggcagccgtacaccgtcgccgaagatgacggcggcggcgctgcggaagtggttcgaggagaagaacccctccgcagtgtcggtggaggtcggagagcatgtccagctcgcttatacccaccagaacgag

SEQ ID NO: 40293 - DNA, 181 bp, Glycine max
  Clone ID: 700941408H1
cactagatggcttcctctgttgctttagtgttgggtctatgtctagcactcaacatggttctgccgacacgtgcagctacccacacagtgggagacacctcaggtttggcactcggtgctgattacagtacatgggccagtggcttgaaattgaaagtcggagatagtcttgttttcaatt

SEQ ID NO: 40294 - DNA, 257 bp, Glycine max
  Clone ID: 700941410H1
cttcttattggtcatgttaataagatgagtcataggaagtctcattcacatggaagcatacccttttcatgggaagacaaacccggggtttgtaagacccccaacagtgatttccctctaaacaacataggaatacgataaaaaatcatgttctcccttaccaccaccaccatttgctcctacccatttgagcaactcaaggagaatgttggaaattcaagacaacgaggaagattcctctgcctccatgtccatta

SEQ ID NO: 40295 - DNA, 262 bp, Glycine max
  Clone ID: 700941411H1
caccaatcaaaacaaaacaaaaacaccgccatctctctctctctctctctctctgtgatcgcttgcggttcatcactgaggcagtaaaaaatgtctgacacagaagaccatgcagcatcagagtattccaatggtgacgaatcccctccaaagcccagacagaggttcagggacagatctaaggagatgctgtccaaacaagctgtgcagaccaagcaaatgctttccaaacaggccgttaagattgccaaacaagctgaag

SEQ ID NO: 40296 - DNA, 83 bp, Glycine max
  Clone ID: 700941414H1
cttgaagagtagaaatccacttatggagggtgcaaagagttgctcgtgtgttgctacaatatctgtggcattagtgttgctcc

SEQ ID NO: 40297 - DNA, 265 bp, Glycine max
  Clone ID: 700941422H1
ctgagatgttgcagtgttgcttccctcctaacctatctgcgcatacatgcaagcatggttacctgcatgctgagtatggtactgcaatcacatgggaccatgcattacagacaagtttgctgtattttgagaacaaaactcacaaccttttcacttgcaactggcactcgtttgtcgcgaactgtctgaatcgactgtgttatggtggatcaatgagttggaatatggtgaatgtaggagctttggtactattcaaggggcactg

SEQ ID NO: 40298 - DNA, 266 bp, Glycine max
  Clone ID: 700941423H1
ttcttcaccaccatcacaacaacttcaccaacactaactcaacccgacacacacccacacaagaaaaaatgtccctcctttcctccggtggcttcttcggccgcagaagaaacgacccgccaccccaccaacccacgtgggaccactaccaggcccaggaccatcaccaccctctgggagtttcccagccccaccacccaccccccttcatgtccttccccagtgactcctcgccggtgcgcaacaccgccgtcatagagtggaag

SEQ ID NO: 40299 - DNA, 255 bp, Glycine max
  Clone ID: 700941424H1
gcagaaactccatcaccgtcaacagaatccactagttcatggcgcgcttgcatcgcactagatccatgacgtcgtcgaacagcaacagttgctgctacaacagcacgagccctacagtgggatggtctcgctgttcgacaccgccacgttcatggttgtggtcaccacggtcacgttgcggacctcatcacggcggcaaaggagtcggtctaccaccaacgtcgaggccaaggacacgtggaacaaccaagtagg

SEQ ID NO: 40300 - DNA, 100 bp, Glycine max
  Clone ID: 700941425H1
cgaacctagctattcattaagtagtagctcagaatggaagtggaagagagacgaaacttgtcgttgaaccatctcaaggagctgccaccccaggtcatcc

SEQ ID NO: 40301 - DNA, 254 bp, Glycine max
  Clone ID: 700941427H1
tcacaatccaagcctgatggggcagtaaaaaagatccggaaacctaagccttggaagcagcctcagcccataacaaagactcaggcttacacagattacgtgaatgagttttgggatacagctcctcactattgtggccggaaagagatttgggatgctcttcgagctgctgctgaggctgatctaactttagcacaagtaattgtggatagtgctggggtcattgtccagagttctgatttgacagtatgcta

SEQ ID NO: 40302 - DNA, 252 bp, Glycine max
  Clone ID: 700941432H1
gttaatccctgcgcggatcgagcagctagaggaaaaggctcatggcaatcaagtgatagtggaggtgcattttatactactaacactggaagtgttccctcctcaaactcaaggctctcaccccttccaccagagccttatgctcgtggggcaactattgacatccccctaaataatgcaaaggacgcaaaagcaaatgagaaggaacttcaagctaaagaggctgaattgaaaagatgggaacaggaacta

SEQ ID NO: 40303 - DNA, 262 bp, Glycine max
  Clone ID: 700941438H1
ggaacttcagattgctggaggagcttgaacgtggtgaaaaaggaattggagatggcacagttagctatggaatggatgatggtgatgacatttacatgcgctcttggactggcacgattattggcccccataatactgtacatgaaggaagaatttatcaactgaagctgttttgtgataaagactacccagaaaagccccctagtgttcggtttcattcacggatcaacatgacttgtgttaatcatgaaactggagtggt

SEQ ID NO: 40304 - DNA, 260 bp, Glycine max
  Clone ID: 700941439H1
ctgaacttaatctaaagataatggataaagacaactttagtcaagatgattgtcttggcgtggcaaccattcatctggatccagtgtttgaagcgggtagcattccagaaactgcttacaaggttgtgaaggacgaagaatattgtggagagattaaggtggctctcacttttactgttgagaaatatgaggagcaggattatgctgaacctgaagagagctatggtggatggaaaatccagttggggaattttaaagtg

SEQ ID NO: 40305 - DNA, 189 bp, Glycine max
  Clone ID: 700941441H1
attctgctctcggagagattataggtatcgcggaggaggctcacaacgcgagaatattatagagcaggagtgtgatcgcgagactcgctcataggggcgccacggagcactcgctgtgtaagcacctcgtaccgcatctcgtcgctgtgtatcacgtgatctcgtacgacaccatatgggctcggacca

SEQ ID NO: 40306 - DNA, 260 bp, Glycine max
  Clone ID: 700941449H1
ggaagatatgacactcaattccattcacttttcaggatcctggacacagcacatcatgatgagtttcatcagcctaactttggtggttcttcaataaaaaaaggtggtccaagggaaccttggcacgacatccattctcgacttgaaggccctattgcttgggatgttttgtgcaactttgagcagagattgaggaagcagggaggaaaggacttacttgttccactgagagaccttgttgatgtcattattcccccatc

SEQ ID NO: 40307 - DNA, 227 bp, Glycine max
  Clone ID: 700941457H1
atctctcttctcttctgattggaactgctgttgtttgttttgctattatttgtaaaaccatttgtttttaattgagatcgttgcatgtatggtttaatataatcttaggcaagtagcagcaaagatgcttctctgtgacatgttcaattattaatttatatgaattgcgctttaatttgttgaaaaaaaaaaaaagaaaaggggaaaaagaatagggaatttggaga

SEQ ID NO: 40308 - DNA, 257 bp, Glycine max
  Clone ID: 700941466H1
atcacaatggcttggtcctctaattgaagtgattagattctctaccaagtcaattgagagggagattaactcagtcaatgacaaccctttgattgatgtgtcaaggaacaaggcacttcatggtggtaacttccaaggaactcctattggagtctccatggataatacacgtttggctcttgcttcaattggtaaactcatgttttctcaattctctgagcttgtcaatgattattacaacaatggtttgccttcaa

SEQ ID NO: 40309 - DNA, 254 bp, Glycine max
  Clone ID: 700941467H1
gctgagtctgtctgatcgtcaattgcagatgtggttctgtcaccggagactgaaggaccgaaatgccaagaagctgcaaaatgattcatcacttgcgtcgggtccggcggtgggtgaggagggtgttgagcaagtgacaggggctgatgttgtccgtgattgtggtttagcttctgggccattcgatcatctggattcgcggagaattgcgcctcggcctgggttgacggcctttcctagtatgggagctggat

SEQ ID NO: 40310 - DNA, 254 bp, Glycine max
  Clone ID: 700941470H1
ctgattctgaggaggagctgaaagaggcattccgggttttcgacaaggaccagaatgggttcatctctgctgctgagctccgccatgtgatgaccaacctcggggagaagctcaccgatgaagaggttgatgagatgattcgcgaggccgatgttgatggcgatggccaaataaactacgaggagttcgttaaggtgatgatggccaagtgatcatcacattatggccacaaaaacctaaatgaagaaatgttg

SEQ ID NO: 40311 - DNA, 252 bp, Glycine max
  Clone ID: 700941474H1
ccgctcgagcggctcgagctcttaatttctctctgtctcgtttacacatctctccaacctttcactttcgtttctcagttttattcgaatccctctctcaatctcctttccaaatggccagcgttgaggttgcacagcaaacaccaacaacagttccagaaaatgaaacaaccgaggtaagcaagacccaggaaacaaccccagtcactgaggctcctgcaacagaacaaccagcagctgaggttcctgcaa

SEQ ID NO: 40312 - DNA, 249 bp, Glycine max
  Clone ID: 700941476H1
gcaaggatgcacatctttgtgaggagagggggtcccaactaccagaagggtcttctttgatgcgagcacttggagaggagattggcatccccattgtggtttatggacccgaagccacaatgactggtatatgcaaagaggcaattacagttcattacagccgctgcttaaggtcaacaacaccttcatttatagtattttcatggtgagtctgaagtgaacgttgattcttaatttccttttccattc

SEQ ID NO: 40313 - DNA, 236 bp, Glycine max
  Clone ID: 700941478H1
ggaagttatgaaaaatggaggggttggcatgattttggcaaatggtgtatttgataattatgaagaatatgttggagctgatattgtgaaaagagctcttagttaccctttgaaattaattgccaaaaacgctggtgtcaacggtagtgttgtcagtgagaaggtattgtccagcgacaatccaagatatggatataatgctgccaccggataatatgaaggattgatgtctgctg

SEQ ID NO: 40314 - DNA, 247 bp, Glycine max
  Clone ID: 700941480H1
gattatcctaagtctttgggaatagtgctgcaatggcttcaagtcaggaggaggtgacccttttgggagctactggaagcccatttgtgtgcagggttcatattgccctcaagttgaagggagttcaatacatatatgtcgatgaaaatttgaggaacaagagtgtactgcttctcaaatccatcccagttcacaagaaggttccagtgtttattcacagtgagaagcccatagcagagtctcttgt

SEQ ID NO: 40315 - DNA, 102 bp, Glycine max
  Clone ID: 700941481H1
cagcacaatgcgggttactgtgtggtcaagctaccatctctctctctctttcttagtgcctccttgccagtagttaaaattgcccaagaaactttcctattc

SEQ ID NO: 40316 - DNA, 254 bp, Glycine max
  Clone ID: 700941482H1
attgaagcgtggaaaaatgctcgtgacagcacaggttcgacacctgaggattatgcccgtttacgtggccattatgcttacattcacttggtgcagaaaaaaattaacaagaaacaaggagcagctcatgtggtggttgagattccaagcaatatgacagagaacaatacaaacaagaagcaaaatgagttatccactatctttgagattggaaagcctgaagtaaggcgtggccaagggcactgtaagctttg

SEQ ID NO: 40317 - DNA, 266 bp, Glycine max
  Clone ID: 700941407H1
cattttgatttcaatgtttcttataatggccatatttgaacatttgttcaaacccacgccaccagaatctatgctgcgacgttatcagattcaggaccaaccaggaaaacaaggaaatgcacaatcagttccagcatctaattatgcatctgatttctcagtcttaatgccagggcagcagtatcctacatacatcgcccaacctgcccctctgctgccttctcaaagggaaggggtttattggccttctcatgaacatcattttg

SEQ ID NO: 40318 - DNA, 236 bp, Glycine max
  Clone ID: 700941484H1
gccggatctgctaaaatacgcttgatccatatgggcttcctcgaccacttgtgggacgacatcgtcgccggcccaaggccggaaaacggtctcggcaagctccggaaacaccacaccttcactttccgacctagctccggcaatgaagcggagggcgggagcgtgagatcgtacggtgacgaatcgtcggaggaagcgactagagtgacgcgtagtatcatgatcgtgaaaccgcc

SEQ ID NO: 40319 - DNA, 73 bp, Glycine max
  Clone ID: 700941488H1
gctagaatggaatttcgatgctcagtcatctcttttaccattctcttctctcttgctcttgcaggagagagcc

SEQ ID NO: 40320 - DNA, 249 bp, Glycine max
  Clone ID: 700941489H1
ggagtcagagaaaccctaggtaagaagaaaagatgccggctggtcatggtttgagatcccgcaccagagattccttctctcgtcctttcaggaagaagggaaccatcgccctcaccacatacctgagaacctaccacgtcggcgactatgttgacgtcaaggttaacggtgccgttcacaagggaatgccccacaaattctaccatggccgcaccggacgcgtctggaatgtcaccaaacgtgctgttg

SEQ ID NO: 40321 - DNA, 262 bp, Glycine max
  Clone ID: 700941365H1
ggtttgctgtgtcatggatatttgatcagaattaaaatggagggcaattctgcgagaaacataccttgatcggttatctcttcggtatgagaaagaaggaaagccatctcagttatctgatatagacgtgttcgttagtacagtggaccctatgaaggaacctccactcagtactgcagacacagttctgtctatccttgctgtggattatccggtggacaaggttgcatgctatgtttcagatgatggtgctgccatgctt

SEQ ID NO: 40322 - DNA, 260 bp, Glycine max
  Clone ID: 700941366H1
cagacctagggatttcggccgtttgctccccaaaaaggaaagaagcagattctgtcctttgaaatcaacaagaaaagatgtcaggtgaagaggtagctgttgcagttgaggtacctgctacttcaattccaggtgagccaatggacaagatgactgctctacagcttgtgctgagaagatctctggcctatggtggtcttgcacgaggtcttcatgaaggtgccaaggtgatcgagaagcatgctgcacagctctgtgtt

SEQ ID NO: 40323 - DNA, 243 bp, Glycine max
  Clone ID: 700941368H1
gcagcattctctggctcgtcaaagaagttatcagacttgaatgtggccgacatacattcatgggctccagattttagaaggttgcaggatcttgtaaatgaggaaattagagttagattttctggtggtaaatctacggtattgcgcgaattggaagcggttgatgcctctgtgcagatattatgtcctactatccaagctggtgcagataccggtgagacagaatgcgcttgtgaagactgt

SEQ ID NO: 40324 - DNA, 81 bp, Glycine max
  Clone ID: 700941370H1
gcaaaagtcacctgatgagtgtaaggctttttatgcacatcctgttcattgtagtgcctttggttgtgcatcgccgccgcc

SEQ ID NO: 40325 - DNA, 101 bp, Glycine max
  Clone ID: 700941371H1
tcaagtttaaattttcagttctgttctgcttctaatggcgagtttcagaaacgctgcgatcaacgtcttcagagcgatcaatactaacaaagccaccatcg

SEQ ID NO: 40326 - DNA, 259 bp, Glycine max
  Clone ID: 700941372H1
ctcaaggagcatgtgatcaagccggtgatcccggagaagtaccttgatgagaagaccattttccacttgaacccctctggacgttttgtcattggaggtcctcacggtgatgctggtctcaccggccgcaagatcatcatcgatacttacggaggatggggtgctcatggtggtggtgccttctccgggaaggatcccaccaaggttgataggagtggtgcttacattgtgagacaggctgctaagagcattgtggcaa

SEQ ID NO: 40327 - DNA, 258 bp, Glycine max
  unsure (1)..(258): unsure at all n locations
  Clone ID: 700941373H1
cctttgttcactcttcttctcttgcggctagggttttagcgcagttgtntctagatttaaggaagatgggtaaggaaaaggttcacatcagtattgtggtcattggccatgtcgactctgggaaatccactaccactggtcacgtgatttacaagcctggaggcattgacaagcgtgttattgagaggtttgagaaggaagctgctgagatgaacaagaggtctttcaagtatgcctgggtgctggacaaacttaagg

SEQ ID NO: 40328 - DNA, 258 bp, Glycine max
  unsure (1)..(258): unsure at all n locations
  Clone ID: 700941374H1
attatcaactctttcaaaagtgagagaagagaaggaaaggaaacaaaacgcacaaaggannattatagcaatggcagaacaaaaccaaaaccagacaactggagatataaagcaccaagaggnaggccacaagagccatctcctgagtgatgctcnnnaccagtatattctggagaccagtgtctacccaagagaagctgtatccatgaaagaactgagagagttgacagcaaaacacccatggaacatcatgacaac

SEQ ID NO: 40329 - DNA, 261 bp, Glycine max
  Clone ID: 700941377H1
tgcaaaagagcgtcgtagtcgcaaccctaatcagaagaagcgcagttcaagcgagtgacagccaccagccatgggtcgtatgcacagccgcggtaagggtatatcctcttctgctttgccctacaaaaggacacctcctagctggctcaagatctcttcgcaagatgtcgaagaaaatatctgcaagtttgcgaagaaaggtttgaccccgtctcagattggtgtcattctcagagattctcacggtattgctcaggtcaa

SEQ ID NO: 40330 - DNA, 257 bp, Glycine max
  Clone ID: 700941378H1
gatcgacgatattcccgttccggacgccaccttcggtgtcaattcctccgccttcacatggttccctaacgccttgtaacgttcctccaatgtcggcgtataaattgatggctcgttgggggattctgacagtctcaaagtgtctggctcaaagaaaagggttaggtctgagtcatgtgctgcttctggctccaaggcatgtcgggagaagttgagaagggataggcttaatgacaagtttgttgaattgggcgcca

SEQ ID NO: 40331 - DNA, 246 bp, Glycine max
  unsure (1)..(246): unsure at all n locations
  Clone ID: 700941379H1
gtcactcatgtcccgatagagtgatgattgncatgatgtgatgattgccggaaaggtagctgttgtgtgtggctgcngagacgttggcaagggttgtgcttcggcacgtattaaaccgtggctcgtgtcattgtcaccgagattgatcccatttgtgcccttcaggctctaatgttgggtcttcaggttctcaccctggaagatgttgtctccgaggccgacatcttcgtcaccaccacagggaac

SEQ ID NO: 40332 - DNA, 258 bp, Glycine max
  Clone ID: 700941380H1
ctcattgagaccctcaccgcccttggcccgaggtccgctggtgctcctgcaacatcttctccacccaggaccacgccggcgccgctattgcccgcgacagtgccgccgtcttcgcctggaagggtgagaccctccaggagtactggtggtgcaccgagcgcgccctcgactggggccccggtggtggacccgacctcatcgtcgacgacggtggtgacgctacccttctcatccacgaaggcgtcaaggccgaggagc

SEQ ID NO: 40333 - DNA, 262 bp, Glycine max
  Clone ID: 700941381H1
cctcgagccgaatcggctcgagtgcattgtatctacccacttcacaaccaacaatggcaatggcaacccaagcctctctcttcaccccacccctctccggtctcaaacccagcgaccgagccaccgcgccatggaaacaatcctccaccctctccttctccacctcgaagcccctcaagttctcgcgaacaatcagagcagcagccaccgaccagaccacagaggcaccggttgggttcaccccaccggaactggacccaaa

SEQ ID NO: 40334 - DNA, 256 bp, Glycine max
  Clone ID: 700941382H1
gtcattgccttttggaggtgatggaagttatatggctccattcaccctacacaatgataatatccttaccagcctcatgagtcagtctgtgcaacctacaacctggtatagattggttgctgggctgaatgcacaactgcggttagttcggcgtggacgactaagagtaacatttttacctgtcctcggatggcttgagactcatgccaatcctgcattgagtgtccatggtgtgcgcattgaccttgcctggttt

SEQ ID NO: 40335 - DNA, 123 bp, Glycine max
  Clone ID: 700941383H1
ctaagcctgaacgaactcctgcgagatcctccaaggatccccgtggtacttcaaaagatccccgtggtacttcaaaagatccccgtgggtcgtctttgacaaaggaggggagatctacacgac

SEQ ID NO: 40336 - DNA, 75 bp, Glycine max
  Clone ID: 700941384H1
caaatcgagtccagcgagtttcaacccgggcagttccactacggccgtccgtagaagccgtacagcatgccctgg

SEQ ID NO: 40337 - DNA, 230 bp, Glycine max
  Clone ID: 700941386H1
tcgtagacagtgtgtgattctaagttataatcttggagtatgtgagatggaccatggatattactatttatacgatcactacaaaaataccatcaagtggttgaggaactttcattttcctaccctttaccattccttttatctatcttgtttttgcgttttcctgtctttgatatgttgagataagagcatgaaggctagcaagatatgtaagattcatttttttttat

SEQ ID NO: 40338 - DNA, 253 bp, Glycine max
  unsure (1)..(253): unsure at all n locations
  Clone ID: 700941387H1
tggaaaaagcagtatagagtgaaagaatgggtgagaaaagcaagattttgatcataggaggcaccggctacatcggcaaacatatagtggaagcaagcgcaaaggctggaaatcccacttttgctttggtgagggaatccacactctctgaaaaagaaaaagcacaactcatccacagttttgangtctgggggcgttaatttggtccgcggggatctgtacgatcatgagaagttcgagaaagctatcaagc

SEQ ID NO: 40339 - DNA, 255 bp, Glycine max
  Clone ID: 700941388H1
caaagaggtggcagatttggtgatggtggtggtcgtggttaccggtttggtggaagaggtggaggaggcaggaatggtaggttctccaatggtggcggaagaggtggacgtggcggcaactggggtggaaagagatggtgaagctgagaaaggacttagggagttgagttttcactctgctcaatgtgggaggagcattgctgcgtgatacaaccacatggagagatgactactacagttgtgaatgaagaaaac

SEQ ID NO: 40340 - DNA, 254 bp, Glycine max
  Clone ID: 700941389H1
gagctgcactttctaccactgatgttattgagcttccaacacaagataaactaaaaaccgtgcttgacaaagtgaaagacttttttggagatgcaaaggaatcttttggaaagataacatcattgggcactactgaaacagaggagtcagaggaagacacaaaagaaaaagccaaggttaaaggatgaaactatagctggaaatgatttgcttgaattgttatgagtagcctgtggccctatgagatcagaaag

SEQ ID NO: 40341 - DNA, 257 bp, Glycine max
  Clone ID: 700941391H1
tgaaattgcagaacgcttacattccaggatggtggttactaacaacaactacaaataagaggctgcaaaaaattgatactgagatacgagcattacttaaaggtgtcatcaacaaacgagagaatgcaatgaaggctggtgaagtcttgaacaatgacttgttgggcatgcttttggaatcaaaacgtatggaactacaagatcatggacagaatagcattattgcaatgactagcctagtggtaattgaggaatgc

SEQ ID NO: 40342 - DNA, 255 bp, Glycine max
  Clone ID: 700941393H1
ctgaactcatctcactacattaatattcccttgggtttcattacttgtgacatttagctttttttattgaaccgtgtcaatggccgctactatgaaggctttagcttttgttgctttgcttgttaccattaatgcaatagtgtgtgacagtagagtggcgagacaggaccttggattggaccttggtggggtgggaattggggtgggtgctggggttggactaggccttggtggtgggggtggtgctggttctgg

SEQ ID NO: 40343 - DNA, 257 bp, Glycine max
  Clone ID: 700941394H1
ggctctatggtctcgcccctgttgctaagtacttggtcaggaacgaagatggtgtctccattactgctctcaacctcatgaaccaggacaaaatcctcatggaaagctgttactatttgaaagatgcagtccttgaagggggtattccatttaacaaagcatatggaatgacagcctttgaataccatggaacggatccaaggtttaacaaggttttcaacaaggggatggctgatcactctaccattacaatgaag

SEQ ID NO: 40344 - DNA, 259 bp, Glycine max
  Clone ID: 700941395H1
atttcttttaatttatagctatcttctttaataagataagatctcatccttcactaccaaaaaagatgaccaaggtcactgccctatttttcaccttattactctgctccatgctcgtccatgccatgtccatacgccttgaaccagcttttcaccaagaatccttagccaaaccgcaccaacagagcgttgaggcggttgatgagagctgcgaaggcgttggagaggatgaatgcttgatgaggagaacacttgccgc

SEQ ID NO: 40345 - DNA, 255 bp, Glycine max
  Clone ID: 700941364H1
tgctatcaagtaatggcagaattctttgattctcctctaatgatattgtgtattattgggtcttatgcaaattttcacaacttgttattcataaatgctactccattttgggattggtccttctcaatttgtcttacataatgttgtctttctcagggaggaatcagagggcaagttgaagggaattcttggttacactgaagatgatgtggtctccaccgactttgtgggcgatacaggtataaattatgttaa

SEQ ID NO: 40346 - DNA, 189 bp, Glycine max
  Clone ID: 700941401H1
aaagttttcattaaaggtgtatacagattgtcgaagtgaggcttaattttcatagaagaacagcacaaattaaaaactgtttaagttttctccttaatttttattgtttttaattctcttcattgttggcttggtttggagacacttgcaacaagttcacaatttaaccacctgttacttgtattgaaa

SEQ ID NO: 40347 - DNA, 251 bp, Glycine max
  Clone ID: 700941405H1
ttcctttcaatctaaacaagtactttccctctgtttaattgtgcacaagagctcaatcaaatatataaggtggtctcatcatgttcaccacggtctagttctaatatttaattgaattttcttacacgccatagctctatgaatagtccaccctattatattttatagcattttgtaatacatttattttattgcccttgtttctgtaaatctgatcaagaaagtggattgacgtagctaaaaaaaaaaga

SEQ ID NO: 40348 - DNA, 264 bp, Glycine max
  Clone ID: 700941323H1
tgggttcaacaggtgagactcagattactccaacccatgtatctgatgaagaggcaaaccttttcgccatgcaactagccagtgcctcagtactccctatggttctcaaatcagctcttgagcttgatgagttggaaatcatagccaaggctggccctggtgttcacctttccccctccgacattgcttctcggctcccaacacacaaccctgatgcacccgttatgttggaccgtatattgcgcctcttggcttgctacaata

SEQ ID NO: 40349 - DNA, 265 bp, Glycine max
  Clone ID: 700941324H1
ccgaaagccgaaccttaaacacaaacgccaaatctagcaactattgagttttgttttctttgaaacatcgtgtgcacagtaccccagaagatcgaacaaggatctccacgaagacaaacctctgttctcaactgtgtttctttacctctcacctactttcagaccataccagattgactaggctgagaagatgcagcagacaccgcctatgattcctatgatgccttcgttcccacctacgaacataaccaccgagcagattcaa

SEQ ID NO: 40350 - DNA, 263 bp, Glycine max
  Clone ID: 700941325H1
ccgttgctaaagacaacaagaacaagaagacggcccctcttaccggccgcccttttttttttcatcttcatcatcctcatcatccctaagagattctgttgtacattacaaggctaggaaagtgtaataataaaagcatacatagcgttttttattttgacatacatattatatatagtgcaaatttgaaaggtgaagcctaccaactcatctgtaaaattgtgaaagcaggaaagttgatgttatagtaccttttgtaatca

SEQ ID NO: 40351 - DNA, 261 bp, Glycine max
  Clone ID: 700941327H1
gggaaggaagagcctgaaatacctgatgctaaccaattagccattgagtttagtaatcgtcgtagaagcgttagaaccttactgattcttggaaagaggtttctgaagaggggagactggcctttcaggctctgttctccagagaggtgttgcctcaaagcttttcacctcctcatgctttgaagaatacggatcatcaaatggacaacgccaatgataacaagcaaaacatagatgacaaagatgaagatcttgacggca

SEQ ID NO: 40352 - DNA, 261 bp, Glycine max
  Clone ID: 700941328H1
atgagaatggacaatatttggctgaacatgatattgtcaacaagatccttggcttgctgataggtagccatgaaaccacaagtactgtttgcactttcgttgtcaaataccttgccgagctccctcaaaatatttatgaaaatgtctatcaagaacaaatggcgattgcaaaatccaaagctccaggagagttgttgaattgggatgacatccagaagatgaaatattcatggaatgtagcttgtgaagtaataaggctta

SEQ ID NO: 40353 - DNA, 84 bp, Glycine max
  Clone ID: 700941329H1
gggaagagcacaccaatcacggaaatcacacctccaccaatccctgaagagaatagtactgcaattaagagtggaaaagtccgt

SEQ ID NO: 40354 - DNA, 262 bp, Glycine max
  Clone ID: 700941330H1
ctacaacatccagaaggagtcaactctccacttggtgttgcgtcttcgtggtggtatgcagattttcgtgaagactcttacgggtaagactattaccctcgaggtggagagctctgacaccattgacaatgtgaaggccaagattcaggacaaggaaggcatcccaccggaccagcagaggctgatttttgctggcaagcagctcgaggatggaaggaccctcgctgactacaacatccagaaggaatcaacccttcacctt

SEQ ID NO: 40355 - DNA, 266 bp, Glycine max
  Clone ID: 700941333H1
agtgaaatggcttccaaggctgcacttctcttgtgtttcaatgttctcttcttcaccgtggttagctccacatatgtgccatgcaacccacgccccaaaactccaaaacacccacctgtcccaaagccaccttccccaaagcaagcaagttgccccaaagacactattaagtttggtgtgtgtgctgatgtgttaggtttgatcaacgtgcaacttgggaagccaccaaagaccccatgctgcaacctcattgagggtctcgctga

SEQ ID NO: 40356 - DNA, 128 bp, Glycine max
  Clone ID: 700941334H1
gcaagtagcagcagcctcaaagtgccctacaccctcctcacttaagctctcagcctgatccctaaaatgaagatcaaacaacaatctctcttctcagcctcaattttactagttatagcacttattac

SEQ ID NO: 40357 - DNA, 217 bp, Glycine max
  Clone ID: 700941339H1
gaacggagcagctatgtaaaatataaaataccaagtatgcatacaaaatgtgaaattgagatccaaatttagggttgaaagggcatgcatttaaaatgagatccaaatttaatgttgaaaggtgacagagtttggccaccattattatttattattctagaatcccaagcgctaaaaaaaaaaaaaaaaagaaaaaaaagaaaacaagatatgtaaa

SEQ ID NO: 40358 - DNA, 260 bp, Glycine max
  Clone ID: 700941340H1
cttttggaaaccactaagccaattcgaactggagccaggccaatcctactatctgctaccattcagcaacagaaacaacaaccacaacaacaacaacagcaacaataatatagacactctaccatgtgatggtgaaaatgttaacgttgttgtgagacaagggcatgttagatctcaaagtgttcctacaatctcaaaccctgccttgtatagaatgtccttggactaccaccaccacaaccagggaatggggttgctca

SEQ ID NO: 40359 - DNA, 262 bp, Glycine max
  Clone ID: 700941341H1
ttattctcttaaaagttattaagagcttttgcttttctttctgcgcgcttttcccaattaagtagttcttccttttctcaaagcaaaaaaaatgttcatcgagagtttcaaggttgagagtcctaacgtgaagtacacagagactgagattcagtccgtgtacaactatgaaaccactgaacttgttcacgagaacaataatggcacttatcagtgggttgtcaagcccaaaactgtcaaatatgaatttaaaaccaacacc

SEQ ID NO: 40360 - DNA, 257 bp, Glycine max
  Clone ID: 700941345H1
catattttggagaatccgaaaaacacgttaaagaaagtcccattcccactaccgaagcaaaagaaagaagatgaagcagcagagagtggagtttatgggcatgggcatgggcatgggcatgggcctgggccttttggtggtgatgatggcatgtgggtcggcgagtggtgcggatgatttggcaaccaagtgttcagcggtgattcagaaggtaataccgtgtttggatttcgcgaaggggaaggaagaaacgccga

SEQ ID NO: 40361 - DNA, 173 bp, Glycine max
  Clone ID: 700941346H1
gagacagtggattcgactcaccaaatcactcttcctcgagggctacctggatggtcagtttctgcaacttcagcagcttcaggatgagaacaaccctgactttgtggtcgaagttgtctctctcttctgtgaagattctgaaaggcttctcaaagatctcacctttgccctag

SEQ ID NO: 40362 - DNA, 259 bp, Glycine max
  Clone ID: 700941347H1
gaagattctggtgaatgcgttgaaaaggaaaataaagaaattagtctgaaaaatgttgggtgtgttcagcagctccatagtgtcgccgccggaggagctcgttgccgccggcattcgtacaccgtcgccgaagatgacggcggcggcgctgcggaagtggttcgaggagaagaacccctccgcagtgtcggtggaggtcggagagcatgtccagctcgcttatacccaccagaacgagtcgccgtttcagcccagatcc

SEQ ID NO: 40363 - DNA, 263 bp, Glycine max
  Clone ID: 700941348H1
gacgggtataccctcgccgactacaacatccagaaggaatcaacccttcacctcgtcctccgtctccgtggtggcatgcagatcttcgttaagaccctcaccggcaagactataaccctagaagtcgagagctccgacaccatcgacaacttcaaggctaagatccaggacaaggagggtatccccccagaccagcagaggctgatcttcgccggcaagcagctcgaggacggacgtacccttgctgactacaacatccagaa

SEQ ID NO: 40364 - DNA, 263 bp, Glycine max
  Clone ID: 700941349H1
aacaaaatttagaaacaaaaacatgttggtgaaattgtacggtccaacctatggagcccccaagagggtgctggtgcgtctgattgagaaggaaattgagtttgaaacagtacatattgatctcttcaagggagagaataaggaacctgagttcctaaagctgcagccatttggatcacttcctgttattcaagatggtgaatatactctctatgaatctcgtgcaaatatcagatacttggcagagaagtataaagaccaag

SEQ ID NO: 40365 - DNA, 128 bp, Glycine max
  Clone ID: 700941352H1
gttccgcatccaccaaggcatgcatatacggcatccagtacggcgacagttccttctcagttggctacttcagccgcgagcgcctcaccgtgaccgtcaccgacgtcttcgacaacttcctcttcggt

SEQ ID NO: 40366 - DNA, 262 bp, Glycine max
  Clone ID: 700941353H1
cgacaacggttcaaacaattctgcatttgctgaccctcttgcatttggtccaggccatgttaaccctgcgagagcttctgatccaggcttagactatggcatctccactcatgattacttgcattacttgtgcagtttgtggtccacatcctcccagtttgctatactgtcggtcggttcttttaaatgtgacatagaagcatctcatcgcgcaggcgacttgaccgacgcctcatgtgctgagctaactagggcgagtgct

SEQ ID NO: 40367 - DNA, 255 bp, Glycine max
  Clone ID: 700941354H1
catgctctcagctatctcatcaaagaattcagagacaaactctcctcattcatcaacacagactgtgcaacatgacacgaagaactatgatgatgaagataattggtctgtcgcctcctctgctatgtctatgcgcacagctagatctaaggtaactcatggttcagcccctacatttagatgctccgaacgtgcagagaaacgtagggagttctatctgaagttggaggcaaaacaccgagctcttcgaagaga

SEQ ID NO: 40368 - DNA, 260 bp, Glycine max
  Clone ID: 700941355H1
ggtgtggtgatgagtggaagttctattcttgtggagttttttagatggaggagaagagtgcaggctctacaagagcagcaacatggcccggcagcacaaaatcctcgaactccaaacacgccgcgtccaggttcagggtcaggtccttccaatcacagtcaacctgtggtgcaaagtcaacagaactcaaatcagagctgaattgatgtgtttgtggtttctcttaacactaggggttgcagctgattgcttttcattct

SEQ ID NO: 40369 - DNA, 260 bp, Glycine max
  Clone ID: 700941358H1
cttcgtttttcacctaaaatcattctttttcctgatttatgatggatgtgaaaatttttttcaatctctcttattggggattgggtatatcaatcggaaacggaagacgcgtacgcagatgagttggaaacgactggaaaagcgaaaaaaaagcaccgaaaaacgttgcgccaccttgattactctctcgcggaagacaaaggctcggtaggataggttggtccttgagctgcttgtgtcagcacaaaggagagttgtat

SEQ ID NO: 40370 - DNA, 255 bp, Glycine max
  Clone ID: 700941361H1
gcacctgtttcatccatgcttaattacatttactgcatgtcttcaagcaagctttttattggaggcctttcatatggagttgacgatcagtctcttaaggatgcattttctggctttagagatgtggttgatgcaaaagttataactgacagagactctggaagatcaaggggatttggatttgtcaacttctccaatgatgagtctgcaagttcggcactctctgcaatggatgggaaggatctagatgggcga

SEQ ID NO: 40371 - DNA, 258 bp, Glycine max
  Clone ID: 700941362H1
aaatgtatggaatgcagtcatggaaaattctgctgtcagtagtttcttccacacaacatacaaaatgaaaagttttggagcagcagaaaattctgaggaagtggataagttatcaagctgtgcttctgaaacagtcgaatcccctgagaaattggaagggtcggctgagtctcacccggggaacatgtttgacgatttcatgggtcttctgcagaatgtgaagcttacagttattgaattggtaagtaggttgtctgg

SEQ ID NO: 40372 - DNA, 257 bp, Glycine max
  Clone ID: 700941363H1
aaagaggttgtctctgttgatggcttcggccttgtttcagggcgcttccattggacttctgatttatttggctattgccattgatcctagccttattgttagtgcatttgtggcaacttctttggcttttgcttgcttctctgcggcagtttagttgcaaggcgtagggagtacctctaccttggtggtttgctttcttctgggctgtccattcttatgtggttgcactttgcttcctctctctttgggggctcaat

SEQ ID NO: 40373 - DNA, 263 bp, Glycine max
  Clone ID: 700941321H1
gaaaattcacaattttgattctcatattttaaaaaattaatgatttcgatgcaatcttcaattttatttacgttttattttatttatttcttacattatagttaattaaatcattttttgatgatatattaaattgagaattggactaaaattaaaaaatttgtaaaatagaaggtcaaatctttttattttgaaatagaagattaaaattgcatattctttaaaacagatgtcaaatgtttttattttaaaatggagagact

SEQ ID NO: 40374 - DNA, 266 bp, Glycine max
  Clone ID: 700941281H1
tgcagcggctcgagcttacccctactgtactggtgttgtcgttctcttctctgatgtgctttccctgactgtcaaatatggctcgtacaaccactctcgagtgctctggttgccctccacttcgcgctctaacgtttgacgcgcttggtcttatcaaagttgtggaggcccgcgataagcaacgaggagctcccctggtggtagagaggttgggcgaccctggaatcatccaaatgtgtgatggctgtatcaatgatcgaccgcaa

SEQ ID NO: 40375 - DNA, 231 bp, Glycine max
  Clone ID: 700941282H1
atcaaacgcagcattgggagatagaaagagagagagaaagagagagagatatagacccttagtcttctctatcgtgcgctttcctttgacgcgtctgacccttgctttgtctgcgtcttccttctgtctttctttctttctctgtgtgtcgtaatggctctcccagactcttcttcccgtcgcaactccctgatcccctccttcatctactcctcttcctccaaaacgctc

SEQ ID NO: 40376 - DNA, 257 bp, Glycine max
  Clone ID: 700941283H1
gtgggttatggtgcataagagcatttcaggaatgttatccaagtccatccagcacgcaggactgacctcttctactgcatgtaacgactgagactccgtagaggactaccacgacgttcaacactatggactcacagcttcccaccatctcatgcacccacttccgcagagtcctcgactggaggacaaatgatgacgggaaggcactctgcattgaagatacagtaatcccaatactcccaacttcagttcgaccg

SEQ ID NO: 40377 - DNA, 67 bp, Glycine max
  Clone ID: 700941284H1
gtttttgttatttaaaaaaaaaaaaaaagggtggtcgccgactatagaactcggatacccgggattt

SEQ ID NO: 40378 - DNA, 249 bp, Glycine max
  Clone ID: 700941285H1
ttcagatccaaatgctatttgtgagtagttaggagaccttaacagcttggtttgattgtgtgaaggcagtttttcctgtggtcagttaaatgaatatactacaagcgaaatgctatatactgttgatatattcgggtcttgtgaccatgacttcttggagttgcttgacctagtgacatcgcagctctggctgaataaacatggaagtggtagctaagattagtaaggctaataaattgagggtagtat

SEQ ID NO: 40379 - DNA, 252 bp, Glycine max
  Clone ID: 700941287H1
tagcggagttatatggacaggtgatgaattagtagacggagtgcctgaagacgctgacatgcttcggtcaaagggcaaaagattaatttgtgtcaccaataactcaacaaagtctaggaagcaatatggaaagaagtatgaaacacttggcctgaatgtcagcgaggaggagattttcgcatcatcctttgcagctgctgcatatctgaagtccattgatgtcccaaaagataaaaaggtttatgtcatcgg

SEQ ID NO: 40380 - DNA, 245 bp, Glycine max
  Clone ID: 700941288H1
acacttcacttcttcttcctctcattcattactctgatccggctgctgagatcttcttggttctcgaatcgtacggccaggggtcctttgtctacctcactcagcttcccaactttctctctctacttagagagtagcttctctggaacaccgagtatggagtccaacggtcatgcaagagtcaagagaaatgatattattaaagaaaatggtcattcccatatgtcaaatgttgatgatgtact

SEQ ID NO: 40381 - DNA, 245 bp, Glycine max
  Clone ID: 700941290H1
gcagacttaacaacagcacaaagcgggttactgtctgttcaagctaccatctctctctctctttcttagtgcctccttgccagaagttaaaatggcccaagaaactttcctattcacatctgaatcagtgaacgaggggcaccctgacaagctctgtgaccagatctccgatgctgtgctcgatgcatgcttggagcaggaccctgacagcaaggttgcctgtgaaacctgcaccaagaccaaca

SEQ ID NO: 40382 - DNA, 247 bp, Glycine max
  Clone ID: 700941291H1
gtgatgtcagagaactacacactggaatcgttcaccgtcgaaggcagcgacggagtgaagctccgtacaagggtgttcaagccagatgctggaacagaagcggatgggaagttggggatcgttctggtgcacccgtattctattttgggtggctgccagggtctcctcaaaggaatcgcttctggcttggctctcaatggttacaccgctgtcacctttgacatgagaggcgttggcaagtccaccg

SEQ ID NO: 40383 - DNA, 246 bp, Glycine max
  Clone ID: 700941292H1
cgcatatgcagaacttgcacctgcattgtctgatctgaatgttcttgttgagacctactttgctgacatccctgctgaggcgtacaagaccctcacatctctgaatggcgtcactgcatatgggtttgatttggtccgtggaacccatactcttgatttgatcaagggtggatttcccagtggaaaatacctctttgctggagtggttgatggaaggaacatctgggccaatgaccttgctgcttc

SEQ ID NO: 40384 - DNA, 248 bp, Glycine max
  Clone ID: 700941293H1
ggagaaggaacttcaagccaaggaaactgaattgagaaaaagggaacaggaagtgagacggagagaagaagctgcttcacgagctggaattgttcttgaggagaagaattggccgccttttttcccaataatccatcacgacattgctaatgaaattccaatccatcttcaaaaattgcaatatgttgcatttactacactgttaggattagtgttgtgccttttttggaatgttatagctgttactg

SEQ ID NO: 40385 - DNA, 247 bp, Glycine max
  Clone ID: 700941294H1
agtggctccagctgaacttgaagcccttcttctcactcatcctaagatctctgatgctgctgttgttccaatgaaggatgaagccgcgggagaggtacctgttgcatttgtggtcatatcaaatggttataccgacacaaccgaggatgaaattaagcagtttatctccaaacaggtggtgttttacaaaagaataaaccgagtattcttcattgatgcaattcccaagtcaccgtcaggcaaaatc

SEQ ID NO: 40386 - DNA, 249 bp, Glycine max
  Clone ID: 700941295H1
cgtttttcttccaggaaatgcacgcgcatctagattcacctgctttctccccaaggcttgcagagcatttattgaagcaaagtttggattatgataactacaagtgcaaagggcatctttctgtgctagttatgctatctgtaatcggtttatagtatgtttcattggctcttttggtattgcaagaaattttggttttgttcgtggttatcaacaaggatacatttaccagcagaagtttagtcttgt

SEQ ID NO: 40387 - DNA, 241 bp, Glycine max
  Clone ID: 700941296H1
gcttttcactgagttgtttttttggtattatttatttcaacagggggaaagcgatctagaacttgccaaacggtgttggaatttgtgatctggggaatcatgaatgctaggagagatggtcgtaacaacagagttgctctttttggtggtattgaggagggtggcatcaaagcatcgtctctttactcctcaacttcttcccatgaaattgatgaacatgataatgaacaagcattggttg

SEQ ID NO: 40388 - DNA, 257 bp, Glycine max
  Clone ID: 700941301H1
gcttccagagctgtacttctcgtgagcttcaatgttcacgtcgtcaccgtggttagctccacatatgtgccattgaaaccacaccccaaaactccaaaacacccacctgtcccaaagccaccttccccaaagcaagcaagttgccccaaagacactattaagtttggtgtgtgtgctgctgtgttaagtttgatcaacgtgcaacttgggcaaccaccaaagaccccattgtgcaacctcattgagggtctcgctga

SEQ ID NO: 40389 - DNA, 265 bp, Glycine max
  Clone ID: 700941303H1
aacaagttatgtaacctttcaccacagaatatgggagctttctttagaaaaggacgaggaagaggaggctgaatttaaagctaaaactaaagaacaagttaatgctcctgaagatctgcctccccaactattatttattcatcagggacagaaagacctgaaggaactacattggcacacacagattcctggaatgattgtatctaccgctgaagatggattcaacgtccttatgccttcaaatattcagagcacactgccatcg

SEQ ID NO: 40390 - DNA, 264 bp, Glycine max
  Clone ID: 700941304H1
tgagatcgttgtcatcggttcctgcatgacccccgcggactccattttcaacgaatgcgaagagagtttgaagagcatcttgtcggagataaggctgaatttgaagacaggcaagtccacgagaaaacccattatctcggaatccgaacaaagcaacttggaagccgggatggtcaacagaaacaagctcgggagaaagacgaagttcgggtacttagcacttgcggagccgtggcctaaggtttcgggttttgccaaggttga

SEQ ID NO: 40391 - DNA, 265 bp, Glycine max
  Clone ID: 700941305H1
gtcttcttcccgaagatatcaatatttatgcaaccacagcttccaatgcagatgaaagtacttggggaacatattgccctggggagtatcctagtcctccccctgaatattcaacctgcttgggtgatctgtacagtgttgcttggatggaagacagtgacagacacaatttacgaacagaaactctgcatcaacaatataaattggttaaagagaggactatatctggagattcatactatggctctcacgtgatgcagtatgg

SEQ ID NO: 40392 - DNA, 261 bp, Glycine max
  unsure (1)..(261): unsure at all n locations
  Clone ID: 700941306H1
ctcgagcgattcggctcagagaaaaggaaataataacgagagagctctagaggcgcttgcgtaacggtaattgcgaaagaagatgcaaccaacatcgaacggctctgactcgaaagcgacggagcagcggacgnagccgcctcagccagtggccgtgccgccgcagtggatgccgatgcaatacccggcggcggcgatggtaatgcagcaccacatgatgccgcctcagcattacgcgtcgccgcagtcctacatggccta

SEQ ID NO: 40393 - DNA, 264 bp, Glycine max
  Clone ID: 700941307H1
atcaatcgtacacaggaaatgcttctaagttataacaatggagtatgaaagatggaccagggaaattactatttatacgaacactacaaaaataccatcaagtggttgaggaactttcattttcctaccctttaccattccttttatctatcttgtttttgtgttttcctttctttgatatgttgagataagagcatgaaggctagcaagatatgtaagattcatttttttttatcccgttttgttgtagaagagatgtgaatt

SEQ ID NO: 40394 - DNA, 265 bp, Glycine max
  Clone ID: 700941308H1
cggaggtcatcgaattcgcgaagatgtcgcggttcccgttcttcaaccgttcgaacacgattcactcgacgaaatcggaatcctcgcagaaaccctacctcgtccaccaccatctccacaatcttgaccggtccggttcggtgaaccgcttctacggttcactggactccatgaaatcctcaatccgcggaaaaatggtgaagaagctctgcaccttattcgaatcctccaaaaaacccttgccagaaccagaatccgaatctga

SEQ ID NO: 40395 - DNA, 264 bp, Glycine max
  Clone ID: 700941309H1
ggctaaccaaccctgacactccttcttctccgcttcctcttcgatcatcgcttcagaatgccgccgaagttcgacccctcccagatcgtcgacgtcttcgtacgcgtcaccggcggtgaggtcggcgcggcgagttccctcgccccgaagatcggtcccctcggtctctcccccaagaagatcggagaagatatcgccaaggaaaccgccaaggactggaagggcctccgcgtcaccgtcaagctcaccgtgcagaaccgtcag

SEQ ID NO: 40396 - DNA, 262 bp, Glycine max
  Clone ID: 700941310H1
ggaagacaaaacattctcactccgaacaaaatgtcgattaacagcgaatctacgccgccaccgctgatcggcaaaatcgggccttacaccgtcttcatgacgccgccgtctacacccaaaccctccgacgaccaccccgtcaccaccaagatcgcacctccgccgcctcagattcccaaagccgttccttcccccaaacccgtctccgaccccgacgattccgtcttcggcttcttcagaaatgccgttaccaaggtccaaa

SEQ ID NO: 40397 - DNA, 85 bp, Glycine max
  Clone ID: 700941312H1
cttctcaacgtggaagtgttggtggtcccttaaataaaagagaagcacagcggaagatagctcgctctctttcagtacctgccaa

SEQ ID NO: 40398 - DNA, 263 bp, Glycine max
  unsure (1)..(263): unsure at all n locations
  Clone ID: 700941319H1
ctcctcattaagccgccactttctctctctttccttttcgtcttctttttcttcttcgttgggtttgttgccacttagtatgaaagagggtgtgaagagagtgtggagaagatttggtgttgtggccatggcggagtctaagagtactgtgcttgttacgggagcgggtggtcgcacaggacaaatgaganacaaaaaatttagagagaggccaaaccaatatgtggctagaggtctggttagaacagatgatagcaaacaga

SEQ ID NO: 40399 - DNA, 103 bp, Glycine max
  Clone ID: 700941320H1
ccttgccatctggaaggcgagtaggcctctgagcagtggtgaaggttgggagacaatgagacgtgaattgtcggttttatacagtcgtttctatgggatccta

SEQ ID NO: 40400 - DNA, 248 bp, Glycine max
  Clone ID: 700941280H1
gaatgttttgtttcttcataaatcatgattgcgcagtacagtgagcagctaaaggaggagcatgattatcccatggcatacttctgtgtccagctacgagcagtggctgcgcaatcatgatttatgaagaaacaagatatacttttaatgaatgttttgtcttttttttgtcagtggaaatcaaccatggtaagggaattgatgatgacttgtgaatatttctttgcaagacatcggtcatggaagaa

SEQ ID NO: 40401 - DNA, 259 bp, Glycine max
  Clone ID: 700941250H1
ctgtaggtacgtttggtgtcaatattggatgattataaactggccagacaacagaaagaggaagataagagacgacatagggaccttaagaagatgcaagatctactcctaaatcaaaaggaagccatgtatggttctaaacctagtccaagaaaaaataacagctttagaaagactaatagttaccgcgcaaatggcaatggatctatgcctcctacaccccgtcgtaactccctaagtggtggaacaacatctgaac

SEQ ID NO: 40402 - DNA, 259 bp, Glycine max
  Clone ID: 700941251H1
aaactcttcagcaattccattaactcaactaattcctcgtgtatcacccatgccgagatcgaatcggaattctcccaccaccaccccacggtggcgcgcctcaacaacggcgccttcgggtgctgcccggcttccgtgatcgccgtgcagcgcgagtggcagatgaagaacctccggcaaccggaccacttctacttcaacgacctcaagaagggactccttcactcccgcaccatcatcaagaacctcgtcaacgccg

SEQ ID NO: 40403 - DNA, 256 bp, Glycine max
  Clone ID: 700941254H1
agtttccacactgcataccttaggtcttccgaattcgaagttaatttgcaagatggctaaggaaaaggctcagatcaacattgtggtggttggtcatgtggaccctgaggaggcaaccaccattaacgagctgaagaagcctgttgtggagaaagaagctccagggcatgccatatgagggcatgcacgtacggcctcggaggggaaccagaaaattatgttaacaaaataatctggaaccctaatgtatcagtgt

SEQ ID NO: 40404 - DNA, 259 bp, Glycine max
  Clone ID: 700941256H1
tggagaagcaccacaagcatcttgagcaccttggggaacttggtgctgcggctgccggtgcttatgccttgcatgagaagcatgaggccaagaaagacccagagcatgctcacaggcacaaggtagaagaggagattgcggcagcagctactgttggtgctggtggttttgtcttgcatgaacaccatgagaaaaaggaagttaagaaagaagatgaggaagctcatggaaagaagcaccaccatctgtttggctgaac

SEQ ID NO: 40405 - DNA, 255 bp, Glycine max
  Clone ID: 700941257H1
gatgaactcgacctgaaacaacttgaacggtttctagggttggacaacatgggtgctgagtgggacaacatggatgacctgtggatgctggacgacgtcgttgtgcccaaccgtcacttaatttactagaagggagataattaattaattaataaatggcgttttcttaagttatagttttataaaactatgttggtgtatgtgttcttagttttctgttttgtcttgtcctctcgctttggtaatttctgtttt

SEQ ID NO: 40406 - DNA, 256 bp, Glycine max
  Clone ID: 700941258H1
ctcgagccgaatcggctcgagcggctcgagggttgaggaactttacgcaaacaacaaaattccgatattggtttgtaccagacaccttggcttggggtgtgaatcttccagctcatctagtgattatcaaggggacagaatactatgatggaaaagcaaagaggtatgttgattttccaatcactgatattttgcaaatgatgggtcgtgctggacggcctcaatttgatcaacatgggaaagctgtgattcttgt

SEQ ID NO: 40407 - DNA, 254 bp, Glycine max
  Clone ID: 700941259H1
ctggaattacaggcaccagtctgatgtttgccatgcatatcaactcatgaggaaaggtggtgtgaaagaggaaaatattgttgtatttatgtatgatgacattgctttcaatgaagagaacccacggcctggagtcattattaacagtccacacggaaatgatgtttacaagggagttcctaaggattacgttggtgaagatgttactgttgacaacttttttgctgctatacttggaaataagtcagctctta

SEQ ID NO: 40408 - DNA, 253 bp, Glycine max
  Clone ID: 700941260H1
tctggattgtggaatttttcgcaccttggtgtggacattgtaaaaaattagctccagagtggaagaaagcatccaataatttgaaagggaaggttaaactgggccatgttgactgtgatgctgaaaagtctctaatgagcaggttcaaagttcaaggattccctacaatcttggtatttggtgctgataaagatagtcctattccttatgaaggcgcaagaactgcctcggctattgaatcatttgcattaga

SEQ ID NO: 40409 - DNA, 214 bp, Glycine max
  Clone ID: 700941261H1
cacatctctgatcactcgttgatctatcatccttcatcgaccagccagtctccagagttagtgagtgagagagtagcagctagcaatggagatttctgccctagcttcttctgctactccaagaccttctcttacgactccttccacttctccacacactgtagtcaccaccaccttcagcaaacctcaactgggacgctccacgtggcagtat

SEQ ID NO: 40410 - DNA, 254 bp, Glycine max
  Clone ID: 700941262H1
ggaaaagggcttttggaagtgatatcacaaacatcagttttgagaggaataacgtggaattgttcacgaatggcgactcaaatccgaatcctaagaagccaagaatggaatatggcagtgggctgggtcaggcagatgaaaacaatttaaaacaaggcacaaaacaagcttcaaagaactatcaatttggtcctttcgctccggcttgtgtgcccaaagttggagcctctgagaataataatctgaagcaggtg

SEQ ID NO: 40411 - DNA, 238 bp, Glycine max
  Clone ID: 700941263H1
ccagtgtgaaccagtctcacctcattgattcattctccgtcagaaatacctttcctttgcgaaagagaagagatctgaaaccctaaccctaaccctaaccagaggtaatggattcagtgcctcgaagaagcagaggaggaggctcttggaaaacctcgacaaggtcctaatgcgtggcaactgagtctacgtcaccttcgtcatcgcaggcgccttcctcggagaacgggctttggat

SEQ ID NO: 40412 - DNA, 254 bp, Glycine max
  Clone ID: 700941264H1
aagaacttggactattcattcatataattaattttctctcttcttcttctttctccttttccttattcacattagatcagactatggatcgcccaacactatcatcattattttcattcctactaacacttcatctatcattatcaggggtaatttcaacaacattcactctagttaacaaatgtgactacaccgtgtggccgggaattctttccaatgcgggtgttcctcctctttcaaccaccggcttggtt

SEQ ID NO: 40413 - DNA, 255 bp, Glycine max
  Clone ID: 700941266H1
actcactggaagccttgttgtgagtaagggaaaggcttcctgcactgagcaccaagttgaaacctcttgattctttgcttagaattccacagaatatggagactgttcttttcaatgactccccacctttggagttcaagggtatgagcaaggaggaggaagactcattgctagggcaagttgaaatatggaggtacatgacatgcttcacggactccgtggccttgaaatccgtcatagagctgcgcatagccg

SEQ ID NO: 40414 - DNA, 254 bp, Glycine max
  Clone ID: 700941267H1
tgcggttgttgggggaaaaatagaaagcgatggcgaatcagggtgctaagaaacgcaaggaagagaacgctcgtcacatggcgaggctccgccaaatcatcatcgcctgcaacgttatctatgttttgcttagaatgttggtgttccattcgagcttcacctggaagcactggattgggttgattgtgacttctttggcatatgttattccctatcaacagctcgcgaagatggcaacccctgcttacgctgaa

SEQ ID NO: 40415 - DNA, 253 bp, Glycine max
  Clone ID: 700941268H1
ggaacatttccttatctatattcacctccatcttaaaacagttcccctagaaacttcgatctgaagatgggtggcattgcatttggacgctttgatgattctttcagtttaacctcaatcaaggcctatattgctgagttccattcaaccttgctctttgtttttgccggtgttggttcagccatagcctatggtaagttgacatcagatgcagcacttgatcctgctgggttactggcagttgctatttgcc

SEQ ID NO: 40416 - DNA, 248 bp, Glycine max
  Clone ID: 700941269H1
acctgctcgggcaagattgttcccgcagctccctgaggtcagtatcatttcatagtctttaccagttgtggtgggaggagttgtagaatcaagtatctggctcctttccacatagcgtgttttatttactcggctcataatttgactttaataaagctggtgttttatattgttctttgttatgctatagtgtggatccaacattggaatatgccaaaaaaaaaaaaaaaaaaaaaagagaatgaaag

SEQ ID NO: 40417 - DNA, 255 bp, Glycine max
  Clone ID: 700941270H1
ctcgagccgttccgttcatagcgttccgcggaacagagaacctcgaaagtaccaatttctttagatagtcatggcttccaccttcgacgccttcttcgtcgacgacgaccacttcgccgcccccgccgccgccgacaccttctctggctaccccgacttctcctccttcccctccgacgacgtcttcgtcgattacgccgacaccgcggcgtcgccggagatcttcggattcagcgatcccggtccagtttactc

SEQ ID NO: 40418 - DNA, 252 bp, Glycine max
  Clone ID: 700941271H1
tggcagggacacgtgttcgggctgcaaaccctggtttgcataccgtccgcgaacggcgtcgttgagctggggtccaccgagttaattttccagaacccggatctgatgaacaaggtgaacgttctgttcaatttcagcaacaacaacttcgacatgggttcttcttggcccgccaccagcgccgatcagggcgaaaacgacccttcctcgctctggctcagcgatcccgaagttagggattccattaacact

SEQ ID NO: 40419 - DNA, 251 bp, Glycine max
  Clone ID: 700941272H1
catcaatgccatcaactttgacttgcctcatgtggttgccactgctcctaagtatgatggaatcacccatgttggaggtgacatgttcgtgtccattccagatgctgatgctatttacatgaagtggattctgcatgactggagcgacgagcactgcgtcaagatcttgaagaactgcaggaaggcaataccagagaaaacagggaaagtgatcatcgttgatcacgtgctgcggcccgaaggcaacgaac

SEQ ID NO: 40420 - DNA, 249 bp, Glycine max
  Clone ID: 700941273H1
gagaatcccaacacttaaccccaagaatgacatattctttatggttaaggcctttgctgcaggggtgattcttgcaactgggtttgtgcacatacttcctgaggcatatgagagcctaacttcaccttgccttaaggaaaatccttggggcaagtttcccttcactggatttgttgccatgttgtcctccatagggaccttaatggtggactcatttgccacagggttttatcataggcaacattttaa

SEQ ID NO: 40421 - DNA, 250 bp, Glycine max
  unsure (1)..(250): unsure at all n locations
  Clone ID: 700941274H1
catcacttttgtctgcattacacctgagcctcagatctcatctcttatccacaatactatggtcctgcaggtgaccancatgaaactcaaggttgatcttgagtgtgataaatgctacaagaaggttaagaaacttctcggcaagtatcctcagtgattcgggaccagaagttcgatgagaaggataacattgtgttcatcacagtggtgtgttgcagtccagagaagataagagacaagctttgctaca

SEQ ID NO: 40422 - DNA, 251 bp, Glycine max
  Clone ID: 700941275H1
gattaaagaatagagttgttggtgtaacaggcgagggcagagggaagggttagggaacaattggagtgcacgaaagcgatgccaaaaaaaccaaacaatcattaacaacagccctaacccccccgacgtctttcaaaactgattcggagcaattaatgtaaaatctatggacatcaacgaggaatcttcattctctctccgtttttgtttgcatcattaatagacccaaatggacccgaacccgacagcct

SEQ ID NO: 40423 - DNA, 83 bp, Glycine max
  Clone ID: 700941276H1
gcctcaattctgagaaggaatttctcttatttccaaaagctaattcccgtgatggtgaaaatggcacaatattttcactgtag

SEQ ID NO: 40424 - DNA, 249 bp, Glycine max
  Clone ID: 700941277H1
agcatctgcagtggcatttgtggctgaacgtcactcccgtgcttgggctgttggttgggattataggctctatgctcctttttacacgggagtagttagttcaggaattgcatactatgttcaagggctggtgatgaaactaagaggccccgtatttgcaacagcctttaatcctctttgcatgatcatggttgctgctttgggctcccttatattaggagaactgctccatctcggaagtatcattgg

SEQ ID NO: 40425 - DNA, 251 bp, Glycine max
  Clone ID: 700941278H1
caataccacaatattttgtcatgaacaccgcaccagatggtcatggtccagttagaacagatggtggatggtttaatgacattttgaacaccatattctcttctgccccaactgtggctataattgttgggactcttattgacaacacacttgaaggcaaacaaacagctgtggacagaggacttccatggtggggtcctttccagaataggaaaggagatgttagaaacgacgagttctaccgtcttcct

SEQ ID NO: 40426 - DNA, 259 bp, Glycine max
  Clone ID: 700941247H1
gcgatggttgcatcacaacaaaggagcttgggactgttatgcgttcgttgggtcagaatccaacagaggctgagctccaagacatgatcaatgaagtagatgctgatgggaatggcaccattgacttccctgagttcttgaacctcatggctagaaagatgaaggacactgattctgaggaggagctgaaagaggcgttccgagtgtttgacaaggaccagaatgggttcatttctgctgctgagctccgccatgtgat

SEQ ID NO: 40427 - DNA, 263 bp, Glycine max
  Clone ID: 700941214H1
tatgtctagccgattcggctcagccagaatttaggaaagactatacaagtagcctgttaacatgttttcttttaagtacctattcaccaccattttcttagtgctaacattctttctttatccatcaaatgctcaactgagttcaaccttctactccagcacatgccccaacgtgtcttccattttgcgcagtgttgttcagcaggctctgcaatctgatcctcgaattgctgcgagcctaactcgtcgtcattttcatgagt

SEQ ID NO: 40428 - DNA, 281 bp, Glycine max
  Clone ID: 700941215H1
gggattcggctcgagcagaaactgagactgtagcagactctttcagtcccccttaggtttccttcttattagcctccccccctcacacctaccctatcatcatgcaccactttgccatggacaactctcagctcctccaattccttcccaacaccaccaccaccaccaccaccaccaacacccccttcttccatgctgcacctcagactcacaccatgcaccaccccctctctactaattcctccaatagtactaattactacgcctgccacctctcccaa

SEQ ID NO: 40429 - DNA, 267 bp, Glycine max
  Clone ID: 700941218H1
ggcttatggtggatacctaggcacccagagacgaggaagggcgtagtaagcgacgaaatgcttcggggagttgaaaataagcgtagatccggggattcccgatataggtcaacctcttcgaactgctgctgaatccacgggcaggcaagagacaacctggtgaactgaaacatcttagtagccagaggaaaagaaagcaaaagcgattcccgtagtagcggcgagcgaaatgggagcagcctaaaccgtgaaaacggggttgtggga

SEQ ID NO: 40430 - DNA, 264 bp, Glycine max
  Clone ID: 700941219H1
cgagaagcttcgcgaacgaaaacaaagaaccctagacagatccattccatagccatgtcaggtgttggccctctatctcaggattgggaacccgtcgtcctccgcaagaaggctcccaccgccgccgccaagaaggacgagaaagccgtcaacgccgcccggcgctccggcgcggaaattgaaaccctaaaaaagtataatgctgggacaaataaagcagcatctagcagcacttcattgaacactaagaggctggatgatgat

SEQ ID NO: 40431 - DNA, 263 bp, Glycine max
  Clone ID: 700941220H1
agctttttctccacttggctttcactgctacgttctttgctggagttttgcaggcatcactcggtctcttcaggttagggtttatcgtggattttgtgtcacatgcaaccatagtagggttcatgggaggagcagctacagtggtttgtctgcaacagttgaaatcaatccttggcctagagcattttacccacgaggccgatctcgtgtcagttatgcgctctgttttttcccaaacgcatgagtggaggtgggaaagcgct

SEQ ID NO: 40432 - DNA, 264 bp, Glycine max
  Clone ID: 700941222H1
atttgttgcaggcatcacatctgatctcacacgattcggattcggaattttctcgatccctttctgatctgtgatctctgatctgtttgcgttacttgatcttatgatacttgtgttactatatgattcttttattactctcacgccaataggtacgttcatcttcttcctttcaccaaaggcgaagatcgatcggttactattcggttctggttttttgttttcgtgctgtttttgtttcagatctgatggtttttcgtgttt

SEQ ID NO: 40433 - DNA, 265 bp, Glycine max
  Clone ID: 700941224H1
cttgtctttatgacatttctcaagaacctgacaatggttttgttcttgtacagctagggataatcttgttttcctacagcgttggttcactaaattccctgagtactcaaataacgacttcttcatttcaggggagagctatggaggtcactatgttccacaacttgcacaacttattgttcaaaccaagaccaacttcaatctcaagggaatagcaatagggaatcctcttcttgagtttaatactgatttcaactcaagatct

SEQ ID NO: 40434 - DNA, 265 bp, Glycine max
  Clone ID: 700941225H1
ccatagccgaagagaaaaagagacaaggaccgtctagaattgatttcattgagtgtagcagcaaccaattccatttccagtttctgattcgtcaaacggacaaaggaagtgaaagggtttagggtgtgacctgagatcaacatgttgcggaggcttctctcttctcacctcaaaaccctagccgccaccgcttcttcttccactccccgatctgcttccgccgccgccagattcgccgctctctctcgctcctcccgctacttct

SEQ ID NO: 40435 - DNA, 262 bp, Glycine max
  Clone ID: 700941226H1
cttgttttgcacatatgcgttggagttccctgctgtagccaaaaaagattctgtaaaggaggaagagagaccaaatgcgagaaggagcatcttgtatcaacataaagaaaaatattagacaaaaccaggaaacacagcactaacagaacaagacaaattacctttccaaatgcagaaggatttctgatcgataggtgaaccagttatagtctgaataacttcaaacaacatgctctgcggagtgctcctgagctcttgtaca

SEQ ID NO: 40436 - DNA, 263 bp, Glycine max
  Clone ID: 700941228H1
cgagatcgacgccgccccggaggaacgcgcccgcggcatcaccatcaacaccgccaccgtcgagtacgagaccgagaaccgccactacgcccacgtggactgccccggccacgccgactacgtcaagaacatgatcaccggcgccgcccagatggacggcgccatccttgtcgtctccggcgccgacggccccatgccccaaaccaaagaacacatcctcttagcctaacaagtcggtgtccccaacatggtcgtcttcctca

SEQ ID NO: 40437 - DNA, 259 bp, Glycine max
  Clone ID: 700941229H1
aagcaaatagtttctgggaagcagaattacctccaaattatgacagagttggaattgagaatttcattcgtgcaaagtatgacgagaagagatggattccaagagatgggaattcaaaaacaccttctggattgagggaagagaaaagtccttcacattggcagaggcctgtggagcgaagtggttatgctgctgtttctgaaaataaatttgaggaaaggaagaaaatccaaccatcaaatgcaatttctaccacaag

SEQ ID NO: 40438 - DNA, 260 bp, Glycine max
  Clone ID: 700941230H1
cttgtctgctagaataattctgtcatagccttgatagtgcattctgttatttccttgtggtctttggcagttagtacctacgtatgctatatatatctagcctctgtatgtactaaggggatatataaagaaaattatcagactcttttcttcaccttgcttctttggaggttccttagtcgtccttgaattctaaggattgtttctgatatccctaacatcttggtgctttcattgagcacatgactgaatcaacgcac

SEQ ID NO: 40439 - DNA, 260 bp, Glycine max
  Clone ID: 700941231H1
ttcggtgatgatggaggacccgacaacgttgttgcacagcgactattcgaggctgttcggcgaagacacggacttgtacaaccgcattgtgttgggcgccctattgccgcactctgtgtggggcccactcccgcgcttcctccagacgtggcttcgcaattacctcggcggcgttctcctctacctcctctctgggctcttgtggtgcttctacatttattattggcagcgcaacgttcatctccccaaagatgctattc

SEQ ID NO: 40440 - DNA, 258 bp, Glycine max
  Clone ID: 700941234H1
ataaaagaccatgtcggtgaaggagtgcgagcaccacaaggggaagaagaggaagatcttccggcgagtgttctggtgcttagtggtgttccttttcatcgtgctggtcacgattcttttgatatgggcaatccttagacccaccaaacccaccttcacgctccaagacgtcaccgtctacggcttcaacgccaccgtggcgaacttcctcacttcgaattttcaggtcacgctcatctcgcgtaacccgaacgaccg

SEQ ID NO: 40441 - DNA, 260 bp, Glycine max
  Clone ID: 700941235H1
ctggacgacaaaaagcgtagatatacgcggtatttgttcccctgctctatctgactctgtctctcgttctctctgcaaaaaccttcgttcatcgtcaacccacgcactcaaacaacaaatcattcattctttcaattgtaacatataataaaaaattggttgtttcgccagcaaaaacgctgacaccaaggccagtagggccgcgcgctggcgatccacgggcatcgttgctttgcgcgattccaaatttaagacgtttc

SEQ ID NO: 40442 - DNA, 263 bp, Glycine max
  Clone ID: 700941236H1
cgcaacattactcagcactgacattcttcaatcacactaatggctgtcaccttctacagatcttcacaccgaagaaggcatcaaatacctcgatcaattcctttctgggaagaactatatctctggggatcaattgacaaaggatgatatcaaagtgtatgcagctgttgtagaaaagccaggagactcttatcataatgctgctaagtggaacgatgacgtcacttctcaacttgctccaagcttcactgggcacgctcaag

SEQ ID NO: 40443 - DNA, 116 bp, Glycine max
  Clone ID: 700941237H1
ctttcttgagcaagcgaagaccgtgttctgctctggttctggctgcatcagcattcattcatgatctcactctcccgttctctctcatgtgttatcgttatgtctcattcagaatc

SEQ ID NO: 40444 - DNA, 261 bp, Glycine max
  Clone ID: 700941239H1
gcaattgctaatcttgaatgaatcagcttcttattatcatgccaaagcaacggcgaaaaattatcaactcccaaaagacacgaatttgcagctgaaattttatcaatggcgaaattgagcataggatataatttttttccttggtttactatttttaccattaacccttaattgtcactccccttatgttttgcccgtttagtattgtaaaacaaattatagcaaaatatttttttcaacacttttattgggcagattttt

SEQ ID NO: 40445 - DNA, 262 bp, Glycine max
  Clone ID: 700941240H1
ttttctttttctctgttgaggttgtcattgggagcactcaacctaaactattcaagttgtgaaagcacatcacaagaaaattcgcaagcgatggatccgaagctaaaagaggtttctcagctcttcgatcgctttaaggcttcgtttatcaggaacgactttgatacctgttccaatctcctttctcagctaaaggtgttacttacaggtttcagaagccttccaccgttgtttgcagatacacctaatgcagttcatgaat

SEQ ID NO: 40446 - DNA, 259 bp, Glycine max
  Clone ID: 700941242H1
cgaatcccctcttgtgtgttgtagccgccccgtgaccatcaatggcggaaactgctgtcgacaaatcccaatcactcgctgaggaatattatgtgaaggataagcaaacagctgtagttgaaaaacctgttgaggtcaaagaagttgaaaacccagaggaggctgcttctgaggaacccgttgctgagaaaactgtggaagaaacaactcctgttgcccctgcagttgctcaggaaagcagtgaagtcacccctcctcc

SEQ ID NO: 40447 - DNA, 254 bp, Glycine max
  Clone ID: 700941243H1
gataaaccctttgtacaaacgtttctcccattgctgcctgtctagaagcctgcgtatatgaagctttttgccagcctcataatgcttgcggggcttgatgctgagctatttcgtctataaaaatgaaatataggtttttgaagtaccttttttttttctctctttgttaaaccctaacctgtgggatgttgggttttgaaaggagtggagccttacagaattttggccaggctctgctgcatgtattttgttcc

SEQ ID NO: 40448 - DNA, 273 bp, Glycine max
  Clone ID: 700941244H1
gtcggaatcggctcgacatcgatttatcgctcttttatgtgggtggcgtcctttcgctctcttcgctacagatgcttcattccaagatcgttaggactgctgtaggctgataaagacgacactcataccgttggtaagaaggatgctgctggccatgttgcttaatttagttcttgcttcctttgtcttcttgagttttatcagagacgggagtgcagggatcactagctctttcattcggtcagagtggccggcagttgacatcccccttga

SEQ ID NO: 40449 - DNA, 258 bp, Glycine max
  Clone ID: 700941245H1
caaactggaactgatggaagccttatatctgaagagggttccacacataaggcagcagacccgtttgatattgggggtggacacgtggatcccaacaaagcaatggatccaggactaatatatgatatcaccactgaggattatgttcaattcctatgttccatgggtcacagtagtgcatccattagcaaagtgaccaagaccaccacaagttgtaagaaaggaaaacaccaaacactgaacctcaaccttccttcc

SEQ ID NO: 40450 - DNA, 271 bp, Glycine max
  Clone ID: 700941246H1
ttaggatcgagaagtgccagagtggtgtagaagacaagatttcccaatctgaagctgaagctgaagctgaagttgaagcaaatgcaaaaaggatcgaagaagtggtggcggaagctgagaaggcccagagtggtgcagaagacaagatttcccaatcggtttcgttcaaggaggagaccaacgtggttcgcgacctccccgaggcgcagaggaaagcccttgatgagctcaagaggcttgttcaagaagcgctcaacaaccatgagctaac

SEQ ID NO: 40451 - DNA, 263 bp, Glycine max
  Clone ID: 700941212H1
taaaactcttgtagctcccaagggcctctctgcctcttcaccactccacctcctgccttctaagaggcaatttagcttcactgttagggccatccaatcagaaaagccaacctatcaagtgattcaaccaatcaacggtgatcccttcattggaagccttgaaaccccagttacatccagccccttgattgcatggtacttatcgaacctccccgcatacaggaccgcagtgagcccactactaagagggatcgaggtgggcc

SEQ ID NO: 40452 - DNA, 253 bp, Glycine max
  Clone ID: 700941177H1
aaatactaaaaaagaaaagaagaaaaacaaataaacagtgatggaaattgaggcaagcaggccggtggtggcaaagaaggtatggaacatggtacgcgtgttgttcttcatgctgagaaagggcatagccaagagcaaaataatggtggagttccatctcatgctcaaacgtggcaaacttgcacttaacaacctcatcctcaaccatcactactacaacatgcagacctccttcttcacatgccgatcccac

SEQ ID NO: 40453 - DNA, 251 bp, Glycine max
  Clone ID: 700941178H1
gttttggatatacttattgagaccagcatgcttgattttcgccatagtgacactccaatggatcccaatatcaagcttcttccgggtcaaggagagccattggaaaacccgtgaagatattgacgacttgtgggtagacttaattacctcactgtcaccaaaccagatatcatgtatgcagttagtgtgttaagtcaatttctgaatgctccttgtgattgccattggaatgctgtcatgcgcattcttcg

SEQ ID NO: 40454 - DNA, 251 bp, Glycine max
  Clone ID: 700941179H1
cctctttcaactgtttaccataatggtactatgcaatctgtttcaagcaatgatcaatcagtctgcactacagtccttagagtgaccaagaaagaggaagagtttgtattcaccgatatatttgaaaggcctgttccttctttgttaagaggatacagtgctcctattcgtctggaatctgatctcactgatagcgacctgtttttcttactagccaatgattccgattcattcaaccgttgggaggctgg

SEQ ID NO: 40455 - DNA, 255 bp, Glycine max
  Clone ID: 700941180H1
ctatgtactagcagtttacccatctgtgccttgtctaaccattgggagaactgcagggtccctgcttgatgccatggttatggtcatagtcaaagttcttagtccagatcaagcttcatgtgcaattgatctcccaattctaggtctatctgattgggactatggctgtcactatttgtcttgaaagatcaaacatgttcaagtacttggggaaattgcatctcttggaaaagtagaggaccagaggacttactt

SEQ ID NO: 40456 - DNA, 247 bp, Glycine max
  Clone ID: 700941181H1
gaacaaggcgggccatggtttccccggaaaacagcaattggctgttcgattacccgctgatcgacgacgttattcccgtcggcgacgcctccttttccgtctccgcctccgccttctcctggcccccacctcccgccaatgtcagtgttgaaattgatgcttcgcttggggattctgatggccccaaagatactgctttgaagaaaagggctagatgtgattcaagtactgcttcaagctctaaagc

SEQ ID NO: 40457 - DNA, 248 bp, Glycine max
  unsure (1)..(248): unsure at all n locations
  Clone ID: 700941182H1
aaaaggaaataatacacttttgttgcctttattctacactctcttgctgtttnctggagtgtcagcagggaatggaagtaacgatgacactaaccgtaaagaagtttatatcgtctatatgggagccgcggattcaacaaatgcttatcttcggaatgaccacgttcagattctgaattcagtgctaaaaagaaatgagaatgccatagtacggaactacaagcatggtttctcaggattcgcagctc

SEQ ID NO: 40458 - DNA, 244 bp, Glycine max
  Clone ID: 700941184H1
ctggtgtcatttctgggctcaacgtgatgcgaattatcaacgagcctaccgcggctgccattgcttatgggctcgacaaaaaggccactagctctggggagaagaatgttctcatttttgatctcggtggtgggacttttgatgtctctcttctcaccatcgaggagggtattttcgaggtgaaggccactgctggtgatactcacttgggaggtgaagattttgataacagaatggtgaacca

SEQ ID NO: 40459 - DNA, 250 bp, Glycine max
  Clone ID: 700941186H1
aaatcatattaagccatggccacctccaacttctcaattgttctctctctctccctagccttctttctagtgctactcaccaaggcaaactcaaccaacaccgtttctttcaccgtcagcaagttttccccacgccaacaaaaccttatcttccaaggagatgctgctatctcaccctccggggtgttacgactcaccaaggttgacagcaacgacgtgccaacgacgggatccctaggacgtgcccttt

SEQ ID NO: 40460 - DNA, 248 bp, Glycine max
  Clone ID: 700941187H1
acttatcattgattcgaccactggtggttttgaagctggtatttccaaggatggacagactcgtgaacatgctctgctttcattcacccttggtgtgaaacagatgatttgctgctgtaacaaaatggatgctactacacccaagtattccaaggccaggtatgatgaaattgtgaaggaagtctcttcctacttgaagaaagtaggatacaaccctgacaagattccttttgttcctatctctggtt

SEQ ID NO: 40461 - DNA, 244 bp, Glycine max
  Clone ID: 700941188H1
ccatagcataatcgatgctctccgaggttgctctggtttgttctactcattcgaacctccctttgaccaaccaaattatgatgcatacatggcagacgtggaagtaagagcagcacacaacgtgctggaagcatgagctcagacagaaactatagataaagtgattttcacttcctcagctaccgcagttgtttggagggaagatcgcaagaccatggaactagatctagatgagagacatgga

SEQ ID NO: 40462 - DNA, 141 bp, Glycine max
  Clone ID: 700941189H1
aatgattgcaagtacttaaagttgatttcactatcttttcttgtgttgaattgtcaatattgaaggctagctttggccccagatagaggaaaagaaaaaataagacaaagacaaaccgtgcaatgaataagacaaagctgt

SEQ ID NO: 40463 - DNA, 249 bp, Glycine max
  Clone ID: 700941190H1
aaggagctcatgaactcggataggggaaaagagattagacagaggattttcaaaatgaaaaacagtgccaccgaagcaatgactgaaggtggatcctcagtagttgcattgaataggttggtagaaatatggagggagcattaatggtatagaacttgagaatgagagaatgatttagaaatgtgcatgagattcagtataagaactgaatttctttctcaataaagaatgagcacgagttaagttgtt

SEQ ID NO: 40464 - DNA, 250 bp, Glycine max
  Clone ID: 700941191H1
gaatctgtcatcaaagggagccgcaagcttgatcacacaaaccgcttcaagtgtttggataaggcagctgtagagaccgaatctgatcataccaaagacttgtcaaatccttggaggctttgcacagtaacacaagttgaggaactcaaatcagtaatctcattactcccagtttgggcatcattgattgcctttgcaactgtgtacggtcaaatgagcaccatgtttgttctccaaggcaacacaatgg

SEQ ID NO: 40465 - DNA, 242 bp, Glycine max
  Clone ID: 700941192H1
aaaacttgtattttttttccttcttatcttagtagattttccccgacatgtttttaaaatcttgttatacctcattcctctatggaggaatattgaggaacgggtgaattttggggcagagaaaactttattataataacttttaagtgtgttgtggaccattttttcttcttctgaacttccaattctgtttcacttggcttcgcaaaagataactgactcgagtataagttgcttgtttt

SEQ ID NO: 40466 - DNA, 254 bp, Glycine max
  Clone ID: 700941196H1
caagccaagtgaaagtgagaacaaataaaaatcaaagagcataatgtcagggatcattcacaagattggggagacccttcatgtgggagggcacaagaaggaggaggagcataagggtgagcaccatgctggagaatacaaaggggagcaccatggtgaacacagtagtgagtacaaaggagagcatcatggtgaacacaaagctggagagtaccatggtgagcacaagccagagcacaaagaggggtcctagc

SEQ ID NO: 40467 - DNA, 268 bp, Glycine max
  Clone ID: 700941202H1
ctttgttccagcgaaacaaagctcttgtaaaggagttaagcacacccccgcctggagctactgatttgtatttccccactaggtattctcaatccacattggggcaatttaaatcctgtttttggaagcaatggctgacatactggaggagtccagattataatcttgtcagatattttttcacattggcttgtgccctcatgatagggacagtattttggagaattggcaaaaacagggagagctcagctgacctgacaatgattat

SEQ ID NO: 40468 - DNA, 267 bp, Glycine max
  Clone ID: 700941203H1
tattagggtttttgagtgcggtgcggcgatcctagcactctcttctgcagctttcgccgacagcttcattcaccatggctgagcaaaccgagaaggcttttttgaaacaaccaaaagtgtttctcagctcgaagaaaactgggaagggaaagagacccggaaagggtgggaaccgcttttggaaatccattgggcttggatttaagactcccagggaagccatcgaaggaacctacattgacaagaagtgccccttcactggcaatg

SEQ ID NO: 40469 - DNA, 264 bp, Glycine max
  Clone ID: 700941204H1
atcgagccgggaaggtggggtgcttgatgctgatgaacggtggggatgaagcggatttgaatggtgggcccggggccacactcgggaattaccaacagcaagggtttgaggttgagtatgacttggaagagaagcgcgtggggttcgcaaggaggcagtgcgcgttgctttgggagagactcaatcgcgacaaaaactagcgtaaggtatcgtgcactgaacatactagattccctcccctgctttctgtcacgggtcgggttc

SEQ ID NO: 40470 - DNA, 267 bp, Glycine max
  Clone ID: 700941206H1
gaaatatggatgtcccagaaaagaaccatgttttcaaaggtccatatctgaggtgactttggagagagtgtctggtctgtttggttccttgtcagtccttccttcaacaggcagaactagaggtacactacatcgacagagtagtgaaattgaaaattccagcaatcctccaaagcttcgcaggaatgcctctactgcatgtgatacgattagcacttcccaatatgctcctttgaagtgcacaagcggcttctgttttgatgaaaa

SEQ ID NO: 40471 - DNA, 257 bp, Glycine max
  Clone ID: 700941207H1
gtggtttgggcagtccaacaaacaggcccgagtggagaagcaagtggcgaatacgacgtcgtgggggtagcgaacctatttccgaagcaagatcgtggacgtcgttggggggtcagacagcgcaattgaaagctcagaagcattgttccgataaatcttcgcaggaaaacaaaacaaaagggaaaggatgattagcattctgagccagcggtggatttgggttgggaataggaacggcttctgggagcttcgttggg

SEQ ID NO: 40472 - DNA, 259 bp, Glycine max
  Clone ID: 700941208H1
ctgagattggttgggtgaagctgaacgtggatggttcacgcgaaccatacaaaagttcctccgctggttgtggtggtgttctgagggacgcatcagcaaagtggctccgtggctttgctaaaaaactgaaccctacttatgcagtgcaccagacagagttagaagccattctcacgggcttgaaggtggcttcagagatgaatgttaagaaactaattgtggagtcagacagtgactctgtggtgagcatggtggagaa

SEQ ID NO: 40473 - DNA, 266 bp, Glycine max
  Clone ID: 700941209H1
gagagaattacagagcattttccaacacgattacacgaccgaatcaaacccctctttctctccgaagctgcttttaatatcgtactggccttcgattgttctcctctttaatacatactgttctctcttcgatttgagggaacagtacaagagtctgagcatcggttaacccaactgcacaggtagtctccaaataatggagcctcatgatgagactggatgccaggctcctgaacgccccattctttgcattaataattgtggct

SEQ ID NO: 40474 - DNA, 266 bp, Glycine max
  Clone ID: 700941210H1
tggaaactggagaaattaggcatatgaccctgtaaattagggtttatgattaagttcaattattttaaggtgttgtctgtgtgtggtttaagtttcggtatctgtgttggtttcgtttcgtgttcctgtggttttcgtttttgacctacaattctagttgtgtttatagtcgatcgaatgaaatgatagtaagaaattatcgcatcaaaaaaaaaaaaaaaaaaaaaaaaaaaaaagaaaaaaaaaaaagagaaaaaaagaggggc

SEQ ID NO: 40475 - DNA, 260 bp, Glycine max
  Clone ID: 700941211H1
gcgattttcgattctcttctctgcaactatgcctaaccctaaggtcttcttcgacatgaccatcggcggtcaacctgccggccgcatcgtgatggagctctacgccgacgtgactccgagcaccgccgagaacttccgcgcgctctgcaccggcgagaagggcgccgggcggagcggcaagcccctccactacaaaggctcgtccttccaccgcgtgatcccgaacttcatgtgccagggcggcgacttcaccgccggaa

SEQ ID NO: 40476 - DNA, 251 bp, Glycine max
  Clone ID: 700941176H1
ctcagctattctctcttctctataagttcctctcctccattgtttttccctcccattcttccatttctgttttctcccatccctctcgcgcgctctctctcccatggaatcctccgctgccattcgatcttttcactatcccataggcactatgtcccatgtgcgagcctcccttgagaagcaggctgtagttcccattcataatgccggatggaactctaaaagtaggcttttcatccagcatttggcat

SEQ ID NO: 40477 - DNA, 257 bp, Glycine max
  Clone ID: 700941145H1
cacccacaagtcatcaaacttcgattgagtttcaaagagatcagtggtagtgtggtacattgtgttgatcaaggatggaacaaaagaagtttgtggcactattaatggtggtggtggtgatggcttcttctatgtggaaaggatccaaaggtcttagtctctgtaacatggatgaagatggattggaggcttgcaagccctcagtgactcagccaaacccagttgatccatcccctgattgctgcaaggctctggat

SEQ ID NO: 40478 - DNA, 258 bp, Glycine max
  Clone ID: 700941146H1
gagatagtggcggggtagtgacattacagtgtgggcataaaattttcaaagtcgaagcgagaacttgccatttcgagggttttagggttagggttttctcaaattgcaagaacatgggtttcaacattcaaccctatgggattcagtccatgctcaaggaaggccataagcacctttctggcctcgatgaagcggttctcaagaacatcgacgcctgcaaacaactttccactatcactcgaactttcctcggtccca

SEQ ID NO: 40479 - DNA, 258 bp, Glycine max
  Clone ID: 700941147H1
ctaaaccctaaacaactctttctcttcttccttcgctcgttgttctccctcgcgtagatcgacaatggcggagacagagacgtttgctttccaggctgagatcaaccagctcctcagtctcatcatcaacaccttctactccaacaaggagattttccttcgtgaactcatcagcaacgcctccgatgctttggacaagattcgatttgagagtttgacagataagagcaagctcgatgctcagccagagttgttcat

SEQ ID NO: 40480 - DNA, 253 bp, Glycine max
  Clone ID: 700941148H1
ggcttatcatttgcttttggttggactttgctgaatggagagtgcaacaatcagccaatggttagatcttcttgtgtatgtactgctattgctcaaggcagaaggatctatagttccattgattttggtcgagaatgcagaatcaaaaggagctgtttgtttggatggaagtccccaagcttaccactttgataaggggtttggggaaggtattaatagctggattgttcacattgagagaagaagatggtgc

SEQ ID NO: 40481 - DNA, 250 bp, Glycine max
  Clone ID: 700941149H1
ggagggttgactaggtttttccgcaatctgtttggttgcttcagaggaagtagtactcagcgttctgcttctagtagagagtctatgagggcgagttcctctcgttctagtactatggatccttcgttgcggtctcggaggacttggtctatggatgtaaacagtgggatgagagcgtggtagtagtagtaataggatcgatgactgatgagggtaaaaggctaaaaatctcaactttgtttctgggttc

SEQ ID NO: 40482 - DNA, 253 bp, Glycine max
  Clone ID: 700941150H1
catccttagagcagcagctatcaaggctcttggatccttcaggagcaacgcttagttaattaatcaattaagctagctaccttgattaatttgccaacaagggctatgcatggtgtttcccccgaagaataataatttctatgttgaggagtgctagtgatctgtctatgcagttccctaatttaggctttttcgtcttttcctctcatcagctacagttgttgggggtgtttggaagagaaggccaaaacca

SEQ ID NO: 40483 - DNA, 244 bp, Glycine max
  Clone ID: 700941151H1
cggctcgaggaatcatcaaatgcttcatcaacttatgggagttgatcctggaactaaccctgtttgccatttccttggaagcaaggccattttatgggtacccaatttatctgtggacactgcctatcagaccaacattgttgcttaattagtccatgcatcttgagcaccatgagaatgagattgtgtataaaataaattatcatgtgctgtgtgttgtgcaagtactaccttctctagctag

SEQ ID NO: 40484 - DNA, 250 bp, Glycine max
  Clone ID: 700941152H1
ggcaatcattgcgctctgataacatcaggatgtttgtattggatgaggcagatgagatgctctctcgaggtttcaaggatcagatctatgatatttttcagctgctgccacctaagatccaggttggggttttctctgccacaatgcctcctgaagccctggaaatcacaaggaagtttatgaacaaacctgtgaggattctagtaaaacgtgatgagcttaccttggaggggatcaagcaattttttgt

SEQ ID NO: 40485 - DNA, 251 bp, Glycine max
  Clone ID: 700941153H1
cgcaactacaaagaaagaatcccaggcgaggaaaaagatggatgggaaggagcaggatgtgtcgttgggagcgaacaagttccccgagagacagccgattgggacggcggcgcatagccaagacgacggcaaggactaccaggagccggcgccggcgccgctggttgacccgacggagtttacgtcatggtcgttttacagagcagggatagcagagtttgtggccacttttctgtttctctacatcaccg

SEQ ID NO: 40486 - DNA, 254 bp, Glycine max
  Clone ID: 700941154H1
caaaatgctaaccttcaatctcaatgctatctcttcttcgttctcagttgttccatttcatgccaattatccactgtctactcaaacccaattgttagttcctatccaatcttagttactcctttgctacaacaggaaccagaaagttcaagtctttccagctcaaggctggattttgggaatcaattaaatctgggttgatgaagaataactccatgcaagtcattgatccaccctctgcagatgaagaagac

SEQ ID NO: 40487 - DNA, 253 bp, Glycine max
  Clone ID: 700941155H1
gaatgggtttatcactcttacggtgggttctgccgctgactctgttgctcacctgcgccctaggtttccaatcggacgagcttctcctcgacgacgaagagttcggcatcgaaggaggacgaacctcctttgattccgattcgcatccaccttccaccgcctccacctcgaggaagaggctttccgactcctcctccgattccaagatccagttccctctccaacacgctttcggcgactccgatttctccga

SEQ ID NO: 40488 - DNA, 253 bp, Glycine max
  Clone ID: 700941156H1
agttaccttcctccaactataatatctcatccaatcaaaacccttttctcaattgtctctctctctgactcactccacaataagtgtcgattttttcctaaataagtgatagtgtagttacacctttttttgtgtgtttaccacttttgagtgccacagagttctgagtttcataggagaaaaaaaatgacagaagaacaaaccaaaactgttgagtcagaatcagtaacaccaccacctgctgctgctgctc

SEQ ID NO: 40489 - DNA, 248 bp, Glycine max
  Clone ID: 700941157H1
gagggagttaagggtgagaggagcagtggtagagctcaacaataccctttgaggccagaggctgaagactgtgcattttatctcaaaactgggacttgcaaatttggattcaattgcaaattcaatcatccgcttaggaggaaaaaccaggctaaaaaagagaatgcgggagaaagagaagaacaggcagaaagatcaggccagatggaatgcaagtattatttaaggtctggggggtgtaagttcgg

SEQ ID NO: 40490 - DNA, 252 bp, Glycine max
  Clone ID: 700941158H1
ctcgagccgctcgagccgattcggctcgagccgtgtcggtggaggcagcagtagtttgaaggacgagaggcgtcatgtgtaagccattatgcttcaggtagtgtgaccaaaggacttgaaatttgatttcacggttataatgaaaaaaatatattacactgttcatgtggtgattctacagcaaaattatgtgcaatatggggttgtaggcatttgcaaggtgtttgcaagtgtttttttaggcattctgct

SEQ ID NO: 40491 - DNA, 255 bp, Glycine max
  Clone ID: 700941160H1
gctgattctgtgcttttcccccaaaagaagcaaaaccactgtcactcgaacaagaacaagaagatgaagattaacgtcaagactctcaaggggactcactttgtccttcaagtgaaccctcaagacacggttgctgttgtgaagaagaatatagagacagcgcaaggtgctgatgtttaccctgctgcgcaacaaatgcttattcatcaggggaaggtgcttaacgatgccacaacccttgaggaaaataaagtt

SEQ ID NO: 40492 - DNA, 256 bp, Glycine max
  Clone ID: 700941161H1
ctctcatattcttcaggagtctactgctaaagagattaatgaaaatcccgaggcaggatgggaggctgctataaatcctcgtttctccaattatacagttgaacaatttaagcgccttcttggagtcaaaccaatgcctaagaaggaacttagaagtacacctgctatatctcacccaaagacgttgaaattgccaaagaattttgatgcgaggacagcttggtcgcagtgtagcactattggaagaattctagat

SEQ ID NO: 40493 - DNA, 255 bp, Glycine max
  Clone ID: 700941162H1
gaaaacaaaaaaagttctcctttgaaacttctctgggctatgttattttgaaagaagttacttcgcatcaagaatgggttcaggtgattggtttaagacaataattagcttaagaaaatcaaaacaaggtagatcaaagaaagcaaagggtatcttagctcaagagaaactaaatgcatcaaagtcaaacagctatccaggaaaagagtctggtggtttagcaaatggtactaaaagtgaaaaccttgtgtcagc

SEQ ID NO: 40494 - DNA, 254 bp, Glycine max
  Clone ID: 700941163H1
gcattttgtagcaacgagtgccgttcaaggcaaatatcgatggacgatgaacgcaaagaacggtgtagatcagaagcttcaaggtctgtggagttgtcaagttcaccatacacagcaagggatcaaatgttttcaactgggattgttgccctttagcgtttaatttctgtcactgtagtagagactcatatatacattgaagtttgaattcacatcatataaggctatactttgtgaatgaaattaagacacct

SEQ ID NO: 40495 - DNA, 249 bp, Glycine max
  Clone ID: 700941166H1
cttgggttgaatttgacttggcaaaccctagcctgggaattcttcagagaacccgttgttctgctattctgaatctgtttcatagtttgcagcattcagagcaaagtttggaagggtgaagcggaaatgcttctgatttggtagtagtccgttggagattcggtcatggctaggcgtcatggatgggagctcccctttcacacttttcaggtcgcagctataactgtatttttcttgctatctatagca

SEQ ID NO: 40496 - DNA, 248 bp, Glycine max
  Clone ID: 700941168H1
ctcgagccgctcgagccgattcggctcgagccgtgtcggtggaggcagcagtagtttgaaccacgagaaccgtcatgtgtaagccattatgcttcaacgtagtgtgaccaaaggacttgaaatttgatttcacggttataatgaaaaaaatatattacactgttcatgtggtgattctacagcaaaattatgtgcaatatggggttgtaggcatttgcaaggtgtttgcaagtgtttttttaggcatt

SEQ ID NO: 40497 - DNA, 243 bp, Glycine max
  Clone ID: 700941169H1
agacaacagaggaacactcccaaacaaaccatggacgtgggtcagatgcagagacagtggatcgactacaccaaatccctcttcctcgagggcttcctggatggtcagtttctgcaacttcagcagcttcaggatgagaacaaccctgactttgtggtcgaagttgtctctctcttctttgaagattctgaaaggcttctcaaagatctcacctttgccctagatcagaatggcgttgacttc

SEQ ID NO: 40498 - DNA, 251 bp, Glycine max
  Clone ID: 700941170H1
aagggacatatgcaaaacttcaacctgaaagagtaggattttccgacttgcccaatcataaggctatcctcgaaacatgtcttcggcagcatgctactctatctcaaggtgacattttaactgtaaactatggagaacttgcttacaaattaagggtccttgagttaaaaccttcttcaagcgtatctgttttagaaacagatattgaagttgacatagttgatcctgatacatcttcagaaaagacagat

SEQ ID NO: 40499 - DNA, 248 bp, Glycine max
  Clone ID: 700941173H1
agaactttcagttttatacagtcgtttctatgggatcttgttgggaggcattctactcatgtacgagttccattattatttgagacctattcttcttcttatgtactctttttggatacctcagataatcaccaacgttattcgcgattcacgcaaaccattgcatcctcattatatcttagggataactgttactcggcttgcaatcccattatatatttttggttgcccaaacaacttcatgcgca

SEQ ID NO: 40500 - DNA, 249 bp, Glycine max
  Clone ID: 700941175H1
aaaatagtttggttttgtagtaagtgaggtgaggtgccaaaatggtgaagataactcttggtactttcgatgactcttttggtgttgcctctcttaaggcttatttggcagagttccatgcaactctgattttcgtgttcgctggtgttggttcagccatcgcttacaacgagcttacaaaagatgcagccttggatccaacggggctggtggcagtagctgtggcccatgcatttgcactgtttgtag

SEQ ID NO: 40501 - DNA, 256 bp, Glycine max
  Clone ID: 700941144H1
attcggtcttgtgattttgacttagagcaaacatgtgtattgcattcaccagaaaagaagtaacagataggattgataagtggtttgctgcgtgtgaagaggagaattggcttgacgaatataatcaagatgacaacagatactgtgctgggcgaggcgctcacattaatcttaaacgtgcagaacgcgctagaataactataagcaaaattccagctatggttgacaatcttataaacaaaacactagcctggga

SEQ ID NO: 40502 - DNA, 259 bp, Glycine max
  Clone ID: 700941113H1
cttgcttacagttcctataattttttttctccattagattaccaagctctgcaactttgcttctcaacatggagtatcgtctcctacccatttttactttactcaatattgcactggtggcaacccatgctgctttaccccctgaagtttactggaagtcggtgcttcctactacgccaatgccaaaagccatcactgatatcctttactctgattgggtggaagagaaaagcagctcagtgcatgttggaggtggagg

SEQ ID NO: 40503 - DNA, 113 bp, Glycine max
  Clone ID: 700941114H1
aagtggaataaccaagaacaagagatttaaaaaaagaaaaaataaacaagaaaacaagagagagaatagatagaggatgatggtgagcacatcctctgtttccattcccagtt

SEQ ID NO: 40504 - DNA, 247 bp, Glycine max
  Clone ID: 700941115H1
gtgttcaccacctctgctgagcgagaaattgtccgtgacatgaaggaaaaacttgcatatgttgccctagattatgagcaagaactcgagactgcaaaaagcagttcatcagttgagaaaagctatgagcttcctgatggacaagttatcacaattggggcagagagattccgttgcccagaagttcttttccagccatctatgattggaatggaagctgctggaattcatgagaccacctacaatt

SEQ ID NO: 40505 - DNA, 261 bp, Glycine max
  Clone ID: 700941116H1
cactcatcacatcagggtcttctcttcttaattttctcactgctttttcctcttctatggctggccttcaacaatacaacttcttccccaccgatctcttgtaccctcgtccacaaccccaacaagcttctcctaaacccaccatgcttcccctccaaacccctaatgttcaagatcacactcagcaccaacaaccaccaaggaccaatgccaccccttcaacttcttctgccgttgtttatagccaaaagggtcattcta

SEQ ID NO: 40506 - DNA, 225 bp, Glycine max
  Clone ID: 700941117H1
aaaattaagcggaagtctacccagttagagaacatgtctatgatattacaggagatggagcattttgctttgaatacaaatagtatcctaactgagatgcggcagagagttgaggacttggtggaagaaacaaccagacagagagtacgatctgctggtaatgaagaagcactttctagagtcaagcatgaatttgagtgtctggaatcaaatgttagtggtcta

SEQ ID NO: 40507 - DNA, 257 bp, Glycine max
  Clone ID: 700941118H1
ctcacaagtggtttctagggtttttccttttgaaccaattagttaataatcttaaacctcaatttggagcattctctgtgatttttatttttatttaaaccaaagtgggtcttttgtagattcctgaggagcatgcctcctttcctacacaaaataaaggattattctgattcctttaaataaaatgcttgttgatttatccttcatagtgttgtggtaaaacctccacctctgcttctcacttactatctccctct

SEQ ID NO: 40508 - DNA, 254 bp, Glycine max
  Clone ID: 700941120H1
gacgaaaactccttatggtcaccttcaaaaccagtcaaccaacgtgatgctgatctcatccatttttgggataagttccgcaaagctcctgagggttctctcaggaaaaatgcagctcagaaacaagttttggaagcaatgtctcatagaatgcatgtagacaacagtgtaaaacttattgggaagcttttatttggtattgaaaagggtccagaagtactcaacgctgttagaccggcaggatcggcacttgt

SEQ ID NO: 40509 - DNA, 258 bp, Glycine max
  Clone ID: 700941121H1
ccggtaccttccttcaaccacaaaacctctctccctctaccacccattctcttctctctctctctctctcccttcctccatctctcaccttctcaatctcatcaccaccaccatcatcatcattatcttctcctatctctataacctcgatatccctcaaaacctcaccctcataccaaatgatatgaccctcttgtgagaacattttttcccccttaagaataggtcaaaggctgcaactttttctgaaccaatctc

SEQ ID NO: 40510 - DNA, 255 bp, Glycine max
  Clone ID: 700941122H1
cacagataactacaactccatagatgaggtgactgaggctcttgcacgtgcaggccttgagtcttcaaatcttattcttggtattgatttcactaagagcaatgagaggacaggaaagcattcatttaacagaaaaagtttgcatcacattgggaatggtccaaacccctatgaacaagcaatatcaattattgggaagaccttggctgcatttgatgaggataacttgattccttgttttggatttggggatgc

SEQ ID NO: 40511 - DNA, 257 bp, Glycine max
  Clone ID: 700941123H1
ggtacttgctcacagatatatttttgtttgtctccatcattttctcgagatctttcagtttctgtggttcatcttgcttcttcttagtctttccccccctctctgtaacatcccgcttctctgaatccctttctgctaatcatctgtctttcaagctaagattttctggtttgtcttttaattcaccaaaaagcaaacttagaaggatttttcgaaagccaggtgttttcagaaacgagatccaggttttattgtcg

SEQ ID NO: 40512 - DNA, 255 bp, Glycine max
  Clone ID: 700941125H1
actcaaagttgatcgaaacctcttttacaccatcggtttggccaagaattcttgccccacatgcgtcaatggaactcggctacttgcttccttaaacaatgtctcttttgtgatgcctcaaaccgcgcttctccaagctcactacttcaatatcaagggggtttacagaactgattttcctgataagcctctaactgcttttaactatacaggtgcaccattaacggctaatcttggtacttcagttggcacaag

SEQ ID NO: 40513 - DNA, 256 bp, Glycine max
  Clone ID: 700941126H1
gagaatcactacattaaactggacatttatcttatataaatttgaaaacaacctaataaaagcacaagtcagatataaagattacttatttaatcagctctttcaattttcctttactcagtagtatggttttaatttttccgtaatcatgtatggaatggggatgcagtattgttacatgtgtataatttattgagccagtcctagttttactgtgtcctatatataatatgaaggtgcctctcatatcatagag

SEQ ID NO: 40514 - DNA, 255 bp, Glycine max
  Clone ID: 700941127H1
ggaacaaagagaatgcagctgccgttttagttcacctctgttctggagatcaacaatatcttgcacaggcacaagagctgggggtgatgggtccactgttagaattggctcaaaatggtacagacagatgcaaaagaaaggctggacaattgctagaacgtatgagcaggttagttgagcaacagcaggaagttccaatacaaactgaaactcaagctcagaacgaggatacccaaccacctttgattactaacc

SEQ ID NO: 40515 - DNA, 255 bp, Glycine max
  Clone ID: 700941128H1
ctagtgaacacatcagtgatgatggaatatatcttcttgagaatggtcatgattgtttgatatatgttggagactctgtgaatccagacatcgtgcagaaactgtttggtgttgctacagttgacaaagtccctaccctgtttgtattgcagcagtacgacaatccactatcaaagaagttaaatgaagtggtaaatgagatacggcggcaaagatgttcctacttccggttcaagctctgcaggaaaggagatc

SEQ ID NO: 40516 - DNA, 258 bp, Glycine max
  Clone ID: 700941129H1
gccatggatgagtacacttctgagatattcatgggtggaaagaacacaattgtgttgcacaacacatgtgaggattcactgttagctgctcctattatcttggacttggtccttcttgctgagctcagcactcgaatcgagtttaaagctgaaaatgagggaaaattccactcattccacccagttgcgaccatccttagttacctgaccaaggcccctctggttccaccgggtacaccagtggtgaatgcgttgtca

SEQ ID NO: 40517 - DNA, 259 bp, Glycine max
  Clone ID: 700941131H1
ccttacaattcctatcatttcctatatcatctaaaccttattttaacaaaatccaaaatgatgaacaagcaatctgtcttgcccttctcactagcattgctagtttcatttttaaattgcaccaccactttagcccaattatcaccagcttctgcccctctcaaaccaccccaacctgctcctaccataccagctgctgctcctcagcaaccattggttccttcattgccacaatcaccaagtgattccacccctgaca

SEQ ID NO: 40518 - DNA, 262 bp, Glycine max
  Clone ID: 700941132H1
gcacttacacctcttgtttctgtttgagtcgagtcgagtctcttctcttctaatctcctccatagcatattttgacccgatccaaccctcgctttgctagatctcttgatgatgggttccgttctagaggacaagatagaccgtcatagttttcacgaccaccacgacgccgacgatactcccttagcatcttcctcttctaaagtcctccaacaattacacagcttcgattttgaggacacaagcgttgtagatttgcgga

SEQ ID NO: 40519 - DNA, 256 bp, Glycine max
  Clone ID: 700941133H1
atagaaagaaataaccaatggcacgatgatatgagtgcaccgttaaccttcgttgttttgtatcaacttgaagatcagggtaattttgaagagaaaaaagcttggagaagtggagcttggccactgaatatagctgcctggggccaatgatcgactcaagattagcattaagaattgataaagtggtacttgagagtgtgtctctttaaatgtttgtgacactcatacagtatatatgtatctaaatcaaatcttg

SEQ ID NO: 40520 - DNA, 251 bp, Glycine max
  Clone ID: 700941134H1
acagaacatcttttttcttttcatccccacaacacaagtttcccgctcttgaataccctccaaagcagcaaactagttaccatatataccttcaaagaacaagaccatcactattacttcacagttcataaaggttacaagtccaacatgggaaactgcttgttggggggcatgtcagatcctgatacaataatcaaagtcacaacatctaatggtggcatcatggaattctatgctcctattactgtgag

SEQ ID NO: 40521 - DNA, 221 bp, Glycine max
  Clone ID: 700941135H1
tcgataatacacgtttggctcttgcttcaattggtaaactcatgtttgctcaattctctgagcttgtcaatgattattacaacaatggtttgccttcaaatctcactgccagcagaaaccccagcttggattatggattcaacggatctgacattgccatgggatcttattgtgctggacttcactattatgcggctccggtgacaagccacgatcaatgc

SEQ ID NO: 40522 - DNA, 233 bp, Glycine max
  Clone ID: 700941136H1
gacataccagtttgagagcctcttcgcgaacgcaacttcgtcggtggcacatgcagtcggattctgggagtacagtactttcagcactgctgcagcactgtatcagtctcttggcttgggcacgactggaggttggaccagaggccaaaaggagcttagtccctgcagaagccatcgtagcagcaggagctctcgctgctatggggtgcctacaggttgtcacaagtcttcgg

SEQ ID NO: 40523 - DNA, 254 bp, Glycine max
  Clone ID: 700941137H1
gtggatacaattgaggatgcatcagattcgtggggtttgtctgtgagctttctcagcataatcttgctaccaatagttggaaatgcagctgaacatgcaggagcaatcatatttgctttcaagaacaagctggacatttcattgggtgttgcattgggttcagcaactcagattgccatgtttgtggtcccattatgtgtaatcgttgcttggataatgggtatcgatatggacctgaacttcaacctcctaga

SEQ ID NO: 40524 - DNA, 255 bp, Glycine max
  Clone ID: 700941139H1
ctttgaccttgcagcttgagattgtaaagttgcaaactttgaagctattagtgtagaagatgagtacgctggatgcaacaagggctgaacttggtcttcttgttttatatttgggcaaggctgaagcaagggacaaaatatgcagggcaatacaatatggttccaaatttttgagtaatggggaacctggtactgctcagaatgtagacaaaacaaccagcttggcacgaaaagtcttccgtctctttaagtttg

SEQ ID NO: 40525 - DNA, 256 bp, Glycine max
  Clone ID: 700941142H1
cccaccgttagtgaattatactctctccccttctttctttatatataaccctttcccttgcttgtctttccactcttcaaattaaaccagcaaaatcttatcttagctaccccatcacaacaaccacgatactatttctcatactctattaggcaaaaacaccaccaaatgggagaggaaaaggagcagcctaagaatgacaccgagaaaaagcccgaggaggtagcccccaagaaagacgacggacccatccctg

SEQ ID NO: 40526 - DNA, 242 bp, Glycine max
  Clone ID: 700941143H1
tgacttcctaaacctaagccatacacattggtaatggatccaactcaactcattatcatattagtaatgatccaactgttcagtgtacagaagtagctcaaagtcaagtgtttaggaatgggtggatttttcaatttgtttaccattacagtagttccaatgacaatggaactaaagcttaagtcatcctcagatgaccccaatgcgtatgatttaggtcctctataggttgctggggtatt

SEQ ID NO: 40527 - DNA, 255 bp, Glycine max
  Clone ID: 700941112H1
gcatctggaagttacaaggagatggttatatacgtggaagcttgtgaaagtgggagcgtgtttgagggtataatgcctaaggatctgaatatttatgtcacaactgcatcaaatgcacaagagaatagttggggaacttattgtcctggaatggatccttctccacctccagagtacatcacttgcctaggggatttgtacagcgttgcttggatggaagatagtgaggctcacaatctaaaaagggaatccgtg

SEQ ID NO: 40528 - DNA, 244 bp, Glycine max
  Clone ID: 700941079H1
ggatgccaaaaaatatgcaggccaatagaccggcagagaaatcccatgggactgatgctgtgatgtgggcacctgttaaacctcagagcaagagtgagatcgtggatgaattgagtgagataagtaaaattgaggcagttaatcctctaaagagtgagcagcaggtgcataatttaaaaaataagagggcagaaatggagaggtatgttccgaaaccatgtgcaaaagaacatgctcagcaagg

SEQ ID NO: 40529 - DNA, 239 bp, Glycine max
  Clone ID: 700941080H1
gtgaagtcagcagaggtgtttgataatgcaatttaatatacttttcagcatagtgaattgttaggaatttttacatggagagaaagtactaaaccaacagctagcacagctaactgtaaccacctttcttttacattaaagaattggtttgatgctttaggaatgagcttttcttatggtaccgaggaattgttcttaattgttgttttgtgtcgggctcaggatcggccatctaccaa

SEQ ID NO: 40530 - DNA, 168 bp, Glycine max
  Clone ID: 700941081H1
ggatttcggttcgagaccacacaaccctgttgaacccgtaatgttggcccgtatattgcgcctcttggcttgttacaaaatccccccttttccccttggaattctccctcatggcaaggttaaaaggccctatggtctcgcccctgtgcctaattacttggtcaggac

SEQ ID NO: 40531 - DNA, 213 bp, Glycine max
  Clone ID: 700941082H1
gggcttattggccaaagaccggtcttgaggtttgttcagtaaattgtggttcatgtaattgttggaaggaaaattccgggaacttcaacaattcagtttagacttccgtccagtgacctcggctccttaatctaatgatccaagaccgatcaccagctataagaagctgctctgggatattccacatgcttctggacactgatcgctatgagt

SEQ ID NO: 40532 - DNA, 105 bp, Glycine max
  Clone ID: 700941083H1
cggtccaagattaattactcagaagattgctcagttcagttaatccccttcctggcgccaccgatttccaagttcattaccttggtccaacattgcccagggctt

SEQ ID NO: 40533 - DNA, 239 bp, Glycine max
  Clone ID: 700941084H1
aattgcttctagttctctcacttaaactattttcacaaaccatagaaaaataataatttttttttccatggtaaaaggccttcctcaaagggggccttggaacagggatttgagtccccagaagccaacaatgtcctcctcatgtcccaaatggaagaggaccaagaggaagagtacctatggcgatgatagacttgtgagcatgattcaatcattggaggcagagatcactgacactg

SEQ ID NO: 40534 - DNA, 239 bp, Glycine max
  Clone ID: 700941085H1
ctggaatcctaaaattgttaatactctaaacacttcagggacaagaagggttcttccatgcaagtcaaagttcctttggaggaataaatcctcccaaaacctgaggccgtactcaggcaaagataatagtccaattgcctggtccataggatccaatagggcactaggctgataatggtggcaggaacctgatagtgaatatatatcgtgttcacaacttatcaaataggagcttggac

SEQ ID NO: 40535 - DNA, 241 bp, Glycine max
  Clone ID: 700941086H1
ctaaaattggaattgcttccttaaattgccatggcaatgagcaatttaagttaccaggtttggaccctgagtatattagattgttcattgagggcttgttgtgcactgctagggttgtgtccaaggctgtgatcactgggtacaaagatgggttcaaccagattaagtccttggttgatgttggaggtggcattggagggtctctttctgagattgttagggcttatcctcacatcaatgc

SEQ ID NO: 40536 - DNA, 243 bp, Glycine max
  Clone ID: 700941087H1
ggatgccaaaaaatatgcaggccaatagaccggcagagaaatcccatgggactgatgctgtgatgtgggcacctgtaaaacctcagagcaagagtgagatcgtggatgaattgagtgggataggtaaaattgaggcagtaaatcctctaaagattgagcagcaggtgcataatttaaaaaataagagggcagaaatggagaggtatgttccgaaacctgttgcaaaagaaatggctcagcaag

SEQ ID NO: 40537 - DNA, 245 bp, Glycine max
  Clone ID: 700941088H1
aaggtgaagtcagcagaggtgtttgataatgcaatttaatatacttttcagcatagtgaattgttaggaatttttacatggagagaaagtactaaaccaacagctagcacagctaactgtaaccaccttccttttacattaaggaattggtttgatgcttaaggaatgagctttcctaatggtaccgaggaattgtccttaatggtggttttgtgttgggcgcaggatcggccatctaccaaggt

SEQ ID NO: 40538 - DNA, 237 bp, Glycine max
  Clone ID: 700941090H1
atgggattggtctgaggatgaagttttcattgcttttaggaatcagcctaacgtcatgctgtactcaatggaaaaactcattacagtttggagaaaagggttgttctgaggggtttggttgtccagcatcttctctccaatggtttgataaagaagagttctagcttggttacactgtttagtaagtctgataaggtgtttctgcaaaagtacgtgagatgtttctgggacagggaa

SEQ ID NO: 40539 - DNA, 225 bp, Glycine max
  Clone ID: 700941091H1
cggtaatgtccatgctgcgtgggaaagggggttaagatacgtgaaactgatgaagcaaagcattcctgctgctgttcactctattgtggtgcagaccccttctggtctggctcgcactcatagatttgcaactgaaacagttgatctgccagctcaagaaggtgaaagggtaactgttgctgtggcagctccatctaatgtgtatcgaaaggagggcccctttaa

SEQ ID NO: 40540 - DNA, 237 bp, Glycine max
  Clone ID: 700941092H1
ctgcattttgcattcctgcattggaaaaaattgaccaggataataatgttattcaagttgttatactggtcccaacccgagaattggcattgcaaacttctcaagtgtgcaaagagcttgcaaagcacttgaagattcaagttatggttacaacaggtggtaccagcctgaaagatgatataatgcgcttatatcaaccagttcatttactagttggaactccaggaagaatattag

SEQ ID NO: 40541 - DNA, 232 bp, Glycine max
  Clone ID: 700941093H1
cgaagagaatggctcccaagggtttaatctttttggctgtgttatgcttctcagcactgtcactgagtcgttgtcttgcggaggataatggacttgttatgaacttctacaaggaatcatgccctcaggctgaagacatcatcaaagaacaagtcaagcttctctacaagcgccacaagaacactgctttctcctggctcagaaacatcttccatgactgtgctgttcagag

SEQ ID NO: 40542 - DNA, 240 bp, Glycine max
  Clone ID: 700941094H1
gaaaactggaaaagatgatatagatgttgggaaactgagacctacactctttgatgtttttggagaagatgctagtcctaaagtgaagaagttcatgaatgttatttttaacaaactccaacatggaagtggtgaaagtgggggtggaatattggggttggtaggtggtcttgcacaagagtttctcaagcaaaagcttgatgacaatgatgaggtatatgcaaagcctgcattggagac

SEQ ID NO: 40543 - DNA, 212 bp, Glycine max
  unsure (1)..(212): unsure at all n locations
  Clone ID: 700941095H1
tgccaaagaactttgtaccagagttctgattcagcattcttctaatttatatgctgccaatggtgctgcggtagtcttagcagaaaagggccattttgatgtgtcaaaggatatctttacacaggttcaagaagctgccagtggtagtgttgttgtccagatgcctgatgttttgataaatctggcacatgntttattttgcacaggggaat

SEQ ID NO: 40544 - DNA, 181 bp, Glycine max
  Clone ID: 700941096H1
ttcagatcgaacgaccgtattggacacccggtgtactacaacgactttggagaatttgaggacaaggagttgtacagcaagacgtttttggacgaggaaaagaggaacaagttcataaagtggaggattcaaccttttagaaacaactttagaaatttgtcaaccccttgcattggtgatt

SEQ ID NO: 40545 - DNA, 259 bp, Glycine max
  Clone ID: 700941101H1
aaattctgtagaaaataaccatgataaaatagaaaatctagagggttctcctgccgatcaggatgaagcaggggacaaattagaagatgtacttgataacgatgatgaagccagtgatagtcctgggagtgaaggatctttgcataataaagtggaagagaatgcaaaagaagctgaggaagaacctattgtgaaatctgaaactgatataaaggtcggaaacaaagagtcttctgctgaaatcatcaataaggggaat

SEQ ID NO: 40546 - DNA, 256 bp, Glycine max
  Clone ID: 700941102H1
tggacattgtttgtgtgaagagaaaaggaagcgtatcaactgatgataataaacctgcaatgctgctacctgcggcttgtgagaatcattctattgagcttccgaaacttctcacaattgagggccttcaagaggagtctgggggagtagaaaccatgtcccacaaggatggcgatgaccaacttgaagatgcagtttatgtggaatctgaatcggacaggaatgttgtctccaagaatagtaaagcttctaagaa

SEQ ID NO: 40547 - DNA, 257 bp, Glycine max
  Clone ID: 700941103H1
gcaccgtcgtcttcatttcgcagccatcttctgcgccacagcataataacctgagcagtatagaagagtttagtagaatagaataggtagcaagattaggaaagagagaaggcgaagaagatccggtgattcttcacggtccgatgatgatgcggaaagccgtgatttgtcctctcaggagagacgccggagagacggtcacctcggccaccatcgattgtggcggggacggagcaggcaggactcagatagttcct

SEQ ID NO: 40548 - DNA, 256 bp, Glycine max
  Clone ID: 700941105H1
aaccacttatcgctgaaccatccaaaatcgctctgctttgagttggcgaaggttataaattgtcatgggaaacagatttgtcaggggaaacaaattggagaagcaagaaaaggatgacataatattactcaagattgtacctcccgtggaccagatttatgctaaatggcttgccagagaccttgcaagaattcacagctttactccaaaacgtattcgtgcagtgcagccgccggatcattatgtagaacatatg

SEQ ID NO: 40549 - DNA, 223 bp, Glycine max
  Clone ID: 700941106H1
gctatccaccaccaactcaaacacagcctccactagagaataagagataccttcctgtcaacccagtctcggtagcttaagttgtctccttgactctatagacgctcttggtgatgaacatgatcatgcttgagacactcatcataggatatcaaagagactagctactccatctgctcagttgatgtcactagccatcatgggatccgttgcagagatcaat

SEQ ID NO: 40550 - DNA, 248 bp, Glycine max
  Clone ID: 700941107H1
ctaataccaagaaatcctaatgatagtatcaaaactaaatataataccataaaattataaatattcaacattacaacttcatcataatgcaaaccaatgtaataaagtatgacagagtaagtgtaaatcttacataaatgaccaaatcagaagtttgataggtgaaaacttattggatcaaagaagttcttgtaattcttggcttagaacctaactcaaccccactagatcggctagtacgataagga

SEQ ID NO: 40551 - DNA, 229 bp, Glycine max
  Clone ID: 700941108H1
ctctctgccttgctcatttacacacctctacaacctttcactatcagctttgtttgaatccctctctctcctttccaaatggccagcgttgaggttgcacatcaaacaccaacaacagttccagaaaatgaaacaaccgaggtaatcaagacccaggaaacaaccccggaaccagtaccagccactgaggctcctgcaacagaacaaataacagctgaggttcctgctc

SEQ ID NO: 40552 - DNA, 236 bp, Glycine max
  Clone ID: 700941077H1
ctggtattctaaaactgtttatactcttaacacttcatatacaagtatggttcttccatgcaagtccaagctccttttgaagtattaatcctcccaagagctgaggtcgtactcatgcaaagattatagtcctattgccttgtccataagactctatagggccataggcatgataatggtggcaggaacctgaatagtgaatatatatcgtgttcacaacttatcaaataggagct

SEQ ID NO: 40553 - DNA, 255 bp, Glycine max
  Clone ID: 700941109H1
aagcatacgggcatatataaaggatccaataacacccaggtttgtgcatgtgagctcagcaggagttacaagacccgaaaagactggaatcgaacggcgggaggctgtttacttagatcgattccaggcctttcggttaaacaaggaactggattatatcctcacatttaaactaaagggcgaggatttacttagagaaagtggcattccctatgcaatcgtgaggccttgtgcattaactgaggagcctgctgg

SEQ ID NO: 40554 - DNA, 254 bp, Glycine max
  Clone ID: 700941111H1
atctgtttctgaggagcagcctgctttgaacaaccatcttccggcagatggagcagaatggattgatttttttgtcagggaaatgatggttgctactagtgttgaagatgctagagcacgtgctgccagaatgctggaggttctagagaaatcaatcagtgaaagagcaaaggctgaggcaactgatgtgcttcagaaggaaaatttgatgctgaaagagcaaattgaagcgttgattaaggagaaaaattctt

SEQ ID NO: 40555 - DNA, 192 bp, Glycine max
  Clone ID: 700941040H1
attaatgtgtgtttgtcacgagacccatagtgctgccaaattatagtagctctctgtctctatctgaagaagatgaagttctgaagaagcatgtgtggaggtgctatcatctcagacttcattggtgtgaagcgtggccgcaacctcgccgcgcaggaactgtggtccgagcttgaccctttctctgacctc

SEQ ID NO: 40556 - DNA, 233 bp, Glycine max
  unsure (1)..(233): unsure at all n locations
  Clone ID: 700941041H1
ctatcttatttcaaatttgttggtagagtggttggaaaagctatatttgatggtcagctcttggatgtccattttactcggtcattctacaagcacgtcctaggggccaaagttacgtatcatgatattgaagccattgatcctgactatttcagaaatttgaaatggatgcttgagaatgatatcagtgaaattttggatcntactttagcacttgatgctgataggaaaag

SEQ ID NO: 40557 - DNA, 229 bp, Glycine max
  Clone ID: 700941042H1
cttcctggtatgtacaacaaggaagagaacccccgtgtgcccatcatcgtcaccggtaacgatttctcaacactgtatgctccactcatccgtgatgggcgtatggagaagttctactgggcacctacaagggacgatcgtgttggcgtctgcaatggaattttccgcactgacaatgttcctaaggatgacattgtcaagcttgttgacacctaccccggccaatcta

SEQ ID NO: 40558 - DNA, 235 bp, Glycine max
  Clone ID: 700941043H1
agcctggtccaaacctggctggcagctcagctggctcctctggccactctaggcttacccaggatcttcaactacgtggaggatttcttaatcaggtcaatcccctttccagcatggactgtcaaatccagctacaagaaactctacgaaggtctctcgacagcaggtactgcgattctggacgaaacggacgctgtggggataaagagggacgaagcgtgccacaatcttgtgt

SEQ ID NO: 40559 - DNA, 243 bp, Glycine max
  Clone ID: 700941044H1
ctgctcctcaaattgcttccttttctagccgtggaccgaaccatcttacatcgcagattctgaaacctgatgttattgctcctggtgttaacattttagcagggtggactgggcgtgtgggtcccacggatttggacattgatcctaggagggtcgagtttaacataatttcggggacttctatgtcgtgccctcatgcgagtggcattgctgcattgcttaggaaggcttatccagagtggt

SEQ ID NO: 40560 - DNA, 242 bp, Glycine max
  Clone ID: 700941045H1
ggaattgaacactggggtcaggatcatcaacctagctagctagtgtatacaacaacaatatgaggaagcccgaggtttctggaaaaaacaacaacattaataacaagcttagaaaggggttgtggtcacctgaagaagatgacaagctcatgaactacatgctaaacagtggacaaggttgttggagcgatgtagccagaaatgcgggccttcaaaggtgtggcaaaagttgtcgccttcga

SEQ ID NO: 40561 - DNA, 169 bp, Glycine max
  Clone ID: 700941048H1
gcgaaagagagaattcgtagaccctaatttcggccagatcggcgatgactgcctccaaggatcgcgagatcttcgtctacatcgccaaactcgccgagcacgtcgagcgttacgaagaacattgtggactcaatgaataacgttgcgaatctcgactgctaactgacag

SEQ ID NO: 40562 - DNA, 254 bp, Glycine max
  Clone ID: 700941051H1
tgaaaatgcaggggaaaatgagggagatccttcacgtgcagggagggcaatgcgggaaccagatcggttccaagttctgggaagtggtgtgcgacgagcacggcatagatccgacggggaagtacgtcggaaactcagatctgcaactcgagcgcgtgaacgtctactacaatgaagcctcgtgcgggcgcttcgtgccacgcgcggtgctgatggacctggagcccggaaccattgacagcgtgcggaccggg

SEQ ID NO: 40563 - DNA, 252 bp, Glycine max
  Clone ID: 700941052H1
gcactttgtgaggccactggggcaaatgtcacacaagtgtcctatgctgttggcactgacacaaggattggaccaaagttcctgaattctagtgttggacttggtggctcctgcttccagaaggacatcttgaaccttgtctacatctgtgagtgtaatggcctgccagaggtggctgagtactggaaacaagtgatcaagatcaatgattatcagaagagccggttcgtgaaccgtgttgtttcgtcgatg

SEQ ID NO: 40564 - DNA, 242 bp, Glycine max
  Clone ID: 700941056H1
ctcgagcgaatcggctcgagagtgaacaagaccgaattgttgagggagttgctacaacccggaggctatctcaaattaattgagctgggacttgaagattgtgtggagaaaattgatgctcaactagtgtttggttatgctcttttcaaggatgggaagcacacaagactctcttatcccttggaaaagtttcactcagatgttgctggcagaagctttcacaatgggcggttttattcaga

SEQ ID NO: 40565 - DNA, 244 bp, Glycine max
  Clone ID: 700941057H1
catagcttcctcttctttcatcacagtttgaaaaaagaaaaaccagaaaagaattccaagcttaaatattggttgaaccagaggcaacaatgggtttgacggtgtcacggctattgagattgttttatgcaaggaaagaaatgaggattctgatggtgggttttgatgctgctgggaaaacaacaatactctacaaactgaaacttggagaaatcgtcactacaatacccacaataggcttcaa

SEQ ID NO: 40566 - DNA, 236 bp, Glycine max
  Clone ID: 700941059H1
ctggcattacctcttctttgtgttgtgcctttacgccagtgtcacagtggttgaaagcttaatgatggcaattgctagcattgtccccaacttcctcatgggcatcattattggagcaggaattcagggcatattcatgttggtctcaggctactttaggctcccacatgatattccaaagccagtgtggcgctacccaatgtcatacatcagtttccacttcttggcactacagg

SEQ ID NO: 40567 - DNA, 241 bp, Glycine max
  Clone ID: 700941061H1
gaataatcgagacacagatcatagtgatcattttttaatttctcagatttatccgacgtcgctgcagatccaccaaccgttatggccgccttcagcggtgatgaaacggcaccgtttttcggcttccttggcgccgcagctgccctcgtcttctcctgtatgggagctgcctatggcacagcgaagagtggcgtgggcgtggcttccatgggtgtaatgagacctgagctggtgatgaagt

SEQ ID NO: 40568 - DNA, 242 bp, Glycine max
  Clone ID: 700941062H1
aaaaatggacggcgaactaagagtgattgtggatggatttctgtctcattatgatgaagttttcaggctgaaaggggtggctgctaaaacagatgtgtttcatcttattaatggcacatggacttcaccagctgagagatgcttcctctggataggtggttttaaaccatcagagctcatcacaatgttgataccacagttagagcccctggcggagcagcaaattatggtcatatgtgaac

SEQ ID NO: 40569 - DNA, 242 bp, Glycine max
  Clone ID: 700941063H1
gtcgttgctttaataactccttggaattatcctctgttgatggctacgtggaaggttgctcctgctctggcggccggctgtgctgcaatattgaagccctctgagttggcatctgtgacatgtttggagctcgctgaaatttgcaaagaagtcgggcttcctcctggcgtgttgaacattctcactggattaggacctgaagcgggggctcctttagcagctcatccgcgattagacaagaa

SEQ ID NO: 40570 - DNA, 231 bp, Glycine max
  Clone ID: 700941064H1
agccaatcagcgtattgcaagaatctctgctcatcttcagcctccaaatttccaggaagggagtgatgttcttcttaagagtgctgagtgcagagcaaagggtggggcacctggattcaaagttgcaattttgggggctgctgggggaattggtcaacccctttctttgctgatgaagatgaacccattggtttcagttcttcatctttatgatgttgtcaacacccctgg

SEQ ID NO: 40571 - DNA, 258 bp, Glycine max
  Clone ID: 700941065H1
gtgattctaaacatggaaactataatggatgagtttgagatcattgggaatccaaagccatatatggattctgatataccaacagtgagagcttcagattcagcttcagctgatagcactgttgagaatttgcccaggagttataatagtaataatagttctgctggtcaaaatgcaagtcacaataacacgcagaatttcaggccaactattcaacctccataccaaccacctccactttacaaaggccgtgggcca

SEQ ID NO: 40572 - DNA, 237 bp, Glycine max
  Clone ID: 700941067H1
gtaataagaggaaagttgacgaaacagaaggcatatgctgcactgtcactgcttaaaggtgttctggattactcagaatttaaagatgtggacttggtcattgaggctgtaattgaaaatatcagtctcaaacaaactatatttggtgatcttgagaagatttgtcctccacactgcattttagctttcaacacatcaactattgaccttgatgttgttggtaaaacgaccagctct

SEQ ID NO: 40573 - DNA, 250 bp, Glycine max
  Clone ID: 700941068H1
cacactctgcggagtcccaaagcactaatctaacaaacgcaatttaaaaaccgcaacaaactttctctcttgcgttcacacttattctctggcttcttcttccattttcgcttctcgtagcgttttcggaacagttatggcttccattgccggatccaactgcgtcgctctccgaaccgccaacttcggcgcctccggtaaccggaaaatcggccagatccgccaatggtctccgattctcacgaatctc

SEQ ID NO: 40574 - DNA, 249 bp, Glycine max
  Clone ID: 700941069H1
tttcgccggaataatcgttccttctcatgcttccgaaatcagttccctcagcggtaccccaacccaaaacacttgcttccaaaatcaccctaacttcttccctcacctccctcctccaaccccaaaaccctcgcacatggatcctcttcaccgtcctcttcatccagatcctcctcctctgcaacctccatatcttcccttcctcaattccccctcccctctctcccatccccgccgccaccgacaccg

SEQ ID NO: 40575 - DNA, 247 bp, Glycine max
  Clone ID: 700941070H1
ctggccttccccttaaagaaacagaaagccaaatgcaataatggtcaagataaaagaggcacactaaagttggtgctgagggactctggcttattaaatgctgatcatcccctccatttcttttcaaaattcaaattgacccttctggccttctcctacttcttctatccattgtttcatttttatttccaaattttcaggtgaaaggaacataggaacttgaggtgatgaaagcaacagaatgtta

SEQ ID NO: 40576 - DNA, 245 bp, Glycine max
  Clone ID: 700941072H1
cgcctttctctctcttctttttactctctctctgtctctctctacgctttctcgttcgagatccctcaagggatccactaactgaaggagaaatggggttgacattcaccaagcttttcagccggcttttcgccaagaaggaaatgcgaattctgatggtgggtctcgatgcagctggtaagaccaccatcctgtacaagctcaaacttggagagatcgttaccacaattcccaccattgggttc

SEQ ID NO: 40577 - DNA, 240 bp, Glycine max
  Clone ID: 700941073H1
aacacacaaccctgatgcacccgttatgttggaccgtatattgcgcctcttggcttgctacaatatcctctctttttctcttcgcactctccctcatggcaaggttgagaggctctatggtctcgcccctgttgctaagtacttggtcaggaacgaagatggtgtctccattgctgctctcaacctcatgaaccaggacaaaatcctcatggaaagctggtactatttgaaagatgcagt

SEQ ID NO: 40578 - DNA, 237 bp, Glycine max
  Clone ID: 700941074H1
ggccttatggtcaaagagcggttctgaagtttgctcagtacactggtgctcatgctattgctggaaggcacactcccggtaccttcaccaatcagcttcagacttcgttcagtgagcctcgtctccttatcctcactgatccaagaacagatcaccagcctattaaggaagctgctcttgggaatattcccaccattgctttctgtgacgactgatcgcctatgaggtatgtggaca

SEQ ID NO: 40579 - DNA, 252 bp, Glycine max
  Clone ID: 700941039H1
gagtgaggaggttgcggggcttgctagaactgcggtgaatcgggacatctggctagggactgcaaccaaggaggcggtggagacaggtacggcggaggcggtggtggtggtcggaagtataaaggcggcggtggcgagacgtacggtcgtggtggaggatgtcgtggcggcggaggaagctgctacagctgtggaaagtctgggcatttcgccagagattgcccatcaagtgctcgtggaaaatactgttat

SEQ ID NO: 40580 - DNA, 210 bp, Glycine max
  Clone ID: 700941075H1
aataagtactcagaagaatgctcagatcaagttattctctctcatggtgcaacgaattgcaaagtcagtaacatagtcccaccattgccaaggctttgcaattcgttgccccatgaaagagaataagtactcagaagaatgctcagatcaagttattaaatctcttggtgctgatctgaagaagattaaagactgcgatggagatcccca

SEQ ID NO: 40581 - DNA, 241 bp, Glycine max
  Clone ID: 700941076H1
aattgcctctagttctctcactttaactattttcacaaaccatagaaaaataataattttttttttcattgtaacatgtcttcctcagagggtgtctttgaacagggaattgagttctcagaagccaacaatgttcttctcatgtctctaatggaagaagaacaagaagaagagtactatggcgatgatagacttgtgagcatgattcaatcattggaggcagagatcactgacactgaaa

SEQ ID NO: 40582 - DNA, 255 bp, Glycine max
  Clone ID: 700941006H1
gatggacgcttttgcgccactggggttaagaggttgaagagtattgggatgattgataacgttcctggaatgaaggctttggatatgaatgctgctgaggacgctattgtcaggctcactagggagattatgcctggcatgattgtcactggcatggaggttgcagaaattgatggctccccgagaatgggtccgacgtttggggcgatgatgatatcagggcagaagggcggctcatttggcgttgaaggcttt

SEQ ID NO: 40583 - DNA, 255 bp, Glycine max
  Clone ID: 700941007H1
cttcaatcacattgcaaaagttcatggatcttctggaagaacatcctaagttgcgattatcacaagctagtattacgcatcaaggaaagaatctgtacatgcaagctccccctgtattggaagaaatgactcgatcaaacctgagtctctctcttttgaatctcatgggtcgattgcccaaggatgttgtgcatgtgaatggtacaacaatcaagaacgaccaaaagttctcctgttcgagaaaattacgtgttg

SEQ ID NO: 40584 - DNA, 227 bp, Glycine max
  Clone ID: 700941008H1
ctagctacctagcacaaaaattgtagtcatgttggggaagaggccccagccactgatcggaaaaatctccgaattattagtctccggcgggcgtgccgccgtgcttttcgatgccctcggaagccctagaagcccggttgacatgatgaacttaaagatgcaatcaccaaagggcctaaaaagctatgaccttggtggtgttggtctatgaattgtggtggcccttg

SEQ ID NO: 40585 - DNA, 248 bp, Glycine max
  Clone ID: 700941009H1
attgaactcaagttttttctcttctctcggtttcatcgccatggatgaagaagtgcgcaagatcttcagcaagttcgacaagaacggcgacggcaagatctcgtgcgccgagctgaaggagatgatggtggcgctgggatccaaaacgacgtcggaggaggtgaagcgcatgatggcggagcttgatcggaacggcgacggctacattgaccttaatgagttcggcggagttccatgcggcggcggcg

SEQ ID NO: 40586 - DNA, 237 bp, Glycine max
  Clone ID: 700941010H1
taaagacttagacaaggaagaaatgctacgaggaaggcctggctatgagcacctgaatgatccgcttcacattataattgaagctgaactacctaccagtgttgctgatgtaagattgatgcaagcacaagaaatcatacaagagctacttaaaccagtggatgagtcacaggacctttacaaaaggcaacaactaagagaacttgctatgcttaattccaactcagagaagagagc

SEQ ID NO: 40587 - DNA, 214 bp, Glycine max
  Clone ID: 700941011H1
ctcgtagtacgaatattattccaagttctaccatatagtgtacagcaagaagacacgaacaatggagttgtggaagctcttcgtaactgcattaatgccagttcttaaggtgctcctcattactgctgttggcacatctcttgctctgcaccgctttgatatactgagggatagtgctaggcagcacttgaatacaatagtagtacttgtattc

SEQ ID NO: 40588 - DNA, 232 bp, Glycine max
  Clone ID: 700941012H1
atctgagaatgccatgcctgttgctacaaataatccctatgaaagaggtgttagtgacagtgtctcaaatccttgtctatacaaggaggatgataattccatatcaacaagtctcgcctacaatgaagaggttgcgaatataataacaatggatggcacatatgacaggacagataacaagtttacatcaagtattcaatcctataacaagggaaatgacagcttatctata

SEQ ID NO: 40589 - DNA, 220 bp, Glycine max
  Clone ID: 700941016H1
tgaacttgtgtacatgaactagctgacaaggccagggatgtgacagaactcaagatggagaggcagaaaaagaagctggcagatagcagagctggagaaaattgtgaggctgaaaaatgcagaggctgatatgttccaattgaaggctaatgaggctaaacgagaggccgagaggcttcagaggattgctctttccaagcaagagataatcgaagaagaa

SEQ ID NO: 40590 - DNA, 266 bp, Glycine max
  Clone ID: 700941017H1
tgggatgcaactttgtcccggaggagaaaaagaagcagaagagggccaagaagaagtacagaggcgtgaggcagaggccctggggaaagttggccgcggagattcgtgaccctcgtcgtgctgcccgggtctggctcggcacgttcggaaccgccgaggatgccgcccgggcctacgacaaggccgcgattgagttccgcggcccacgggccaagctcaatttccccttggtggacgagtcgctcactttgcagcagagcgagcca

SEQ ID NO: 40591 - DNA, 250 bp, Glycine max
  Clone ID: 700941019H1
ctgttggggtagaaagcagagaagaatgaaggaggagttggtggtgcaagaagggtaccttttcaaagaagagacgaagctcacagtgctcaaaacatccctcttcttcagcggtgatggcttcgctgtctacgattccaagggcaacctcgtcttccgcttcgactcctatggtcccctcgcacgtgacaaggacgagcgtgttctcatggatccccatggccgttctcttctcacccgccgtcgaaag

SEQ ID NO: 40592 - DNA, 256 bp, Glycine max
  Clone ID: 700941020H1
tagatggctgttaatgactcaacttccccgtatggccttcgattattgattgaggattacccttttgcagttgatgggctagagatttggtttgctatcaaaacatgggttaaggactactgctcctttgactacaaggaggatgacactatcaagaaagatactgaacttcaatcttggtggaaggaaataagggaggtgggtcatggtgacaagaaagatgagccttggtggccaaagatgcagacatgtggag

SEQ ID NO: 40593 - DNA, 254 bp, Glycine max
  Clone ID: 700941021H1
ctaatgtcaagtgaaagctgctccttatcacagctctatcatgcatggtcatgttaacaaatagaagattgagcttgtgttggattctcatcagatgcatacaatgtttcttgcaagctcaaactggtattttcacaattcatcttgaggaatatgtgcttttggactctgagtatgacatgtgaggcaagtcttaggtttatttgtctgtgtaatttggagagctacttataatgcagccagtttgttttcgt

SEQ ID NO: 40594 - DNA, 256 bp, Glycine max
  Clone ID: 700941022H1
tgcgctggtgtcgaccctaatctcccactcgagcgccaagaagaagcgaaacaacttctcacgcgctgtctcaatcttggaatctctgctctaaattctaatcttcccgccatagatgtcgtcgaacttgtggtgagggaattggaaacggatccgctgttcaattcgggccgtggatctgccctgacagaaaaaggaacggtggagatggaggctagcatcatggatggtccaaaacgacgatgcggcgccgttt

SEQ ID NO: 40595 - DNA, 246 bp, Glycine max
  Clone ID: 700941024H1
aatgagcatgcttgatcttgtggcaagcctggtgaagacatgagtgcatggaagaatatattcttcaggcgattgaaggccattaccaggctctataactgtcagtggaagaaattacacagttagagctggaaatacttttggtgactatcatcgcatactcgccccaagagataaatatgaagtagtggcaaccatgccgggctacaaagcaaaggaatacaactattgtgtggacgaaggacc

SEQ ID NO: 40596 - DNA, 238 bp, Glycine max
  Clone ID: 700941025H1
tacaaattatgcagcagcttattgcactggtctcctgttggcccgaagagtcctcaaaacacttgaaatggatgaggagtatgaaggaaatgttgaggctactggagaggattattcagtggaacctgccgagagcaggaggccattccgtgcactccttgatgttggtcttgttaggactacaacaggaaatcgcgtctttggtgcccttaagggagctctggatgggggtttgata

SEQ ID NO: 40597 - DNA, 247 bp, Glycine max
  Clone ID: 700941026H1
aatgatgaagagaagaaggaagagaagaaaaaggagaagagagacaaggatggcaaaactgatgcagagaagatcaagaagaaagaagatgatgggaaggatgatgaagagaagaaggaaaagaagagaaagtatgacaaaattgatgcagagaaagtcaaggggaaagaagatgatgggaaagagtaagggacataggaaaagaaggacaaagaaaaaggagacggataatgcgaagagaagaagg

SEQ ID NO: 40598 - DNA, 243 bp, Glycine max
  Clone ID: 700941027H1
tccatttccattttgttctggttttctttctccatggcctccgccgccgccgtcgccgccgaagacgacgctgtcaacggcttcactcggtcggagatgtactcggaaaacctcgccggcactgtcgacgcctacgaccgacacgtgttcctctgctacaagagctacgtgtcctggccggcacgcatcgaggcatccgacgccgatcccttccccaagcgcgatcgcgccaccgtcaaagcc

SEQ ID NO: 40599 - DNA, 250 bp, Glycine max
  Clone ID: 700941028H1
atggacagcatcagatctggcccctacggcaagatcttccgccctgacaacttcgtcttcggccagtccggcgccggtaacaattgggccaaaggtcattacacagaatggcgccgagctgatcgactccgttctcgatgtcgttcgcaaagaggctgaaaactgcgattgcctgcacagttttcaagtttgccactctcttggaggaggcacaggttctggcatgggaacactgttgatatcaaaaatt

SEQ ID NO: 40600 - DNA, 250 bp, Glycine max
  Clone ID: 700941030H1
tcagcccctcaaaccttccgctcgaaggaaatttccaagagcaatgttgttgacgatatggtcaacagcaacgccatcctctatgagcctggtgaacatccggaccatgtggttgtcattaagtatgtaccttacgttggggacagcaagagggccatggatgagtactcttctgagatattcatgggcggaaagaacacaattgtgttgcacaacacttgtgaggattcactgttagctgctcctatta

SEQ ID NO: 40601 - DNA, 239 bp, Glycine max
  Clone ID: 700941031H1
gtcaattttgttttcggagatctatacgatcaccaaagtttggtgagtgccataaagcaggtcgatgtagtcatttctactttaggacacttgcagctagctgatcaagacaagatcatttctgcaattaaggaaatgttaggaagttctatccatctgagtttggaaatgatgtggaccggactcatgcagtggaaccagccaaatctgcatttcaacaaaggccaaggctcgcagag

SEQ ID NO: 40602 - DNA, 249 bp, Glycine max
  unsure (1)..(249): unsure at all n locations
  Clone ID: 700941032H1
aaacgtgcaagcaaaccccacacccccacgcaacaacagtccccatttgttccccagcaaaacaaaaacaccgcgtcttccccgtgcgggaaaaaaaaaagaatcctcaattttccgggaaaacccttcagaatggtttcccgggaaaataccaattggctcttcgattacggcttgatcgacgaatatcccgatccggattccacctttggcgtcaantccttcgcctttacagtgcccccaaacgcc

SEQ ID NO: 40603 - DNA, 218 bp, Glycine max
  Clone ID: 700941033H1
cggctcgagcagtctgtgacattcccccaactggcttgaagatggcttcaacattcattggacaatctacctccattcaggaaatgttccgtagagtgagtgagcaattcactgctatgtttaggaggaaggctttcttgcattggtataccggggaaggcatggacgagatggagtttccagaggctgagagcaacatgaacgatctcgtgtccgag

SEQ ID NO: 40604 - DNA, 249 bp, Glycine max
  Clone ID: 700941035H1
agacacgagcctcgaagtggatccttcgcgacacgaatatgaccctagcacccatgttgctactggagaagcacccaattcacctgaaccctgcgcactacatcagtgagattattagagaaggcacaaaacatggcactgctttctttaagtgccatggacatgagcaatttgagatgacgggtttggattctgagtataataggttgttcaatgagggcatggtgtgcactgctaaggttgtgtcca

SEQ ID NO: 40605 - DNA, 239 bp, Glycine max
  unsure (1)..(239): unsure at all n locations
  Clone ID: 700941037H1
cgtgagaaccgtgagtgactatatatcaatcttcagagtcctaaaaaagtgtgatcactttcgcattgacctatataaccttttctctccggttaccagagccgtaagtcgctgaacatgaanccgcaatcttcggttcgggcggaaccggagcctccggttccgacgttctccccacggttcgcgctcacgtccggttcgcagcggaaaatcgcgatcgcggtcgatctgagcgacga

SEQ ID NO: 40606 - DNA, 250 bp, Glycine max
  Clone ID: 700941038H1
ggacgacctggagcatgttgaatccagtttcaacattccaggtgtttcaattgccatgccccaatcttctgtggaccctgaatgtagtaaatcaatatgtaaaagtgatccagctctgcctgctaaaacaaagaagctaagcatggatcgatcagactcaagaaaccggatgcttctgcagaagagacttttctttcactcacacagagtccagcctatggcactagaacaagtgttatcagaccgtgat

SEQ ID NO: 40607 - DNA, 246 bp, Glycine max
  Clone ID: 700941005H1
cgttgttaatgttgtcgcaacttgtgtctcaatttatggtgttgacaagtggggtaggagagccctgttccttgaaggtggagtccaaatgctcatttgccaggctgtagttgcagctgcaattggagcaaagtttggaactgatgggaacccaggtgatttgccaaagtggtatgcaattgttgtggttctcttcatttgcatgtatgtaacatcatttgccttgtcattggggtccctaggttt

SEQ ID NO: 40608 - DNA, 119 bp, Glycine max
  Clone ID: 700940970H1
cgtttctaccttcacttcgcacatctcgaaccctctctttccggcaactaggttaaagttcatcaatggcaggtcgtggcaaaaccctaggatccagcgccgccaagaaggccacctca

SEQ ID NO: 40609 - DNA, 239 bp, Glycine max
  Clone ID: 700940971H1
gccaccgcatgagtatttggcgcgtagcagacgatggtggctaactcggtgtttgaaggagtgggcgcacgttgaagggccgagacttgagccgggttcgtgatgccgtgtggagccagaccgggttcgacggttaacaccgggctcaggtttgggctttcatgggtttactgtaataaaaattattataatatattcaatttaagttaatagaaatgcagacaaatgaatgaacacag

SEQ ID NO: 40610 - DNA, 231 bp, Glycine max
  Clone ID: 700940972H1
caaattctctgtgttgtgttgtgtacttgtgttaattgtgttgttgttgtaggaaatttaagtgaaggagaatgatgatgaagtctgctatgtgtgcattggtgcttgtggcactggttgtggttgaagtggggcccatggctgaggctgcgagtgacttgcaacccatacacagttgactccttgatacttccgagcaatgtacattcaggggttctgctaccttcgagt

SEQ ID NO: 40611 - DNA, 258 bp, Glycine max
  Clone ID: 700940973H1
cggaatgcggctcgatcagaattccatcgagttccgcctccagctgccggaatccgaccgctacatctggaatcccgacgattacgtcgagcggcggagtacgaggcgctgctgcatacgcatgcggaaagcgacggcggaggtaggagatgagcgccgccgacgtcgaaggcggcggtggatgcgttgccgacggtcgaagattgcgtccgacagcgaaccgtggcgtgcactatatgtaaggatctactcggtgtt

SEQ ID NO: 40612 - DNA, 236 bp, Glycine max
  Clone ID: 700940974H1
tagcaataaaattacagacgatctcagcacaccaattcataatgtcgcagagatcttagtgcctctgactcctcagattgagggtgagatcttgcagtcatccaatctgaagaactttattttgacataactaacaactggcacaagagatttccgtaaagacagtgtgatacgtagagaaggtgattttggatcagttttcaagggctggattgctaaccactcactggctgctg

SEQ ID NO: 40613 - DNA, 199 bp, Glycine max
  Clone ID: 700940975H1
ggtgtaactcgttcttcttcttctgttgttctgtgtttgtgtttgattttactctcacctgaaaatgtcttgctgcggtggtaactgtgggtgcggaagctcctgcaagtgcggcaacggcttcggaagctgcaagatgtacccagacttgagctacactgagtcaaccaccaacgagaccttggtcatgggagttgca

SEQ ID NO: 40614 - DNA, 116 bp, Glycine max
  Clone ID: 700940976H1
gatgaggaggactctggtgagagatggcaggctctatgactcgaagcgtcgtcatcactccgacctgcacttgccgcttcatctcgtcctcaattcagactcttttcctccaatga

SEQ ID NO: 40615 - DNA, 239 bp, Glycine max
  Clone ID: 700940978H1
ctcattaattgcaagaatggcacttcgttgcttggtgatgtccctttctgttctcttcactcttggtcttgcgagagaaagccatgccagagacgaagatttttggcatgctgtttggccaaacactcccattccaagttcattgcgagatcttctaaagcctggccctgcaagtgttgaaatcgatgatcaccctatgcaaattgaagaaacacagtacccgaaaaccttcttctata

SEQ ID NO: 40616 - DNA, 239 bp, Glycine max
  Clone ID: 700940980H1
cccaactccaacctctgttcatcgtctaccgcgctttcttttcaaccagaactatgattaagcttttaaagtaaaggaaaagcagagagaacttgcagaaaatgcaagtggcggaccacctgttaagaagcaaagtgctggagagttgcgtcttcacaaagatataagtgagctgaatctaccaaaatcatgtaccatgcaattccccaatggcaaagatgatctgatgaactttgaag

SEQ ID NO: 40617 - DNA, 240 bp, Glycine max
  Clone ID: 700940982H1
gttgtatactataatagcagaatcgtgagtaacagcagagcagaacaccgataaatcgctatgactgctcagacccaagaggagcttcttgcggccgaccttgagcaacaaaagatccatgatgatgagcctgtagttgaggatgatgatgaggatgacgaagatgacgacgatgaggatgacgacaatgttgaaggtgatgcatctggtaggtccaagcagaccagaagcgaaaagaag

SEQ ID NO: 40618 - DNA, 241 bp, Glycine max
  Clone ID: 700940983H1
cgttgagggccccagaacctcttctctccgttcacgccttccacaacaaccaaaaaataaaggttcgttcttgtaactcgaattggcgtcgagtgaagtgaagggcttcaaaaaccagagggaaactatgagcaatctcagaaccctatgtaagacctcagacggtgttctctttcattagtttccaacaccaatttcgttctagggtttcctttcgaaaccctacttgcaagccccgttt

SEQ ID NO: 40619 - DNA, 241 bp, Glycine max
  Clone ID: 700940984H1
ctacagtatgtgtttgctgaaaggatcatgttattgaagctttttgtgatatctgtctgattatgttgcgaggagttaaaggtggtgcagacccagaaaagatcttccaatcaaggtactagttccatccatcaacaaagttgcctattgggatgcttcattttcaaggttcttttgatgcaaacctgtgcttttgagaaattaatactgctgctggattcaattacttgatcgtggatac

SEQ ID NO: 40620 - DNA, 192 bp, Glycine max
  Clone ID: 700940985H1
ggacgctattgtcaggctcactagggagattgtgcctggcatgattgtcactggcatggaggttgcgaaattgatggctccccgagaatgggtccgacgtttggggcgatgatgatatcagggcagaaggcggctcatttggcgttgaaggctttgggtaggaacaatgcaattgatggaacgtgtggagtt

SEQ ID NO: 40621 - DNA, 233 bp, Glycine max
  Clone ID: 700940986H1
tggtgctgttcagttctaagactggtagcagatgctttcaatgcgtatatatatgacattataatgaagccaagggtttgccttatttagaaactcatgctgaaccatatatgaggcagctatcagtaggcgatgtagtcacaggcccacttcagacatttaatggggttgagaaggtttgcaacatagggtttattctcagaactacgggacataatgggtttgccgttata

SEQ ID NO: 40622 - DNA, 196 bp, Glycine max
  Clone ID: 700940987H1
ctctagtcatggcttcttctcttcctcttctcaaccttcttaccctcgctctgtcactactcttctcattgccttaacttccgaggttggcgtgcaggcgcagatggaagagacaggcttgaacctcatgtcggaggcgttggagtgggcaaccgcaatgtcgcttctacgacgaagaccacgaagaagaggatgt

SEQ ID NO: 40623 - DNA, 95 bp, Glycine max
  Clone ID: 700940988H1
gcacattcaggaacgctgttgtagaagacgatctactagacgaggcagcttagagaattggtaggattatcacatggcgagacagtactagatcc

SEQ ID NO: 40624 - DNA, 239 bp, Glycine max
  Clone ID: 700940989H1
catctagtcatctgaattgaactttaatggaactgatcttatagaaatatggcgtcagaattaataccatcttgatgatgagggttctcaagctaaaaaaagaaaagttggaatttatgttttaagtttttaactctactggagtttgttatagagagactttgaatttaagatgtcattgtactctgagaagtttcagcaccactgcttccaccatatgctcatttcttcttcattac

SEQ ID NO: 40625 - DNA, 240 bp, Glycine max
  Clone ID: 700940990H1
aggtttatctcggatgcttttctatcttgctcttccaccttcagtatatccatcagtgtgcaagatgatcaagacttgttgcatgaataaatctgatcttggtggatggacacgtgttgttgttgagaaaccttttggtaaggatctagaatctgcagaggaactcagtactgagattggaaagttgtttgaggtaccacagacttatcgtattgatcactacttgggaaaggaactagt

SEQ ID NO: 40626 - DNA, 238 bp, Glycine max
  Clone ID: 700940991H1
caaagatttatataagagaatttggatgcgcaaagactgtgtatactgtacatagtcaagtcaggtattgtgctgaatattgccccatgtattacagggcttgtatcaatgaagattgagcccttacacatttatttaatttactatgatacaatggaaagaattgtagacacgcaaaatgtgtcggagagtatatttgctatattctgccagaaataattgtgttttcccattataa

SEQ ID NO: 40627 - DNA, 114 bp, Glycine max
  Clone ID: 700940992H1
tgagtccataaatgacactggtatgttctatggcatgaaatactttaatgatctcttaatggaagctggaccaactgggaatgttcaatcagaaattcttcttcagaagaacca

SEQ ID NO: 40628 - DNA, 236 bp, Glycine max
  Clone ID: 700940993H1
catgaccgcgttgaaatcatcgccaacgaccaagggaacagaaccacgccgtcttacgtcggatcactgacaccgagcgtctcatcggtgatgcggccaagaatcaagtcgccatgaaccccatcaacaccgtcttcgatgccaagaggttgattggtcgtagattcagtgattcctctgttcagagtgatatcaaattgtggcctttcaaggtcattcctggtgctgctgacaac

SEQ ID NO: 40629 - DNA, 237 bp, Glycine max
  Clone ID: 700940994H1
atcttcattttggagaattgagtgtgaggaaagtttttcaagtgacacgtatgaagcaaatattatggacaaatgaaggcaacagtgctggtgaagagagtgtaaatcttttcctcagggccattggacttagggagtactcacgctatctttgtttcaactttcctttcacccatgagaaagcacttctgggacacttaaagttttttccttggaatcctgatgctgatatcttta

SEQ ID NO: 40630 - DNA, 236 bp, Glycine max
  Clone ID: 700940995H1
ctcgagcgaatcggctcagggcgaacaaaaaaaccaacaatacttagagcaacagagacatggtttgcttctgtggacggatttcgtcacactgctatggatgctattggcatgtaaaattggttcccctcacggagcgaacagcatctcatcaatgacttctattcgctccgattgatgggtgtcatcgcacaagacatggggtgtggtcttcccattccagtattttatcatct

SEQ ID NO: 40631 - DNA, 243 bp, Glycine max
  Clone ID: 700940969H1
aggaaatgtggaacagaatgatccaagtactaagcttgtttgtacaatccctattgttccagatcatagtggctccacagtgtctgatatcactgcaagtttgagttccattgatccaccaacactgtctctcgggttatctttgtcatctagtcaaagacaaacatcatcaacacattctgctttacatgcactgccatgcttcaacaatcaagatagcatcataagtgttgcttaagaaag

SEQ ID NO: 40632 - DNA, 234 bp, Glycine max
  Clone ID: 700940996H1
gagcattgtggcaagtggacttgccagaaggtgcattgtgcaagtgtcttatgccattggtgtgcctgagcctttgtctgtgtttgttgacacctatggcactgggaagatccatgataaggagattctcaacattgtgaaggaaaactttgatttcaggcctggtatgatctccatcaaccttgatctcaagaggggtggaactaacaggtttttgaagactgctgcctatgg

SEQ ID NO: 40633 - DNA, 268 bp, Glycine max
  Clone ID: 700941001H1
tgtggccaggctgttcactttagcgaaggatcaaaaaccctgtgaaagtgtgtttgtttggtcgagttgattgaattcgctggcagcttacagctatgatcatcaacaacgccccttttcctctatgattgattcgattcgattgaagtcgattccgtagagagtgagaaatcagatcacaataatcatcgatgggtaatttgttcgtgaagaagcccaaggtaacagacgttgataaagcaatcctcgcactcaagacccagagacg

SEQ ID NO: 40634 - DNA, 223 bp, Glycine max
  Clone ID: 700941002H1
ccgttcggagtctccggcggtcctactatccctactactactctactctatttacacggaataacaacatactatctccctactccaatacatagcccagagcggctccgttagggtttagtcctgtaccatatcgtgtaatctaatttttcatccgtaaaaatcttatcttgtggcgacgagatggcggaggttcaagtgcagcatcagagtccggtgtcag

SEQ ID NO: 40635 - DNA, 259 bp, Glycine max
  Clone ID: 700941003H1
cagatcttcgttaagaccctcaccggcaagactataaccctagaagtcgagagctccgacaccatcgacaacgtcaaggctaagatccaggacaaggagggtatccccccagaccagcagaggctgatcttcgccggcaagcagctcgaggacggacgtacccttgctgactacaacatccagaaggagtcaactctccacttggtgttgcgtcttcgtggtggtatgcagatcttcgtcaagacccttacgggtaaga

SEQ ID NO: 40636 - DNA, 261 bp, Glycine max
  Clone ID: 700941004H1
ctttgagtgccattattgggtcctgggttcgagacaagacagccacattccctaaacccttccaaatccaattcaacaacaaaaatacgcgacagtcaccggttctcttcacctaatctgaatcacactctcttcgttgcgtcagttcatctcctcatatctacaactctccctcattctctggttcttttctcactccaaactgaactgcgaaattttggttttgttcactcagtacagggtgcgatgtgcttccatttt

SEQ ID NO: 40637 - DNA, 247 bp, Glycine max
  Clone ID: 700940936H1
gggaaaaatacatcgatagaggaaaattaattgaagggtgctactactacgaccttctatatcattaatgattgaaattcgtgttggaattgtcttgtaggtgtagtagtgataataagagaggatcatatatatattagtagtgctagaaattaattgaagtgtgtaatagaatagagtgtgatagagagagatatggggagaggaagggtgcagttgaagaggatcgagaacaagatcaataggc

SEQ ID NO: 40638 - DNA, 246 bp, Glycine max
  Clone ID: 700940937H1
ctcgaccgtgttctgcttgtttgagggagcccttgacaatttgggaaacttgagacaacaatatggactggcaagtcagtcaatgaagtattgttggtcattgaggcttatcaaagctttgcgtgaccgagcaccctaccctgctaatcatgttgttggccatctcagtgggagctttgcgtttatagtgtttgacaaatctacttctaccctctttgtggcatctgatcaatatggtaaggtacc

SEQ ID NO: 40639 - DNA, 123 bp, Glycine max
  Clone ID: 700940938H1
tgaagagcgaagagaatggctcccaagggtttaatctttttggctgtgttatgcttctcagcactgtcactgagtcgttgtcttgcggaggataatggacttgttatgaacttctacaaggaa

SEQ ID NO: 40640 - DNA, 232 bp, Glycine max
  Clone ID: 700940939H1
cgcgtcgctccgcaccagtttcaccgcacgaatatcacgttgtttggagcgatccgagaaaaactctgtaaaatgttggtttaccaggacctccttacaggtgatgagcttctctctgactccttccgttacaaggaaattgagaatggaatgctgtgggaagttgaggggaagtgggttgttaaaaggagcgttgatatagacaatggtgcaaaccttctgctgaggtgga

SEQ ID NO: 40641 - DNA, 226 bp, Glycine max
  Clone ID: 700940940H1
attctctctactactgctagctgtgacttgttttgagttcaatcaaatcgcattggtatctgaaatcaggaagatggttagcgtactgacgatcaggcaggcacaaagggcagaaggcccagcaaccatccttgccattggaactgctaacccaccagaccgtggtgatccgagcacctatcctgattactacttcagaatcaccaacagtgatcacatgatcgag

SEQ ID NO: 40642 - DNA, 243 bp, Glycine max
  Clone ID: 700940942H1
gagagagagagagagagagagagagagagagaaatggcttgcaggcaattgtgggcttcaagagctgcctctacctgaggatctctgtgtttcacagaggcttttctaatgttgttaaagatttgaagtatgctgattctcatgagtgggtgaaagttgatgaaaattctgcaaccgtcggcataactgatcatgcccaagatcatttaggtgatgttgtatatgttgacttgccagaagtgg

SEQ ID NO: 40643 - DNA, 227 bp, Glycine max
  Clone ID: 700940943H1
gcaaatagcaaccaaacatacaaagatgaaagaaacatgttgttgtgctagttttagttttggcaaggcaagccttatttgttaacggtgggacttcaatttgggttcgccggtgcatacatcttctccgtcgctagtctcaaccatggaatgaatcgttacgtcttcgttgtctatcgcaatgccatcgctgcattggcccttgctccttttgcattgattttcga

SEQ ID NO: 40644 - DNA, 243 bp, Glycine max
  Clone ID: 700940945H1
acggtggcggcgcctctccccgccgcatatccgccgtcgcattacggggcttttgccggcgcgggttttcgatagctccggtggtgttgccggtgagtggcgagagactaaccaagccgatcaggccgacgccgattttgccagcgcctccgtcttcgaagatggctaatttgaacttgaaagagaaagcttctccgacaaatctcattgagcctttgccgttgtcgttgaatctgccatcgc

SEQ ID NO: 40645 - DNA, 117 bp, Glycine max
  Clone ID: 700940946H1
ccataactcaaatggtgatcaaaactcagtacgagctgctgccatgcaaattgcttctagcaatggtatggttagtgtaaataactctgtcaacccagcatccacatcaacaaccac

SEQ ID NO: 40646 - DNA, 243 bp, Glycine max
  Clone ID: 700940947H1
gtgaggttgtcattaagcacttcaacaaggaacaggattccaaccaaagcaattttcgggatcctgagagaatgctgattttgaggttcaggagaagttgtctctgctggagtggtttgcaaatgaatacaaacggtttggttgcactcttgagtttgttaccaataaatcacaagaaggttcacagttttgcagaggtttcggtgggatatgtgggatcttgcgttaccagcttgatatgcg

SEQ ID NO: 40647 - DNA, 236 bp, Glycine max
  Clone ID: 700940948H1
attcatgcaaagtggtgcttagcttaccacaaagaggattttgcttatgagcactgggatgagatacttgacatctgcaaccagtatgatgtggctctatccattggtgatgggctaagacctggatccatctatgatgcaaatgacacagcacaatttgctgagctcttgacacaaggagaactgacccgtagagcttgggaaagggagttcaggtgaatgatgatggacctgga

SEQ ID NO: 40648 - DNA, 248 bp, Glycine max
  Clone ID: 700940949H1
tggggagctcatggacaatgtacagcagctgacatcttggataactgcttgcaggctaattgcatcggatgttggcatatgtggtcgccagctgtgtgcttccagagccagaggcacggcctactctgagagttggtactgctcggttgcaggctatcaccgccatggggccggacggatcaactccgttagcatctgctctgaagtgggcaccaatagtgatttggtccagtgacttaactccggtc

SEQ ID NO: 40649 - DNA, 247 bp, Glycine max
  Clone ID: 700940950H1
gccaaggacactaaggcaactaagtcaaaggcaccagctaagcccaaggcagctgctaagcctaaagccaagttccagccaagcccaagcccgcccctaaaccaaaggctgctgctgctgctgcttccaagcccaagcctgctgccgccaagcccaaagggactaagccagctgccaagcccaagcccaagcccgctgctaaaacaaaggctgctgctgccaagcccgcggcaaagcccaaagcgaa

SEQ ID NO: 40650 - DNA, 54 bp, Glycine max
  Clone ID: 700940951H1
ggaaatcctccattttccgaacaggctaacaatctgtctccggtcccctcggaa

SEQ ID NO: 40651 - DNA, 101 bp, Glycine max
  Clone ID: 700940952H1
gtttatatactttgtttgtaatgcattgtacaactaaagtatatagacttatacggtgattgtctcacaatttactacggggcctctgagatgaggtatcg

SEQ ID NO: 40652 - DNA, 242 bp, Glycine max
  Clone ID: 700940953H1
ctcatgcccaagttcgatattaactccttgcttgctctcattcacaagcacaaagtcactattgcccctgtcgtccctcccattgctctcgccatctccaaatcacccgatctccacaattacgatctgtcttccatcagagtcttcaagtccgggggagctcctctcggtcaggcactcggagacactctcagagctagatttccccaacgacaaacttggccagggttacggcatgactg

SEQ ID NO: 40653 - DNA, 105 bp, Glycine max
  Clone ID: 700940956H1
gccattttgagctatatttgttgcagtgttacgccaacaggatgtccagcgctatcttgcgcgatgaaatcggtcataatgatgagagcatgctgggtccatccg

SEQ ID NO: 40654 - DNA, 244 bp, Glycine max
  Clone ID: 700940957H1
ccaaaccctagcggcactacacacgttatctctctctctctctctctctctccctctctccttccccaagtgtcgagcgccgatcccgagcaccgagaagaggaggaggcacccgccgtcggcgacgacgaggacaccggagcacacgtcgctcccatcgtcaagctcgaggaggttgctgtcaccaccggcgaggaggacgaagatgcaatcctagatctcaaatcgaagctttaccggttcg

SEQ ID NO: 40655 - DNA, 244 bp, Glycine max
  Clone ID: 700940958H1
gcgaaaaccaaatcaagatgctgagagtgggcgcaaagaggcttttgggaacgacgtcagttgggcgttagggttccggcgaggctgtaccacgagagggttgtggatcactacgacaacccccggaacgttggatcgttagacaagaacgacccgagcgtggggacgggtttggtgggggcgccggcgtgcgagcacgtgatgaagctccagattaaggtcgacgacaaaaccggaaaaatcg

SEQ ID NO: 40656 - DNA, 119 bp, Glycine max
  Clone ID: 700940959H1
gagagaggcgagggataggatgggttgttgccaatcatcgacgttgctgagagtgggagagagggagatcaccctgaaaaggaataggaaaaagaccaccagaggctctctgaggccga

SEQ ID NO: 40657 - DNA, 239 bp, Glycine max
  Clone ID: 700940960H1
atttattttgcagtaacggaagagagtggaactggatccccgtcatcggataaacacaatagctgtagcagagaggagattcgcagaagaagataagggatgtttgggttaatcggaagaaaggccaatttgttggtaggatcgggaacaagaagaaggtggttgagcttcgcagcaacagccacaaccacttctaatggtggtgccatggaggagttgctttcgcaactccaatctaa

SEQ ID NO: 40658 - DNA, 242 bp, Glycine max
  Clone ID: 700940961H1
gtgaaactctctgcagatatcatactggattcttggagcgaaacacacagatctcatctcgtagcacaacttatcttcttagaccaactttgtgagatttcaccgtaccttccaagaagctcgctggaaacccacgttccgtatgccattctccgttcagtatacagccaatactatgcagatactcagtccactccattggcaatactgaacgcatcaccccgtcattcacctgccgtgtt

SEQ ID NO: 40659 - DNA, 240 bp, Glycine max
  Clone ID: 700940962H1
aggttagtggtttaatgcatcaactgtgcaggtattggacactagttgaactgaggggtcatgtatgctgtggaatgaaatctataataacactaaaaacagggctatctgactatcttttaacaaggagttaagtgactttatatttgtgattaaatctgataatattcattgatatcttttacactgtcaattggaatggatttgcagtaagacttttaccactgcatctaatatcaa

SEQ ID NO: 40660 - DNA, 242 bp, Glycine max
  Clone ID: 700940963H1
taaagacacctctaaagaagggtatagttttgaagagatatgcatcaagaaagaagcgtttgagggagagagaagttttgtgcaaaatccttgggaacagtaattggttttgccatttcaaagctgggaaagaacattcaagtactttcaagttcctttgtcaataagcaagagcaatacactgtggaaggagtgcagaatcttggagacaaagcagtgatgtgtcatgggctaaatttcag

SEQ ID NO: 40661 - DNA, 245 bp, Glycine max
  Clone ID: 700940935H1
catttctccatttccattttctctctcacttttcaagaatcgtaagctatgggaaagtcttacccaactgtgagtgctgattaccagaaggccgttgagaaggcgaagaagaagctcagaggcttcatcgctgagaagagatgcgctcctctaatgctccgtttggcatggcactctgctggaacctttgacaagggcacgaagaccggtggacccttcggaaccatcaagcaccctgccgaact

SEQ ID NO: 40662 - DNA, 233 bp, Glycine max
  Clone ID: 700940964H1
gttgtcctccttgagcttttgaccggaagaaaaccagtagacatgtcacgacctcccggtcaagaaatctcgttgcatgggctcgtccattactctcaagcgaagaaggattggaagcaatgatagatccatctctaggacatgatgtgccttctgatagtgtggctaaggttgcagccattgcttcaatgtgtgtacagccagaggtgtcggaccgtcccttcatgggcgag

SEQ ID NO: 40663 - DNA, 241 bp, Glycine max
  Clone ID: 700940965H1
agcactcatccacacattctccgtcgccacgacaacaatggctccacagaaaggtgcgaaaggtggagtgtagcagcaaagaagaaggttcaggagccggttacgaaccctttgttcgagaagcgtccgaagcagttcgggatcggaggcgcgctgccgccgaagcgggacctgacgcgcttcgtgacatcgccgaagaacgtccaaatcctacgcatgatgcgcatcctcaagcagaggc

SEQ ID NO: 40664 - DNA, 240 bp, Glycine max
  Clone ID: 700940966H1
tcctaatggacgacgtatagctgtgaaaagattatcgacaaattcatcacaaggttcggttgaattcaaaatgagattttatcaatagcaaaactacagcatagaaatcttgtggagttaataggtttttgtctagaagtgcaagagaagattcttatttatgagtacatgtccaacgggagccttgataactttttatttggtttgattcttgactttaaactcttgaataatatcaaa

SEQ ID NO: 40665 - DNA, 239 bp, Glycine max
  Clone ID: 700940967H1
ataaagtccggccagaagcagggcgacatgctgctcgtggtccccgagggggcctacgcggtgcgcctcgggaacgaggcctccatcaagcagaggatcaaggtgatcaagggcatgtactactccatcaccttcatggtggcccgcacctgcgcgctagaggagaggctcaacatatccgtcactccagactggggcgtcattcctattcagactttgtataccagcagtggttggga

SEQ ID NO: 40666 - DNA, 244 bp, Glycine max
  Clone ID: 700940968H1
gtatctactgctctctctctccctctccctctccctccaaattttccttcattctcacgcgccgccgtgtttccgccggcggctactccctatccaccgcgcatccatcccgcttccctctcctcgcttttctcacaaaacaaaaaaaattaaaaatttctccgaagactgtgtattatcgttatcgttcactgacttaagttttgctgttcttcctagggttttattgtgtccaataacaaga

SEQ ID NO: 40667 - DNA, 251 bp, Glycine max
  Clone ID: 700940903H1
aaaccatctcttcctctctcagctgtctttttaatcccccttttctcattttcccttttgcaattttcactaacagccttctttctatcttagctctcagaaacttcaataacaatgaagaaagttgtgttgaaggtggaagtacatgaagacaaaatcaagcaaaaagctatgaaggttgtctctggcatttcaggggttgagtcagtttctgtggacatgaaagacaagaaattgaccgtaattgggga

SEQ ID NO: 40668 - DNA, 249 bp, Glycine max
  Clone ID: 700940904H1
ctcgccatcctactcccaatctcagagagcatttgaagctgccaaagcaattaatgacataaatggtctagtgagctattacagcaccatccttatcatatagattcccttctaacaatggcagaatattttgcggtattgggtgaacaacagatgtctgcagatgctattgccaggtgtctatatgcccttgaatgtgcatggcatcccatgttcaatccattgcagggaaattgccggctgaagttc

SEQ ID NO: 40669 - DNA, 251 bp, Glycine max
  Clone ID: 700940906H1
ggcgcaagtgaggaacaagcaagtgcttctaaaggactatgttaccggttttcccaaagaatccgacatgaatattgtcgaaagtaccataacattgaagcttccacaaggttccaatgatgtcttgctcaaaaatttgtacttgtcttgtgatccgtatatgaggaatctcatgaacaagcccgaaggccctcccaatagtcgtgcttacactcctggctctccattaataggatatggtgtgtctaaag

SEQ ID NO: 40670 - DNA, 123 bp, Glycine max
  Clone ID: 700940908H1
cgtttgccagtggcgggtggaaaagtgacgatggaagacttagctgtgggtattcacgttttaggggaaagagagtccaatggaggatttctatgatattaagacattgaagattggtggcca

SEQ ID NO: 40671 - DNA, 249 bp, Glycine max
  Clone ID: 700940909H1
atctcatgtacggttctgtaataaagatggaattgagaaacaaccatcaattataacccccaaagaaccagatttgtaaacaacatagaggaagaatgaaaggaatatcctatcgagggaatcatatttgcttcggaagatatgctcttcaagcacttgagccagcttggataacatctagacaaatagaagcgggacggcgggcaatgtcacgaaatgttcgccggagtggaccaataatggtacgct

SEQ ID NO: 40672 - DNA, 126 bp, Glycine max
  Clone ID: 700940910H1
cccaattcctaattgtttaaacctaattctcatttcttcatcggtcgattcttctcctcctaaagatgcagatcttcgtgaaaactttgaccggtaagaccatcacccttgaggtggagtcctccg

SEQ ID NO: 40673 - DNA, 247 bp, Glycine max
  Clone ID: 700940912H1
cgatgtttttgtgcatgatgtggataggaaagtggaggacatgttctctaaggcttttctctgtgaagggtattcaaggagcaagaagggaggatcaggcacttcaacattccaagccacaggtctcgtttgtggaggcctttttgcccagagtagttgaagaacacaatttgctccctttatttcatctcacatgagccatttattattgttatcatcaaaacttatataattactatatgatatg

SEQ ID NO: 40674 - DNA, 246 bp, Glycine max
  Clone ID: 700940913H1
atttgacacaccataccaatcaaccaaccttgttgcttcttgtgatcactcctgaaccacactaatggatattgtgagtgggagtttctctctgatgatggctaccttgatttcaatgaagagggtgggaagcaaaagcaaaagcagaattcctttggaaaattggactccgagggcatctttgacatggactacttttgctcatcaccaccaccaccaagggtgagaactcaactagtccctttg

SEQ ID NO: 40675 - DNA, 246 bp, Glycine max
  Clone ID: 700940914H1
gatgtttcatgtcatggtgaatgaataccaattgatgcccaatatagagcattacgggataatggttgatcttttggtcgaatgggagagttggataaggccttggatatgattaataacatgcccatgcaagctgggcctcatgtatggggagccttacttggtgtttgtcgcatacatcaaaatattaagataggggagcttgccgctctgaatcttttcctgttagaccctaatcacgcaggg

SEQ ID NO: 40676 - DNA, 247 bp, Glycine max
  Clone ID: 700940915H1
cggctcgagctctgactctctccacaataagtgttgattttttcctaaataagtgaaagtgtagttacacctttatttagtgttttaccactcttgtgtgccagagttttctgagtttcataggagaagaaaatgacagaagaacaaaccaaaacggctgagtcagaatcagtgacaccaccacctgctgctgctccttcacaggctcctccagctgctgcggctgaacatgttcctgaggctccaa

SEQ ID NO: 40677 - DNA, 247 bp, Glycine max
  Clone ID: 700940916H1
ctttggactcgaacatgccggcgacttattactggttcacagactggggaatttactctttggactggacaatttttaattttgaaatgattcttcaggcgcatgatcaagcaatcagatccatggtctggagtcacaatgacaattggatggtctctggtgatgatggaggcgcaataaagtattggcagaacaacatgaacaatgttaaagccaacatatctgctcataaagaatcagtccgtga

SEQ ID NO: 40678 - DNA, 251 bp, Glycine max
  Clone ID: 700940917H1
atatgaaggggcaaccattgagagacttggtggacacaagcctgaactctttgcaagcaaatgaaattgaaaaatgggaagaagtggtcaaaagctgtgtgcatccagatccagaaaaaaggccaactatgagagaggttactgctaagttgaaggaaatcaccgccatggggccggacggagcaactccgaaagcatctcctctttggtgggcagaaatagaaattatgtccagtgacttaagtttagac

SEQ ID NO: 40679 - DNA, 250 bp, Glycine max
  Clone ID: 700940918H1
ctcacagtcctcctcccaatccccaaatcacccctcctctcgtcgaaactctccgaccccatctccgaattcgcctccggcatcgtaccatgtaacgcctcgccggtacagttcagtttctttcctcccctaaccctaatcttcgcgttttctaattttcgcgcagttctctctgtaacacatccgcgattcgcttcttcttccgtacatggctcaaccagacactctcactatcactcccaccagttct

SEQ ID NO: 40680 - DNA, 246 bp, Glycine max
  Clone ID: 700940919H1
cagaagaaaaaagagtttcttctttccgaaatccaagcagtagggttagggttttttccgatctcaatggcggagaaccggagagcaccgtcaccaccggcgcccccgacgaatcgctgctcgataagatcaccgagaagcttcacggccacgattcttcctcttcttcctcttcggattccgattccgaaaaaaccgttacttcgtccgttaaggatagggtttttcgcctcttcggaagggaga

SEQ ID NO: 40681 - DNA, 251 bp, Glycine max
  Clone ID: 700940920H1
gagatggtgccaaggaacatgttcaaacagccagatactaatggaattgttagtggagagttgcctaatggaaaatcacaaatacaagcttgaatatacaggtgactggttcatcacctgaaagtacatcacatcaatcaagcagagctgctcctgctgttgtccatgggcaggagcagggccttagcgacccagttcagttgatgagaatgttcgcagaaagggctcaaaagcaacacacttcttccaat

SEQ ID NO: 40682 - DNA, 249 bp, Glycine max
  Clone ID: 700940921H1
ggttggctctgcccgacaccggcttcatctcctacggcgaaatgctggagcagggccaactcatcacccaagccgttccattcccgtcattggcgacgccgacaacggctacggcaatgccatgaacctcaagcgaaccgtcaagggtttcattgccgccggtttcgcaggaatcattctggaagaccagattgcgccgaaagcgtgtgggcacacgcgcgggaggaaagtgataccgagagaggaggg

SEQ ID NO: 40683 - DNA, 125 bp, Glycine max
  Clone ID: 700940922H1
aggccatcaagggccatgaactgagcaacatgagaaccaaatcctccaattgatcctatcttcaactgtaatcaaaacctcatgtgattttgccaggctgcgaatcagggaacgatcatggatca

SEQ ID NO: 40684 - DNA, 248 bp, Glycine max
  Clone ID: 700940924H1
cttcagctctactgctgcttccagaaaacaaagagattttcattcagaaatcagctatctcatccctctcttgaccctcgcacatgaagaacactagcagcaacacaaaactaatccttctccacccatatatccagaaacaaggaagctcaaaccgcttatggcttctagccttcatatccttcttcaccttagttttcctggccacactcatgtacacaagagacacaacctcatctaccactacc

SEQ ID NO: 40685 - DNA, 124 bp, Glycine max
  Clone ID: 700940925H1
gacaattccatcgagttccgcctccagctgccggaatccgaccgctacgtcgggaatcccgagacttacgtcgagcggcggagtacgaggcgctgctgcatacgcatgcggaaagcgacggcgg

SEQ ID NO: 40686 - DNA, 125 bp, Glycine max
  Clone ID: 700940926H1
gggagggagccgtagcagcggaagctctagcttgggtagcgaatcacaatggcgagaggattaaagaagcatctgaagaggcttaatgccccaaagcattggatgcttgacaaactgggtggtgc

SEQ ID NO: 40687 - DNA, 244 bp, Glycine max
  Clone ID: 700940927H1
gttccgtcctttcggccctgtcagcagagtctatgttgccattgatcagaagactggcatgagcagagggtttggctttgttaactttgtcaacagggaagatgcacaaagagccatcggcaagctcaatggttatggctatgacaatctcatccttagagttgaatgggcaaccccaagagcaaattaaatgttgagtgttttttgcccctttctgtaaaacagtattttgaaggtctatgta

SEQ ID NO: 40688 - DNA, 125 bp, Glycine max
  Clone ID: 700940928H1
ctcccaagcagtgggaggaggctcgggactctgaccgcgtgcctgttgaagaatgagccggcgactcataggcgtggcttggttaagggaaaccaccggagccgtagcgaaagcgacgtacttca

SEQ ID NO: 40689 - DNA, 245 bp, Glycine max
  Clone ID: 700940929H1
accgatcagagctgattttcgcggctgttaccggtcaccggagattctatccgaaatcgttttccgatgatgtaaaaactgttaaagtcagtaacgtttccttgggagcaactgagcaagacattaaggagttcttttcattttctggtgatattgaatatgttgaactacggagccatgatgaacgatctcaaattgcttatattaccttcaaggattcacagggagctgagactgcactactg

SEQ ID NO: 40690 - DNA, 252 bp, Glycine max
  Clone ID: 700940902H1
catttactcaaagcctgttccggggaccactgcggaggagattgccggtggattgacggagatttcagcagtttttgaatctgtggatgagccggaggaggcactgaagctgttgaacagggcgatgaagttgttggaggataagccagggcagcagagcacgattgcagggattgaggcacgaatgggagtgatgtattacatgattgggaggtatgaggactcaaggaactcgtttgagagtgctgtggc

SEQ ID NO: 40691 - DNA, 246 bp, Glycine max
  Clone ID: 700940930H1
cgatttcattgcaaacaaccaaatcccagggattgatttcgcaacagtgcattcctaccccgaccaatggatacaagttcaggttatgaggaccaaatctcattcttaggccggtggctgaatgagcacatccaagatgcacagaacacccttcacaagccacttctatttgcggagtttggtatttccacaaagagttatggtcgcaactcaacaccaagggatcggttattcaacacggtatat

SEQ ID NO: 40692 - DNA, 247 bp, Glycine max
  Clone ID: 700940931H1
ttatgaatgaacattgagaaaaaaggcagaggcagaaacagagaagcagaagaaaaccacacttttttcatggccaaaatcattggcaggagcagaagaagaagaataacaacgactactactcaacaactatgcaacagaatggttcatcatcatgtcaatgtccgctgcaacctgttccatagcatgtcctttcttggtcgttttatttgggacaggatccttctctgctctcttggaaggcctt

SEQ ID NO: 40693 - DNA, 244 bp, Glycine max
  Clone ID: 700940932H1
cgcccttcctttcaccctcacttttcttctcattgcaaaagcatccataatccaggctctcaatcaccacaaccaacttttccaccttccttcaaatcaatactatccctttacaagcctctcctccacacctatttttgcaactgtttcttgattctctcagcaaatgcaactgcttttggtctcatgtttttggccttcagcttcattgaaagacttggctactcttcccctactggcctca

SEQ ID NO: 40694 - DNA, 123 bp, Glycine max
  Clone ID: 700940933H1
cgagtggcggaccacccgttaagaagcaaagtgccggcgagttgcgtcttcacaaagatataagcgagctgatctaccaaaatcatgtaccatgcaattccccaatggcaaagatgacctgat

SEQ ID NO: 40695 - DNA, 247 bp, Glycine max
  Clone ID: 700940934H1
gttgatgatagggtcgctctttctgttcaaagctttcgattttactttctgggtctccttcttctgcttctttgattcccccaattcttcagctttcaaaaccctaatctgctgccatgaggaagaagctcgatacccgtttccctgctgctcggataaagaagataatgcaagctgatgaggatgttggaaagatagcactcgctgtgcctgttttagtttctaaagctctagaactatgtttgca

SEQ ID NO: 40696 - DNA, 251 bp, Glycine max
  Clone ID: 700940901H1
caatgggtggtttccctcactatggtgttgttaaggatgattttatcatggtcaagggatgctgtgttggtcccagaagagggtcattacattgcgtcaatccctccttaagcagacttctcgtgttgctcttgaggagatcaaactcaagtttatcgatacctcttcaaagtttgggcatggtcgcttccagaccacacaggagaagcagaagttctttggacgcctcaaagcataattatgttaattgg

SEQ ID NO: 40697 - DNA, 166 bp, Glycine max
  unsure (1)..(166): unsure at all n locations
  Clone ID: 701037027H1
cacgcgtacgtaagctcggccgactagtgagcncgtcgacccgggaattaattccggaccggtacctgcaggcgtaccagctttccctatagtgagtcgtattagagcttggcgtaatcatggtcatagctgtttcctgtgtgaaattgttatccgctcacaattc

SEQ ID NO: 40698 - DNA, 145 bp, Glycine max
  unsure (1)..(145): unsure at all n locations
  Clone ID: 701037050H1
angcacgcgtacgtaagctcggaattccggaccggnacctgcaggcgtaccagctttccctatagtgagtcgtattagagcttggcgtaatcatggtcatagctgtttcctgtgtgaaatngttatccgctcacaattccacaca

SEQ ID NO: 40699 - DNA, 68 bp, Glycine max
  unsure (1)..(68): unsure at all n locations
  Clone ID: 701037344H1
gtcgcnngcacgcgtacgtnagctcggaattcggctcgaggggattcccaaaggcnaaaaanaaaaaa

SEQ ID NO: 40700 - DNA, 50 bp, Glycine max
  unsure (1)..(50): unsure at all n locations
  Clone ID: 701037876H1
gtcgangcagcgtacgtagctcggaattcggctcgagaaaaaaaaaaaan

SEQ ID NO: 40701 - DNA, 134 bp, Glycine max
  unsure (1)..(134): unsure at all n locations
  Clone ID: 701037940H1
tntcangcnngcgtncgtnagctcggaattcggctcgaggttctagatcgcgggcngccgccgatctagtgagctccgtcgacccgggaattaattccggaccggtacctgcaggccgtaccagctttccctat

SEQ ID NO: 40702 - DNA, 136 bp, Glycine max
  unsure (1)..(136): unsure at all n locations
  Clone ID: 701038012H1
tcncncncncgcntacgttagctcggtattccgagcttggntcctctagagcngccgcncgactagtgagcttcgtatacccgggatttnattccggaccggtaacctgcnggcntaaccanctttnccctatagt

SEQ ID NO: 40703 - DNA, 219 bp, Glycine max
  unsure (1)..(219): unsure at all n locations
  Clone ID: 701038165H1
nntcaagcanangcacgcnnacgananctcgnaattccgancttgnatcctcnanagcggcagacgactagtgagntcgncgacncgggnnttaattcncggaccggtacctnacaggcgtaccagctttccctatagagagtcgtattagagcttggcgtaatcatggtcatagctgtttcctgtgtgaaattgtnatccgctcacaatttcacanna

SEQ ID NO: 40704 - DNA, 316 bp, Glycine max
  unsure (1)..(316): unsure at all n locations
  Clone ID: 701038265H1
nngnnngcagcgtacgtaagctcggaattccgagcttggatcctctagagcggccgccgactagtgagctcgtcgaaccgggaattaattccggaccggtacctgcaggcgtaccagctttccctatagtgagtcgnattagagcttggcgtaatcatggtcatagctgtttcctgtgtgaaattgttatccgctcacaattccacacaacatacgnntcnnannnnnnnnnnnnnnnncnnnnnnnnnnnannnnnannnnnnannnnnnnntnnnnnggnnannanngggnnnnnnnntgggcannnnnnnnnn

SEQ ID NO: 40705 - DNA, 162 bp, Glycine max
  unsure (1)..(162): unsure at all n locations
  Clone ID: 701038310H1
ctcgggccgactagtgagnncgtcgacccgggaattaattccggaccggtacctgcaggcgtaccagctttccccatagtgagtcgtattagagcttggcgtaatcatggtcatagctgtttcctgtgtgaaatcgttatccgctcacaattccacacaaca

SEQ ID NO: 40706 - DNA, 163 bp, Glycine max
  unsure (1)..(163): unsure at all n locations
  Clone ID: 701038329H1
agctcggaattcggntcgaggttgataaacaaaaaaaaaaaaaaagggnggccgcngncnantganntcntcgacccggnatnaatnccggacccggtantgnaggcgnanagttttccccnatantgagccgtattagagcttggncntaataagggacaaa

SEQ ID NO: 40707 - DNA, 187 bp, Glycine max
  unsure (1)..(187): unsure at all n locations
  Clone ID: 701038440H1
agtcgcangcacgcgtacgtnagctcggaattccgagcttgngatcctctagagcggccgccgactagtgagctcgtcgacccgggaattaattccggaccggtacctgcaggcgtaccagctttccctatagtgagtcgnattagagcttggcgtnatcatggtcatagctgtttcctgtgtgaaa

SEQ ID NO: 40708 - DNA, 215 bp, Glycine max
  unsure (1)..(215): unsure at all n locations
  Clone ID: 701038734H1
tcgcangcacgcgtacgtaagctcggaattccgagcttggatcctctagagcggccgccgactagtgagctcgtcgacccgggaattaattccggaccggtacctgcaggcgtaccagctttccctatagtgagtcgtattagagcttggcgtaatcatggtcatagctgtttcctgtgtgaaattgttatccgctcacaattccacacaacata

SEQ ID NO: 40709 - DNA, 217 bp, Glycine max
  unsure (1)..(217): unsure at all n locations
  Clone ID: 701039077H1
acgtcgcangcacgcgtacgtaagctcggaattccgagcttgnatcctctagagcggccgccgactagtgagctcgtcgacccgggaattaattccggaccggtacctgcaggcgtaccagctttccctatagtgagtcgtattagagcttggcgtaatcatggtcatagctgtttcctgtgtgaaattgttatccgctcacaattccacacaacat

SEQ ID NO: 40710 - DNA, 237 bp, Glycine max
  unsure (1)..(237): unsure at all n locations
  Clone ID: 701039165H1
attttanagncgcangcacgcgtacgtaagctcgggaattccgagcttgngatcctctagagcggccgccgactagtgagctcgtcgacccgggaattaattccggaccggtacctgcaggcgtaccagctttccctatagtgagtcgtattagagcttggcgtaatcatggtcatagctgtttcctgtgtgaaattgttatccgctcacaattccacacaacatacgcgnnncccn

SEQ ID NO: 40711 - DNA, 179 bp, Glycine max
  unsure (1)..(179): unsure at all n locations
  Clone ID: 701039235H1
gtcncangcacgcgtacgtaagctcgggccgactagtgagntcgtcgacccgggaattaattccggaccggtacctgcaggcgtaccagctttccctatagtgagtcgnattagagcttggcgtaatcatggtcatagctgtttcctgtgtgaaatngttatccgctcacaattccaca

SEQ ID NO: 40712 - DNA, 174 bp, Glycine max
  unsure (1)..(174): unsure at all n locations
  Clone ID: 701039319H1
gcangcacgcgtacgtnagctcggaattccgagcttggcatcctctagagcggccgccgactagtgagctcgtcgncccgggaattaattccggaccggtacctgcaggcgtaccagctttccctatagtgagtcgtattagagcttggcgtaatcatggtcatagctgtttcc

SEQ ID NO: 40713 - DNA, 179 bp, Glycine max
  unsure (1)..(179): unsure at all n locations
  Clone ID: 701039339H1
tcgcangcacgcgtacgtaagctcggccgactagtgagcnccgtcgacccgggaattaattccggaccggtacctgcaggcgtaccagctttccctatagtgagtcgtattagagcttggcgtaatcatggtcatagctgtttcctgtgtgaaatngttatccgctcacaattccacac

SEQ ID NO: 40714 - DNA, 57 bp, Glycine max
  unsure (1)..(57): unsure at all n locations
  Clone ID: 701039490H1
gtctcnngcacgcgtacgtnagctcggaattcggctcgagntaaaaaaaaaaaaaaa

SEQ ID NO: 40715 - DNA, 53 bp, Glycine max
  unsure (1)..(53): unsure at all n locations
  Clone ID: 701039640H1
gnantgagcgtacgtngctcggaattcggctcgagntaaaaaaaaaaaaaaaa

SEQ ID NO: 40716 - DNA, 221 bp, Glycine max
  unsure (1)..(221): unsure at all n locations
  Clone ID: 701039666H1
cccgaanagtcgcangcacgcgtacgtnanctcggaattccgagcttgngatcctctagagcggccgccgactagtgagctcgtcgaccnnggaattaattccgggaccggtacctgcaggcgtaccagctttccctatagtgagtcgtattagagcttggcgtaatcatggtcatagctgtttcctgtgtgaaattgttatccgctcacaattccacaca

SEQ ID NO: 40717 - DNA, 59 bp, Glycine max
  unsure (1)..(59): unsure at all n locations
  Clone ID: 701039718H1
tacgtnagctcggaattcggctcgagccggcctttagggaaaaaaagaagaaaaaaaan

SEQ ID NO: 40718 - DNA, 208 bp, Glycine max
  unsure (1)..(208): unsure at all n locations
  Clone ID: 701039810H1
aagtcgcngcacgngtacnnagctcggaattccgagcttgggatcctctagagcggccgccgactagtgagctcgtcgacccgggaattaattccggaccggtacctgcaggcgtaccagctttccctatagtgagtcgtattagagcttggcgtaatcatggtcatagctgtttcctgtgtgaaattttatccgctcacaattccat

SEQ ID NO: 40719 - DNA, 313 bp, Glycine max
  unsure (1)..(313): unsure at all n locations
  Clone ID: 701039938H1
nntngaggtagngncgnttggtcagtanagtgntgttgacagatggnatggtttaatnaagttgtacggaaggccttcntgccangtgtgncgtgattgccgggtatancagacagtanttcgaaggnatgggagaattacatnttgaaatgcattgttgntacggngcaaangagantttaaggtggaagntaacgttggtgccccccaagnaaactnacagggagngcatttccaaaatgctcagaagtgaagtatgtgcacaagaaacantccaggtggncagggtnagtttgcagatgtcatgtccggt

SEQ ID NO: 40720 - DNA, 317 bp, Glycine max
  unsure (1)..(317): unsure at all n locations
  Clone ID: 701040024H1
aacnnagaggaagnngggaaataagagngagnagatanagaatagnngnannaannagnagnnagagaggaaggaanaagnanagnaanggnggagaggnanangaggactaggagcganaagganagngagggcnnggcaaggagnggagnaaagaaggagaaggggnaagnaaggagngaaaangcngaannggaagnagacnnnggnagggaaagaggagnaaaagggatananacacnngacnaagnaaagananaaaggngaggagnagagaagnaagnggnaagaganaanangagaagcaaanggnagcc

SEQ ID NO: 40721 - DNA, 195 bp, Glycine max
  unsure (1)..(195): unsure at all n locations
  Clone ID: 701040203H1
tctanngcacgcgtacgtaagcttggatcctctagagcggccgccgactagtgagctcgtcgacccgggaattccggaccggtacctgcaggcgtaccagctttccctatagtgagtcgtattagagcttggcgtaatcatggtcatagctgtttcctgtgtgaaattgttatccgctcacaattccacacaaca

SEQ ID NO: 40722 - DNA, 52 bp, Glycine max
  unsure (1)..(52): unsure at all n locations
  Clone ID: 701040214H1
naagctcggaattcggctcgaggttctagatcgcgagcgggccctttttttt

SEQ ID NO: 40723 - DNA, 64 bp, Glycine max
  unsure (1)..(64): unsure at all n locations
  Clone ID: 701040221H1
gctcgcacgcgtacgtnagctcggaattcggctcgaggaatccattgagagaaaaaaaaaaaan

SEQ ID NO: 40724 - DNA, 184 bp, Glycine max
  unsure (1)..(184): unsure at all n locations
  Clone ID: 701040223H1
cgcangcacgcgtacgtaagctcgggccgactagtgagctcgtcgacccgggaattaattccggaccggtacctgcaggcgtaccagctttccctatagtgagtcgtattagagcttggcgtaatcatggtcatagctgtttcctgtgtgaaattgttatccgctcacaattccacacaacata

SEQ ID NO: 40725 - DNA, 210 bp, Glycine max
  unsure (1)..(210): unsure at all n locations
  Clone ID: 701040589H1
tcgcatgcacgcgtacgtaagctcggaattccgagcttggatcctctagagcggccgccgactagtgagctcgtcgacccnggaattaattccggaccggtacctgcaggcgtaccagctttccctatagtgagtcgnattagagcttggcgtaatcatggtcatagctgtttcctatgtgaaattgttatccgctcacaattccacaca

SEQ ID NO: 40726 - DNA, 310 bp, Glycine max
  unsure (1)..(310): unsure at all n locations
  Clone ID: 701040681H1
agacaaatcgnggtgnnggnntntagangngngtgnngngngannggngncnngannnnngancgnngatnngnntnngnnnnnnntnnccaangnnanananannnggnngangngcgnngtgntngngcnnggannnngnncangctatngncaggtnangggccntgnnnnctcagagnnanctnnnaactgnncagcngaantgacgggaagaganttgtatctgntnnttggggttngganacnggtcaaaaaccttntgtgtggnatnagctgagcccaganggtgacagacctnctggganaa

SEQ ID NO: 40727 - DNA, 217 bp, Glycine max
  Clone ID: 701040815H1
cggctcgagaaattagttgctaatgaaggaaacaacacacttcattctggacccaaagcattcagtgatgttctttggaaagtgacaaggtatataaaagatggtgaaaaacccagaatcaccttcagttaccacagttatgatggtgaaggaggatttcctggggacctcctagtaactgtgagctacattcttgggaaaaactcattgaggataa

SEQ ID NO: 40728 - DNA, 152 bp, Glycine max
  Clone ID: 701040849H1
aattccgagcttggatcctctagagcggccgccggacttagtgagcttcgttcgacaccgggaattaattccggaccggttacctggcagggcgtaccagctttccctatagtgagttcgtattagagcttgggcgtaaattcatggtcata

SEQ ID NO: 40729 - DNA, 218 bp, Glycine max
  unsure (1)..(218): unsure at all n locations
  Clone ID: 701041055H1
nngcncnngtacgnnanctcggnnttnggctcnaggtcgannctnaactcagaatngcatcanagttnctctgcaganttgcntcaaattcnangtttgncngancaanatnnngcatgccngattnnncagacgntcntanggnanngacccnnattggnaattccgcgtcgtctntnagnggcntncnagntgntgccggnatnatntctgatttg

SEQ ID NO: 40730 - DNA, 188 bp, Glycine max
  unsure (1)..(188): unsure at all n locations
  Clone ID: 701041074H1
gtcgcangcacgcgtcacgtaagctcggggcgnctantgnnctcgtcgacccgggaatnaattccggaccggtacctgcaggcgtaccagctttccctatagtgagtcgtattagcagttgggcgtaatcanggtcatagctgtttcctgtgtggaatngttatccgctcaccattccacacaacata

SEQ ID NO: 40731 - DNA, 214 bp, Glycine max
  unsure (1)..(214): unsure at all n locations
  Clone ID: 701041117H1
ncgnngnnnnntnggaattccgagcttgnatcctctagagcggccgccgactagtgagctcgtcgacacgggaattaattccggaccggtacctgcaggcgtaccagctttccctatagtgagtcgtattagagcttggcgtaatcatggtcatagctgtttcctntgtgaaattgttatccgctcacaattccacacaacatacgngnnnncc

SEQ ID NO: 40732 - DNA, 221 bp, Glycine max
  unsure (1)..(221): unsure at all n locations
  Clone ID: 701041136H1
gtcgcangcacgcgtacgtaagctcggaattccgagcttgngatcctctagagcggccgccgactagtgagctcgtcgaccacgggaattaattccggaccggtacctgcaggcgtaccagctttccctatagtgagtcgtattagagcttggcgtaatcatggtcatagctgtttcctgtgtgaaattgttatccgctcacaattccacacaacatacgn

SEQ ID NO: 40733 - DNA, 215 bp, Glycine max
  unsure (1)..(215): unsure at all n locations
  Clone ID: 701041147H1
cacgcgtacgtaagctcggaattccgagcttgngatcctctagagcggccgccgactagtgagctcgtcgaccacgggaattaattccggaccggtacctgcaggcgtaccagctttccctatagtgagtcgtattagagcttggcgtaatcatggtcatagctgtttcctntgtgaaattgttatccgctcacaattccacacaacatacgnnn

SEQ ID NO: 40734 - DNA, 208 bp, Glycine max
  unsure (1)..(208): unsure at all n locations
  Clone ID: 701041307H1
gtcnnangcacgcgtacgtaagctcggaattccgagcttggatcctctagagcggccgccgactagtgagctcgtcgacccgggaattaattccggaccggtacctgcaggcgtaccagctttccctatagtgagtcgtattagagcttggcgtaatcatggtcatagctgtttcctgtgtgaaatgttatccgctcacaattccaca

SEQ ID NO: 40735 - DNA, 207 bp, Glycine max
  Clone ID: 701041339H1
agtcgcatgcacgcgtacgtaagctcggaattccgagcttggatcctctagagcggccgccgactagtgagctcgtcgaaccgggaattaattccggaccggtacctgcaggcgtaccagctttccctatagtgagtcgtattagagcttggcgtaatcatggtcatagctgtttcctgtgtgaattgttatccgctcacaattcca

SEQ ID NO: 40736 - DNA, 219 bp, Glycine max
  unsure (1)..(219): unsure at all n locations
  Clone ID: 701042162H1
nacgtcgcangcacgcgtacgtaagctcggaattcggctcgaggttctagatcgcgagcggccgccgactagtgagctcgtcgacccgggaattaattccggaccggtacctgcaggcgtaccagctttccctatagtgagtcgtattagagcttggcgtaatcatggtcatagctgtttcctgtgtgaaattgttatccgctcacaattccacacaac

SEQ ID NO: 40737 - DNA, 319 bp, Glycine max
  unsure (1)..(319): unsure at all n locations
  Clone ID: 701042237H1
agtcgcangcacgcgtacgtaagctcggaattgcaagctctgcattaatgaatcggccaacgcgcggggagaggcggtttgcgtattgggcgctcttccgcttcctcgcttcactgactcgctgcgctcggtcgttcggctgcggcgagcggtatcagctcactcaaaggcggtaatacggttatccacagaatcaggggtggcacgcaggaaagaacatgtgagcaaaaggccagcaaaaggccaggaaccgtaaaaaggccgcgttgctggcgtttttccataggctccacacatcatagannnngacantggntcn

SEQ ID NO: 40738 - DNA, 65 bp, Glycine max
  unsure (1)..(65): unsure at all n locations
  Clone ID: 701042284H1
cgtcgctngcacgcgtacgtaagctcggaattcggctcgagnaattcaggaaaaaaaaaaaaaaa

SEQ ID NO: 40739 - DNA, 298 bp, Glycine max
  unsure (1)..(298): unsure at all n locations
  Clone ID: 701042646H1
antangcatgcacgcgtacgtaagctcggaattccggaccggtacctggcaggcgtaccagctttccctatagtgagtcgtattagagcttggcgtaatcatggtcatagctgtttcctgtgtgaaattgttatccgctcacaattccacacaacatacgaccntaacgntgngngncgnngngnggngnnggangnntngnaagnngagnnggngtnggggnnngggggtnttgnnnncggngnntcgnnnnngggnnnagtngtgaaccccccngnangggtnctggnnntttnnt

SEQ ID NO: 40740 - DNA, 226 bp, Glycine max
  unsure (1)..(226): unsure at all n locations
  Clone ID: 701043371H1
ncgtcgcangcacgcgtacgtaagctcggaattccgagcttgggatcctctagagcggccgccgactagtgagctcgtcgacccgggaattaattccggaccggtacctgcaggcgtaccagctttccctatagtgagtcgtattagagcttggcgtaatcatggtcatagctgtttcctgtgtaaattgttatccgctcacaattccacacaacatacgcnnnnn

SEQ ID NO: 40741 - DNA, 166 bp, Glycine max
  unsure (1)..(166): unsure at all n locations
  Clone ID: 701043413H1
ntcgcangnacgcgtacgtaagctcgggccgactagtgagctcgtcgacccgggaattaattccggaccggtacctgcaggcgtaccagctttccctatagtgagtcgnattagagcttggcgtaatcatggtcatagctgtttcctgtgtgaaattgttatccgc

SEQ ID NO: 40742 - DNA, 77 bp, Glycine max
  unsure (1)..(77): unsure at all n locations
  Clone ID: 701043518H1
cgntgncgcgtacgtnagctcggaattcggctcgacgcgngcgcgccggcctttttttttttttttttttttttttn

SEQ ID NO: 40743 - DNA, 177 bp, Glycine max
  unsure (1)..(177): unsure at all n locations
  Clone ID: 701043595H1
cgtcgcangcacgcgtacgtaagctcggccgactagtgagcncgtcgacccgggaattaattccggaccggtacctgcaggcgtaccagctttccctatagtgagtcgtattagagcttggcgtaatcatggtcatagctgtttcctgtgtgaaatngttatccgctcacaattcca

SEQ ID NO: 40744 - DNA, 181 bp, Glycine max
  unsure (1)..(181): unsure at all n locations
  Clone ID: 701043638H1
gtcgcangcacgcgtacgtaagctcgggccgactagtgagctcgtcgacccgggaattaattccggaccggtacctgcaggcgtaccagctttcccnatagtgagtcgtattagagcttggcgtaatcatggtcatagctgtttcctgtgtgaaattgttatccgctcacaattccacaca

SEQ ID NO: 40745 - DNA, 63 bp, Glycine max
  unsure (1)..(63): unsure at all n locations
  Clone ID: 700966995H1
gtcgcangcacgcgtacgtaagctcggaattcggctcgagcaaaattcaggaaaaaaaaaaaa

SEQ ID NO: 40746 - DNA, 139 bp, Glycine max
  unsure (1)..(139): unsure at all n locations
  Clone ID: 700967028H1
ngtcgcangcacgcgtacgtaagctcggaattcggctcgaggtcaattatatttttatgatgccattttggtcttagttcaaaaaaaaaaaaaaaaaaaangggnggccgccgatcnantgnncncgtncgncccggnn

SEQ ID NO: 40747 - DNA, 201 bp, Glycine max
  Clone ID: 701042913H1
gcggaatatccactagcttcgtggaggtgacggatcttgacatggttgatgctgccatagtagaagggaaaacaaaagtgctttacttcgaatctgtttccaaccccacccttacggttgcgaacatacctgaactgtgccacatggcacaccggaagggagtgacggtggtggtggacaacacgttcgcgcccatggtgc

SEQ ID NO: 40748 - DNA, 269 bp, Glycine max
  Clone ID: 701041545H1
gctggtgctcctgcaacatcttctccacccaggaccacgccgccgccgctattgcccgcgacagtgccgccgtcttcgcctggaagggtgagaccctccaggagtactggtggtgcaccgagcgcgccctcgactggggccccggtggtggacccgacctcatcgtcgacgacggtggtgacgctacccttctcatccacgaaggcgtcaaggccgaggagctctatgagaagaccggcgaactccccgaccccaactccaccgacaac

SEQ ID NO: 40749 - DNA, 294 bp, Glycine max
  Clone ID: 701040287H1
ctggaattggccctggtgtctatgacatccactccccaagaataccaccaactgaagaaatcgctgacagaatcaataagatgcttgcagtgctcgagaagaacatcttgtgggtcaaccctgactgtggtctcaagacccgcaagtacactgaagtgaagccagccctcacaaacatggttgccgcagcaaaactcatccgtaacgaacttgccaagtgaatggtataagaaagtagaatctacaagttcattggttctgcttttataatacaccaaagaaaaattttctata

SEQ ID NO: 40750 - DNA, 297 bp, Glycine max
  Clone ID: 701040251H1
gccccactcaaccaccacacctctcctcgttcacgctacccctttctgctcttcttctacctttcaagttttaaaagtataaagatggcagagacattcctatttacctcagagtcggtgaacgagggacaccctgacaagctctgcgaccaaatctccgatgctgtcctcgacgcttgcctcgagcaggacccagacagcaaagttgcctgcgaaacatgcaccaaaaccaacttggtcatggtcttcggagaaatcacgaccaaggccaacgttgactacgagaagatagtgcgt

SEQ ID NO: 40751 - DNA, 252 bp, Glycine max
  Clone ID: 700967039H1
ccctaccaaggttgacagaagtggtgcctatatcgtgaggcaggctgcaaagagtgttgtggcaaatggccttgccagaaggtgcattgtccaagtttcctatgccattggtgtccctgagcccttgtcagtgtttgtggacacttatggaactgggaagattcctgacaaggagattcttcaaattgtgaaggagaatttcgacttcagacctggaatgatcaccattaacttggaccttaagaggggtgg

SEQ ID NO: 40752 - DNA, 257 bp, Glycine max
  Clone ID: 701041675H1
ggagaggataaggctttgcatttcatttgagagagagagcgtcttaactttacattatcaaaatggctgtttcggctatcacaggagcgaggctaaatctagggatagggttggcgatacctctttcctctcccacgcgctctcgaaccgtcgcaatggccgtatccgtcgaccccaagaccgacaacaaactcactcttaccaagtccgaggaagctttcgctgctgccaaggagctgatgcctggaggtgtcaac

SEQ ID NO: 40753 - DNA, 249 bp, Glycine max
  Clone ID: 701042351H1
gggtcctgcaatcattggtcacgctgatgatcaggtgcttgcagctctgggtgaaaccatgaagaaaggaaccagctttggtgcaccctgtctgctggaaaacactttggcagagctggttatcgatgccgtccccagcattgaaatggttcggtttgtcaattcaggcactgaagcttgcatgggtgcgctccgtctggcccgtgcttataccggaagagagaagatcatcaagtttgagggctgtta

SEQ ID NO: 40754 - DNA, 294 bp, Glycine max
  Clone ID: 701040274H1
aatgcaaataccacaaagacttatgctacaagaaccatatttttcttgaaagatgatggaactttgacaccattggccattgagttaagtaagccacatcctcagggtgaagaatatggtcctgttagcgaagtctacgtgcctgccagcgaaggagtggaagcttatatttggttactggcaaaggcttatgttgttgtgaatgatgcatgctaccatcaaatcattagccattggctaagcactcatgcaattgttgagccatttgtcatagcaacaaacaggcaactgagt

SEQ ID NO: 40755 - DNA, 186 bp, Glycine max
  Clone ID: 701043046H1
ctggtcaatgcagatggtattatagagaaaacattcttgtggggtaggtactctatggaaatgtccgctgtcatttacaaggactgggttttcactgatcaagcattacctaatgatcttgtaaagagaggagttgctgttaaggacccatctgctccccatggagttcgtcttttgattgaggac

SEQ ID NO: 40756 - DNA, 158 bp, Glycine max
  Clone ID: 701037401H1
gcagatggtattatagagaaaacattcttgtggggtaggtactctatggaaatgtccgctgtcatttacaaggactgggttttcactgatcaagcattacctaatgatcttgtaaagagaggagttgctgttaaggacccatctgctccccatggagt

SEQ ID NO: 40757 - DNA, 264 bp, Glycine max
  Clone ID: 701039015H1
ccctaaccaagttttaagtttttctcaacagaatggaagcaaccaacagaagctcttcctccacttcctcttcctctgattgctgctcttccgagtccaaccccaacaagcccgacagaatcaaaggcccatggagcgccgaagaggatcggatcctgaccggactcgtcgaacgatacggcccacgaaattggtccctcatcagccgctacattaagggaaggtccggcaagtcatgccggctccgatggtgcaatcagctta

SEQ ID NO: 40758 - DNA, 272 bp, Glycine max
  Clone ID: 701042608H1
ctcgatcaactcaacacaaaccaaaactcaagctaaaattctcactctctctctcatctcgagatcatagtatcatattcaatatcatttcataccaaacacatggctttggaagctctcaactcaccaacaacaaccgctccatcttttccctttgacgacccaactattccatgggcgaaacgaaaacgttcaaagcgttctcgcgaccatccttctgaagaagagtacctcgccctctgcctcatcatgctcgctcgcggcggcaccac

SEQ ID NO: 40759 - DNA, 272 bp, Glycine max
  Clone ID: 701041839H1
caaaagcaaccacaacaagcacttctcttatttcctatcacaccctattacagattcacaagcgcagacacttcaaatggctctggaagctcttcaatcacccagaacagccactccatcgtttagtccctttgaagaaaccaacctcagttacttggagacaccgtggaccaaaggaaagcgttctaagcgtagcgcatggagcagcaactgcaacactcttcatgcaccgaggaagagtacctcgctctctgtctcatcatgctcgctca

SEQ ID NO: 40760 - DNA, 198 bp, Glycine max
  Clone ID: 701042926H1
gggccacaggagtcgcctcgtgtttccgtttccgtttcaatttcctctcacaggctttaaccttaccagctcgagataagacatggaccggatcaaaggcccatggagtccggaggaggacgaggctctgcagaagctggtggagaaacacgggcccaggaactggtctctgatcagcaagtccatcccgggccggtc

SEQ ID NO: 40761 - DNA, 234 bp, Glycine max
  Clone ID: 701038462H1
cggatgccagacacgagccagttcgtggaggccgtggaggtggacgaggtgggggacgtggatttggacgtggtcgtgggtttagtcgtgactcctcgaatgatgagaactcattccctaccagcagagctccttataatcagggtccttttgaagaaggagatgctgggaagtcttctgaaagacgcagttatggtggaccacgagttccttaccgtggtggtcgtcgtggag

SEQ ID NO: 40762 - DNA, 267 bp, Glycine max
  Clone ID: 701039421H1
ctcgagcgatgctgggaagtcttctgaaagacgcggttatggtggaccacgaggtcattaccgtggtgcgtggtggtcgtcgtggaggtttcagcaatggtgaaactggtgaagctgaagaaggacgacctcgaagagcatttgatcgtcgcagtgggactggacgaggaaatgaattcaaacgtgaaggttcaggacgtggtaactggggagcccaaactgatgaacttgctcaggtaactgatgaggttgcgaatgaaactgaaa

SEQ ID NO: 40763 - DNA, 289 bp, Glycine max
  Clone ID: 701036956H1
aaatttctccaacgctatcgagccaaacccaaacgttaactcagaagaagaccagcagaagaagaagaagaagaaacaaaaccgaaccactttcaactctccaacgtcgccacacgattcatcgcgtttcgcaggctgcaatggcgacgttcgaactgtaccgcaggtcgacgatcggaatgtgcctgacggagacgctggacgagatggttcagaacggcactctcagccccgagctcgcgattcaggttctggtccagttcgataagtccatgactgaggctctgga

SEQ ID NO: 40764 - DNA, 274 bp, Glycine max
  Clone ID: 701041532H1
aatttctccaacgctatcgagccaaacccaaacgttaactcagaagaagaccagcagaagaagaagaagaagaaacaaaaccgaaccactttcaactctccaacgtcgccacacgattcatcgcgtttcgcaggctgcaatggcgacgttcgaactgtaccgcaggtcgacgatcggaatgtgcctgacggagacgctggacgagatggttcagaacggcactctcagccccgagctcgcgattcaggttctggtccagttcgataagtccatg

SEQ ID NO: 40765 - DNA, 258 bp, Glycine max
  Clone ID: 701042075H1
atagacttatattccatggctccgccgctcgaacacaacggcgtttccaccagcggtgactctctgagatctattccgacgccgtttctcaccaaaaccttccaactcgtcgacgatcacaccatcgaccatgtgatttcgtggaacgattctggatcgtccttcatcgtctggaacaccaccgctttcgccaaggatttgcttcctaaatatttcaagcacaacaacttctccagcttcgttcgccaactcaacact

SEQ ID NO: 40766 - DNA, 271 bp, Glycine max
  Clone ID: 701038289H1
cggtgaacagctgtctccggaggtggagcgccggcctttcacggcggaggaagacgaggcgatcctgaaggctcacgccaggttcgggaacaagtgggccaccatcgcgcgcttcctcaatggccgcaccgacaacgccatcaagaaccattggaattccaccctcaagaggaagcgctccgagcctctctccgagcctcggcctctgaagagatccgccaccgtttcgggtagtcaatccggatccgatttgagcgattcgggtttaccc

SEQ ID NO: 40767 - DNA, 284 bp, Glycine max
  Clone ID: 701038255H1
attatattctctcactctcttactctttcactctacttctctctcctattgcggctagggtttaggtttttctttcaccgtctccgttccttcaatcttcttattctctttcatctctgatggagacgttgcgggtttagttctaaggggtggttctggccttgggtttttggaacgtacggtgtcgttttggggttgggaaaacaaattctgagagatggcaaccacgaacccttttgatttgttgggtgacgacgctgaggacccttctcagctcatcgccg

SEQ ID NO: 40768 - DNA, 238 bp, Glycine max
  Clone ID: 701038727H1
ctggccttgggtttttggaacgtacggtgtcgttttggggttgggaaaacaaattctgagagatggcaaccacgaacccttttgatttgttgggtgacgacgctgaggacccttctcagctcatcgccgccgagcaactcaaggcggcggctgcggcctcggcggccaccgcggctcccaagaaggcgccggctcagcagaacaagccggctcagctccctaccaagccgcctcctcc

SEQ ID NO: 40769 - DNA, 251 bp, Glycine max
  Clone ID: 701042306H1
ggcggaaggtggtgtctccggtgaccggaaaatctaccggcggtggcgttaacatctcggcgtcccactccggcggcgacgacatggggtcgacatcgacgggatcgatggacgcggcaacggcggcgggcgctgatatatcgggcgagaacgagaaattgaagaaggacaacgagaaattgagcggcgagttagcgctggcgaagaaacaatgcgaggagttggtggcgtttcttagagactcgctgaac

SEQ ID NO: 40770 - DNA, 291 bp, Glycine max
  Clone ID: 701038207H1
cattgttcaacttgagatgatggcatcatttgcagggactactcagaagtgcaaagcatgtgagaagactgtgtatttggtggatcagctcactgctgacaacaagatctatcacaaatcatgtttcagatgctaccactgcaagggtacccttaagttgagtaattattgttcctttgagggtgttttatactgtaagcctcattttgatcaactctttaagaagactggcagcttggacaaaagttttgaaggtattccaagaactgcaagacttgaaagatctgccga

SEQ ID NO: 40771 - DNA, 265 bp, Glycine max
  Clone ID: 701037159H1
aaaggataatagcttttgacctagctaatagcacacaataatgggaagatccccatgctgcgatgagaatggccttaagaaaggtccctggactcccgaagaagatcagaaactagtccaacacattcagaaacatggccatggaagttggagagccctccctaagttagctggtctcaatagatgtggaaaaagttgtaggctaaggtggactaactatttaaggcctgatatcaagagggggaattttctcaagaagaggagc

SEQ ID NO: 40772 - DNA, 287 bp, Glycine max
  Clone ID: 701041007H1
ggataatagcttttgacctagctaatagcacacaataatgggaagatccccatgctgcgatgagaatggccttaagaaaggtccctggactcccgaagaagatcagaaactagtccaacacattcagaaacatggccatggaagttggagagccctccctaagttagctggtctcaatagatgtggaaaaagttgtaggctaaggtggactaactatttaaggcctgatatcaagagggggaagttttctcaagaagaggagcaaacaattctgcatctccattcca

SEQ ID NO: 40773 - DNA, 295 bp, Glycine max
  Clone ID: 701039535H1
gaaaagaaaaacttcacttcacttgcatgccaaatgagaacaacctcttcttagaataatttcctcggtgtttaagccttgtcgatttccgaacaccaatccgagttaattaaacaatgagagtttcgacagaaaagttagagacagagccggagagcaaaaagataaaacgcattcgtggcggcggcggcggggactcgagcaataagcaccctttgtaccgcggcgtgcggatgcggaactgggggaaatgggtgtcggaaatccgcgagccgcggaagaagtcgcggatatg

SEQ ID NO: 40774 - DNA, 272 bp, Glycine max
  Clone ID: 701042245H1
ctcgagctctttctttccccaatttgtgagtgttactgttgaatcgattggattggcattaggttgatctgaaatacgcaattgacatggcgagcgcgatggtagaggacgcgaacttcgaagatgaccaactagccaatatgaccaccgacgacatcgtcagagcttctcgtcttctcgacaacgagattcgcatcctcaaggaagagttgcagaggaccaatttggaattggaatcgtacaaggacaagatcaaggagaatcaggagaag

SEQ ID NO: 40775 - DNA, 195 bp, Glycine max
  Clone ID: 701042960H1
tccagggaatatttatttcaagtactggagatcaggcacagtcaatgagtggaaatggcgctatggcatttgatgtagagtacgcacgatggttagaagagcataatagacaaaccaatgagctaagggcctgcaataaattctcatgctggagatattgaacttcgaaccattgttgacaatttcatgacgcag

SEQ ID NO: 40776 - DNA, 274 bp, Glycine max
  Clone ID: 701038060H1
tgagtttccacacccaagtgaagaagcaagagctcgaattctacagatccattcgaggaagatgaatgttcacccagatgtcaactttgaagaacttgctcggtccacagatgatttcaatggagctcaactgaaggctgttgtgttgaggctggcatgttggctctacgccgtgatgcaactgaggtgaaccatgaggactttaatgaaggtattattcaagtccaagcaaagaagaaagcaagcctcaattattatgcataggctggatttt

SEQ ID NO: 40777 - DNA, 245 bp, Glycine max
  Clone ID: 701038688H1
ctttcttcctaacacggaacactcaggtttcgaacccttgttgtggttaggtcttcatatttcgaatttgggaattcatgggtcagggaactccgggcggcatgaaccggcagggcgaccggaagccggacggcggcgacaagaaggagaagaagttcgagccggcggcgccgccagcacgcgtggggcggaaacagcggaagcagaagggcccggaggccgcggcgcgactgccgacggtgact

SEQ ID NO: 40778 - DNA, 256 bp, Glycine max
  Clone ID: 701042170H1
tatagaaaagaaactcaagaaccgaattcaatggaagggactggatgtttcaagaccgggtgaggctgatgatagtcttcctagtttacaggcagaagttgaaaatttaacaatgaaggagcgccagttagatgaacaaataagggagatgcaagacagactgcgagatcttagtgaagatgaaaataatgacaagttgctttctgttactgaggaggatataaagaatttgccctgcttccagaatgaaacctta

SEQ ID NO: 40779 - DNA, 136 bp, Glycine max
  Clone ID: 701038358H1
cttaccatttgctcccagtacagagcttaaccgagcttcacaaagatgaatcgggaaaagttgatgaagatggccggttcggttagaactgggggaaagggtaccatgagaagacagaagaaggctgtccacaaga

SEQ ID NO: 40780 - DNA, 185 bp, Glycine max
  Clone ID: 701040773H1
atttaattcactgtactttatccttttgtgtggggaattatggtaattgattttgagggtttgactactcatggattatgatggtatgagaaaaccttccaaaaacttatttcactctcgcttctcccttttgggttctattgctgggattgggagttcttgaccgctctcctcctttttagttc

SEQ ID NO: 40781 - DNA, 236 bp, Glycine max
  Clone ID: 701043485H1
cttttgtgtggggaattatggtaattgattttgagggtttgactactcatggattatgatggtatgagaaaaccttccaaaaacttatttcactctcgcttcttcctttttgggttctattgctggattgggagttcttgaccgctctcctcctttttagttcttccccttaatcttctttcttcacaatttttatttccttccttattagacgtattagatcagattgaacaaaa

SEQ ID NO: 40782 - DNA, 241 bp, Glycine max
  Clone ID: 701043135H1
gcaaacacttccttgagggcacaaaagattccattgtttgcttctttcagattaatttttttgtcagttcagatcttcaagaagaagaatccagagaagctatatatacatcatcgttgttctttgccaagacaaagaagaaaaatggtgagggggaaaactcatgaagcgcatagaaaatgagacgagtaggcaagtaacgttctccaagagaaggaacgggttgctcaagaaggccttt

SEQ ID NO: 40783 - DNA, 270 bp, Glycine max
  Clone ID: 701038095H1
gggaattatggtaattgatatcgaggttttgactcatggattctgatcgccccagaaaaccttccaaaaatttagttcactctcgcttcttccttttcggcttctattgctgggattgggagttcttaaccgctctctcctttttagttgttccccttaatcttgttccttcatattttttttttttcttattagatcagattgaacaaaagggttgctctttattttttaatcttgggggaataatagtattagaactaagaaaagatt

SEQ ID NO: 40784 - DNA, 271 bp, Glycine max
  Clone ID: 701042603H1
tcttcatgaagaataggagttgtcaagatggttatgcagtgaaatcatctttgaaagctgaagatggaattctgtatccccttgagaagagcttcttctttctacctaaacctcccactcttattcttcatgaagagattgactatgtggaattcgagcggcatgctgctggtggctccaatatgcattattttgaccttcttatcagactaaaatctgaacaagagcatctcttccgtaatattcagagaaatgagtaccacaatttgtt

SEQ ID NO: 40785 - DNA, 270 bp, Glycine max
  Clone ID: 701040606H1
ctctgacacaagaattaagttgtgagatggagagaagtagtgaagaggagatgttaataacgaaaggtccatggacagagcaagaggattctcttctcttcaattacatcactgtccacggcgaaggtcactggaactctgtcgctcgctacacaggcatgcaaagcattaattatattcatcatcttaatcctagcttctttcttactcacactcatcacgttttcaatcacaggtctaaaacgaacgggcaaaagctgcagattaaga

SEQ ID NO: 40786 - DNA, 231 bp, Glycine max
  Clone ID: 701038792H1
ctcgagcgttgtgccatttcttctctcaataaacttctattgatgccccgctccacgttccattcttcagtatcctttgtagtttgaaccttcctcacactcccacttccgaaaccaatcaaagagagagagagagagagatgggtagagctccttgttgtgacaaggcaaatgtaaagaaaggaccatggtcaccagaagaagatgaaacgctaaaggattacatagagc

SEQ ID NO: 40787 - DNA, 260 bp, Glycine max
  Clone ID: 701038959H1
cacaaagcaagcgcgtgctgtgaactcttctcccactaacagttccataaccattgttgaagaagaggctagcagtaacagctgcaagaccaagctttttggtgtgtctctccaatccaagaaaagggtgcaccctgatgagtacggatctaactatattcttcaaagctccgaaacgaataataaggcgcgtttggttttggaaaatgatgctattaggcttgaatcttatgcccccttcaacttgttaattagttagt

SEQ ID NO: 40788 - DNA, 271 bp, Glycine max
  Clone ID: 701041739H1
caaaagcaaccacaacaagcacttctcttatttcctatcacaccctattacagattcacaagcgcagacacttcaaatggctctggaagctcttcaatcacccagaacagccactccatcgtttagtccctttgaagaaaccaacctcagttacttggagacaccgtggaccaaaggaaagcgttctaagcgtagcgcatggagcagcaactgcaacactcttcatgcaccgaggaagagtacctcgctctctgtctcatcatgctcgctc

SEQ ID NO: 40789 - DNA, 273 bp, Glycine max
  Clone ID: 701037760H1
ccaaactcaagttcaccaaaagcaaccacaacaagcacttctcttatttcctatcacaccctattacagattcacaagcgcagacacttcaaatggctctggaagctcttcaatcacccagaactgccactccatcgtttagtccctttgaagaaaccaacctcagttacttggagacaccgtggaccaaaggaaagcgttctaagcgtagcgcatggagcagcaactgcaacactcttcatgcaccgaggaagagtacctcgctctctgtct

SEQ ID NO: 40790 - DNA, 293 bp, Glycine max
  Clone ID: 701038122H1
ccaaaagcaaccacaacaagcacttctcttatttcctatcacaccctattacagattcacaagcgcagacacttcaaatggctctggaagctcttcaatcacccagaagggccactccatcgtttagtccctttgaagaaaccaacctcagttacttggagacaccgtggaccaaaggaaagcgttctaagcgtagccgcatggagcagcaactgcaacactcttcatgcaccgaggaagagtacctcgctctctgtctcatcatgctcgctcacggcggcgccggcggtgtc

SEQ ID NO: 40791 - DNA, 260 bp, Glycine max
  Clone ID: 701040129H1
caacaagcacttctcttatttcctatcacaccctattacagattcacaagcgcagacacttcaaatggctctggaagctcttcaatcacccagaactgccactccatcgtttagtccctttgaagaaaccaacctcagttacttggagacaccgtggaccaaaggaaagcgttctaagcgtagccgcatggagcagcaactgcaacactcttcatgcaccgaggaagagtacctcgctctctgtctcatcatgctcgctc

SEQ ID NO: 40792 - DNA, 273 bp, Glycine max
  Clone ID: 701041906H1
tgctgctgttgcaaaacttagggttgggcctttttttgaggttttcagcgcttctttctcacaatggttcttcagaatgatattgatttgctgaatcctccagctgagttggagaagagaaagcacaaactcaagcgtcttgttcagtcaccaaactctttcttcatggatgttaagtgccagggatgcttcaacataacaactgtgtttagccactctcaaactgttgtggtgtgcggaaactgccagactgttttgtgccaaccaacaggg

SEQ ID NO: 40793 - DNA, 284 bp, Glycine max
  Clone ID: 701038517H1
ccctcgccgctttgtgctgctgctgctgcaaaacctagggttgagccttttgctcaggttttcagcgcttctttcttacaatggttctacagaacgatattgatttgctgaatcctccagctgagttggagaagagaaagcacaagctcaagcgtcttgtgcagtcaccaaactctttcttcatggatgttaagtgccagggctgcttcaacataacaactgtgtttagccactctcagactgttgtggtttgcggaaactgccagactgtgttgtgccaacca

SEQ ID NO: 40794 - DNA, 249 bp, Glycine max
  Clone ID: 701038681H1
tcttattcatcttttcattcactcactctcactcatggctgaagatgggaacaacaacgatgtacccttacacaaattcaaagacagcaatccaaaccctggagagttcgatgcaaagggttacagcctcagcggaaaaatcatgctttcagcaataatccttcttttcttcgtcgtcgttttgatgttgtgccttcatatctacgcgcgctggtacctccggcgtgctcgccgccgccagctccggcg

SEQ ID NO: 40795 - DNA, 254 bp, Glycine max
  Clone ID: 701042157H1
cccatctctcaaagctttacacgcttttaacactctctagaaaagtggtgttcttttttctttctctgaggactcgttgcttttcctttttcccattctcttcttaaatccatggacacggctcagtgggcacagggtattggagtggttaaacaaccgatggaaggttcaaagcctcctcctcctcctcctcctcctatgttggagagaagggcaaggcctcaaaaggatcaagctttgaactgcccaaggtg

SEQ ID NO: 40796 - DNA, 173 bp, Glycine max
  Clone ID: 701037531H1
gaaaaatgtccgaaaacggagaagagaaattactcgctgtggcgcggcacatagccaaaacgctgggccacaacaacaccatgtctgatgacatattccaaatactatcgaacttcgatggaagattctcgagagagaatctttctgagaagggcgcagatgtggatcccaga

SEQ ID NO: 40797 - DNA, 272 bp, Glycine max
  Clone ID: 701041921H1
gggaatcggcacgtagatcgaggatgaggaaacagcagcacctggaaggtctcagtgcccaattggatcagctaaaaaaggagaacacccaaatgaacacaaacataggcatcagcacgcagctgtacctcaacgtggaagctgagaacgcgattctgagggctcaaatggaagaactgagcaagagattgaactctctgaacgaaatgataagtttgattaactccaccaccaccaccaacaactgcttgatgttcgatgaggcacaggag

SEQ ID NO: 40798 - DNA, 256 bp, Glycine max
  Clone ID: 701042734H1
gacaaccagagtcatccatggccaagcccaatccacacactgaagccccttctgcacctgagccacccaaagctgtaaagcgagagggcaatcgcaagggaacaacatcaagctctgagcaggaagcacccaaaacaccagatcctaagacactaagaagacttgctcagaatagagaagcagcaaggaaaagcaggctcaggaaaaaggcgtacgttcagcaactagagtcaagtaggattaagcttaatcagat

SEQ ID NO: 40799 - DNA, 280 bp, Glycine max
  Clone ID: 701040904H1
cttttacacattcagttcatttccttattttctcaacaaaacaaccgagagttcgtcatatctgtatctgtatatatacctatacctatacctatatcgtatccgcatttccgaaaggatatatcttatttagggtttttgtgactgtgctccacaaccgagtcgccatggcgtcgcaggagagtatcgaaaagatgcaggcacggcagaattaccggaatttatggcacaccgatctcatgagatccattcaggccgatactccttattgttgcctcgc

SEQ ID NO: 40800 - DNA, 281 bp, Glycine max
  Clone ID: 701036975H1
catattttagcacgccaaaccggtctctcgagaggacaggtttcgaattggtttattaatgcaagggtgagactatggaagccaatggtggaggaaatgtacttggaggaagtgaaggaccctgaaaacaacatagcttcctcagaaggggctactgatcaagacaatgatataaacccaaataatgttgaataccctccacctccttcttcatcacgatcagaggatcagaagccatctctggttcgaattgactccgagtgtgcatcctccatcatcaa

SEQ ID NO: 40801 - DNA, 274 bp, Glycine max
  Clone ID: 701041521H1
gaaaattatgctggctaggcaaacaggcttgaccagaaaccaggtggcaaattggttcatcaatgcaagggtgcgtctctggaagccaatggttgaggaaatgtacaaagaggagtttggagattccgagatgaactgcaacctttcatctgagaacaacacggtcaaaggtaaaagagatgatgttcaagagtctgataacattaacaataataataataaatgggaagagtcacaggacaatttagtaactgttgacagtgtgcaagtccaa

SEQ ID NO: 40802 - DNA, 240 bp, Glycine max
  Clone ID: 701041243H1
ccaaaacacaaacaaaaactcccgttttctctctctgtctttccatggccatctgatcaaacttttcttgattctctctctcagtttttgctattctgagtgatgggtatgccctgccgctgttcccacacctccacatcactgaaatcatcatcaccagcttcttccgccacaagtcttaaattacaacaatttccctcaattattcatcaaccaaccaccttaatagccttttccaat

SEQ ID NO: 40803 - DNA, 249 bp, Glycine max
  Clone ID: 701042768H1
gttttctctctctgtttttccatggccatctgatcaaacttttcttgattctctctctcagtttttgctattctgagtgatgggtatgccctgccgctgttcccacacctcccacatcactgaaatcatcatcaccagcttcttccgccacaagtcttaaattacaacaatttccctcaattattcatcaaccaaccaccttaatagccttttccaatggttccttaaagatccaacttggtcggagta

SEQ ID NO: 40804 - DNA, 242 bp, Glycine max
  Clone ID: 701038730H1
aaaacctttcacccaatatcctcaatctactacttctgataaattgctaatttttataaagctagctagagatgatggttcaaaaggcagatttgggtttgagtttaagcctcaacttccctcatcacaataccccaaatcctcaacatccgagtctcatgtcatcctctactcattcctcttctccttctggttgcaaccctcaaaaaccctcttggaacgaggctttcacttcttcgggt

SEQ ID NO: 40805 - DNA, 252 bp, Glycine max
  Clone ID: 701037074H1
gttgaatttggaagcaggtttcgaattggtttattaacgcgagggtgaggctatggaagccgatggtggaggaaatgtatctggaagaagagaaggagcaagaaaacgacgtagcatcatcggatattaatgttcccgaagaggatgagaagccaacgcaggaggctccactccttcgaattgactcagagtgcatgtcgtctatcgtcaacgacgtcacaaagagcggcaaaaccatccaaaacgacaatc

SEQ ID NO: 40806 - DNA, 236 bp, Glycine max
  Clone ID: 701038758H1
acggcgcaggcgccgaatccggagatttgaagggagagacggcgccggtggacggcctcttgaactggcagaatgcgagattgaaggcggagattttaacgcatcctctgtacgaacagcttctgtcggcacacgtggcgtgcttgcggatcgccacgccggtcgaccagttgcccaggatcgacgctcagctcgcacagtcccagaatgtcgtcgccaagtactctgccttcgga

SEQ ID NO: 40807 - DNA, 266 bp, Glycine max
  Clone ID: 701042583H1
ggaaatcttgcgcaagagaagagctgggaaacttcctggtgacacaacttctgttcttaaagcttggtggcaatcacattccaagtcgccttaccctaccgaggaggataaggcaaggttggtgcaggaaactggattgcaattaaagcagattaataattggtttatcaatcaaaggaagaggaattggcacagcaatccttcaacttcaactgtcttgaagagcaaacgcaaaaggtattcccatcaaaactagtaatttgtaa

SEQ ID NO: 40808 - DNA, 252 bp, Glycine max
  Clone ID: 700966971H1
ggaacgggtgcaacaatgtccgacgatgaagaagatcaggcagagagtaatgccaacttgtacgaaggaagcatggatggagctgatagtctcagctttggtcctcttgttcccacagaaactgaaagatctttgatggagcgtgtgaggcaggagctgaagcatgagttaaaacagggttacaaggacaagattgtggacataagagaagaaattttacgaaagagaagagcgggaaagctaccaggcgac

SEQ ID NO: 40809 - DNA, 269 bp, Glycine max
  Clone ID: 701037153H1
gttttacattttttttttgttcctgagttccaatggctcttcaggctgcttccttggtttctgcttctttttctattgctaaagagggaaagtctggtgtatctctcagggacaccacaatgtttggtgtttcattgtcggatactctcaaatctgacttcagctctccctcatcgacttgcaaaagggaattccaacaaaaatttggccctttgagggttcagtcagtggcaacaacaactccaggagtcaccaaggcttcaccagaa

SEQ ID NO: 40810 - DNA, 150 bp, Glycine max
  Clone ID: 701037485H1
cgaacaagggtttctctttctctttctctgtctgcttcttcactttctctcgtttcaatcgaaaaaaatcatgggcagaaaattcttcgtcggtggcaactggaaatgcaatgggaccactgaggaggtgaagaagattgttactacttt

SEQ ID NO: 40811 - DNA, 287 bp, Glycine max
  Clone ID: 701038167H1
ctgtgttcctgtttttgttcttcgatggcggcaacctcaacatcactggcttctcaactctacattggcctgcgccgcccctgcctcaagctcgattctttcaattctcaatctttctctctcttcgaccctaatcttcgcctatccctctctccacccaaaccctcacgcgccgtcatcgccatggccggcaccgggaagttctttgttggtggcaactggaagtgtaacggaacaaaagactcaatcagcaagcttgttgctgacttgaacaatgcaaaattgga

SEQ ID NO: 40812 - DNA, 240 bp, Glycine max
  Clone ID: 701043447H1
ctcgagcgttttgttcttcgatggcggcaacctcaacatcactggcttctcaactctacattggcctgcgccgcccctgcctcaagctcgattctttcaattctcaatctttctctctcttcgaccctaacttcgcctatccctctctccacccaaaccctcacgcgccgtcatcgccatggccggcaccgggaagttctttgttggtggcaactggaagtgtaaggaacaaaagactca

SEQ ID NO: 40813 - DNA, 276 bp, Glycine max
  Clone ID: 701039850H1
ctttaccagtcgacaacagatggaaataaatttgtggattgcctccgcgatcagaacattgtgcccggcatcaaagttgataagggtctggtccctctgccagggtcaaacaatgagtcttggtgccaagggctggatggttggcttctaggtctgctgaatactacaagcaaggtgctcgatttgccaagtggaggacagttgttagcattccatgtggtccttctgcattagctgtcccggaagcagcgtgggggcttgcacgttatgctgcta

SEQ ID NO: 40814 - DNA, 263 bp, Glycine max
  Clone ID: 701037190H1
acaccaaattaacaaagccttctttttcttgtgtgatctcacaagcccctaaaggccaccatgtcttccttcaagagcaaattccaagatgagttgattgccaatgctagttacattggcaccccaggaaagggtatccttgcggctgacgagtcaacagggacaattgggaagcgtttggcgagcatcaacgtggagaatgttgaaacaaacaggcgcattcttcgtgagctcctattcactgcccctggttgtcttgagcg

SEQ ID NO: 40815 - DNA, 258 bp, Glycine max
  Clone ID: 701042664H1
cacaccaaattaacaaagccttctttttcttgtgtgatctcacaagcccctaaaggccaccatgtcttccttcaagagcaaattccaagatgagttgattgccaatgctagttacattggcaccccaggaaacggtatccttgcggctgacgagtcaacagggacaattgggaagcgtttggcgagcatcaacgtggagaatgttgaaccaaaaaggggaatcctccgtgagctcctattcactgcccctggttgtct

SEQ ID NO: 40816 - DNA, 273 bp, Glycine max
  Clone ID: 701042223H1
tgctgctgatgagtcaacagggacaattggcaagcgtttggccagcatcagtgtagagaatgttgaatccaacaggcgtgctcttagggagctgcttttcaccgctcccggtgctcttaaatatctcagtggtgtcatcctctttgaggaaactctctaccagagcacagctgcaggcaagccctttgtggaagtcttgaaggaggctggtgttcttcctggcatcaaggttgacaagggcacagttgagcttgctggcactaatggagaaac

SEQ ID NO: 40817 - DNA, 284 bp, Glycine max
  Clone ID: 701038194H1
ctaacctacctctttttcttctctctcaacaacttcaccttcttcctcctcgatcatgtctcacttcaagggcaagtaccatgatgagcttatcgccaatgctgcgtacattggcactcctggaaagggtattcttgctgctgatgagtcaacagggacaattggcaagcgtttggccagcatcagtgtagagaacattgaatccaacaggcgagctcttagggagctgcttttcactgctcctggtgttcttcaatatctcagtggtgtcatcctctttgagg

SEQ ID NO: 40818 - DNA, 258 bp, Glycine max
  Clone ID: 701042141H1
ctgagctggctatccatgagaatgcctatggcttggccagatacgctgtcatatgccaggagaatggcctggttcccattgttgagcctgagatccttgttgatggatctcatgacattcacaagtgtgctgccgtcaccgagcgtgtccttgcagcatgctacaaggctttgaatgatcaccacgtccttcttgagggtaccctattgaagccaaacatggtcacccccggatccaattctgctaaggtttcccctc

SEQ ID NO: 40819 - DNA, 145 bp, Glycine max
  Clone ID: 701038320H1
cgtttggccagcatcagtgtagagaatgttgaatccaacaggcgtgctcttagggagctgcttttcaccgctcccggtgctcttaaatatctcagtggtgtcatcctctttgaggaaactctctaccagagcacagctgcaggca

SEQ ID NO: 40820 - DNA, 263 bp, Glycine max
  Clone ID: 701041476H1
cgttgtcttctcacttcgtcaaaaccaaccaaacccctccccaattctcaagccaaccatgtcttccttcaagagcaagtaccaagatgaactcattgccaatgctgcttacattggcaccccagggaagggtatccttgctgctgatgagtcaactggtacaattggcaagcgattggccagcattaatgtcgagaatgttgaagcaaataggcgtgctcttcgtgaactcctattcaccacacctggtgcttttgagtgcc

SEQ ID NO: 40821 - DNA, 264 bp, Glycine max
  Clone ID: 701040560H1
ctttaactcatgctttttcccacttgcaaactccaaattcactctctgacagtttttgcagccaattaagaagaacttaacagacatataaacatagtgatcgtcatgtctacgcaaccaaagcttggtcggatttccagtatcagagaccgagttgaagacactctctctgctcaccgtaacgaactcatttctctcatctccaggtatgtggctcaggggaaagggattttgcaaccccataatttgattgatgaacttgac

SEQ ID NO: 40822 - DNA, 253 bp, Glycine max
  Clone ID: 701037091H1
caaaacccagatgcactccaacatgttctgaggaaagctgaggagtatctgggcacagtgcctcctgaaactccctactcagaatttgaggacaagttccaggagattggtttggcgagagggcggggtgacaagcagagcgtgttcttgagtcaattcaacttctcttggatcttcttgaggcccctgacccttgcacccttgagactttccttggaagaattcctatggtcttcaatgttgtcattctttc

SEQ ID NO: 40823 - DNA, 257 bp, Glycine max
  Clone ID: 701037195H1
tattactcgtcttctccctgatgcagtaggaactacctgtggccaacgtctagagagggtatatcatactgaatattgtgacattctccgagttcctttcagaaccgaaaacggaattgttcgcaaatggatctcaacattcgaagtctggccatacctagagacttacactgaggatgttgcccttgaacttgccaaggagttgcaagccaagccagatctgatcgttggaaactacagtgatggaaacattgttg

SEQ ID NO: 40824 - DNA, 152 bp, Glycine max
  Clone ID: 701039594H1
ctggactctaccgcgttgtgcatggtattgatgtctttgatccaaaattcaacattgtctcccctggagctgatcaaaccatttacttcccccacactgaaaccagccgtaggttgacatccttccaccctgaaatcgaagaactcctttac

SEQ ID NO: 40825 - DNA, 254 bp, Glycine max
  Clone ID: 701042737H1
ctttataccccccctctcttttttgcgttcattctgttttcctgatgaagtctttccctagccaatggccaccgatcgtttgacccgggttcacagtctccgtgagaggcttgatgaaaccctcactgccaacaggaatgaaattttggcccttctgtcaaggatcgaagccaagggcaagggcatcctgcaacaccaccaggtcattgctgagtttgaggaaatccctgaggagaacagacagaagctcactg

SEQ ID NO: 40826 - DNA, 268 bp, Glycine max
  Clone ID: 701037284H1
ctttacacccccctctctattttgcgttcattctgttttccagttgaagtctttccctagccaatggccactgatcgtttgacccgggttcacagtctccgtgagaggcttgatgaaaccctcactgccaacaggacgaaattttggcccttctgtcaaggatcgaagctaagggcaaggggatcctgcaacaccaccaggtcattgctgagtttgaggaaatccctgaggagaacaggcagaagcttactgatggtgcctttggaga

SEQ ID NO: 40827 - DNA, 264 bp, Glycine max
  Clone ID: 701042523H1
gttcattctgttttcttgaagtctttccctagccaatggccactgatcgtttgacccgggttcacagtctccgtgagacgcttgatgaaaccctcactgccaacaggaacgaaattttggcccttctgtcaaggatcgaagctaagggcaaggggatcctgcaacaccaccaggtcattgctgagtttgaggaaatccctgaggagaacaggcagaagcttactgatggtgcctttggagaagtcttgagatctacacaggaag

SEQ ID NO: 40828 - DNA, 277 bp, Glycine max
  Clone ID: 701039647H1
ctcgagccgctcgtagcatttcggcatccaaactaactctctcatcttctacagcattcttctgcaattcaaatcaaattttcaaaccatggcttcctccaccaacgctcttcctcccaccggcaacggcctcatcgtgagcttcggcgagatgctcatcgatttcgtccccaccgtctccggcgtgtcccttgcggaggctccgggcttcctcaaggcccccggcggcgcccccgccaacgtcgccatcgccgtcgcgaggctcggcggaaaggcg

SEQ ID NO: 40829 - DNA, 256 bp, Glycine max
  Clone ID: 701041987H1
ggatcaatcagtttgatcgtggagccatgcagatcagcacacttgaaggcaatggaagtagccaaggaatctgggtgcttgctctcctatgaccccaaccttcgtctacctttgtgcgccttcggctgaggaagctcgtaagcaaatactgagcatttgggagaacgctgatttgatcaaggtcagtgatgcggacttgagttcctcacaggaagtgacaagattgatgatgaatctgctttgtcattgtggcacc

SEQ ID NO: 40830 - DNA, 284 bp, Glycine max
  Clone ID: 701038169H1
caaccttaaaagactctcttttctctctctgaactctgaagcaaaacaacattaccagagtggttctagtaattcagtgctgctagaagatggaaactagtgaatggcatatcgagcgaagatctagcttcggctctgaatcccccttagcaagagaggcaggaaatgtgcctgaaactgggtcactctctattgtggtgcttggtgcttctggtgatcttgctaagaagaagacatttcctgcacttttccacctatacctgcagggattcttaccaccagat

SEQ ID NO: 40831 - DNA, 140 bp, Glycine max
  Clone ID: 701038338H1
cagccagccagccatggtgctcatcaatgtttcacgcgttgagaccactcccttcgatggacagaagcctggaacctctggtctccgcaagaaggtgaaagtattcgtgcaacctcattacctccataactttgttcagt

SEQ ID NO: 40832 - DNA, 263 bp, Glycine max
  Clone ID: 701039454H1
ctggccttttgttctcgtgtcaatttctaaatccaccaccacaccctctcttctattctctattattattatgtccacacccttcactctgtctcactcttctctcgaatcttccaccgcaatggccacccctgccgagaaactctccgctctcaaatccgccgtcgccggattgaacgaaatcagtgagaatgagaagaacggattcatcagcctcgtcggccgctatctcagtggcgaacgcagcatgtggaatggagcaa

SEQ ID NO: 40833 - DNA, 249 bp, Glycine max
  Clone ID: 701043539H1
gctggtgttatcctcaagggaaaaatcagtatcgtggccaatcctggtgttaagctggaagttcccgatggtgctgtcatttcggataaggaaattaatggcccagaggacctcctgtgaggaagcccgctgagtttagaagtatcagactgtatactatctttatggtctcatgttttttccaattattactactcccaagtttgatgggcaaagaaaataagtccctttttgtttgtcttctgattc

SEQ ID NO: 40834 - DNA, 298 bp, Glycine max
  Clone ID: 701040204H1
tggtcatcctcggcacacaatacgccggggaaatgaagaagggtcttttcggtgtcatgcattatctcatgcctaagcgccaaatcctctccctacactctggatgcaatatgggcaaagatggggatgtggcactcttctttggactctcaggtaccggaaagaccactctttcgaccgatcacaataggtatctaatcggagatgatgaacactgttggggtgacaatggtgtctccaacattgaaggtggttgctatgccaaatgcattgacctctcacgggagaaagagccaga

SEQ ID NO: 40835 - DNA, 260 bp, Glycine max
  Clone ID: 701042078H1
tggtcatcctcggcacacaatacgccggggaaatgaagaagggtcttttcggtgtcatgcattatctcatgcctaagcgccaaatcctctccctacactctggatgcaatatgggcaaagatggggatgtggcactcttctttggactctcaggtaccggaaagaccactctttcgaccgatcacaataggtatctaatcggagatgatgaacactgttggggtgacaatggtgtctccaacattgaaggttgttgctat

SEQ ID NO: 40836 - DNA, 271 bp, Glycine max
  Clone ID: 701041607H1
agcaggtagccacagctgttataaaagaagcagtggaggaggacctagctgaaggatatcatggaatggatgctcgggagtgcagaaactaagcgaggatgaaatcgcggaatatgtgcagaataacatgtggagtccagagtaccctacattagtttacaagaaagaatgagtaacctgcagggttgataactacaatttccctctcgatgcatgtttggttcgatcaggttgttcacagaatcctgtttactggattagatgatttaaa

SEQ ID NO: 40837 - DNA, 245 bp, Glycine max
  Clone ID: 701038703H1
catcaccatccctttccttattcttcttctgtttcatccctctccccattttctcgctctcgtttcttgtcctctactcctttctccatggcttctgattcccctttccctgtcaccgctcaaaacatcaaccccaaggttctgaaatgtgagtatgctgttagaggagaggttgtcacacttgcccagaatttgcaaaaggatttacaggccaatccaggttctcacccatttgatgagatact

SEQ ID NO: 40838 - DNA, 284 bp, Glycine max
  Clone ID: 701037102H1
ggattttctaaggcctttgcaatgactggttggcggcttggatatattgctggtccaaaacattttgttgcagcatgtggaaagatccaaagtcagtttacttcaggggccagtagtatagctcagaaagctgcagttgctgcattaggactaggccatgctggtggggaggcagtttctaccatggtgaaagcatttagggagcgaagggatttcttagtacaaagttttagagaaatagatggcatcaagatatctgaaccccagggagcattttatctatt

SEQ ID NO: 40839 - DNA, 272 bp, Glycine max
  Clone ID: 701039262H1
cactgtttccttcatcttcttcttcttcttctatctctctacaacacacttttttaagtgattcgttcgcagaaacatggcttcttcgtttctatccgcagcttcgcacgctgtctcaccctcttgttctctgtccaccacgacaagggaaagcccatgcttggaggcaacactttgagatttcacaaaggacccaattccttctctagttcaaggtctagaggtcggatctctatggctgttgcagttaatgtatctcggtttgaaggcat

SEQ ID NO: 40840 - DNA, 189 bp, Glycine max
  Clone ID: 701038869H1
ggacacatttcatgtcatagcagaactaccaccagacaactttggagcctatatcatatcaatggcaactgcaccatctgatgtgcttgcagttgagcttctacaacgtgaatgccacatcaagcatcccttaagagttgtgccattgtttgagaagctagctgatctagaggctgctcctgctgcttt

SEQ ID NO: 40841 - DNA, 257 bp, Glycine max
  Clone ID: 701042717H1
gaccagcaaagagaaagcctagtggaggcattgaaacactgcgtgcaataccttggatttttgcatggactcagacaaggtttcatcttccagtgtggctaggctttggagcagcatttaaagaagtcattgagaaaaatgttaacaatctcaatatgctgcaagagatgtacaatcaatggcctctctttagggtcacacttgatttggtggaaatggtgtttgccaaaggagatccgaaaattgctggtctgaat

SEQ ID NO: 40842 - DNA, 266 bp, Glycine max
  Clone ID: 701040960H1
aagaaattagagatgttttggacacatttcatgtcatagcagaactaccaccagacaactttggagcctatatcatatcaatggcaactgcaccatctgatgtgcttgcagttgagcttctacaacgtgaatgccacatcaagcatcccttaagagttgtgccattgtttgagaagctagctgatctagaggctgctcctgctgctttggcacggttgttctcgatagactggtatagaaataggatcaatgggaagcaagaagtg

SEQ ID NO: 40843 - DNA, 277 bp, Glycine max
  Clone ID: 701038039H1
ctttttgatccatttttcattcgttgtgatcttcctcttcctcgtacacaggtgagcgactgaaaggtagcaatggcgaccaggaacttggaaaagatggcatccattgatgcacagcttaggcaattggctcctgccaaagtgagtgaggatgacaaactgattgagtatgatgctcttctgctggatcggttccttgatatccttcaagatttacatggggaggatctgaaggcaacagttcaagaagtgtatgaactttcagctgagtatgaag

SEQ ID NO: 40844 - DNA, 265 bp, Glycine max
  Clone ID: 701041573H1
ctccagacacaatccatggatcacttcgtgtgacagtccaaggtgaagtcattgagcaatcatttggagaacaacacttgtgttttagaacactacaacgtttcactgctgccactctagaacatggcatgcaccccccgatttctccaaaaccagaatggcgtgctttgatggatcagatggctgtcattgctactgaggaataccgttccattgtattcaaggaaccacgctttgttgagtatttccgcctggctacaccgga

SEQ ID NO: 40845 - DNA, 237 bp, Glycine max
  Clone ID: 701043122H1
cttttgatttattttatttgttcatgtggggttattggttatttttctatgatcggttgatcacaggtgcgggactgaaaggtagcaatggcgaccaggaacttggaaaagatggcatccattgatgcacagcttaggcaattggctcctgccaaagtgagtgaggatgacaaactgattgagtatgatgctcttctgctggatcggttccttgatatccttcaagatttacatggg

SEQ ID NO: 40846 - DNA, 241 bp, Glycine max
  Clone ID: 701043454H1
ctggttttggggtactttgaaaagttgcaatggcgaacaggaacttggaaaagatggcatcgattgatgctcagcttcggctgttggttccggccaaagtgagtgaggatgacaaactggttgagtatgtgctttgcttttggatcggttccttgatattcttcaggatttacatggggaggatctgaaagaaacggttcaagaggtgtatgagctttctgctgagtatgaaggtaagcat

SEQ ID NO: 40847 - DNA, 259 bp, Glycine max
  Clone ID: 701040171H1
ggttatgtaaacttgaattgaagtgaagaaggagatggctgcaacctcttccttgtgctcatcgaccctccaatcccagatcaatggattcttccttcacaaaacctctctttcccatactccttccctcactttctccaggaggaaaatttcaaccacagtgaaggctacatctcgagtcgacaagttttcaaaaagcgatatcattgtctctccgtccattctttctgcaaacttttcaaaattgggagagcaggtg

SEQ ID NO: 40848 - DNA, 250 bp, Glycine max
  Clone ID: 701043561H1
ggaaaattgactggtatggcataccgtgttcccaccgtggatgtactctgtagtagacctcacggcgaggctggagaaggaagcctcatatgatgggattaaaaatgctatcaaggaggcatcagacggcaagttgaacggaattcttggttacactgaagatgatgtggtctccaccgacttagttggtgataacagatcaagtatttttgatgcaaaggctggaatcgcattgaataagaattttgtg

SEQ ID NO: 40849 - DNA, 249 bp, Glycine max
  Clone ID: 701043647H1
aacaacttctgctacttcctactccaaccgcacttctgttccgcaattatcatgggcaaggtcaagatcggaatcaacggatttggaagaattggccgtttggtagccagagtggctctgcagagagacgatgttgaactcgttgccgttaacgaccctttcatcaccaccgattacatgacatacatgtttaaatacgacagtgttcatggacactggaagcatcacgatgtccccgttaaggacgag

SEQ ID NO: 40850 - DNA, 229 bp, Glycine max
  Clone ID: 701043292H1
ccactttcttttttcccgcagtcatgggcaaggtcaagatcggaatcaacggatttggaagaattggccgtttggtggccagggtggctctgcagagagacgatgttgaactcgttgccgttaacgatcctttcattaccaccgattacatgacatacatgtttaaatacgacagtgttcacgggcactggaagcatcacgatgtcaccgttaaggatgagaagaccct

SEQ ID NO: 40851 - DNA, 269 bp, Glycine max
  Clone ID: 701041622H1
cttggttacactgaagatgatgtggtctccactgactttatcggcgatagcagatcaagtatttttgatgcaaaggctggaattgcattgaataagaactttgtgaagcttgtttcttggtacgacaacgagtggggatacagctcacgtgtcattgatcttcctgtattcgttgccaagaagtctctttaaggtgttacttcaaagtatcttgtcttcacattattaccgtatgtttatgtttagctgcgatttagtgtcttgctcga

SEQ ID NO: 40852 - DNA, 275 bp, Glycine max
  Clone ID: 701037342H1
ctttcttttttcccgcagtcatgggcaaggtcaagatcggaatacacggatttggaagaattggccgtttggtggccagggtggctctgcagagagacgatgttgaactcgttgccgttaacgatcctttcattaccaccgattacatgacatacatgtttaaatacgacagtgttcacgggcactggaagcatcacgatgtcaccgttaaggatgagaagacccttctcttcggtgacaagccagtcactgtttttggacacagaaccctgaag

SEQ ID NO: 40853 - DNA, 278 bp, Glycine max
  Clone ID: 701037105H1
gtccaccggagttttcaccgataaggacaaggccgccgcacatttgaagggtggtgcgaagaaggttattatttctgcccccagtaaggatgcccccatgtttgttgttggtgttaacgagcacgagtacaagccagagcttgatattatttccaatgctagctgcacaaccaactgccttgctccacttgctaaggttattaatgacaggtttggcattgttgagggtttgatgaccatgttcattccatcactgccacccagaagactgttgatgg

SEQ ID NO: 40854 - DNA, 239 bp, Glycine max
  Clone ID: 701043160H1
ctctctaataacatttctaatctcattctccttctgttcaaacactctctctcatggcatcagataagaagattaggatcggcatcaacgggtttggaaggattggccgtttggtggccagggttgcccttcaaaggaatgatgttgaacttgttgctgtcaacgatcctttcatcaccactgattacatgacatacatgttcaagtacgacaccgttcatggccagtggaagcatttt

SEQ ID NO: 40855 - DNA, 234 bp, Glycine max
  Clone ID: 701039360H1
gtcggtggatcgaaggtgtcttccaagattggagttattgaatccttgttggagaaagttaatgttctcttgcttggtggaggaatgatctttaccttttacaaggctcagggttattcagttgggtctctcttgtggaggaagacaagcttagccttgcaactacacttcttgaaatggccaaggctaaaggggtttctttgttgcttccaactgatgttgtcatagcagaca

SEQ ID NO: 40856 - DNA, 189 bp, Glycine max
  Clone ID: 701043044H1
tcgaatcgagcgaatcggctcgagcccgtttgcgttgttgtttgcgcataaatggcgactaacaggagcgtgggaacgttgacaggagggtgatttgaaggggaagagggtattcgtgagggtcgatctgaacgtgcctttggatgacaaccttaacatcaccgatgacactagagtccgtgctgctgt

SEQ ID NO: 40857 - DNA, 271 bp, Glycine max
  Clone ID: 701040938H1
acacactacaccgatatttccaccaaacccgtttgcgttgttgtttgcgaataaatggcgactaagaggagcgtgggaacgttgaaggagggtgatttgaaggggaagagggtattcgtgagggtcgatctgaacgtgcctttggatgacaaccttaacatcaccgatgacactagagtccgtgctgctgttcccaccatcaagtacttgactggttatggtgctaaagtgatcctttctagccatttgggacgtccaaaaggtgtaacac

SEQ ID NO: 40858 - DNA, 281 bp, Glycine max
  Clone ID: 701041022H1
cttgctggttgccacactacaccgatatttccaccaaacccgttagcgttgttgtttgcgaataaatggcgactaagaggagcgtgggaacgttgaaggagggtgatttgaaggggaagagggtattcgtgagggtcgatctgaacgtgcctttggatgacaaccttaacatcaccgatgacactagagtccgtgctgctgttcccaccatcaagtacttgactggttatggtgctaaagtgatcctttctagccatttgggacgtccaaaaggtgtaaca

SEQ ID NO: 40859 - DNA, 259 bp, Glycine max
  Clone ID: 700966925H1
cttgctggttgccacactacaccgatatttccaccaaacccgtttgcgttgttgtttgcgaataaatggcgactaagaggagcgtgggaacgttgaaggagggtgatttgaaggggaagagggtattcgtgagggtcgatctgaacgtgcctttggatgacaaccttaacatcaccgatgacactagagtccgtgctgctgttcccaccatcaagtacttgactggttatggtgctaaagtgatcctttctagccattt

SEQ ID NO: 40860 - DNA, 264 bp, Glycine max
  Clone ID: 701038580H1
cacactacaccgatatttccaccaaacccgtttgcgttgttgtttgcgaataaatggcgactaagaggagcgtgggaacgttgaaggagggtgatttgaaggggaagagggtattcgtgagggtcgatctgaacgtgcctttggatgacaaccttaacatcaccgatgacactagagtccgtgctgctgttcccaccatcaagtacttgactggttatggtgctaaagtgatcctttctagccatttgggacgtccaaaggtgt

SEQ ID NO: 40861 - DNA, 269 bp, Glycine max
  Clone ID: 701037523H1
cgagattcccccaaaacccgtttgcgttgttgtttgcgaagaaatggcgactaagaggagcgtgggaacgttgaaggagggtgatttgaaagggaagagggtgttcgtgagggtcgatctgaacgtgcctttggatgacaaccttaacatcaccgatgacactagagtccgtgctgctgttcccaccatcaagtacttaactggtcatggagccaaagtgatcctttctagccacttgggacgtcctaaaggtgtaacacctaaataca

SEQ ID NO: 40862 - DNA, 254 bp, Glycine max
  Clone ID: 700967038H1
tctcgagccgaatcggctcgaggttgaaagaaacatccccgaagatgatccaagaaatccaactgtgattgctgataatgatggtgataatgttggggatatcgctggtatgggatctgatctttttggttcatatgccgagtcatcctgtgctgctcttgttgttgcttccatctcttcttttggggtgaatcatgagttgactgctatgttataccctctcattatcagttctgtgggtatccttgtatgtt

SEQ ID NO: 40863 - DNA, 284 bp, Glycine max
  Clone ID: 701036988H1
aaacacaccaattgcatttgcattaccattcacaatggcaatctcctccacttccaactccctcattcccaccaaatctctaatcccccaatcccaccccctcattcccaacaccaggcccgccctccggcccaagcccggcccatccccttccatcttcgccgttcacgccgccgagcccgccaaaaaccccgtcgtcaccgacaagcccaagccccaagcccaacaacctcccccggcctcggcccgggcaacgaaatgggccgtggacagctggaagtcaa

SEQ ID NO: 40864 - DNA, 278 bp, Glycine max
  Clone ID: 701040351H1
gttgagaagagagaatggctgtggcgtcgtcatcatcccttatcacgttgaaggtgaaaccttgcattttcgggtctcctcggagatccgcggtggttcggaattgtgcgaagtcaacggcggggacaatatcgacgagttggagcctggacagctggagggcgaagaaggcgcttcagcttccggagtacccagatgcgaatgaattggacctagtcctccaaaccctctcttcttttcccccaatcgtcttcgccggcgaggcgaggaatctggag

SEQ ID NO: 40865 - DNA, 270 bp, Glycine max
  Clone ID: 701037327H1
catttctctcatcaaagtttcaacctttgataagattgaatcatggggaacgccctgagattcctctacagccattgctgcaagcccacagcagctggtgattctgaatcacttggcccacacggtgtttcctctgccaccgttggtgtttcaacacttgcccatgatctctttcactttgacatcacctcccaggtcccggaaggactcagcaagcatgttgtgtcttctaagaaggctcaggctaattggtatagagagttagtagtg

SEQ ID NO: 40866 - DNA, 254 bp, Glycine max
  Clone ID: 701042739H1
aatgtttttaggtcccggaaggactcagcaagcatgttgtgtcttctaagaaggctcaggctaattggtatagaaagttagtagatgcttggaaagaggcaaaacctcctcctaagacacctgaagaagcagctagacttgtcattcagaccttgagaagacatcaaaaagcagatgttgagggattgttggctttctatggtcttcctctaccacacacactggttcaaggaactacccaacccctttcatcc

SEQ ID NO: 40867 - DNA, 432 bp, Glycine max
  Clone ID: jC-gmro02910001a02d1
attaataataaaaggatggaaatggaaatatttatgtattttgggaaattacagaaacaaccatgagatactctgttaagttctcagttgcaaaaaaaagcaagaaaaagcgcgtttgcttttcggttataacgtgtatttacataacgtgccgattatatcttcatcacaaaatggtcaacaacaattccgagcatcatgtcatccactactcacacttagctgctgctccctctccgtaacactataatttctcgagggcaatttcgtcacaaaaaaatgcgtagtagtgttcccagatgcttaaaaaagtagtacgaaaaaaattgcggaaaaccagatctccctgcatgaatcaggcaacctccgggagaggaggcacgttcaggtcaagatcaaagagcacgcggcggttgtaatcggaatctgagt

SEQ ID NO: 40868 - DNA, 567 bp, Glycine max
  unsure (1)..(567): unsure at all n locations
  Clone ID: jC-gmro02910001a03d1
aataaatcagttggctaacttgttaactgattcacgaaagccgttctagtcatgttatgtagtcatcatcacatcacaattcacatgagtacaataatttgttcagccatcttaaacatgatcagtatcttccaaaaacaagtgaaacatctctattggcatgggcacaacatccagaccaggcaagcatcattgttttcctgattcccaaacaattcttaagatcaatctattcagcacccaccatacaaggtacaagtacatacaatcaccatgtgacagaatatatatacctctcaattaccaaacatgtaccagacaatgtagactgcagcagagcctaaaatatgttaaatgatggtttgttggtagaatcaactgagaaagaaacatagcaacattgtatgttaaaaatgctctaaaatcctattacatcagagatgcactacggttacaatttagtcatacaaaagctgagtaacaacaattgcctactcccatgatactgataatgaaaataggaaaagaaaagaaaaacanagggaaatataccatcaacatcattgt

SEQ ID NO: 40869 - DNA, 533 bp, Glycine max
  unsure (1)..(533): unsure at all n locations
  Clone ID: jC-gmro02910001a04d1
gatgcaaaaactgattccaaatacttcaatgagacttgagtccgtaatttaaaatcatgtttctaacgcagattcaaacatcttggtgaatgcaaaaaccatgtttgacccatcctaaactcaagtcatgccttcgaaactgctcataattatctgttgcatataaaaaagtattacagtctaaattaaaaattttaaccaaccaaatatctaggaagtccaacatcaagaagggctacattattgatatttaaatagcatcctgatattagcctttgtcagccttgctaccctcaattcatgatgacttggtagattccctaaccaaagggttggttgggtgcgtcaggttgagatttttgaatcttttggaggtgtgttagcatacttccatgaaaagtgatccaatccattgtagtatctaccacctgctacatcaccaatgggaaccgcctcagaaatttctctcaggtctttttctgacagtttcactgctaaggcacctatgtnttgatccaggttcttaatcttag

SEQ ID NO: 40870 - DNA, 424 bp, Glycine max
  Clone ID: jC-gmro02910001a07d1
atgttatctcaacaaacaagaaaatcggggcaaacttgattaagataccatatatatagtactagatataaatacacatatttcccagaagatcgacaacctaataatagatacatcatacatgcatcaaactagttgaagaagcagtggcttcaatttcatacttaattcccacccaaattaaagcacttaatcttccatgattgccaaattaattaagtagcccatggtgtccttcaaaaaccttgtcatagtaatttttcttttcttatttttgaaagaagaagaaaaaaaaaaaaaggactaaaagctttcacagcctatctcatcctccaagagcaactggttacagttagccgggggatgaagatactcctcacaaacataattacaagccaatttccgagcattgttggcgagccta

SEQ ID NO: 40871 - DNA, 455 bp, Glycine max
  Clone ID: jC-gmro02910001a09d1
gcaatataagaacattattcatcacatggaatacagatcacatgtaaattaaaaaaacacacatcacattatcaacatctaaaaacaaggaaacagactttaaaatataactgcaaacatagtagaagccctcaattacacagtagtcatgaggataaatctctgatccactactgaaattgtaatgcgaacgccaaggtattttgacacttgacaggcatattatgaccggaattgatatggcatcagacatatttttccgtaatgatccataatggaaagattttgactcatgacgatcctgattgcaaccacagtttaaaaacatgatagtagctaacagaagatggcatagctccatatgtgctataatgaggagacatacaaatcctcgtagaacaactttgtgaaaagctgcataagtgcttcctggaaaaatatgttaacaataacac

SEQ ID NO: 40872 - DNA, 433 bp, Glycine max
  Clone ID: jC-gmro02910001b01d1
gaaccaaaaacaaaaatgtagtagcattttactgagttggacaagaaaattgaaatggattgagaatacaacagaaaaggcctacttagcctgaattacagaaaatatacaacaatcattataaaaaaccctaaggcaatccctcaaccccgaagaaggtagtaacttccctcctcctttttctattctttaagactacatccatctgcaataataaagcttgccccacaatattatgttagaaacctaaatatctagtagaggcaatggagatgaaaagataaatgattcaaagagaaaaaaaaagtagttcaggttttatcagtaaattagcaagcaaagagaccattacaatgacaatgaaggtgacattatctgcataaaattatccttcccaaattcagaattccttgtccttaataagccgagcaag

SEQ ID NO: 40873 - DNA, 462 bp, Glycine max
  Clone ID: jC-gmro02910001b02d1
caagtacattacaaatacttaattaaaaaaatcaattatttttttagtttactactgcatataatacatgaaaaaagtatatataattatgactttccagaaaaaaaaaagatagttaaaaataaaataaatactgaagtaaaaaatgtaaatagtaaaattattttacccacaatacatgaaaattaaactcctgaatatatacattgcacaaactacacagatgttcatttatgttaacaagatagaatagaaatagacttgaagcagacaagattcatggcttccacaacttcattgtgcagtcttcactaaaagttgcaacaagattcctatggggatgatgagtgacacctataacttccttctcgtggaccttcattagatgctccaatttgccagatagatagctgaagcagtatatattcctatcttcaccaacacagtaaatccattctcctt

SEQ ID NO: 40874 - DNA, 532 bp, Glycine max
  Clone ID: jC-gmro02910001b04d1
gcagttaaacaaatacaaacagaaatacaaataacaagcagtcagtacattttttttttgacaatgcatataaatatatttatgttagtaataaaagtctatatttagtccagagtgttgtagaaacaaactattgactataaacatgattctaaatttcggcagcaaaggatttaccacatccacaagtctgtgtcgcgttaggattcttgaaagagaagcctcccgcaatcagagcatcactgtaatctaattgcatgccaaatatgaagagtaggctcttaggatcacaaacaatttcaaaaccttcatactcaatgattgaatcatctggccttttattaaccctgtcttcaaaatccattgtgtatgacataccagagcacccaccctgtttgacacctattcttaaacataaatcttgatttcgttcagacctcatcttattcaagtgcttcagcgcattatccgtaacagaaattgcaggggccagagaccctgatgctggtgcagcaggaatagaaactgatcg

SEQ ID NO: 40875 - DNA, 541 bp, Glycine max
  Clone ID: jC-gmro02910001b06d1
gatggaaaattgaatggctttcttttacaaaatgggttgcttggatgctttcattacaaaattgatgacgatagaaacaatgaagagacagaataataatacaagatgtttaggaatttcagcatttcttcttccaccttggctgcacataaataagagctcagaagcatcaggttgaacaactactccaacgaagtcacctaaaataccaataacttcttagtaaaccactggcaacatgatagcctctcaaatcattcctatcaggcggcgtgccaaatcagtatgcaatgcatggccacccttgtacgcaacgatatgagccactgggagtccttgattcccaaactgggcaaacagtgacagatcaccaataaggtctaagatcttgtgacgacatggttcatcactgaaatgcaaaggtggattcaaccaacctttactggcactgcacacaatggcattttctagagaacctcctttgataagtccagcattgcgcatttgctcaacctcttcataaatgcagaaggttcttgac

SEQ ID NO: 40876 - DNA, 476 bp, Glycine max
  unsure (1)..(476): unsure at all n locations
  Clone ID: jC-gmro02910001b08d1
gaccaataataatagtccctaacttcagataagagtgatgacgatttctttccccataatcaggtttatacatagttactaatcattctgtaccacagttttattaaacttcccaaagtaaaatcaaaatgggcaccagtgatgaattacatatataatcatttacaacattgatcagacaaaatctaaagcttgatccatccactttcagtatacaccgcaaatgaggttatttccagctccaacactaactatttggagaccaataaatatccgccacaacctgcaaatgaaaaattccttgtgacaaaaaggttttagttggatcctcctcttatccagcgaccagatcctggttttcccaaactagaatagtaatcacccacatttgccacaaatagtggatctctatcttctactttgcactctntactgccaccatctgtcataatatctagctctgtcttctccaactc

SEQ ID NO: 40877 - DNA, 361 bp, Glycine max
  Clone ID: jC-gmro02910001b12a1
caacccaaaccccgaaaattccaaaatacttttaaaaaaaggggaccagaccccactttagtctgaacaacaaaaaggctcctacacaacaatttttttgtacaaaaggcaaaatgttaaaaatttcaaacaaattttttttgtttaaaaaaataaaaacctatttatatggataaaaataaccgtggcaaaacaaggacctaaaaattcaatgttgttgacacaactgtgacagggcttacacttgcacctgagggagtggctcgtccttatgcgaatccaataggggaaaggccctttctaccttaatttattgaacgagattttattgatcactaaaggaatgagcgaacgaattttc

SEQ ID NO: 40878 - DNA, 511 bp, Glycine max
  Clone ID: jC-gmro02910001c04d1
ctcttctgtgaattaaggtctaatgccttgattacacaagtgtgctaacctaaaatcttacgcaccttttggttatgggcatatttatttgcaactattgaggttgagcattactttacgtggacacactattaggaatccctctacatgtaacgccgggtcgagaggtaggtgcaagtaactcgtaaggtaaaacccctgcgccacaacggttcctgagtgatggatcgaggttccttctctcaatctccttctctatccgtctgatctctgcggagaagctacagaatgcctcagtgatgtctgcgtcacctgaccaaatggatgagtgtcggcgctctcccaaatactcctcgtcagatgagtgggtagagagtatgtcaactatagacatatattttgtagcctgtaacacgctgggcaacgcatttaggaaatacttttggggatctgctaagaaattggcatattctgcctcatcctctggaaatgggattaatcttctcattaa

SEQ ID NO: 40879 - DNA, 508 bp, Glycine max
  unsure (1)..(508): unsure at all n locations
  Clone ID: jC-gmro02910001c06d1
aacgtgaagatcatcatcacaaataagataaaatcaactcagcccgtcattaacaaggccatggaacaatttcagtgttatacatatgcacattattttctcgaattaagattatcatcacaaattaatgtcccccacaacttattcatgccagattttagaacagcaattcatatcacagctttgaaggcgactgataccagccccacggttcatcagatatgtacttggtcacttgcttcacacttaaatagttctcgagtccccattctcctagttcacgaccaaaaccactacgtttaacgcctccccatggagcttgaatgaagcttggttgagcacaatttatccatacaattccagcctgaatagcctttgatatgcgctcgcatctttctagatcttttgacattacagcagaccctaagccgtagtgtgtgtcatttgctagttcaatagcttcttcttcggtactgaatgttntcacacatagcacaggtccaaaaac

SEQ ID NO: 40880 - DNA, 367 bp, Glycine max
  Clone ID: jC-gmro02910001c07d1
ggggcataacgccacttttttttaattattccaaaatgccctttcgtacaaataaattttgtacaccggccaaaatgagctgtacagttagctgatcaaaccaaacagtaatttttttcaattgaagcactttactggtttggaaaagatttttaacactcttaggggggttcattcacttccatgaattctttcgtgggagggaaggagtcaacattgggagaggggaattgctagaatctacttttcaaaacagcaacagttggtgcaacataacaagcttcaactcctcaatggttatgattgccattaaaatgcccgggagaatcatcaacttctgtgttgaaaatgaaactgctaaacaggg

SEQ ID NO: 40881 - DNA, 519 bp, Glycine max
  Clone ID: jC-gmro02910001c08d1
gaatataaagatttttatgtacacatatatgtgaggtactaggggatttgcacatgtaaagaaaaggaattccaacttcatagggagatgatcaacatacacttacaaatatctagacaaccagaataaagtttttgattgcttcctttttaataggggaaaaaaggaaagaatattgttgcaaattttgttctccaagtgcctggtctatatcttagccaacgctccttactaacgttcgtccacaggttcggaggcatgaaatgttaaaacacttgagtaaattatgattgctacgaaatttgcatagctctgacacgatcagtcagatccctaacttggctccttaatcgctcaggattgcagaagaaatcaacaaaaactcgcctttgaagtccaatttcttgtttatgatgtttcacaatctcattcttctttacatgctctagtgtcacctcttcaacagcaacagacagctttgcgttaatcttttccatttcatcaagctctttcattaat

SEQ ID NO: 40882 - DNA, 487 bp, Glycine max
  Clone ID: jC-gmro02910001c09d1
cggaggttaaaagtggtttttaagggggaatttattgaagtgtgaacccaggatcaaaattataaattacccactgttgtacaaattgaagttaatagtgatacatgtgtgcctcgcatttgtctctatcgccccactccccgtttgttttttattgaccacagggtgagaagtaactaggaattttttacctcagtcactatgtcatcatctgactgaatcatatgttctataaataaaattatatgacttaactcctcatagttcgtgcttcacatgactgctctggctttctttggcatgacagctccccttggaatcggattcacaagtagaggttggtttatggagcttgaatgggatcgatgcatgttttttgaggaacttgtataaggctaccactgtacgatctggatcaacagtgatagggtcaaaactattgtttactgccgggaagaagagaatagtggggaatccatcaggctta

SEQ ID NO: 40883 - DNA, 464 bp, Glycine max
  Clone ID: jC-gmro02910001c10d1
agtatgaaggaaatactctgataaaacttgtttgtaagaatatataaatgaagaaaaacaaaaataaaatgaattaaacttttgtaagataaaattaacttatacatcttattttttgaaaaacttaataacagaacttgtataataacatttgccatagtagcattagtgtgtgaagctgggggagaacctctttatgatcaatcaatcatgatagatagagacataaacatcatcttgagctatataccatcaatctgcatttgcaatgtgtggcgctgctctaattaattttcccgaatatgagagaccattgttgttgatagctggttggtgccccacgaacaaagccacatgacccataagcttgtcttttctagaaaacgaggtgccacacgagcacagccacttgagatccccacagtgcttctcatgtgtcctcagatcagagagcaccgagaact

SEQ ID NO: 40884 - DNA, 453 bp, Glycine max
  Clone ID: jC-gmro02910001c11d1
gaaagcagtaccacacaggggttccgtgatatataatgaaagtaaaggaaaattacaagagttgcatcatgcatgtgacttttttattttatttcatttcattaaactgctatgggaccccgtattctttttttctctctctctctctctcatcttcaatttacactttacacataaatttatgagcgcaaaaacatgtccacccactatagctatgcttttgctttgctggcccatgtgaactggggtttcttaggagaaattaacgatctctgatcccagttcatggcggccggaatgtgacccacagctccaatgatctgcttttaacctggcccatgatcagaaagtgtgtcatataggaaccttgggctattgcttatgcttctgcttttgcaccaccatgcttttagaggggtgattcattattaacaaaatggattttatagggcc

SEQ ID NO: 40885 - DNA, 359 bp, Glycine max
  Clone ID: jC-gmro02910001c12a1
aaagcaggcatgttttacaaaggacacccatcaaaacccaaaaaactacacaaatgagctatatacaagcattcagttgacatgcatatatatagtagtgcaatataacgaacaaacatcatatccatgcattctatcacaaacaaggaacactaagaagcatatatatcattattacacatccggcattccaaagtttactaaatgatgcttttatttagataataaggattaaaactctagccaaacccacttcatcaccaatcacacactctttttttttcttgctatgccttgacaagatgatcatcaatatctttagtgaccttagcagcaaagtccaaaaaagaatcaggaga

SEQ ID NO: 40886 - DNA, 514 bp, Glycine max
  Clone ID: jC-gmro02910001c12d1
aatagacaaattactagttattacggtaaatggtcacatactacaaagggtaataatatcgcaatcgctgaacaatgttatttaacaaaaggatcgaccacaaataaaaacaacccaactccaatcatcatcaccacgtccagcaaaatacattcaaaagctatctaaaaatttgaggaacccacagtggcgcattagaaaccatgaccatagaatttatgagagaaatattatgggcaccgtgcctctccaacaatccccaaaacgttgcttaggcttcagcaaacccaagctcagaaagcttttggtgagcctcagcgtaatcagcgaagaaggcatcttcgtccgatgcatatttctcaacaagagggcggaacacagggtcagacaaaagtgccttgtcagaaggtagctgaaggaggccttctttctcaccactcaacaactccttgaagtatgagttgtcgaaaataagaggattagaggtccagggaccctcgaatccagaaacgct

SEQ ID NO: 40887 - DNA, 369 bp, Glycine max
  Clone ID: jC-gmro02910001d01d1
gtgtacaagtgcaataaaatttcaccaaaaaacacataaccaacccccataaacatcatgttttattttttctccccctcccccccatccccaaacatcctgatagcacacaaaaaaaaacaagccccctcccccccttcctccccttttcaaaaatttatttaaaacaaaaaaaacaaaaaaaaattcctcttctttttttaacaaaaactaagcctatcaaccccaatgttacttttcaattttccactcctccttccaactccccaatatattttcaactacccctcgttaacctacacacacctccccctttgcaatgtttttttatcaaaaatccaaccatcactctgactctaacttttcttt

SEQ ID NO: 40888 - DNA, 435 bp, Glycine max
  Clone ID: jC-gmro02910001d02d1
ataccctgcaagaacttatataccataattcaaacataagttgcacacaatgtgcaaaaaaataatggaccaagcaatctgaagtctgaacaaagttcagagtcaacatcaacatctagatataaaagtagtggcatgaaattaaaggcactctgttttatattcagcatagactatattgcggcttagaaagagatgagatcatctttcgatgacggctgcttctttgtctcgtgtcccccatctgatgcttccccacctttcttcccaaaaatcatctcatcgagatcatccatcatgtcatcattgctccctccctcgacaccagtccttgatccagctggctttcgaatcaaagcatcttctttactatgatagggtgactcgtctggttcaacagcaacaggtatcatagctggttcaggatgaagtgga

SEQ ID NO: 40889 - DNA, 357 bp, Glycine max
  Clone ID: jC-gmro02910001d05d1
agcgataacacactatatcataagcaaaccgggggcattttgagacgctattgccattgcacaggcaaatattcctcatactcgtgtaacatgtcaatcttagagttcagaaccacatatatctggagaccactagcgataattcctgattgagctatcctgatacaaattattttttaggtgagacttcactaaatggaacaactgatattagtgaatgtgaccatgaccgtgatagatctgtgatatggactaggtttaacttgacattggttgctattagcataaatgacagtcacctggctgacttatgttgaggatgaatctaaggccgtcgtatcttgtgtcggacttgtg

SEQ ID NO: 40890 - DNA, 504 bp, Glycine max
  Clone ID: jC-gmro02910001d06d1
gcaataacaatacaaactatttcatcatttcaggcctcctaattaagcagctacgctgtttacttatggacagctacaaactaatttaactaccacaccagtacctcaaataaacacaaccaaaagtaactcagcataagagctcatacaatcataaatgagtgcaagaaacctcaaacaatctttggcatttttcaatgcaaaacactaaactacagctgacttaaaggcattaagtaaatttgtaataatcataaggggcatgctactttccgacctaattgaattgcatggtcatcatgagtctgtttgttgatgttggggtggctgctgttgctggggttgtgtatggggccatggcatgaacgccatgggaggtcgaggctgctgtgtataatacagcgttgcttgctcagcaccaacgggcttgcccatgatcatcccaggaggtcctacaacaggatgctgtggagggacatagtaatatggcatatcagctggaga

SEQ ID NO: 40891 - DNA, 531 bp, Glycine max
  Clone ID: jC-gmro02910001d07d1
aaatgaaaaataagtctcggttactttgtgttatgatgaacgatagctcttctcaaaatctcaaacatacttgaatcactacagctggtagctttaagatcttaacaggtaaaaggcggaatcaatctgcttgaggagcagtgcatttgtcaacatctctatgaagcatattgctcagagttcaccatcccaaagctcttcaacggtcttaaaggcaccataggtctcgtcaacaaaaaaagtgcccttaattagtctatcctgcttaatttcagagaacttatccatcacttcttctggaatagaccagtcaaacacatcaaagtttcccttgattctggactcattagtgctcttaggcagcacactatgacctgtttgcagtccccacctaagggcaacttgtgccggtgtcttccccaatttctctgcaatctctatcacaacaggattcttaagaatgtcacttttgagaactcctggtgagcccagtggagaatatccagacagatgaactcctttagattcaca

SEQ ID NO: 40892 - DNA, 424 bp, Glycine max
  Clone ID: jC-gmro02910001d08d1
ggaaaatattgtaaatacattaattatgaaggaaaatgtgtacacaagaaaacccaatgactcagaaatatgtataaatatatgaagtttcaaattacaaaacatgctcaaattacaagagatggattgcacatattaacctcaaaagtttgtataaaagtgtgtgtgctggaactcaaacattgactgtagttcctgtacaaaaaaaaaatactataaaaaatactcactgttcaacatgaaatcctcacgataaaccaaaaaactttccacgtggggtagatcggctccttctaaattcaagcgtggatgcattggttccttctttaagattgctacccgaaccattcacgactttgttttcaactttgctaaccaataaaggctctcctgtttgcactattcctattgattcaaggttctg

SEQ ID NO: 40893 - DNA, 453 bp, Glycine max
  Clone ID: jC-gmro02910001d09d1
gatgggtaggaatttttttattttctttgatatattgaaaaggcagaaagaaacacaaattttagtgtttaataaagcaaaatgcacacatcccccaaacaaaacaagccttattcaacccacattggtttcatatcacagaaaccaacaggatgccgccttccttcttactggtcccacccactcgaacaaaagttctacagaaataaaaatggctacaattcttctaccacaaatctgaaaagtctaacaccaaaaatcaaaataaggaaaattaaacaatcaaatccgattgataaaaccgatttttgtctttccctcactcacttttcaggtgatcatctcaatcacttactacctgtagtgagcaggcttgtatggaccctcaacaggcacactgatgtaatcagcctgtgacttgctaagctgggtcagcttagctacaagtttgcc

SEQ ID NO: 40894 - DNA, 520 bp, Glycine max
  Clone ID: jC-gmro02910001d10d1
catattaaagggcatatgtattgagaaaacctccaaaatggcaaattgaacatacacagctcagaacagttcctctctaattacttgtcactcccatattataattcctaaagcagtaactagtaatttgacaatgctacaaagatgaaattatagggttgaaaatgaagatctcgtcattagggtgatgccgggagtggttcagtaccagaaacatgggaagcagcatcttcttttgatatggccacataattcaccggagcagatagtcggttatccctttttccatcttttgatgtggacctgtttccatttttatgagcattaagcgatagccgtcggttaggagtaccattggctcctccgttagcacgaggacctcctgacttactggaactaactggcctagcagggctgggtcttgaaccaaagatggtttattgttccgcgtttcgctgctcgtgatgctttttctgatccctcatgctacgttgttgctcttcccgttcatgtgtgagca

SEQ ID NO: 40895 - DNA, 477 bp, Glycine max
  Clone ID: jC-gmro02910001d11d1
ccataattattattatttaaaaatccaaaatattcttataatcacataatattagttcacaaaataattaaagaaaattcaaatcaactctatgtaagtaaattacgaactccgaccatcattatttatcgaacaaggtgaagtccaataatgtccaattggggaggcaacaactcatttttctttcagggaattctcaacatctattacaaaccggtacttgacgtccctatttatgagcctctcaagagcttcattggcgtactcgattggaatcacctctatatttgggtgaatctcgtttgcagcacagaagccaatcatctcctgtatatcttttgtaccacctgtaacactgccggcaacagtctttgatcctatattaaggctggcagggataaatttgacttgactagggaaaccaactaggacaaaaacaccatatgtcttcagcagtgacatggtaggatcaaacga

SEQ ID NO: 40896 - DNA, 431 bp, Glycine max
  Clone ID: jC-gmro02910001d12a1
gccacataataataatatggttcattgactttagcaaacaaacaaaataaattagcaaaagataagagcggggcaatgcaacaaaaaaccgttacacgcaacgggaaattgcaattcgaaccccgaaggagaaaaacaataataatggtggtaaatattcttaagagcaaaaagagaaatgctgctgtggatgacataacagagagtcaatcggcgctggtcattttaagccgtctgattggagaggcaagcacgctggctgaagaagtacgagaagatgacggtgatggtgaggaaaccgactgtgatgatgaaagggtagaagttgacggtggtgataatgacacgtcagaggtgtcttgctcttccagctttcttttgttgtttatctgcagaacaccaccatcaccaccgttaacatagccatcact

SEQ ID NO: 40897 - DNA, 333 bp, Glycine max
  Clone ID: jC-gmro02910001e01d1
ctaattaataaactttattcacggggtattgtgggatttttaagccctgatacctacatatgataactttattcccccaggagctatatctcaagattgcaaaagcggttcttctaacaaaaaaccatgggccgtacacaacctaccgctggaggtattgcaccacaggactaaggacgatgaacaggacaaactacaagagccaggtcacacacaaaatccacttatgtaatgaactaattactgctaccgctaacatgagatactaagcctgaacgtgggacatgtgaacaggtttgtaaacgacatatggaggatgaggcccaccaatct

SEQ ID NO: 40898 - DNA, 476 bp, Glycine max
  Clone ID: jC-gmro02910001e02d1
cacacctaagccaaaatgcatttccactccaatggtaactgggtttcagtacatcagaaccaaaaaggaataaaaaaatgtttattctatgatatatgcacacccaaaaacaacaaagaggaatccaatttgccactggttaatctttttactcttttttttcttctttctctcttctatctatgtctctgttcattatatgtagtaggatggcgaattgccagtgtatacatacactcaggactactagtatcacactgcaaactctgtacaaaaaggcaaaccaagatcaaaagctggattggagaaaaacaaacccagaataatatcaaaacaaaccaaagaatgacacactaagcagtaagcacactattttttcggtgcaggtatcaagaaaggtaaccctttgaggaggagggccagaaaaggacactgttagatgtgttgatgatcctcagaatgtaccattacattct

SEQ ID NO: 40899 - DNA, 458 bp, Glycine max
  Clone ID: jC-gmro02910001e03d1
gaaagaaaatctcaaacatagaattaaaagttgggggatagctgaataacatatatagaacacaactacatgggatgaagttcataggaagcaaccaaggtcttagaaatctcaaaaatgagcctggcctcaaattcatcacgggaatagcccttagacacttgacgagcctttggaatccgtttcacttcaaagatgttatcactgttcatagcacctacgttccctgacagcttcaacataaagttcatataagcattcttgagctttgacaaaatcgtcaatggggatctcatcacccatctaagccttggaactgctctgatcctccaatacctacgtggccctctcaagcggatgatcgccatcttccttctaacgacggtggcgccgccgtggagacgccggtagcgccgccttctcaagtaacttttgatgccaccgtacattgacttggg

SEQ ID NO: 40900 - DNA, 338 bp, Glycine max
  Clone ID: jC-gmro02910001e05d1
acaaagtgtaagtgagaacacactttattatatgaaaaccgagggcatccttatacaatagtgcacaagttcaggcaataattacgcatagacatgcataaagtctatgttattcagaagtacaacatagataaggaaaccacaaactctttttaattagatagagatactgttgggaattcctttgaaagtcaacccttcctcacttgaacgatggagcaaagtgtatggcagctgaactggcccagtccggtttctcagacttggatcactgttccttgcattgatttttccttcaattccagtcagattgctttcaaaccttttgaaagcttcta

SEQ ID NO: 40901 - DNA, 404 bp, Glycine max
  Clone ID: jC-gmro02910001e07d1
gaagaaggcacggcttgaaattggattgatgggtaaaacaccccaattcgaagcttttccaatcaagattcaaatcatgcaaaagaaaaaaagtaaaaggctttttttttttggcctccttttttctctctctctggctctgatcgagcgcttaatcacaaaattaaaatcatcagggacatattatttatagaactcaagtaagacaaactccaaatgagaaacaaaaagccgggtcctccatttgtttatccaactcttcatcctcagtttactcaacagcaaggggcacagactggggcaatttggggtacttgagagcatagaacatctcgagatagcggcggctctcacggcggtcaaggttagacacatgcttccagaagccatagacacccgtggga

SEQ ID NO: 40902 - DNA, 519 bp, Glycine max
  Clone ID: jC-gmro02910001e08d1
aaaaaaaaatatatatatatatatatataatataagtataatataatatttcacagacatacaaaaaaatcctactacaatagcaatgaaacaagaattttctactaggggtccttagtccttacatgtcgacacaattcctaacatagctaatggatcttcattcttcacccagttgagatcatttttcttatttttaggtacctatgatctcattttttcctagtgatcaatggcagtcaaattcaacaatcccaagaacagataatagtcaccacacgtgcagaccaaagccggcatgagtagtagttaggtacagtagtatagtaggtacgcttgaatgtgatttttttgttgtttttttttttaacgaattttaaaaataaatgtgagacccgtatttccttcttggggtcccattgaccctaaaaaaatcaaaatgtctttggtaggtacgtgaacatttcttgccacggtgagagatggttgatttggtattgaacctgaggggcaaaagcg

SEQ ID NO: 40903 - DNA, 291 bp, Glycine max
  Clone ID: jC-gmro02910001e09d1
gtaaaaggggaaaattggccctatcaccctttcgggatttaaaaaacaacaggtttaaaccggtggtggtttctttctttctgcaaaaattgtgacacctgttcctcttacgtatgcacatgattttttttctttccgttgccttcccttgaaatttttcccaatggggggctgttacttttttttctcatcataaagaagactaacgagaaatttccaatccctctcccaatgatgatattgaaaacttacggggggaaacattctttctatccatggaacaatacctga

SEQ ID NO: 40904 - DNA, 541 bp, Glycine max
  Clone ID: jC-gmro02910001e10d1
aaaagctaacatttgctgattaaaaaaaataacaagttccttaaactaaacaaaccaaattgcctcaaaagtcaaagccacatagtttttttcctcaccaagtaatgggatcaacgaggattaacaagttcatcattcaacagaaacaaacatgacaggtaaacaggattgcaagggaaaataaaccactttgtgccctcatttaaggagagtcttcacaattgatttgacattgagcttcttgaggtcagtataagactgtccacagcccacaaacatgacaggagctccagatatgtaaaccattgaaagtgcagctcccaccttatcatctatggtgtcaaatttcgtgagcaagatcccatcaatcaatcttggattaggtgatgttgcaaggtcagctaatttctgattgaactttgaaagctgatcaacagcgtcattaccaaccagtgcttctccaacaaataagactagatctggattgttaaggtagatgagttttgacagtgctctcataagtggttcattatcctgcata

SEQ ID NO: 40905 - DNA, 512 bp, Glycine max
  Clone ID: jC-gmro02910001e11d1
gataacaatcagtagtaacattaatgggacaatagagttcaacacaaaccaaacttattttcaaaggtcattacagacccattacacatcacatttcttcttaaaatgtttgggaaaatccaacatcgaacatcacacagaaatcagctccagcttaaaaccccccacgaagacgcaacaccaagtgcagagttgactccttctggatgttgtagtcagcgagggtccttccatcctctagctgtttgccagcaaaaataagcctctgctggtccggtgggattccttccttgtcctggatcttcgccttcacattgtcaatggtgtcggagctctccacctcgagggtaatagtcttacccgtaagggtcttgacgaagatctgcataccaccacgaagacgcaacaccaagtggagagttgactccttctggatgttgtagtcagcaagggtacgtccgtcctcgagctgcttgccggcgaagatcagcctctgctggtctggggggata

SEQ ID NO: 40906 - DNA, 520 bp, Glycine max
  Clone ID: jC-gmro02910001e12d1
ccataattattattatttaaaaatccaaaatattcttataatcacataatattagttcacaaaataattaaagaaaattcaaatcaactctatgtaagtaaattacgaactccgaccatcattatttatcgaacaaggtgaagtccaataatgtccaatttgggaggcaacaactcatttttctttcagggaattctcaacatctattacaaaccggtacttgacgtccctatttatgagcctctcaagagcttcattggcatactcgattggaatcacctctatatttgggtgaatctcgtttgcagcacagaagccaatcatctcctgtatatcttttgtaccacctgtaacacttccggcaacagtctttgatcctatattaaggcttgcagggataaatttgacttgactagggaaaccaactaggacaaaaacaccatatgtcttcagcagtgacatgtaaggatcaaacgagtgatcaccagatgctgtgtcgattataaagtccaacgattta

SEQ ID NO: 40907 - DNA, 341 bp, Glycine max
  Clone ID: jC-gmro02910001f02d1
gggaggcaagcataaagcttgttttcatgaaagtggccccccccaaaaacaatcaaactccctggggggttgggaaactatttatccacttccttttttaaaaacattcacatgctcaaattaacccctgcctaaaagaaaaaatcccccggggggggacaacaaaaccaaagggggcaaaggggttttgctaaaggtaagggaacaccctacctttttgcttccatttgaagttaccagccaactgaatacaacaaatccctcagaccataaaccttagtacagaaaatgtttactatggaagccctcggtttgggcgggatcgattcccaccataatta

SEQ ID NO: 40908 - DNA, 504 bp, Glycine max
  unsure (1)..(504): unsure at all n locations
  Clone ID: jC-gmro02910001f06d1
gacttatataattgatcaattccatgtgattatcattgacacagattcatgtgcatcaacatggtgggcaacccataacccacaatattttatggttgaatgtcaatttcaataataagtataaacaacaaatgaaaaaacaaaatacttgcaaaataataataccacttgcaagcttcatatcacatggagatggagccaacccaagaagcattattatcattatacaaaccacaaagctccataacgggcatccccaacacctcatccaccacacggtcatgccacgtgtccctcatggcttcattcaaccgttggatgaaccccttcttgaatttctcacaataatgcaacaaacgtgccacatggctagggtccttatnctnccaccaccaaccgncaccaccctccctacattgtggcatctcaccgccaccggagaccataccacggcggaatccagccatctccgccacatactccgccatgccatcaacaagccct

SEQ ID NO: 40909 - DNA, 449 bp, Glycine max
  Clone ID: jC-gmro02910001f07d1
gattgcatccattacatgtttattcaatttagggtggccagataggattgagaaatccgtacacagaacatttaacaacatagcggggaggaacataatgtaattccaccagaagttgataatgctatgtcatcatagctttattcagcaaacaacacgcataccactcaatacaattacaacgatgtctgaggatgttcataaatataaacgttaagtgtgacatacacataataaaaatgttcaagggtagacctcaatcagagatctaaaaccaaagatgggaaatattttggagtgtttgaatcctgcttcgatgaagagatgtgtccattcctcttccggcctctctctggcatacatcggaaacataataatgtgcaaactaagctttgtatgcgtcatatccgggtcatgtagcttctcatttatgacggtatctatgataa

SEQ ID NO: 40910 - DNA, 473 bp, Glycine max
  Clone ID: jC-gmro02910001f09d1
gttcataatatataagagtttacattaatggccactcaaaagaagacactcaggggaaagtaaaatcttaaaccttcagcctgtatactaagatgaaaaaccctaaacagcaacttaaaagccaccaaagcccaaatatttggcatgatcaagtgaagatttggccaatatttgaccaaagagtgaaaccaatggtggctgcaaccgccacaccatagcacaaccgcactaggaaatataaaacgctgttagactcaaaatttgtttcatgctggagacaagtccctatctaaaagacctatccactcactaactgtacaagcaaccgaggacaagaagaatgcccttggatatagttataccacgattattagcatgcgccaaacacttgatatgaggcctaacaactaccatccacatacaccccattgccattggtgtatataccatttaaggaaccattggatgaattg

SEQ ID NO: 40911 - DNA, 437 bp, Glycine max
  Clone ID: jC-gmro02910001f11d1
aaacaagataattttgcattttttttcgcttgctgttttgttaaaatctgaagttaactaactaaccagcttaacaacctcaagagtctgaaatttagtccatgacccacgtcttctagaacatatataacatgctaccttattaatgatacacattttacaaatgttgcaccataaacaaaatcacgccttgtcagaaaagaagaaagataagatgtatgcaacgacccgtggaggttggagaaactcaggttagagcagaggcctcttcgaatcaacggccgtcggaggcaagataggcgcggcggaagacgacgacgacaaccccgttacttcaacatgattgtttggtaccctaggcgatctaatagacaacgcccttgcggaaaagggcgccgccctcgaaaaaatacaccggtccgattttaaactacggt

SEQ ID NO: 40912 - DNA, 511 bp, Glycine max
  Clone ID: jC-gmro02910001f12a1
gacttaaatggagaaaaacttcccaggggatttgtgattgaagagtgtctaccaaactcaaacgtattgtatttctataacaatgttggtacaacttaaaaaacttcaagtaataacacccatttccaaatacgtttattgtaaataaaatacagcctcgtggtctattctatacacctatttgttctaatgtacaatgttggtgatacagaggcaccatttattgcacaacaaacaaataatcacaaaagattcttcaccctgaagactatcgaaaagatagcgtgcttggtgagtcaatcctcacaataatatcttcttcttcagcaccagaatcatcacttgaattatctccatggtgatgctgtcttcgttctgtgctttgtgaaggtggatttgtaacatgtcttgtgacctcatggaccttcttggcagttgcagctccttctgatttgactgaaacaagaggacgaccttgatgtgacacaatggttggataggacaagctatg

SEQ ID NO: 40913 - DNA, 500 bp, Glycine max
  Clone ID: jC-gmro02910001g01d1
gttctaacagccttgatcaatctattgatagttacaacgtaacagaaaattatctatttatgcagtcactgtatacaacacaaccaagcatgttacagcgcttctccaatagaccagtgaacctttgtgagtgatgtttccaagtagtagctagttccacagtaggaatcatggttagcagcattatcagaggaagcttcaaacacttcatcatgagaataaaaccacctatttcgatactgtttatctttgctgctgcctcttttagagtaactgaccttctggcccttctttccatttttcttttcactcttcttgatcctgggtttttgctgtttcttgtttttaacagtatgtgataacaatgtaggtaccggatcatatacatcaggggcccacttcactgtcaatttcattcgtgatccccgctctttctcgcggctacctttcatggcagatacaagctttcgaggtgctggcaaagatactgagcacgagta

SEQ ID NO: 40914 - DNA, 427 bp, Glycine max
  Clone ID: jC-gmro02910001g02d1
aaaattgactgcagatacaataaaatttcgagccatttggaaaattaaagtctcaaccaaaattctaatactcaaacatgtaaaagttgaagaaactaatacacaggttacctcattttttcactaccctctacttggctagttgtcttttggaagggtgaggaaaaatagacggctttctcacccaatcgttgtgtcactttctttgctaagcaccttttcactcggttatcatctgtctgaatcatatatctttataaatagaaatatcctttatctctcataattcatccttcacttcggtggtgctgctttggctctccttgacatcagaactctcactggcggttttagtagttgaggctagtttctggagctggaatgggattgatgcatgtttcctgaggaacttataaaaggctttcac

SEQ ID NO: 40915 - DNA, 463 bp, Glycine max
  Clone ID: jC-gmro02910001g03d1
ccaacaatccatgcatcaagttcgaattataattgagcataatgattacaagcggggaataatagataaaggtacagttaaaaatgcaaaaagccatgaagctcgagacatcaaacggggaacaaagatgaaacttgaagggacaggacacacaagtgaatagaacaagaagtcatatttttcaagttgaagctcaagggtaggtttcagaggctgggacagccgtatatgaaccaatgaagacgtctccataaatcaagccagccaaacctcctccaatcaatgggccaacccaatagatccagttggcagcgaagtctccactgaccacagctgggccgaatgagcgagctgggttcattgaaccgccactgaatgggcctgctgctaagatgttggcacccacaacgaacccaatagcaatgggtgcaatgatacccaatgacccctttttgggtctgct

SEQ ID NO: 40916 - DNA, 374 bp, Glycine max
  Clone ID: jC-gmro02910001g06d1
aaaaaggaaagaaatattgttattaaggggagtaaaatgatgggatactccaacccattacattgcaagagaagatgtaggccttgcaacagctttggtgatgagggagtgtttcatttccatggagagctttaagcactcagacaagtccacaccagaatcattacaaggcgtccatttgaacttttgaaggaacacagcaagccaagggtcaacaggggccaagcccatggttttttcaggggacacttttctaccagcgccaaaaggggccaacctaaaatcagaccccatgattggcacgtccttgtccttcaaaaaccgctcgggcttgaaatgttctggctcggaccacacttgttggtcatgagtga

SEQ ID NO: 40917 - DNA, 405 bp, Glycine max
  Clone ID: jC-gmro02910001g07d1
ggggcccagggcaaggctattattttggtaagctcgccccatttgaaggattggcctttgatcttaaaagagggcttcatattttgggggggaaaaaaatttataaactatcattggaattgtttgctaaaaaatgtaggatttttaatggtttggaacaatagctcttggttcaaattggggggattttgacactaaaagggggggttcttttccaatacataaaaaaaaaaaggctcgcttttttaatggggctgagagactaaagaatgtttataaaaattttatttccttaacctattaagggctttatgaaaaacaaaattgtgaagactcctgggagtcgaagcgaattattttttaaatggaataagcctaacaatttaatgaacttgggggtggaac

SEQ ID NO: 40918 - DNA, 477 bp, Glycine max
  Clone ID: jC-gmro02910001g08d1
aatgataaagttaaactcgttcacatttcaagatccgaaaaatccagtttccccatcgaattataagcacaaaatcatctccttaaattaaggttattgtagctaaaaaccgtgttcctgtttgaatcactgaactcctactgaatgagttccttttacacataaatttttaggtactcgtccatgcgtgtgtaattcacttcagggtaaagcttggatgcttcttctccttcctctccaatttcaaaatttgctaaacatccctcgtagaatatatgataaaagtgtccaatccctacttgaagtttataatccaaccctttcagtgttgtaagaaagccttctggaggtatgtatgtcttctctagttcctttccaataagtttctcccaaattccaataagctctgcttgagagataatattttctggaggccttatgtacaatgttttgttaagggttcgtggatcatctatt

SEQ ID NO: 40919 - DNA, 484 bp, Glycine max
  Clone ID: jC-gmro02910001g11d1
aaccttaattacttgattaagtaccagtcacaccttattgaaatgatgattatgaatacataaaaagcaactgcgatggcaagacactactattgtatatgatgattatcttaattaagaaaggagtttagatgcaacgccgatccttgcaagtggaacacaaacgagactatgtgcccttggaaccgtgaggccagctctctcttccatgctaactttggcatcatcacctttcaatatttgtccttgagggcccagcacttgcaggtcaaagcattggataagagatgcaagaagtgttgccattcctgaagtagccaaattgacaccagggcacattctcctcccagacccaaatgggaggagttggaaatgctggcccctaagatcaagaggccctgctttcccttcagcaccagtttctaagaaccttttcggacggaattctgatggtctgtccaagatttggggtcccttctacttg

SEQ ID NO: 40920 - DNA, 505 bp, Glycine max
  unsure (1)..(505): unsure at all n locations
  Clone ID: jC-gmro02910001g12a1
cacatcacaaccacaatcaggcatatctttgtatttaatggctggatggatatatagcagctacagttgagaccatggaatctactccacacacatttcgacctctgcagatcttgtaatatccattctctccccagctctcgccccatgaattcttaatgatccagtaaggtttgttcttaaaacgaatgggagcatatgcaccttcaccataaccaactagaagaaccccatgatccaaatgcttcccacagatgtatgggcatgagacgccaccaacatatgtctgcataaaaactgcattgatagcaactgcaagagggccattctttactaggtttgcagcaatttgttcttcatcaagggaaaccacactgtaattagatacagtagccgcaactttggttttgtcaaatttgcaggtgccatctctcccggtgtatggatagtccttttctttctgtactcccncagactgaagtatgtactcaaatgcgttgttcat

SEQ ID NO: 40921 - DNA, 542 bp, Glycine max
  Clone ID: jC-gmro02910001h02d1
acttcaaaaacaagtactattatttactgttattagggaaactacgaagtttgatattttacaaatcaattacaataatcatttgaactgatgatagtatgaaagcgtacaacatcacgatttcacattacttgaaagggactacaattttttgatacatgtaagttccatgtatcaaatgcagctagctatataccacccactacaacaaaaaatgatccaactatatataactacagttgccaaaaataataataaataaactgagaaaagaatctaaaaattttctttgtgaaaatcaaacttggtgctggttttcctggaaaagtctaaagaaagctttttcagttccccaaccaatccatgcgccccacagtagaaaacaccaactctttggtcagggtgtttgatggctgcatgtttaaagacattgcgccagttgggtcttgcaaaatgagtcttcacccttgtccctgaaactatatccacaccatttttggcatggtgaagagactgaagcattgtgatcaaagctgacctag

SEQ ID NO: 40922 - DNA, 495 bp, Glycine max
  Clone ID: jC-gmro02910001h03d1
aatacaagccatgtgacattaggaataggggttaatgggcccaatcagaaaaaaactgaaactacatcatcaacaaggactcaggaggagttccaccaagtctcaggtttcactacattcaaatctaatagaataaaatggtccacaagaagggacaatttattttactaaattgtaaaactacttaacaaaaggagctccttgttaatatattaaaacttatttaccgttacaccatctctagtaacctcatatgcttcccttttccttgttttcttcatgccggccgtgaaatggagctttggtccctccgatgaaatggcagtcacttttacccatatcagcactttggtcttgattccttctatttctgctagcttccctttctacaaatagccactcacgctggtggagaaacgcagaactgacgaatccctgttgccaacctcacacacttgaggaatgtaaacaacaagcttttctgtcttttcttaa

SEQ ID NO: 40923 - DNA, 315 bp, Glycine max
  Clone ID: jC-gmro02910001h06d1
aggaaaaaaaaaaaaatttgtgtgggggggggaaaaaaaaaggggaaaaaaacacccaaatttttctttttggggggggccctaaaaaaaacccccctttgggctttttttttaccccaacccccaatttgaaacttttttttttttttaaaaggggggataaaaaaaaccggggtgttttttttttttaaaaacattaaaaaaaatttccttttttccgggaaaaacttttttaggttccccccccgccgggttttaaaggaaaaaaccaaatgccccttttttttaaacccccccaaaaaaataaaacctttt

SEQ ID NO: 40924 - DNA, 466 bp, Glycine max
  Clone ID: jC-gmro02910001h07d1
ggcctccaactcaacaaatactgtatttggtgtagcgtgtcctcaaaacataaattatacttacaatatagcagggaacgaatcttagagtttgctgctcctactcactttaacacagtagaaaatgaatactgtatgaacattacgaatttgtctctgcttctctaatgggcagaattacttaaatcaacggctataatttcacactttacttttaagtagttgtataggactcatccaaaattacaacggcccaaaaaatatcaatgccctattttttaggacaccactatgctgattagttcctgtaatgaacactgcaaaatcgacagatttcctattttacgtaaaagtgatcacaagcagataggtatcacagagactccggactagtggatggtctgattctagctggcattcgcttacattgattcaactgtgtctcaaacccatgtttaaaagattt

SEQ ID NO: 40925 - DNA, 387 bp, Glycine max
  Clone ID: jC-gmro02910001h08d1
aaaccaaactaactgatcttatcatatgtgaaagatattactatgggacttatgtgcatgaccaaggctcataacacgtatgctattgggctaccttagtctacagaaaatttgaaacatgcacgggcacaccataccggagaacgctatagagaagcattacatcatcaaccggcttttgatgctgtgacaaaacccagaacaaagccctatatggctcgcttgatgtatgttgtaccccagaatcaccgccttaacaaactggcacacaagcctcttccatggaggcgataaaatcaccggtgttgctaatgttggcgaaagcacgactgtgcttgatgccatactggatcaatgtccaacagagagtgtgagacaccctaacca

SEQ ID NO: 40926 - DNA, 448 bp, Glycine max
  Clone ID: jC-gmro02910001h12a1
ctcttcccattcaatggttccttggaaataatatgttttaaaaaatcaatagtaaaaagaagaaaatatacccaacacggaatctgcctctgacagaattaagatcatattaccataatcttacatctgatcatttttttaatatattttttccctcatagcaataacaaaaaatcaagttgaagagataaaaaaaatgagaaattaaaaatcatcatcgcacgataatcatcagagacaaagcgcggtgcagcgtaaatcatcatccacgacggcagcatcatcatcaaacggcagcgcgttgagatcgaacggcaagggaggtcgaaacgacgaggaaacgatgttgtcgtcgctgtcgtcaacgacggaggaggaagagtcgcagtcactgtggcagtcttcggggacaagagggggagtgcgcgggtatctccgcgtagtggtc

SEQ ID NO: 40927 - DNA, 535 bp, Glycine max
  Clone ID: jC-gmro02910002a02d1
acagccatccgcttccaaattttttattttgacagttgacgaatattacattgatccaacaaaatggtgccatagcaccttattatagccacaagacgaaactttgagatgtccttattctggaacggacaggaacactctaatcttaaaggacatttataatttcaaataaagggcaccctataaaatgaaaagggaaagaatccctgtagtctgaatattcaaaatggacttacgttacattctttgctaaggctacttgggtgaatcaataaattcctgactgcaaatacattccggtcaaaacacagggacgacaccttaaatatggagacctgcgagagccaagaatgctgctgcaactttgtcttcctctttgtggttgaacacaaacaactgttaccaaagcagcaacacaaattctcaaatcttcaatgaagaaactggaattttttcagcagatggagatgtttccttgaaacccaacatcttgtttagtgcagcaatataagccttgacactggaaacaacgaca

SEQ ID NO: 40928 - DNA, 442 bp, Glycine max
  Clone ID: jC-gmro02910002a03d1
acaaaagaaaattatcacagttaacctgcattgctgtagaaattttgaagctatatattcagttatcacatttcgatctatacaataatattttaactgagcaaaaacaaaattcaccttgtacggatcaagttgaacaatggagtaagctgtctccaaggatgcaagaaagttgagtaatattttgacaaaatgccatgttaggtgggaaaaggagctttagcttgttaagcctttgggtccgactcaatgaacaaatcagtgaagaaggggtcaagaattgcttccttggccgaatcatacttgtcaagacgtttcttcaaggatcgtagatctctctcgtgctttgcagtacgttcaaatgatttcttcatgaggagtatgtctaccaagtagatcaaccataacacgtttggtttgggacagcttcctttgcagcaat

SEQ ID NO: 40929 - DNA, 416 bp, Glycine max
  Clone ID: jC-gmro02910002a04d1
ggaaccgagctgtaatatttttttttcctcatttgaaatacaaatggcagacgttacatagggttgaatgacaatggagattgttatgagtgtgatatatgttctctaacacatacactggaaatcaactagagaagggagtgaatacaattttgggttactccattaaaccacaatttgtaacaatgacctttgaataagggcggttgaatcctatttctgctacaacagctctcttggctcctattagctttgccaccctaaaatatggagatcctgtattctcttgtacggttttaactagaccgatcctctggacaacctccatccctcctattacttttccaattaccagagtcgatgcatccaattctggcgaatccttcgtagctatgacaaattctggcccattggga

SEQ ID NO: 40930 - DNA, 365 bp, Glycine max
  Clone ID: jC-gmro02910002a07d1
attgcactaatggaaatgataatacgaatacttcattactaatatttcataattacaatttctcaagtagcctaaagaataagtatatataatacaacaatctccaaaagaggttgaatgctaaagccttgcaacatctattaatatttataatagactttaatagcagtaatcctatattatattattaatataacagtattatattacaaatactggatttggaggttttccattataacctcaaatgggcacgaggtattccattttcaacgccagataattagcttatagctttcgctttcccagccttgttatgaaggataatgacactcatgcatgtctagatggatcctcatgcaact

SEQ ID NO: 40931 - DNA, 402 bp, Glycine max
  Clone ID: jC-gmro02910002a09d1
ccagcttggttgtttccaataaaactatgtcatgtcaggttcttcaaacattaggtcttgaagaccttgtataaaagacttgtgaacatgtcagacagaaccttgcatataggttgttgtaaaggagatcattttgctaattaacagaaaattaccaaggtgacctaaattgttgttaaaaaagagtcacattggatggctccatattactgatgtacatacttctgcaagtaattggggaagatgtttgctttagagcttcttcagtgacgctttcaagtgtggttgaagagttattttattggtagccatctgaacgtcataacaaagattcccatgaaccagctggaaacatcttcttatctctttaaccttagaagcgttccccactattacactctg

SEQ ID NO: 40932 - DNA, 400 bp, Glycine max
  Clone ID: jC-gmro02910002a10d1
gtacaacaaaagtgaacgaacgaaccagagattccctctgctggtaccatctccaacagccccccaccaaacatttccatttccgaccaacttcgattcaatcaacagctcaaagcttcatacttcaccggcatggatcggttaaaccccgcctgagaaagcaagttccccaccaccgtaagatcacggcagaaaacaccctgaaacaccgccggattcaccgtagaagaagacaccatagacctattttgagacatttgagtactattactctcaacgaccttattcaactcagcagcagcttcattggctttctctttctgtgcttcaagagcttgcaaagcagccttctttctctgcttctcagcagcttcctcatccataatattacccatcacat

SEQ ID NO: 40933 - DNA, 126 bp, Glycine max
  Clone ID: jC-gmro02910002a11a1
gttctagatcgcgggcggccgcccttttttttttttattcaaaaaaaagggaaaggaaagaaaaaaaacaaaacaaaaaaaaaaaaaaaaaaaaaaaaaaaaacaaaaaaaaaaaaaaagaaaaag

SEQ ID NO: 40934 - DNA, 321 bp, Glycine max
  Clone ID: jC-gmro02910002b01d1
gcttgaccttttattattattgttattattaggttggggctgcctttgggttatatcaaaagcagtaacaacaattaaagccgctgcgaagacagccagacaagcttattaacatttacatgcaaataccagctattatacttcataatagtatcagaagccaaatacagttaaagacaccactgaaatcagatacttggaacacttattagataatgactaaaaagcctatggggaaaacaatgcaactttttggccaaaatggaagcccaaacaattggacaaagcccacttagggaaactggggaccggaaacatgaa

SEQ ID NO: 40935 - DNA, 510 bp, Glycine max
  Clone ID: jC-gmro02910002b02d1
aggtaatagtaattgtgattcttctcttggtgccactggcttgttgattatacatacgtactcgatgacatcaaatgctcaattattgattccttaattggcacgaagtaaagtcgaaaagtactggatctacaaggaagaaacaatgaacctagagtttggagcaatggcactaggttggacgatgtggtggttaagcacacagtccaactccttctgaaacctctccatggcttcagaaggcaaacaaaccggtataaccaacccttcctctcctttagcattcttaaagggtatgtaaaagctagcaacaccaggtatggctccaacccctcccttggcgggtcctccataaacagccttcccccacccaaactcaatgtttccaaacccagcacgagtcacatccgacacgagatacgatctcacaacagtgaagtgaggccggcccttggtgaccattaaatcagccaccgagtgcatgtattcctcagtcacatccgctttggc

SEQ ID NO: 40936 - DNA, 425 bp, Glycine max
  Clone ID: jC-gmro02910002b05d1
gaaataatatatatctttattttgctattggcatataaggtagacataccacctattttcccagaagtacattggcatcatttcatttggcggctttttcaacctcacttagccactatttacatatctctaccccaaaacttagggataataatttaccttagaaaccaaaccctataaggccttaccaaatatcatcaccttaactaaggttgaaaaagagccttgcttattttgctacacgccattcttttgatcactgcaccatcaactatttcacaggtgtcttatttctacttcttcagccttttccagttctgttggactttgctatatatacaaaacgctagaaaccacttcaagaagaaaaataataagacggacggtgacactttcaaataccggccctaggaaaagctgagtat

SEQ ID NO: 40937 - DNA, 438 bp, Glycine max
  Clone ID: jC-gmro02910002b06d1
ccaaaaccaactccaattttaattccatttgctactcccaacattggtcatcaccagaaaataaaagaacaatttagactagcaataaagtgttacatacaacacaacaaacaacatagacagagaaagacaatctgcaaacaactcacgaccaaaactatagatgaaaaatggaccgaacaaatgatgacatgcatatttcttactcttcaagttcaatttccttcatgtacccaaaaccaccaccagaggttattttctctcaatcagagtagggtttgatcttgaacctgtaaagaagcctcttttttttcaaggtaggattgtctatggtgagcaacaattttcccagttcaacaactttaaagctattggtaacaactggttcatcggtaggggacatctttgtggccttctgtatgataaccgtatatgcat

SEQ ID NO: 40938 - DNA, 264 bp, Glycine max
  Clone ID: jC-gmro02910002b07d1
gggtcatagcacttcccaagggtttaggattttataacccttattaaaaaaactggcatgagtccaaaacccaaaatatagcgcaatgatttatgaataatgactttacccataacatttaaaatgaaaatttctactggctgttgaaatgaaacctgagcattgttgaacatggaaccaacttggtcaaaacctaacttggaaaaaagcttaattttggattttgaaaaaaagtacaattcaaattcattttcaagctttaag

SEQ ID NO: 40939 - DNA, 421 bp, Glycine max
  Clone ID: jC-gmro02910002b09d1
cacagaaatacaaatgtttctaacatttcttcaataacagcttttatcaaacctgccaacaagaagtttcttatcacagaaatacaattcaatgctaaagccaagagtatgaaagcgcccaaccattttcaagaccaaaggagctgttacaacaatgttgaaaaccagggccagaaaacctgtgggaactagaaacccttctgccgcattatcctaatctgatttcaaaaattccaacaagaataaacagcattgtcacctcactgttccttccgagctttagatctggcaggctttccaggtttaattactttaccaagaagaatcataacaacaggaacaatagttccaatgtaatacacgcttccatatgatgcaagagtttcatgcagacttaacaccatgaaaccaacacaggagt

SEQ ID NO: 40940 - DNA, 394 bp, Glycine max
  Clone ID: jC-gmro02910002b10d1
accagtgcaaccaggaaccatatcactattcatcgtcaaatgacaatcacaaggctttctttaaactaatgcacaaaaaaggataatagagaatcttatgaataaaccaaaaaatttaaaagaatgctgtgtataagtactgcacagttcacaggcttctggaaagtagaaattaaatgggaaaaaaattagggagaaatataaattgccaatactgttcccaaaacctatttattagatattcatctaacctaattaaactttgtagttcaagaagaaaaaaaaaaataagatatccaagatagagaataaacctttgatcattgagaaagaaatggaagcaggaaaatacaatttggtttacctccaatgccttagcaactagaggacagac

SEQ ID NO: 40941 - DNA, 430 bp, Glycine max
  unsure (1)..(430): unsure at all n locations
  Clone ID: jC-gmro02910002b11d1
agaattcggtatatataaactttgagcacaatcaaaattcatgtgaactcgatactcgatcttactgtttagtattactataataaattgatacacttgtcaaggagttaacaactaatggtgaccactagctccccacgatcatgcacaatgcctaaagaatcaattagtcaatgtaatcttctcaaggttgaacgtgtacatatagacccaaagaaaacacaacaagatacgtttttttatcatcccatacacaaatacacaaacaccttgggctcaactgacttgatcgtcagagtcctttttgtaagtacctccccaacactggagtaggagatcaaagattctacgaagactaggaactcgatcacaactcatcggaacttaaccacaacttgccagaatagaatctaagaaactttntatgctt

SEQ ID NO: 40942 - DNA, 410 bp, Glycine max
  Clone ID: jC-gmro02910002b12d1
gacaatgaatgcgcatttaacattacatcatgcataatgtacattgggcatttacctgacgattttgctttctgcttttcaacacctaaatgcattgattgcattatctatgactaagaacatcctcaggattacagcaacactttccacatcacaatctgtaagaccaaagtttccggcataaaccgggaaatggtaccacgaaagaaagaaaaaaaaagaagataaaagggtgcccaggcaacttttataatgggcatcacaagaacttttttgatcttttggttttgaggggaagggaaaaccatagcgaaaacaaaacctaaacctgagttttaacctcctcagtagttgcagtccacattcaaagaattgaagggctggtcctttcagagcctttttgaaaataa

SEQ ID NO: 40943 - DNA, 393 bp, Glycine max
  Clone ID: jC-gmro02910002c02d1
gaacaaagatcatgcctttattatcaacgaagtccagttttttggcctgttttgttaggacgtgaattccaattgcattaaaactttagaccataaactttatattctatatatagacttgccccgttacataaaatactattgtatacaaaaatgggcctatcacttcacttaccaaaagaaaacccccccaaaccaaaatactactattagcgacactcggttccattttttttccccttaggagcaatgccgggggaccaattttgcgccccacatggaaatcatagatccccttcttgcaaagtcaacagtgggcttaaaagaaagaaagaaggcccaccagcggggcattgatatatgtagggggctcaaactgttgaaagaaaggcc

SEQ ID NO: 40944 - DNA, 428 bp, Glycine max
  Clone ID: jC-gmro02910002c03d1
gcacttaaaaacgacaagaaatttattcaatcacgagcggtaaaaatacaacatacaaataaaaataagggagagtgacatctacacaaaatccacacaaacttaaatcaaacgaggacaataataataataataataatgatgatgataaaaatgagaaaagcttgaacctttagacttgagctttaaccttctggtttggctcgaagacatacttaataagagaatccttaatagacaacagttctggaaattccttcttcaatttggcagcgtcaagctcattgatgctcctcggagcaacaatcaccttggcctgttcctcgagagtgaagttgttccaggtgaagttcgggtcaacataatctctgtacatctccaagatttcattgtgactaaccactcctgggttagtaaagttccagatc

SEQ ID NO: 40945 - DNA, 356 bp, Glycine max
  Clone ID: jC-gmro02910002c04d1
cccccaaaaaaaccacaaatttgggaaaaatttccccaaaggggggaaaaatggggggggacccccctaaaaaaaaacctttttgggggggtaaatttgggggaaaaaaacccccgggggtaaaaaaaaacccctttgtcaaaaaaaaaaactaaaaaaaatggccccccacaaaaaaaaaaacccggggtaaaaaaaaacccgcttcccaaaaaaaaaattggggggggggaaaaaaaaaattttttcacgggaaattttccccaaaaaattttgggaaaggggcccccaaccctatttaaaaacggggggaaaatttttccccccccgggggtttttattaccaaatttaaaaa

SEQ ID NO: 40946 - DNA, 390 bp, Glycine max
  Clone ID: jC-gmro02910002c06d1
gaaccatcctatcattatatttataagccacatgataggatttaatattagtaacatttgaacatattagcaattctcaagaatttcaaccacaactaaaccaaatcaacaaacagtaaagccttcaaaaattggggggttcaaaatgtttgacaaatgaaaacagccccttcacttgcagatactttttgggggcatgcaaatttagctgtattgaattcataaagggtcaacaggggtatttgattgtgctccccattcaggccaagatccatcataaactgcaacatcagactttctaagacgatgaagacccaatgcaagaatgcaagcagttacgcctgttccacatgaagtcacagctgggctttccagagagatgccttcttg

SEQ ID NO: 40947 - DNA, 401 bp, Glycine max
  Clone ID: jC-gmro02910002c08d1
aaacaaaaactccaaattccataagcctattttggcttcaacatacttcccttttattttccaatttccatttttcatcatgatcatcatccatattattatttcgtcctgttattggtcacctgaaaagtgaagactgaaaaacctccccggaatcacgtaccgaaaaaccattatttcatttgggccaaccaccgaaacacttaaacacagcctaaaaaagagaccccactccccgaacgtttgacctttgactgacacaaaacgacttataatttttttttcactccctccctccttccagttttcactatcactactactgggccgaaacttcatgaacaaacttattcaaacgaattgcgttacgtattgcataaaccccatgtcgctttcgagcc

SEQ ID NO: 40948 - DNA, 420 bp, Glycine max
  Clone ID: jC-gmro02910002c10d1
aaaccaacaaacttgaataaaagttcacaataaaaatgggtgaaaatatccatgttttagaccgaacatgttctgaatagagctaatcaatctcgtgcaaaaattgtcttgcaacaactattatatggatggactacaaacgagagacttctaaggtcatcactttttgtcttccttctcagcttcggcagccttcttcagtctggcaccataatggcgtttgtttgtgcgttcaagtcgaagcttgtaataagctttaaaagccttcatgtcatctgtaacctttacaagttcaacagttggcttctccctcacaataggcaagaaagaaccctggacttgcgttgcatttgcaagctcctcgggagtagaatcaccagccttaaccttctgtgcccgtcttgggaacacaaccaattt

SEQ ID NO: 40949 - DNA, 438 bp, Glycine max
  Clone ID: jC-gmro02910002d03d1
attaaaaccacccatatgccttcaacaaatagtttagacttgtgagaaatcctttctaatccgaatactctggtacagccacaatcttttacagtttccacgagccgtttcttacaatcagtaatcaattattcatacatcaccaagttcaaatgcaaaatctttaaaatcgctccactcaagaatgtgttagcatcatcaaatcactgggatgaagcttcctccttcttttccgacagaagcccctgtgcctttgcccatcgggaaaaatgatagagttgaacagtctcatttgaggcatggcaagcaaaaagtagatagttgcgtggctgaaccatccatgcaaatctcatgaacaatgctgaatagacacacattgctcctgtcatgttgccagagatcatttctggaggtttgttcaggtcagccaatccagct

SEQ ID NO: 40950 - DNA, 443 bp, Glycine max
  Clone ID: jC-gmro02910002d06d1
ctggcagaatatagcaaatatactctccgacacattttgcgtgtctacaattctttccattgtatcatagtaaattaaataaatgtgtaagggctcaatcttcattgatacaagccctgtaatacatggggcaatattcagcacaatagcctgacttgactatgtacagtatacacagtctttgcgcatccaaattctcttatataaatctttgtttttggccaggcagtgcatgattaggccttggcaatcttttgaggtatacttgaacaaccagaagacaaggagcaccaattatgaacttcaaatattttttatatactgaacctaatatgatctaaaccacacgtatttggtaaattgctgcatcatagggtcctaaccgcataggactcacttgacagcttctttgcatttcctagacatttgttacaagatatata

SEQ ID NO: 40951 - DNA, 388 bp, Glycine max
  Clone ID: jC-gmro02910002d07d1
aaaacaagagttcaaatgatgatttcctttattataatttatttattgatgaaggaggtacaaagatatcgaccagctcttacaattctgaggcaaaagaaaataaaaggaaacactcgttacattgaaagccaacttaaaacttgagcacaaagtactaaataacagtacttcacgcaaggaaactcttgtatatgataagcaagacactgatgataactaagttgaatattggatcagttgtaatgaggattggccaaaaggttagcctcaacggccttgaaaagagcatcagacttgactttgccaattttgaggtcgtctgggttgggctgagcatctcctttggtttggtatttgacagttagcttcccagcagaccctccgt

SEQ ID NO: 40952 - DNA, 301 bp, Glycine max
  Clone ID: jC-gmro02910002d08d1
aaccaaaatctggccccggaatcttcaaaaaaatagcaaaaaaaacctttccccaagacattccaagacttttttaagatttttcccaagggggaaggaaaaccccgattggggggtgagccataaccgggttggaacaaaggcccaaatcaaattaagtagggagaatgggggggggggagtcaggtttgccccccaaaaggggacccctgggggcggggaaaaattcaaaacctggcagctcggggacatttcctttatggggaacccccaggggggacccgaaaaggggccccggaag

SEQ ID NO: 40953 - DNA, 428 bp, Glycine max
  Clone ID: jC-gmro02910002d10d1
actagtaaatggacttcattttccatttattttgcatttaaaggcaaatcagttacacaaaccgtgccaaacactcttagtctcttatattgttccaaatgcttgatacacatccgtgggagtgcttcaaagggaagaagcctcacaagcttattgtgtattcattagcagctaaaaattcctcatcttattacattagatcactctacaaggtaggagggatccatatgtagccgtgtgtttgaacatagccagctttttcaagtaactgatctgcttctgcaggacctctgcttcctggtttgtaggggagtggcttgaattccccttcatcaattctgtgcagaagtggggtgaagatctgccaggatgccttcaactcatctctgcgaacaaaatgttgctgatcacctctaattgtgtcaaga

SEQ ID NO: 40954 - DNA, 452 bp, Glycine max
  Clone ID: jC-gmro02910002e03d1
aaaaattgatcactatggatctatactcagtaataaacaagggatacatcaataacctttctattatttcacatgtaacgaaatgctgccatgtgatctctacccatcaaacaataataaaaagaaagtaacgccctacgggtgtacttattgtttctaagctcaaatgatgaagttattaaacagaattacagctaacaatgctgcaaattttaagccgagaataacagctaagttgaagataaatactaaggaaaaaaaatacagtatataaatagttccatttccaagttctgtggctgttatgcagttaaccaaaaaccgattcacgctttgccattggccactgatgctcccgcagggttaagctcatcccaagcttcaatccaagtgaccatggcatctgccaacttgtcaaagtaaggatctaccttggaaagcttttccttgac

SEQ ID NO: 40955 - DNA, 421 bp, Glycine max
  Clone ID: jC-gmro02910002e04d1
aatcagaatacttcatgaaaagaatttgttaattcaaccaaaccaaataggtaacaattcacatctcttctacaacagaacgggagaaaaaaaaaaagaatcttacatatcttgctagccttcatgctcttatctcaacataccaaagaaaggaaaacacaaaaacaagatagataaaaggatggtaaagagtaggaaatgaaagttcctcaaccactagatggtatttttgtagtatttgtataaatagtaatttccctggtccagctttcacactccatgattataacttagaagcatttcctgtgtacgattgatggtccagattcatcatactctgccttcgcaatccacatctgttggaaggtgctgagggaagccaagatggagcctccaatccagacactggacttcctctctg

SEQ ID NO: 40956 - DNA, 379 bp, Glycine max
  Clone ID: jC-gmro02910002e07d1
atgtaatcaacctattttaaaaccgttagtaaagactggatcccagaccatatattacataattgataatccttatggacatcaaacagaaaatcccctgaaaacgagggcccttgagtttcacacaaaggataccctataaaaacctatatatagtcctatactgcattagctacaagataaataaactccacatatgctttaagcaggttgggtttcttggtgtggaatccattaccaacatcacgatcacaattcctgaaagccatacacaaatgaaaattatgatgataaataatatacatttagaaacatgcagggatgcttccactatgaagagaacagcaccaaaaattaaagaaactagaggccgatagaa

SEQ ID NO: 40957 - DNA, 363 bp, Glycine max
  Clone ID: jC-gmro02910002e08d1
aataagattcaaccaaactagagaaggccaccacggagcctaaggacaacatagacatagaaattttgttatatcatacacattcaaggaagagaaaatctcaatagcaagattcaactgaaactagaaatcgccaccacggagcctaagaacaaggtgaagcgtggattccttctgaatattgtaatcggcgagagtgcgtccggattcgagctgcttgccagcgaagataagacgctgctgatccggtggaatcccttccttatcctgaatcttcgccttcacgttatcgatcgtatcagaactctccagctgcagagtaataggttctccggtgagcgtcttcacgaagatctgcattcc

SEQ ID NO: 40958 - DNA, 323 bp, Glycine max
  Clone ID: jC-gmro02910002f03d1
ggaaaattaaaacaaaaaggaaaattaaaaaagggtcccgggttgaacccacattaggggcccctaatcgaggtctcccaaaaaaaaaaaaccatggggggacctgggatataattcaccaacggttggggcgatttaaacctgggagacctttttgggccccttacaggaacccattcccatttaaaaaatggggggtttcaaatttcaaccgggtgccacgggcaaagcttggggctctctcggtttcgggggggcccccaacgattatcggggaggccaaactccgcgggggggggcttgacaaagggggcgataaaccc

SEQ ID NO: 40959 - DNA, 309 bp, Glycine max
  Clone ID: jC-gmro02910002f06d1
ggccgcccttttttttttcttttttttttttttttaacccaaaagagacatctttgcctgttctgatcagtgaaataatcaaatgtgattgaagcaaaagcttcagctttcactcgcagatttccacgggctgcttatctagggaaacatctaaacggagacccactactactgacgaagatgcaccttgccggaatataactttcgctacactctttatcctgatggcaaacctcctacatatcatcctgtacaccctactccttgatgcgttctccagttatcgtatacgcatctgcacaggcgcca

SEQ ID NO: 40960 - DNA, 370 bp, Glycine max
  Clone ID: jC-gmro02910002f07d1
gctaaagaccatataatctttcatataaatgggtgtaactgggtgaacccagtcaaccaacctttgcactatctacaaaagaacatcctatcgggatcactctgagggattaaaggcggaggaaccacatcttgaatctcctataaatgatgcgttgaatgacaccttggagaaggaataatgaaccattgaacattatggacaatcaaaatgcttcaacactagcccttctagaggctgaggatgatgacttgcggttttactgcctatcaggctgctccaatgagagacttgatgcacaagcacgcagtggcatgaggagaatgggccctccacctgaccatcttggaggcgaaacagatactggaat

SEQ ID NO: 40961 - DNA, 315 bp, Glycine max
  Clone ID: jC-gmro02910002f09d1
tagccctgcggccgccctttttttttttttttttttttttttttttttttttcttttttattggggtttttaggttccccatgatattaattaacaatagaaacacttgaacctattcctaatcttaaaaaatcttaatcacaactcatccctatcaaaaaccacgattccatccaaaaatgggcgggtacaaaatgtatgccaaacgaaaaaagtcccttcacttgcaaataccaatagggggcatgcaaaataactgatacgaattcttaaaaggtcaaaaggtgtattcgattgtgctccccatttaatcca

SEQ ID NO: 40962 - DNA, 505 bp, Glycine max
  Clone ID: jC-gmro02910002f11d1
atcaagaggaactaaaatgcattaaatttgcttatccaggacttcagaaattacaaagattatttcattcaatattatgtatcctacacaaaccataagtaacgacaaaaattgcgaagccaccttgtgcccacacttacaccacaatccaacacaagttgatatatcttacaaatagggaatgtagtagaaagccagcagttacaatagggaatgaagaatgaagtgtgatgacaagtaggtagtacaagaggctacaaaattatgagcaaataaatatgcaacagttagatttcattaactgaatcaattctgtttaatgatgcctgagaatatgctttgttgaaggtgatggatgatccaacctcacttgtgcttctgtaagatatgccctccattttttttctcttggagcggctcttaactatctcttccttttcatctacgaatgtaaggaatgtgcgcaaacgcgaagatcctgagccatggccagaagattcgagct

SEQ ID NO: 40963 - DNA, 567 bp, Glycine max
  Clone ID: jC-gmro02910002g01d1
gaacttgaagactaggaggaaataaatatattgagcataggccatttacatctagccctctactaattaacagttaacagaaaacagttagagtgttccttggcagttatcaatgccagtgtatggctctcaaaattgcatattttgatacaattgccagaggagagttggtaagtacatagatcaagataatgaattagcctcgtgaactggcatatcccgtggaattccttcagagcagccaatgccatggtagatgaaagcattcgtagaaaacaaatattgaccaacatatccacatcaattttacagtctgaaaactgaaaagctcatccatgtgcacctttaaaatgtaatggccgtagcttcagtcaagtttgcctttcctattcatcaagtcatggtagtatagcagtacacacatatgttgaccaaggatactgaatatgaaccaaaaaatcatatttccaaccattgagtatctgaatttattatgcagataattagtgatcaagaccaaaggaaccctggaacataattccatccgaagcccacaacttgaatatg

SEQ ID NO: 40964 - DNA, 484 bp, Glycine max
  Clone ID: jC-gmro02910002g02a1
gtttctactctcacaactgtttattttcttcctcttctcaactgtgttcgtgtgtatgcatttgagttgaaagccagactcaaggagctgaaagacaaaagaagaaacttggatttgaatcagccaaaatttgagttacacgtaattgcaaagataagatgagtgttatgtatagtcctgttctcaattactcagatgtggagcatcagctaaggaaaaaccaagacatggattcaagtattggacatccacaacaacactgtcaccaacccaattctggactattgaggtattgctctgctccaagctcattgctggcaagcctcattgacaacaccattcatggctgtgtgaacgaggaatcgctcacaagtgagaatgatcatgatcatcatgagcagcagcaggagcattatcttccatctacaagttcataaatggagaccatgttatccaaattgctaccatccaacaatggatggag

SEQ ID NO: 40965 - DNA, 442 bp, Glycine max
  Clone ID: jC-gmro02910002g03d1
ggctaccctttttttttttttttgggtattctaatacgaagtttattcgattaaaaagagatttatataggacctaatacaagtataagaatggagaaaatcaaatatcctttcaagtcttgcatattcaaaatgcaactatatggagttgacaaatctattcctgaaaacataagagactattttctctaactacaaaatccatcctcatcaaatatcaattgggtacccttaaattgacggataaaattcaagtaggacttagtcacggaactcatccatgaatttttcatggaactcagtcaagcgggtgacgatggccggaatcttttcttctggaggcaatatggtgcacctaaaatgccatgtgccaggaacctgtccaaaaccagaaccaggatcaacaacgactcctgtggcattaagcaagcgttcgcaatag

SEQ ID NO: 40966 - DNA, 436 bp, Glycine max
  Clone ID: jC-gmro02910002g05d1
ataatactggagcttacaatattagaaacgggggggtgaagaatttcaaaggtttttcatcaaggaaaaaaaaaaatcctaccattgcccggatgaatcgtgtctaaaggccgcagatcttcctcaattttggtcgcctaattaactactaccaagcagcgacactattcacatattggtaaagtaaagcctagaaataattcaaaagcaaaggttaaacaagatgccatatttatctatacctatttatctacaaatcggattctggcacaatgcctcacttctgcactgtcgaggcattaaccggcttctctttgcagcttgtgcctcacaattatcaggttccatgtcatctatcatctgaccatcatcacatccagcctcatcagaaacttgtgatggccttgtgggagcttcctcatcgtctactgcatca

SEQ ID NO: 40967 - DNA, 412 bp, Glycine max
  Clone ID: jC-gmro02910002g09d1
caagacgtatgatattgcaaatgacttaaacttctacacaagaacgaacaaaatgctataatgaattcccacactgccacacagttcaaagttattgcataccaataatttcaagaacccttattaacttacactttcaaagggattggcacaacaatattatatgctaataaatataataatcttaagatgatgaagcaggtttggaagatgggttgaaaggaacctgctcagcgcatgtaaggatgtcatggggcccagcctgttctcgaccaacaccaagaaggtcaagataatacaggtaatgggaaacaatattgttcattgagtccacatctccttgtccacatacaccatccccatagagaatgttcattgtagtgccaaatccaggaacccgattctccatagt

SEQ ID NO: 40968 - DNA, 416 bp, Glycine max
  Clone ID: jC-gmro02910002g10d1
agcacaaaccagaccttgccataaataaaatatccttgattgaaatataacaaagaagttgaacattactcgaagcattaacttgatttgcttatcttgacataggttgaatagaagcaagcataatatcaaattaaaggcatagtagaatgagtagcaaatccattctcatccagcatggacagagaatgaaatcctcctactttagtattcctaattacaatccaaaccatataggcttaattaaacatataattaatagagtatcaaggtccatctcgatgtaaaagttggcagacagaaagcagggagaagagagatagagagtgatgagattcacctatgtcctaaccatggttggtgagtaagtgaagtacccaagggaaccaaaatatctcccagggttccatgcaagt

SEQ ID NO: 40969 - DNA, 532 bp, Glycine max
  Clone ID: jC-gmro02910002g11d1
aataaaggtatcatagcatatagcatagcataggtatttcatacattgttcttttgaggagcacatgcagcaactcagtcttactacatgattctctttatttagaaaacaaagttttaccaattaaacaaacttatcagctaggctttgcatcttagacaaactgattaaggtactcatccacagtgatgtatttcacatcaggatatagagctgaagcttccactccaaaagaagactcaatttcaaagttagtatgatccccctttacataagaagagtggttaattgacaggatcacattcacgggtggtgcggactcttcaatttgcttcaggagttgttcttctggaacatagattctttcaagagttttaccaatctttccctcccagagagtaacaagctcattaaacgacaaggtattagctggtggtctaatgtagagaattttgttcaaggttcttggatcatccacagaattgattggataagttccaatatcctcttccttgttaaaaacagctttggg

SEQ ID NO: 40970 - DNA, 557 bp, Glycine max
  unsure (1)..(557): unsure at all n locations
  Clone ID: jC-gmro02910002g12d1
gatggaaagataattctaattaaattcttattaaaaaaaatactacaccataaaagtaatgaaaagatattgtaagagaatataaaattattcaaaataaaataacaccctagaacaacccaatctatattgactccttgtttttagccaaaacagaagtccgaaacatttatatttaaatttactctttggcacatttggcagcttaaagagctttgatgtatgttattacgatggtattagttggtggcaaaattttggcaacactccgaagaatatatttcctcttctcacatatcatcgcaattgccaattgcattaatcccataactctcattaacccgatgatgcttgctccatgtctaatgtggcttttggcatgtgctccctgttctttccccacaatacgctgtacagtcctagaatcaatacgaacccttctagaagacttcccaaactgattatctcacccaacacagctgcagaggcaaagatcgtaataatgagagccaatggagtngacatggctagaaacacgggtcctttcttttctatga

SEQ ID NO: 40971 - DNA, 320 bp, Glycine max
  Clone ID: jC-gmro02910002h09d1
ctggagaaattggtttcatttttatgtaagcaagctttacaattagcaattttcgtattctatttaactatttttggaacccgaagataagaaccaattaaggaaaaaatttatatttcaacgaataagtccatcatttatggtcatcccaaaaccattctacgtcagtatttcgggccacctaacttacgcgccgatcaccgcctacattaaaatccagaaacgtcacttttacacaccgccacgcgccaacaacccaagtttttccggtttcaacaagggccacgtaagcacccgagttaccgactaactgagtctcc

SEQ ID NO: 40972 - DNA, 337 bp, Glycine max
  Clone ID: jC-gmro02910002h10d1
aattcaaacgatagatagagggctgattattgaacatgataacataattatacaatttactctagcaaatatagacctgcagtttctgctttgtgcagagaagctgttaaatagaaggacataataagaaataaacgatgcataccacacggtttgcgcaagttctaatgcgtcttcaaatacatgagatttgaatagattaattatgcataaattaatagtagtagtagtagtaaatcattagcagaagtcataggaacatcttttacgtgggaatgctgtcttggactcaactagttactactttcattatcgaggcattattccttcaattcat

SEQ ID NO: 40973 - DNA, 481 bp, Glycine max
  Clone ID: jC-gmro02910003h06a1
taagctcggatattcggctcgaggcacaatttctctttctctctgtttttgtgtgtccaatatggctcctaggtctactcacaacaatgggttctatgtgcttatgctagttgggatagtggttagcgctatggttgctatttgtgctgctagcttatacctagactttgatccaacatgggttggtgaccgtgctaagatattcaatggtggccagcttctatcactttccctagacaaagtctccggctctggcttcaaatcatagaaataatacctatttgggaagatagatatgcagctcaagctcattgccggcaactctgatggcacagtcactgcttactacgtgcgacaatcccttgttgagggcgtagagacccagaatcgatgccgctgtagcctcagtgaagaaagacagcgggagcgacattccttgtgtgggctcactgtggttgggcagaaacgtctgtgacagaat

SEQ ID NO: 40974 - DNA, 532 bp, Glycine max
  Clone ID: jC-gmro02910004a01d1
aaaaaactcaaacacaacggatactattaaaactccaaagccaaagacctcacattaagtttagacaaacaattcataaagctcaagacttcacagatatagtagtctaaacacactggaaggtataatgcgtcaaccctttatttagtaggtaattatgggatgattttgattcacacagcaagcactggcattttgattactcatcatcataactcttgtactggtgatgcttgtggtgatgcttcttcctcccatcatcatcatctgagtcatctccatatttcttgcgtccatagccttcctcatcatcatcatccttcctctgataggagggcttgcggtacccctcctcctcctcctcctcctgccgaggtggacgcccctcataaccatactcaacccctcctcctcctccctggctttcatagttgctcctcccatagctcggtttctcctcatactcactcctccctccatacccggatccatattcagattcttgcttccttccaccatacccggatccata

SEQ ID NO: 40975 - DNA, 499 bp, Glycine max
  Clone ID: jC-gmro02910004a03d1
ataagaccaaacaacctgttttgattattatattttattagattactacaagaaaaaaaatgaactttcccaaatatgggcgtatttaacaaaagatgcaaaaacaccagagggggaaaaaagatgcagagcacacatgaaatatatagcatacactcctaagtttttttacaacaaagtattgttctagtatacgacacaaaccgcaaagtcaaattctaaacaaaattagtatacatcatagtactccaaaaactagaaatcactgaaagttctttcgattagcttccgaaccactagtggatggcacggccactcctggcgctacaaaatgtgagataccttctgagatgttcttaactgctttgtcaaaattaacaaaacccatgaaccaaaaatcatgcccttccaccgttacaacctgaatgtacttttctgatgggttttccctcatggtcactgggttgaccactccaacctttcccaaaggcaccattac

SEQ ID NO: 40976 - DNA, 477 bp, Glycine max
  Clone ID: jC-gmro02910004a06d1
accaagaaccgtaatatatatactatttttcttttcagatgtacataagagtccaggtggtaatggtataaccaacgggtgactagttagtaaaaaaaaaaataatcttgatcaacaaacaaatttaaattaaatataagaataaatgacccatgacccaagcttcttgaatgcccttgagacggaaaaccaatgtcacccaaacccaaaaatgcccaaaaaagaaaaaaaaacttctatataattcatccccttaattagggacatctcacatttctcccaggtccaccatagtaaaagtaattcccccaaacattattaatccctccttgaatgtcatagcaattcgggtgatccgctagaacccgaagatttgacaatggtaccaagttgttatcccaatccacaacttgcatgttcctaaaatatgaagcttttccaaaaccttcacttgcaaaatgtccactacccatttgg

SEQ ID NO: 40977 - DNA, 535 bp, Glycine max
  unsure (1)..(535): unsure at all n locations
  Clone ID: jC-gmro02910004a07d1
atagtaaatagtagtttattgcattttcattaaccgacctaagagtagattactagttacaagacactttctggacattgcttaagcaggagtccaagcagaaatggcattcagaatacgccctttccaccccagccaaacccacttgccatcctcagccaccacaaaatctttttgatattccttcttcaccatttctttttcatcattcaccaatagaggatcaaatcggacttgcttgaacccagctctctggttcctaacctgccactgcttataggtctcaggtctctcaaccctctcagccccttcacacgctataacattgatggcatctcttccaaacaacccattctcaagcatcactctttccgggtcttcacgaggcacattagcttcaaacatatcaaacagtgatgagaagtggtagagtgcctccctaaaccgagtcaggaaaaagggtgcattgtaagtgccattgaccaccccatggatgaacatgtttggattgatcctncttatcaacttcaacacg

SEQ ID NO: 40978 - DNA, 443 bp, Glycine max
  Clone ID: jC-gmro02910004a09d1
aaaaactgaaactctccatcaaatcttgtttcccttacaaaaggacagcgaatcaaaacctgaaagatacacgcgtataatcagataaataatagcatcataaattctacaactcgtacatgggatatcacagcaaaatatctgagtttagagttggttgcattgcatcaaatcaaacagaacctagataaaataaaagtcgcaccacgatcagcaccttagacagtcacgatgcaagcacgatgaatggaatggaacatgcaatcataggttcaaaagacccacctgtatggcaaaagtgaaaggcagacaatatgtgcaacttgtcccagattggggcgcgagacaagagtgtttaacagagtcccattatgccttcacgttgacctttacacaacagagtatttgcccggttgagttccaccaggaagttgcaaagcctg

SEQ ID NO: 40979 - DNA, 377 bp, Glycine max
  Clone ID: jC-gmro02910004a11d1
ccgccctttttttttttttttttttttttttttttttttttttttttttttttttttttttttttttttttgttttttttttttttttttttttttttttttttttttttttttttaaaaggaaaaagggcccccaaccctttcaaaaaaaaccttcaaaaaaaacttcccaagggccccctaattttggccaaaaaaaaaaaaaaaacctttgggcccccaggggggggccccccaaattttttcccccccccaaaaaaatggggcccaaaagggccgggttcaaaaaacgaaaaaccccctggttttaaaaaaaaaacacctaaggggggggggcccgaaatcccccttggggaaaggggggaacaccccccccc

SEQ ID NO: 40980 - DNA, 517 bp, Glycine max
  Clone ID: jC-gmro02910004b01d1
aacaccgtgttaaagagggaaattgcattcttacttgattttaaaatgggcaaccataatcgtgcccatacaatttcatgtatgactgaatggcattatagattcaaatcaggaggaggcttgattatggagcttatatgaaagaatacaaaacaaatcaatcatcatgtttcatttttgaggggtaaaatcatcattttttttttattctttttttctccccgcacttcagcaatagaaatacatctcagatggcacaaattaacgcataatggcattattaggtcattgacaaatctgtatcaatgaataagatattcatcccaaactgcatgcaaagtcaggtcaagctggctcttctaagagaatctccgaacagctcattcccaggcaaagacgggagaaactgtcaatttagaatagatgaacgtatctggaaaccttcatcaccttcagaaagcagcgggaatcttgtcaagaaattgccacaggtttgttcccaggtgggagtttactt

SEQ ID NO: 40981 - DNA, 460 bp, Glycine max
  Clone ID: jC-gmro02910004b02d1
aaaacaacatagttcaatattgccattcagtttaggtacgtaacaggagcagcgaagcataaaagcaatgcatccaaattaaaaccacatcggtactggtacacatttgaacatcaaacacaacagaaaacagaccacaagaacaagaatctgaagtagattctagtagtcttcatccttttcctggccctcaccagactcagcacccacttttttataatccttctcaagggctgcaaggtcctcacgggcttcagaaaattcaccttttttcataccctcacccacgtaccagtggacaaaagcacgcttggcatacatgagatcaaacttgtgatcaatgcggccaaacacttcagccacactggtggagtttgaaattatgcaaactgccctctgcaccttggcaaggtcgcctccaggaacaacggtaggtggctggtagttaataccacacttg

SEQ ID NO: 40982 - DNA, 477 bp, Glycine max
  unsure (1)..(477): unsure at all n locations
  Clone ID: jC-gmro02910004b03d1
gaacataaaaaactacccccaaacaaagaaaactaacaagagatttaaaaatcaaatccaccgaaatctccaaaaccagcgtcgtaagaaccggcatcagaaatcatgtccccaattagaagtccacccaaggctcctccaagcaaccccgcacccaatcccattcccaaattgttcttccccggtctttgaactgctgcagcagcaggaggaggaggagcgtaaccgtacccgggttgtggcgcgtacccataagccgcttgtggcgcgtaaccgtatccatgttgtggagcgtatccgtatccgtgagcgggttgaggcggcggaggataggcatattgtggcggcggcggcggaggatacatggcgggatacgcggcagaagaagtggagcccaccgcgggagcaggataagccgtgacggtgtccaccttgtgagaaggcgaggtangtgcgggtgctgataccttggctggg

SEQ ID NO: 40983 - DNA, 519 bp, Glycine max
  unsure (1)..(519): unsure at all n locations
  Clone ID: jC-gmro02910004b04a1
ctcaggaccaaattttgaatgaaactagattgcaaaacttgcaacgtgaacttgtgaaggacttgcatgaggttaatacaccaagaatgttggcccgccttatttgggctattgcagagcacatagatatagaaggattggatccactcctagcagacgacccagatgatcctcttaatgtcattatatcaaatattcacaaggttcttttcaatgtcgattcaactgcagaaacaacaaatagagttcaagatgtacaggcagttctaatatctgctcaacggctgggatcacgccaccctagggctggtcagttacttaccaaagagcttgaagagtttaggaacaatcctttggctgattctgtcagcaagcatcaatgtcgtttgatattgcaaagaatcaaatatgctacaagtcatcaagacaataagtgggcaggggtaacagaagctagaggggattacccatttagccaccacangataactgttcagttttatgaagcatctgctgctc

SEQ ID NO: 40984 - DNA, 453 bp, Glycine max
  Clone ID: jC-gmro02910004b04d1
aacattcccaacaaatgctcaaaaataaaatagcagatcaatagccgcacggtacatgtacaaagcaattttttgaaaatgggggaaaggcaacacaaaaaatacactcaaacgttttttgggcaaattttggcttctacctaattcgtatatgtaaaaagagaaaatttttttacaaagaatacactcgtacattttttggaaagccctggaaaagaaaaacccaaagacccaaagaaaatagttaattaacttcagtggttcgatccttgcagaacatatgccactcctgtagtactgctgcttgaagagcttgatgttcagcttcctcagcagttagtttcgatagagttgatggcccctttggtttctcgccttcttcaccatctttcttttctttattattggcatattcctccccttcatcttcggcatcaaattttggagtcttgg

SEQ ID NO: 40985 - DNA, 545 bp, Glycine max
  Clone ID: jC-gmro02910004b05d1
aatccatatcatggatgacatgattttaaattaatataaataaaattttatatgtacaatcaatgagacaagaagttccaatctaacggctgatagaaagttattcaataacataaaagtgatggacttacatcgctataaattaattcctcaaaaataaggctcagaaaatacgcatggcacctgaggggaggaaagaatacaaaacaaatacttctaccaccgagagtgtacataaaacatgtacaataggaagatggatccacacatcaacccttcccattacgtttaagtccttcaagataagacttgtcagcattggttacgcgaagttgaaactgggcccattcacttctgcatctggctcggaccgaatcccttggcccttttcctttgtcagactctccctggttcccaagagaaggaattacttgatgaacaatccattgtgaatcaattacaccaattttttcatgtgctggctctacacatcttctgagagcaaagtccaatccccatccatgcactagatcgttctgaatcat

SEQ ID NO: 40986 - DNA, 517 bp, Glycine max
  Clone ID: jC-gmro02910004b06d1
aaataaacacaaagcctcattcacagcacgggggggtctttcaagaaaacaaagttacattcccttccctgttgcacaggtttgaccaaatacactgaattactaaaattgacataaaaggaacactaggaaaacaaaaagcaaaattccaaacgattattctgggaagagtcaaaccacaataatacttatcaacaagaaattcggttgttgtacccataataccgattcctactcgcactagtctcttcaaacaacaccaacttcgattgatcagtagctgtagttcgaaacatggaggctctctgaggcaccatcagcaagctgtgagttacccttgtaggttcccagagttgcctctgagttagccttggctcttaccaaaagggcttcctgagccttcttcacattctcttcttttccgccccatgccttaagggtgctctgttgaagtgcccttccaaaggagaaagagagtgaccatggcttcttcccattgacctggttaatggcgttg

SEQ ID NO: 40987 - DNA, 562 bp, Glycine max
  unsure (1)..(562): unsure at all n locations
  Clone ID: jC-gmro02910004b07d1
agaactatatacttccaagtttgaggaccaaagcaagtatgttcttctgcctctctcacatgaaaataaccatgggaaactgaaattcagaatgctatataatgtatattaaaaaaataaaatcgaggaccaaagcattcattacaaatgctgctacaacaaggtgaagtttctcacagaagtatatgcttccgttagatggtcagatttccctaaaacaacccttctcgcaattcatccaaggaagttttatcaatgctctccccactcttgatgaggcaaattttcctcatgtaagttgtaacatgtcataacaccgaaagtaaaaatgagaattcatccgagggagtttcatgacttttatcaatgctctccccactcttgatgaggtgaactctcccgtcgcggcgaacacatatctctggaatgcttttaacttcaccgttgatgctatcattataaactctaatctcaatgtcaccctcaacataaactgaagagtttttaaagagtttctgtactgcataggcccncagtatatcattatgcacagcaatcctat

SEQ ID NO: 40988 - DNA, 415 bp, Glycine max
  Clone ID: jC-gmro02910004b12d1
aaccaacaaaccaataaattttgtagggggggctggttcaacaacactatgcacaatccgctgtgcaaacccaagggtgccaggattccctgtaatgccctaacccttgttatattaaaccttttaccgatcttgggcgggcagattcacttgcacgaatattctcggtggggtgatgccctccccttttggagagtgcaaccgaacaccacgctggaacgactgaatgttgatgattgccattcatatgccagggaaaatcattaactttggtgttgaagatgaaactggttaacagctgtcactgatgtcctattgacgaggtagagccatgtgctccaagagttgtcgggtgtggaatgacaaatagccctccattcttctttgcgtattttatcacccctgtgcgcatcag

SEQ ID NO: 40989 - DNA, 556 bp, Glycine max
  Clone ID: jC-gmro02910004c01d1
cactcaaactagaacatgcatcaaaactcatagaatgcttacaagaatatttacatatcgtctaccaataagatatatttgatcacattgcaaccatatatcaatctttatttttcagcagcaaggttgctttgtatacataaacataaagcatagtagtacaagggactttgtttgacacaaaccttaattaattgatcaattatcttagtacacactttaaaatgttcattattaattataattatatgatgagttaataatatattgtggttagggtatgggataaacgaccacttttcctgtggctcttgaagtttctaagtaggaaatggcttcaataacctgagaaaatggcactggagtcttggcatcgagtataggcttcaacttaccactctcaaagtaaggtcttaaattctctaagatagatccctttgaggtgagcacaaaaaacatagctggtggatgtccaggtggtactattgtcacaactttcccatcttccttaacggccttaaatgctctatcaccttgccctactacatcatacact

SEQ ID NO: 40990 - DNA, 531 bp, Glycine max
  Clone ID: jC-gmro02910004c03d1
gatataaattatctttgtattatgggttcatgctgccttggaatgacaaacgtattttttctatctagaaaccaaacacaacctttgagcagctatttcttctctccattgccacatttgcacatctaggtttactttccttgcaaagtgtttcggttcatggcttctctcttcattaaagtgaaaactgttataaaatgaaaaatccttattgctatgtaaggtttgagtgcatattgccgtgcctcatgccttggctgaatagtttgacagcaaagagtactttttaacagaagtgattcgaaactatgacaaccaagacacatcatcctgtcctgctacgtcgtccaaccaagtatgatgtaagtgcatccaggtatactcatctggtacatcaacctttgcattcatcagagcctttgttgaacaaccccgtgactcattaccagataactcccacttgtcaaatttgaccagccacgaacccaaactaacctctgctaaagatatacaatcaacccacactcgaaa

SEQ ID NO: 40991 - DNA, 500 bp, Glycine max
  Clone ID: jC-gmro02910004c05d1
agaaaaattaatttgatgtttatttagttataagaagatgtggcattgtaaatatagttggatctaaaattagtaggatacaggggaaaagcaaatttaaaaacagacaattattttgcactatctaatgttgaaataaataaagaaatgcttatttgattgaaaatacattaatttgtaatgtataataataataataatgatatggggggtataggtacaaattttgctaacattttgtacacaaatactttctcgcaaaaaaacggtgaaggtgattgattgctctaatcaccgttcaaaaagatcaccattgaaatcaagcctcgaagtccaccatcaatttgttcaacttcttgttgttaattctctgttcgataaaactctttccgtagtcatcactttgctgcaaggaggaagaggcaccaggcgtcaacttgcgggcgagctgaacggcgtcgtcgtgggtgttgataatgtgattgaagcacaaataacga

SEQ ID NO: 40992 - DNA, 475 bp, Glycine max
  Clone ID: jC-gmro02910004c06d1
gacacattggtaacacctgttatttatttctttttggatcacaacattttcaccattcataatatttatattctctcttttttcactctctcacaaggggtttaatgtcatttggagcgtcaatcacataacagggaatgggttaagccttggaacagggacacaaattatggggggagccctcggaagagtgatgccagactttttttccatgtccaccttgttattgccattatcaaacttccactgaaaacactgaatcataatagccagattcacatgcccaatctgcaatgccagaaaagtaccagggcatgatcttcttccactcccgaatggaataaaatgataatgttgtcccctaacatccaattgactttgtccattttcaaaaaacctctccggcctaaactcaaatgggttctcccaatgattggggtcccttccaatagcccaaacattgacaaataatcgg

SEQ ID NO: 40993 - DNA, 588 bp, Glycine max
  unsure (1)..(588): unsure at all n locations
  Clone ID: jC-gmro02910004c07d1
gctaaaaaactgttttactactataatatttatgtctgtgcattctacaaatactactaccgccaagtatggatgacaaaattacatcgatcatgtttgaacatattaacgcaatctttgcccatatgccatgtaattgtttttctctttcaaaaaaacaatcatccaccggttctcaattagaacacagaacagctccctactttcatcaaactaccacctattgtcaaaaaataatccaaaagaatcaaaacggaactgcgtatggcaacgcatatacttcgacctcaggcaagtattgtgcacgaggccacatagaatttgaaagctgaaagacatcagaatcacacttctgtttcttcgagacgggccttgactctttcggttcagaactaaataaccaatcatcatataccgagtccaatccatcatacgttagtggtggaatctgtaacaaagattcgtacaaagattcaactttttgacttccaggaaccaaattctgcaacgctttgcaatgtttagaatcagagtttccaagaatccgttnggctctgtaatctcgagacttttcaactgatgatcact

SEQ ID NO: 40994 - DNA, 525 bp, Glycine max
  Clone ID: jC-gmro02910004c09d1
ctgtcagaatatgttgattcacacaaaaattagttgtacagagcatggatgggaactacacaacccctatgatacatggacccccaagaaagatttctgatttatatatctcaccatcacaggaaaaaaaaaaaaacccttgtcctcttgatttaaaaatatataaattgaaaaaaaaaaaacaataacctagggacaatgagtaaaaaaaatatgtaaaaaataatgagaaaaatagccagcactgacattccatgacacggacatccatccatgaccttgattttgtaccctagggctcaatttacaacaggtgggtaggaacccatactgcaacttctagcttttgtcaattgaaccaacctagcagtggctaccaactttgcttgcttctcgaacttgtatcgtctacaggccagatgattgagtgatgagaaccgggacaaataatagcttgatccttgaagctttctgcgggtaagctcgaataccctgaaaacgcatcatgctattacgtaacaccga

SEQ ID NO: 40995 - DNA, 503 bp, Glycine max
  Clone ID: jC-gmro02910004d01d1
gaaagaacacaacaaaattataaatttacaacttagaagttacaaatttacaacaatatcacaaacaacctcttaataagcttcatttacaaattatgccgctctaaagaaagccaaatcctattcatcgatagcaatctaaatgtatgattgaaattgcaatcatatatatctctaaaatcagataagaactaccagcgaataaagctcattgaatcaataattgtatgtacctaaatgatctactacgccggataatgaaaagaaaaatacaacctagaaaatatgaaggagttgtgattttcattctagcatccacaaaataaaggacattatattccctaggacttgctgagcattcggtttttaattttaattcgaatttttggtgcaccagatgtgccttcagatggctccgatttggtatctatcttttttatttctactttagaattatatccactgggttcaacagatttaacctgtctagcaacgtccactac

SEQ ID NO: 40996 - DNA, 506 bp, Glycine max
  Clone ID: jC-gmro02910004d03d1
aatataagaaccagaatttgcactaaaatccaacaaacaaaatttccacattgtctgcataattatgatgacaaccttaacccgcaaaacaaaaaaaccaaagataaggatatttagttctgatgagcataaaaaacaaaattctaatacgaaaaaataaatcatgaagtttactgtgaaacacccaaccacttagaaaagttgtcgaattctgtataatcagaatctgacaccatagtgtgataccatgctttcccagcagccttgatggcagacgcttcctccttagagacagtcttcctcttcttgtcgagcttctccttcttgaccttaacccgctgtgcctcagcgagaagggccatcctcttagcagtcttggcataaggattcagcttcagcatcgagttgagattcttaagagggttcttcttgagagtggccctcttcacatccttcttaatgggcctcacaacagattgcacctcatcagaattaataatcctgga

SEQ ID NO: 40997 - DNA, 525 bp, Glycine max
  unsure (1)..(525): unsure at all n locations
  Clone ID: jC-gmro02910004d04d1
aaccatcaaactaaaccatatcgatttcagtaaaattaaatatccaacaaaaccacatccacttcaataaagagaaattcaacattggctactatgccttgtggaaggctgagagatattgtcttacaatttaacaaaattaatataccataactgaaattgattccatctcaaaaacctaacaaccgaaaatgtcaaatcattgacaaagaaaagtctggttaacaaaccattcaatctcccttcttcctaaatgagcaaccttcggttaacctcgcccgtccccctgttggttggcacaaaacagtctggcagtttccgcacaccacaacagtttgagagtggctaaacacagttgttatgttgaagcatccctggcacttaacatccatgaagaaagagtttggtgactgaacaagacgcttgagtttgtgctttctcttctccaactcagctggaggattcagcaaatcaatatcattctgaagaaccatngtgagaaagaagcgctgaaaacctcaaaaa

SEQ ID NO: 40998 - DNA, 533 bp, Glycine max
  Clone ID: jC-gmro02910004d05d1
gttccaatataaccccttcttttgaatgtatctatgaacccaatccttgcaaacaggcaagttagaattacatgtatatggtacaaaaggctttgtactttcttgtagctgaaggtataattaatcattgcatatttgagcattggatataatactaaactctggatatcatgtaaaatgaaaaaaaaaatcaatagatttgtttgaacataactccatgacgaaaatcaaagctaaatggacaaatatctcacaccagattctagtgtttgggatttaattgctagtcttgtgtccctaccacctgctactgtccggggttccccaaaagccgctcaactgctgcatgtacgttccctgatgtagcaataagagcccttatgttctcttgcgtgtcaaagaaccccatctcttgaagctgagaaagttgggtggcatacaattgctccggtggctcatttgatctgttaggaacagccaggctaccagcttcaagtccaccaaacatgcttgataacatctccagccccatg

SEQ ID NO: 40999 - DNA, 538 bp, Glycine max
  Clone ID: jC-gmro02910004d06d1
ggtggttgttgttgttacaaaccccaagcaagtttgaaaagtggtacacaataatgaaataatatatgaggcatctcagatggccacactatgcaaaacaacagtttcaatggtaagtccaggtccaaaaccgaacaacacaccccattcaagtccttcacctgtggttttatgtccattttcagcagatttcctcctcatctcatccaagatgaaaagaacacaagcacttgacatgttcccatattcactaagcacatctctagtggccttcatcttctcaggtttgagacccaacttttgctcaacttggtccaaaatcgcaggcccaccagggtgtgcaatccaaaagatggagttgtaatcagagatgttcaatgggttgaaagcctcaaaaagtgccttatcaatgttctttgagacaatcccgggaacatccttgaggaggtgaaatgtgagtccaacttcacgaaggtgtccatcaatagcaccttcactgtctggagcaattgtttgtgcagtccaaacaagctcatac

SEQ ID NO: 41000 - DNA, 521 bp, Glycine max
  Clone ID: jC-gmro02910004d07d1
attattacttctcaacacaagaggcttcttagataacaagttataactaatggactcaacaactaatcacactgctcaataattttaaatttatgttttcaccatccaatgttattattcaagaagaggaaaagatccaaatccaaaaaaaaactacaggtccacatcttgcagatagcctccattatattctcaaacaggtatcagaaaacactgaaggcacatccctcacaccatcttggaatgttggggtagatcgaactaactagacagggtatttatatagctgaagaaccttctgccaagctggtctgttactaatatcatcccaccaagcactcacatgcttcctgtctctgaccaaatttcctctcccggtttggttcaccaaatagtgaccaaatgggaggtggctaagatcagcaaggctgaagaagtcaccagccaagtacttgctctttgacagcctctcctcataaacatccagcaccttctcaatctttttatcactttcttctatc

SEQ ID NO: 41001 - DNA, 460 bp, Glycine max
  Clone ID: jC-gmro02910004d10d1
aaaaagggtttcatttttatgtaagcaagcattacaattagcaattttcgtattctatttaactatttttggaacccgaagataagaaacaaataaagaaaaaatttttttatcaacgaataagtccatcatttatgttcatcccaaaaccattctacgtgagtattttgggccacctaactaacgcgccgttcaccgcctacattaaaatccagaaacgtcactattacacaccggcacgcgccaacaacccaagtttttccgtttccaacaagtgccacgtgagcacccgagtcaccgactcactgagtttcctttcgctcacctcgctccgggggggagctaccatcgccgccgccgaacgacgacggggacacgttccccttcttttccctgccgagcatcctcgtaaacgacagcatgcgactcatcggcgaccgaaacgaggaggacgagtcgc

SEQ ID NO: 41002 - DNA, 353 bp, Glycine max
  Clone ID: jC-gmro02910004d12d1
ggaaaaccccctattaaaagcctatttgtttttgcacaaaaaggggaaaattcccaaaaaaaaagggttggggggaacccccaaaaatacaacctttttttgggaaaaccgggggggggaaaaaaaggggggggggggggggggaaaaaaaaattgcttccagaggggggtaaaacccccgaattttcccccccccggttttgaaccccccccttatggggaaaatttttggtggggggtttttaaaaaaaagccgaaccaaaggggtggggaggagtgttttttctttaccaatcacttgtgaaaggggggggggaagaattttgctcccgccccccttttgtggggggggg

SEQ ID NO: 41003 - DNA, 525 bp, Glycine max
  Clone ID: jC-gmro02910004e02d1
gggattcgtcggcattgctgtttcggcgtggctaaatttcatttaatgttacggcagtgaggagagcaggggtacatcagcaaatgattaatgctgaatctcgaatgggttatgtagtccagaactcaacttagaaaatttggcatctgtagaaaaaacaatatcatggcctatctctagaaatttatactggggaggaaacatttttaactaatgatccattagcatgatcattcaacataatcctactagttctgcctaagaatatacaaaaattagacccacatatacagggagcaggacctaggactttagccagatccacattaaaaagacaagagatgaccatcttatggatgcaagtcatactaactgtagaactcagtctctttctggagcatcgccagatgctcttcttgcactgaggtttccggcatatgaccaaaccctctcaaactcagatgtggccaacttttcagtcttcgaatctgcaccctcctttggagcattccttttcacatcatg

SEQ ID NO: 41004 - DNA, 529 bp, Glycine max
  Clone ID: jC-gmro02910004e04d1
aacattacaaacaataaaattgagttaacaagaataaaaggtatacacgattgtgcgtctaagcatttaccattttatgtccaagctgacctgatattgatgagacatattggtgaatcgaaatctaaacatctaagctgatacaattacagatgaaaagaactacactagtataatacaatttgttgatcgtttatctttgagcctgatcagcagtgtggttgcttgttgtagatgatgatcctgttctaccattcaatattccattgtgcgttggtgggcaggttccccacttaccctctgactcggtcggttctatcactttgacagatccatccgtcaacccaaccgcaaactggttgggttctagaggatgagcagcaaccacaagaggatacacaccttgacttccacttaaagctgccggtgacaagcatattgatggagcaatacgacatctgagcctgaagctatcagcatcaaaaacaccaatgttggcatcacataatgtagcatatattaactgact

SEQ ID NO: 41005 - DNA, 506 bp, Glycine max
  Clone ID: jC-gmro02910004e05d1
gaaattaaactgtacgtttatctaattaaccaagtatatatagctttatgtatggaattaagcattaattgtgtactatataataattttgtacgtagctagctaaaagtgaaaaaaaaaagactaatcttaatttgttgttgattatactcaccattttaatctcaattcctcaaatcaagaattaatatatataatctatcctgccaagtcatgcagaagctgtgctcccatcaaattcctgtaaggcaggttttgtccttcaccgtccaaaagagagtactgatgaactggttgacaatcttcaatttggtcccttggatagtacagtgaactctgtgttgctggcgggaacgctagactcaccccatgttgctgtaaccctagcgtcaaagacaccccactctggttgttgttcccattctgatcactacttccgtaagaaaccatgcccgaggagtggtgtgtgtatgatgaaaaatcaagctccactgacccaaagcact

SEQ ID NO: 41006 - DNA, 522 bp, Glycine max
  unsure (1)..(522): unsure at all n locations
  Clone ID: jC-gmro02910004e07d1
attaagaaataaatttcttagatgatcaatgatacaaaatgtaaataaaagctatttttacaactatgaatacagtcaatacaccaaaaatgaaaagcatactttccctaaccaattatttcagtaccctaccctcccccaacaatatctttggaattttttttatcaagcaaaatatgatgacgaggaggatgtatccgccagaatctcaagttgctcttcagtaaataattctttctgaacattccatgtatcagcatgggtccgccggaactctgcaactgctttagtaactgtagatttcacgggtgatggctccccactgaagcgagcaagtagtgtaacatgatcaggcaaccaactgggcatgtcatatggggctgataatacagaagctaccaaagctagtacagcaccatgaacagatgctattgataatccagaacttgcatttctcgactttcttctcttctgtacaatatttgcctncttataagctctatcatggaaatctctagcaag

SEQ ID NO: 41007 - DNA, 498 bp, Glycine max
  Clone ID: jC-gmro02910004e09d1
ggaggaaaatagagtaagattgagttcaatattgagcaacggtgtcaataccaatgtattgagcttttaatattatcttagtaagcaataacactagcatactaccagataaaaagatgatagtaaaccctaccaattatgttatttggtgcgtaaagagcatagtatctcctagaaaagatggagacagtgagagaggccattcaaattttcacaggactcatttttttatgtaacttaaagacaaattgaacatggtctttcttcgtctttatatgtgattttttctcaaaaaagcacggttcttcttgaaacttgtccaagctccttaaactgtatagtgctgctgaatcgtgtcaatgtcaagccccttcagcttcaccactgactcgacatgtccctttagagtatgaagctccctaagccttgcaacttcagcacgtctcttggcttgttctgcaatctctgaaagctccctgtagctatttttgtcattga

SEQ ID NO: 41008 - DNA, 525 bp, Glycine max
  Clone ID: jC-gmro02910004e10d1
gaaagtgagaacacactttattatatgaaaaccgagagcatccaaatacaatagtgcagaagttcaggcaataattacgcatagacatgcataaagtctatgttattcagaagtacaacatagataaggaaaccacaaactctttttaattagatagagatactgttgggaattcctttgaaagtcaacccttcctcacttgaacgatggagcaaagtgtatggcagctgaactggcccagtccggtttctcagacttggatcactgttccttgcattgatttttccttcaattccagtcagtttgcttccaaaccttttgaaagcttctaatgccttcttatcagtagtccaatttggagtctccctctctccaaggtatatctcatcagaagcatgccttgacaatatctctatcactgaaagatcaataagggtctcaaacttgggtgtgattgttctcagataagccttttgaggattcttcaccatctcatcatactctggggttccttcagctgggata

SEQ ID NO: 41009 - DNA, 505 bp, Glycine max
  Clone ID: jC-gmro02910004e11d1
gaggaaaagaaagaaagcacatgtattatttcaattggtaatatgaaaaaaatatgatcaatcagggtaacaaaaacatgaaatcaaagacaaagaaatttcaaacttttgaattgaaacaccatcacgataaaccctacccctcccagaatggaagacacttatttcctttttctccatttctgccctttgtgccgaactttgagtgacacaattaagtagagagcgttatgattgaacctaatccttgtacttcatttcagataccaggaagccaggcatgtcaaatgtggcagagaacttctcaacatcagctttgagatcttcaatggccttgttgttgacgaggcccttgttgaaatccttgagaagtttgccatgctccttctggatctccagtgtgagagtcacagcacggtgaaggaactcaccaatctgctcaaagtccttttcaaccaaacccctagaagtcatggcaggggccccaattcgcactccaccgggg

SEQ ID NO: 41010 - DNA, 504 bp, Glycine max
  Clone ID: jC-gmro02910004f02d1
aacccaaaaatttatttttttcccttttcagaatcgtctcatgtgtgttaagatgacaatacaagtggataagatgacaacaaaaaatgagtatgaataatgaactggaaatagggaaacaatgaataatgacactgctggctctcgtataaacgtgatctgacatacatatatctacttagaccaagcaactgcatctatttcagcttgtgcactccggtataactctagtctctttgcgagcgcactacgttgtttcataattgcaggatcctcattcaataacgatgacagacgcttggtctccattttgcctagcttggtaaaaaagtgatcaagtagacttcgttttgcctcccgcacttgacaatagacgatggacttgggaattgaattccgtagtgtagcacagaccatattgacatatgacaaaattgtggttccaattcgccttagatatgaatcattatatctatcaaaaattgaatgtgtgggattgccacc

SEQ ID NO: 41011 - DNA, 540 bp, Glycine max
  Clone ID: jC-gmro02910004f03d1
gaaataaattctctcatgacatcatgccatgtattaattgtaagcttgtcacattatcttaaaggttgtgacttctgttctttcacaggtaacaacttgctcaacaatctatatactcatttcctaatccatattggtaggacttactcaaagtggagattcctgaagcactatgagcacatgaactcctacatactaataaataaaaaatttacacgtaatcctaaaactgatatatatataactttgctgagactatctcctttggaaattcaagaatttgatgccataggcaaaaacgaacatgaagaggataacccagcctacatgagcagcagcaacaacgggaaggaaatcatagtcaaaacccaagttttgtttaaggaattccttcaatcccatgcttccagcacctggtatctccaattctgcatttttgtcacccagttgtgaggtaataaggccatatagtgtccaagaaacaggagaagcccaataataccatctccaccacacaggaaattgcgtcctatgaatgat

SEQ ID NO: 41012 - DNA, 528 bp, Glycine max
  Clone ID: jC-gmro02910004f04d1
gataataggtacatttgtattttattgctgctgttacaccttgacatttagctatatgcaacatcataatctatttcaaagtttcactactatttgttagttaatctacatgccttgttgagataacttacaacacgttaaaaatctatgctctggtaaatcgtaattgaaagttaaacaactagaaacgaacacaagcatagctggaatgtcctatagtagttgaaatttagataataaaatggtaagctttcctcacacttgttcttcgtttctagtgatctccattttcaaaattgtgggcgctgatgacttcctgagtgcaattgcaattttccttcttagcattggcctcatttactatttgcttcgccagaaatatgggctcttgagtatttgggcttcgtgggctacaatctttgcttttgccccacaccacagcatataggcccaaacaaatgataacggcaccgatcacccttgcaaggaacactcgttcggccagaatgaagtagctcatgacagcca

SEQ ID NO: 41013 - DNA, 278 bp, Glycine max
  Clone ID: jC-gmro02910004f05d1
aacattcattatatcaaactaatttccaattttcaaattccgtcttattcattttcctttaaaatgagccttaacagccataagacaaaatgggtataatgattaatgaactaaaaaaataatagacttcagcggtgctgaagttctttttggatacatatgtaatgctatctaaagacatccccaaattattggatctccattaaaatcatatcataaagtgtagacataaggactaagatttgtcctcatttggaagaaatcattgatttcaatct

SEQ ID NO: 41014 - DNA, 295 bp, Glycine max
  Clone ID: jC-gmro02910004f06d1
gggtggagccacaactcacaatgcttcaacacaaattgaggcaggttattttctttgtaagccataccttgcgcaacaaaagataaactgaataatacccatacataaaaccgttttttataaccataaacaattcataaagttttttttttaaactaaaaattgcccctatctttacaggaaaggggcttactatccccaagcagatttaaattattggccacatacaaagttttttttttgagaaatacttaaggggacctcctgcctcttggcgagcggcggtgggttttct

SEQ ID NO: 41015 - DNA, 534 bp, Glycine max
  Clone ID: jC-gmro02910004f11d1
atatcaaaatttagttattggatacttctaatttttatgaatataatacagacgaccataacgaaaaataaatgcttaaaatcatgcatagacacttgcatgaactaggcaatggcatgtatttttaattaattagtcattgatttagagaaaatctaattcatcatttgttgagagaggatagaccacgagcttgcacccattgttcaccaccaaattttggagcctttttaccaattcagtacatggccacaagacctgcacttcccgcaagctagtcaaagaccatagttcttttggaagctccgtcaaggatttgcagcttctaacgtctaaacgtcgaatgcgtggcattgaacctttgtcaagtctccaattttttaccttgattgctatcatctcaaacacttggagctgaaggaaccctcccgtggcacagtggaggtcaaaacgagtatcatttgtctgcgatgacagtttcagaactggaggctgggaagctttcctagtatatgcatggcattggagttgaaa

SEQ ID NO: 41016 - DNA, 459 bp, Glycine max
  Clone ID: jC-gmro02910004f12d1
aacataaatttttgaatagaattttattacagacaaaatcgttctccaatgcatgaattatacaattcaaaacaaaattcgaccacttgtgtgtagaccttgcatcagtgtaaataaatggcttgacttccgactatgcaattaacattcctcaagctcagttctcaaatacacttagcaaaggaaagttgaaaagataagctgaaaacaggaaaaaatttcaattcaatcatcttacaaacagcaaaatttgtagtgaaatgctgcagtcttttgccaaacaaaacaagatatatagcaatgtgatagctgtagacgccaaatttcaggtcccccaactttctcagtatcataatcataataataactataatgatgaaaattttgaaaatgggccagactcatctcacttattatttctctactttgacatgtcaccagaagagcgaaaacaaatta

SEQ ID NO: 41017 - DNA, 472 bp, Glycine max
  unsure (1)..(472): unsure at all n locations
  Clone ID: jC-gmro02910004g01d1
agaaaaatgcaggagaaaatttattggaaaatcaccatggcttgctaagtttcaaagccaagtacattctgttgtaatggcaaatggaaattaaaaagacacacaagggggagctgttgtgatgtcaccagctattgaaccctaagaattgatccacaagcttagccacacagttggcaagtgtatcacctgcttcctgtgtggatgcctcagcatacacacgaacaacattttcagtgccagatgggcgcacaaagcatcgaccttgggggtccttaacaggttcttcatttatggcttcttgtagacccggagggctcacaaccacagtttctgcatttgttgtaacaacagccgttctgtcaacaactttgaccttgagctggttgctgggtaaatcatgataaagntcattccatttatttattgaccatcccatatgctggaatatgacttccaccaagagcaatcc

SEQ ID NO: 41018 - DNA, 555 bp, Glycine max
  Clone ID: jC-gmro02910004g02d1
atatatatgatagtaatatatatgattttcagtatacttatttatacacagaatctccatatccttccctccaaagaaataacaatgatggaaacatcatcatggtaacggcgcctatcaccctgtggaatttcgagcaactcgtgaaagtccaaaccagctttctttgcagcacgaaacaacacttcttcaaccaaatgctgagccgggtctccctcgggttgcaatgtgatgaaaagctcgacttcagccactgcctcttcgtttgacaagtactgatagagcccatcagagcatagaatcaaaaatttgtcctttgggcctaatctgtggtgttttagatatggtaggcagcttatgtaaggagagtttcctacgtagtctattctaaacatctccagaagtgcgttgttccactttggctgtttgagaaatccggcaccaaatgctcgagtaactttgagagaacccttcacacggtcatttacaacagcaaaaggatcatccgggtgctctttttaattctctggattcttcctcacactagtactatga

SEQ ID NO: 41019 - DNA, 502 bp, Glycine max
  Clone ID: jC-gmro02910004g05d1
aaacgcgttataagtttactagttttctagtcgaatcaactgggctgttttttttttttcttcactcagtgctttctttcctgtggtctatgaaattaagcaaataatgacatacaaattacaatgcccatgtgaagcgacaaagcgagacacagcgtaggcaagcaaagttaaacttgacttgaagctgtcaacagagtatgtacagatatagacaggagtggaaccaaattatttgataactccatgaaagcctccttgcttgtgttaaattgacagtagcatttgttgtgagccagttctacatactaattgctcctgttatcattcatctcgaatagccctcaataatcaaacttgcttgtgttgaaggtatagtatgtttacaaccaactgaattttgcaagagtacagtaacgggcaaaaccccctttgctatatttactggttggtcctgagggcatagataaaccatatttcctacttccaagtagatgcagag

SEQ ID NO: 41020 - DNA, 466 bp, Glycine max
  Clone ID: jC-gmro02910004g06d1
aagaaagaaatttggtgggtctcatgtggacccataccttttacaccttattttaataataaaaaattctcttcaatttacatctctatttttattctctgaaccaaagacaacattaggcatgttcccggcaaagtggaatcacatactagtacactagttacaagctagcagacaaaaatgatgatgcttctagctgtcttaagctttcggccacatgagcaataactcctacaccagcattgtgaaaccattcatttttcacctgaaaatcagacaagcactcgtgttaaaaactctgtatcagtgataccatcatcatccgacagattaaatggatgcagtacatgaatgttgttatgagcaaagaaaggccagaatgctgagtgaaagctgacatcaacttttttccatcccaactgctgtaatcctcgaatcatctcatcttctacaatttcatgatatt

SEQ ID NO: 41021 - DNA, 463 bp, Glycine max
  Clone ID: jC-gmro02910004g12d1
ccaacaaactattttcttccttgtattccataaatcaacaattacaggaattccctaattaaatgacgaattcgtaaatataaatgctaacaaaagagatagaaacattaaacttaaaagactaggacacataattgagagaggaagaaaatgcttctatatcctaaatacttacaaagcattacacagatatacagaagcctattccttaaaactaataattagtatcacaaagtaattaatctaaaaagtacgaagactaatcccagtagtaacatgtatgtacggcaatctgaagaaagttctaaacaataagagacttgcattcgtgacacgaccttcccgctgaaaaaataagagaagatcgagcactacaatgccctaatcaccaacaacctccgttcaaatccttgttcattcacaaaccgccacaggattagggaaaatcaagccgtaacatttt

SEQ ID NO: 41022 - DNA, 574 bp, Glycine max
  unsure (1)..(574): unsure at all n locations
  Clone ID: jC-gmro02910004h02d1
gtgaaagatttttatctatcttcaaatggtaatcacagtaatggctgattagcatccttggctcaacaagttaatacgttctgcaggtattcagttaaagacaagtaagaaacaagttccgggaaacaagttgtgggaaacaagtctgatatccttctaacaaattaatcaacctcctcgcatatgtgcaccaagctcgccaaactgatcatcagcctccactgtatcttcagatagcctcacagcatccagcttctgcttgagaatttctatggcatttagaaccaattgagaagctttaaccgctccagtagactccacagtgaatatgaagctatcctgcctcgcaatgatttctacaagcccaggcttgcccatagcttctgctttcttaagcacctcatcatcatatgtgtatgcctcagcatcaaccaccatcacctgtngtgtcactggatcaatttcaaagacacgggttggactactgtcaacccattctcttttctctttcagagtcaagggttccatcaaatacttatttatatgaatcttcggttcatacatgaaagtgaca

SEQ ID NO: 41023 - DNA, 487 bp, Glycine max
  Clone ID: jC-gmro02910004h03d1
gaatgacaattattatttaaaaaaagaagaaaagatagaatatccttcaggtaacttcgcagccaaccaatcctccattccttttactacacttctttccttgttgtcttcccaaaaaatttcaccaaaagaatatgtaccttacgaaattaaatacctatctcaacaagatatgtaaagggtcaattttgactagactacaagctgatccagctgcatttgctcaagccaggctcctaaaacagaatggtcaatggattcaatttgggaatttgaattcggtccatcagcagatgcagtaggcataggagatgcaaacttctctttgatcatctcaggtggggactccttcaccagagattggacccaagagagatcaggctcttgcccattgttcttgcgctcaaacgaggatgatcttcgcatctgacgaccaagggagtctccatttactgaccaatcagctttcccaataggagaaccccac

SEQ ID NO: 41024 - DNA, 512 bp, Glycine max
  unsure (1)..(512): unsure at all n locations
  Clone ID: jC-gmro02910004h04d1
aacacaacgaagtttatgtaacgaccatatcatcctacattgtataatgaagcatgccaccggtcatttttcttctcagtcaggtggtgccacaattctcaaattcctagacagaagaacataaactgtaggcactttacaaacacaaggaatgcagttacaatttacatgcagtcaagatacatatagtttctccgtcgattgtactgaagaaggcttccataggtgcgatcccagacaccaacaaaaagtgattctgtgtcagggctaaaagatacaccacagatctccccaaaaaaatcgatctcctgctccttctcaaacccactctgtgcatcatatacatgcacaaagtcagctggctcggccattgccatgaaccgaccatcagatgtaaaccgtatagaacgtatagctccaaggttgcccttaagcacagtgacagactttgacaagttcctaacatcccaaacacggcatgttntgtcttggttcccagtagccaaaatgcg

SEQ ID NO: 41025 - DNA, 511 bp, Glycine max
  Clone ID: jC-gmro02910004h05d1
gacagtgtcacgtatattagtttaattatgcaataactgagacgtaatcagtggcaagatttcccctgtggcaccttgaaacaaccccaccccgccaatctacatagagaggagcttatcttgcaccatttttaggaccacacattcccttggatatcccacttgtatgtgtcaagcatacatacagaaattacatactacataaacaacatggtcttagcagggtgctgatcctatacggagatgattttaccagtaccaaatgataaagctcacaacatagatatttatacaaactccccttagtgcagcatcacatcacatccacaatcaggcatatctttgtatttaacggctggatggatatatagcagctacagttgagaccatggaatctacttcacacacattaagacctttgtagatcgtggaatatccattgtctccccaggtctcgccctatgaattcttaatgatccagtaaggtttgttcttaaaacgaatgggagca

SEQ ID NO: 41026 - DNA, 513 bp, Glycine max
  Clone ID: jC-gmro02910004h06d1
aatatgaactccacagaatcagattaacggggtgcctgaacatttttgtttgtaccttaatattacatccaaaagacagccactacattctgaaacatacaggaccacatagacaaatatcatctttgtaacacatacatggcagttgagaaagcttgttacaccttgaaagctaatatcacacatacagtacaaggaagaaagaataagaatggtaagtaattaatgaaaaatcataggaggtcccgtgctagagtcattggtttttcttttataatggtgagttcaccaccatttgatgtagttagcagatggtgattggaatcctcgtcttcactctcctctgaatctgagaggccatcagattccagttcttcgtcgtcagaaagtgcaagatgttcaggcagatgtctaacagcagcaacctgaaggctttctggcagaagacaattgcaaaaagaaccaacacgagccagccgatttatccatgcaggaataggctttccagttagc

SEQ ID NO: 41027 - DNA, 502 bp, Glycine max
  Clone ID: jC-gmro02910004h12d1
gaacagccagttaaacttgccaaagctttcatttattgaaaagcatagcaacacttattgagaccaaaaactgatacatttcttacaatttttaatatcagttcacttttaagaatgcccctatctctgtgcttttgcaacaaggtttaccggaaacaatgttcaccctcaaaaagaaaataggagagaagaaaataaacatagtttaacttacattaatacaaaacgatagattgcacccgcaaaaatatctgccacaatgcgaccaggagccgaatgctcgcaaggggggaacttggacttgtcatcaaagtgaattaactgccaactaaacactagccagaaggaagattttatccaaggccaattactggtttatgcacccccttcatcttcagagaagcgcttcttctggccgtaatatgggcaccaggggttcttgcaaatctgagtttacgggaaacagattacactgcgcatattgtgccatcaattggtccac

SEQ ID NO: 41028 - DNA, 571 bp, Glycine max
  Clone ID: jC-gmro02910005a04d1
gataaactagtagattaatcataggtagcatgcagaatgaggtttcaattgcggttttaagtcaacaaaagaacccataaaagcaagaaaacaagttgatgactggtactgatacaaaacgcacaatgataaaatgcgagacaacttattcatacaaaagcagcaggactacttatttcatataaagcttgctcttcacttcagttcttccaagaaatcaacgttgtcaaccaagacagttttccatccatctggatctaaaaacgaagtggtttttgtattaaggccaggaattggccctggttgccgagtaatcttccctccaacctcttttatgacttggttaactacctcagcactcttatatacatcatcagtaccaatggcaatctgtgcataagcatttcccttagagtattcagtcacaccatagttatatgtcaactccaacacagttgtctcgtgctcctctccatacccgagcatagctatagtgtacttgtactcaggcttatcaaccttccttaacaccttcatgcccaaagccttttcataaaacttaattgagcgc

SEQ ID NO: 41029 - DNA, 545 bp, Glycine max
  Clone ID: jC-gmro02910005a05d1
gaagcaaatgattcaaatttgatattcagtaacatgatttgaaatcttgacataatcagcaccagaacaaggggaaaaaaaatagcatttgagctttgaacctccttatctggttttcttctccagcaataataggatcatacttaccatttttcactcctcctaagttaaagatgaaaggtagaagatacatcaacaagcttcctaacaataacttgtttcaaaaagtgacaccaacatgtaacatattaatacaaacaaagatcaaatcatcaaatgacagaaggttgtcttaatcacaactcaagattaccctccaagtgttattctgagattgatttcaagctcttcttgttgctcaaagttcaggtccccatcaccgcacaattgcggataaagtgattaagctgaatgctgccacatccaatttgcctccacctcaatttctcatcatcaggatcagggcagcaagtgtacatagacaaggcatgcactatgtgtggcatagaaggtgcaccaataacaagcaactcatcaccaagaga

SEQ ID NO: 41030 - DNA, 477 bp, Glycine max
  Clone ID: jC-gmro02910005a06d1
gccataataataataatgaaaatgaaaacaaccaagttaaaaaaaaactgtatcagcagtcaagactgtatccaagaccatatataacataattgataatccttaaggacatcaaacagaaaaatcccctgaaaacgaggtctttgagttcacaaaaggataccctataataaaaacctatatatagtcctatactactgcattagctacaagataaaataaactccacataagctttaagcaggtttcttgctgtggactccatcaccaacatcacgatcacaattcttgtagctttatttacataaaaggggagataaagggtgttcagaagactcctgccatggaaggcaggtcgtcgaagctccaaaggttcatagggtttccggcggcgtcatgagttgcgtctccgccgagcaaagacgccaatgtagcatcagcccaggcttcatcaagaaaagaaggggtctcaaagaa

SEQ ID NO: 41031 - DNA, 510 bp, Glycine max
  Clone ID: jC-gmro02910005a07d1
agcaagaaactgagttattcttctatataatcatccaaatgtgttacccgtaataagatagggggaacaaaataatccacactcattggatattctactatataatcatccaaataaatacactgatttcctatcgctacaagggtaattgttaccccatccaaaacaacacgctaactagtaataagcaatcccaaataagtcaattaccgggtggtaacccaggcttctacagggaactaagctacattttcaaactgctgcatgatactcatctatagtttgtttcattgcatctaactgtgacataataaattccactttcttgcgacaaatctcattggcgattcttgaaccatagtcacatttctcaaatggacgatattcacaagcacttttgatttcatcccgcaatgcaacctgaatgtccttgattaattgcatgaactcaggcagtggttttggaccacatcctttctaggaccaacagggcttgcaagctcatccatg

SEQ ID NO: 41032 - DNA, 401 bp, Glycine max
  Clone ID: jC-gmro02910005a09d1
gacaattaatcatttcatatttcacacattcataacaaacgtaggtgggatattagagtactattattaatgggacacaattgagttcaacacaaaccgaacttattttcaagggacattattacagaacccattaaacatcaaagttcttcaaatgttttgggaacacatccaacattacacaacgagcttaaaaccccccacggagacggaggacaaggtgaagggttgattccttctggatgttgtagtcagcgagggtccttccatcctcgagctgcttgccagcaaaaatcagcctctgctggtccggtgggatgccttccttgtcctgaatcttggccttcacattgtcaatggtgtcagagctctccacctcgagggtaatagtcttacccgta

SEQ ID NO: 41033 - DNA, 569 bp, Glycine max
  unsure (1)..(569): unsure at all n locations
  Clone ID: jC-gmro02910005a10d1
aactacatatagaaaaagcaaatgcttttattcaagagaaacaactgtgcattacatttgatactgctctcaggactatcaagaacaaagagcatcatcatacagttgacgaaggtgactgcaaagggtgatgtcaagacagccaatttttcagcanaaaaaccagaaataaaactgataacttcccattgaacacaagaaacaaatgctttttactcatgagaaacaacgagcacttgttttccaacattgcgaccgctaaaaaggccaaccaatgctgaaggtccattctcaagcccctcagctatgtcttccacatacacaaccttcccctctctgatatttggcaggagaaactccaagaacttgggatataggtgaacgaaatccatgaagttaaagccttgcaaacgaatccgcttatatatgatctgtgccaaatttgttacaccttcatgttgagtaagattatactgtgagatcattccacagacgggtatgcgaccacggactctcatgttcaggagtacggcgtaagtgtcttgcccccacattctcaaagtaacatc

SEQ ID NO: 41034 - DNA, 530 bp, Glycine max
  Clone ID: jC-gmro02910005a11d1
ccaaaaaacaagagcataagaattatacatttcaaacaaatatcttggaaaatcttaaaatgcatttggaacacagtgacagcctggcctaaagcaaataattttatcgacaactcactattaaataattcatcatcaaaatggaactagagacaaaacaagaaaataaaacaagagaaaataccttacatacagctataagcttaatcagctaacatccctaagtctttttatcaatgtatccaatgatttccttttgggattctgcctcgccccacgactaccaaaggttccaaagagccgatcggaaggatccctcaacttttctgaaacaatcaccactttcttgtggtccaaagtattgtaactcctctccctgatcactggattcaagaagttctctggatgattgcttaacagcaaattaatcagttgctttgagccggcaagtgatgctctcagaacatcaacatccgcatcagagaaaagggaggcctgattatcagcaaatgattctaagagccggatgt

SEQ ID NO: 41035 - DNA, 287 bp, Glycine max
  Clone ID: jC-gmro02910005b01d1
gattagcttctttttattatggactataagcataattttccgtgttgtgaccgccaaagaacaagaagaacactgttaatcatccctcaaagaatctcccgcggttgaaaaaaaaaacaccgctccttacgaaaacggtgacgcccgaaagactgatacccgcgcacaaaaagctgaacgtggaaggagggggaacactacaggtatctttcttctacgaagaaaaaacagatgaatttttttttagatcccccggagaccgcaaagggaatgagccccttttcaaa

SEQ ID NO: 41036 - DNA, 480 bp, Glycine max
  Clone ID: jC-gmro02910005b02a1
atctcaagagacaacaccgacaacatcaaaatcattaagaaacattacagatacaaagtaatttgttgaatacaataggaaagtaaacacatacaatcaacttacacatgcacaacaatgacaaggaagaaaaagagttgaagaagtgtatatacacaattacacaccacaacactcactcaatataccaaatttaagattttttaacattaggttcgagtcctaattcctttctggttttcccaacaaacaaatcccctgacttgatcatgccaggaagccttccaagcacagtcatgaatgggaactgtgcaacagctattttccttccaagtgaaactatagatattggtggctgtgccttgtatgttcccaacttacgctctttgcctcctccctctatcaatagcttcaggttcttggcaaccacttgagcatgagcacttgcatacatcccttggttgatttcttgaacatctg

SEQ ID NO: 41037 - DNA, 391 bp, Glycine max
  Clone ID: jC-gmro02910005b02d1
gggggcccaaaaaaccaaacatcctttcattaaaacccgggggtgattaaaaattttgcccctgtgtccaattttacctttttccccgtcagggttgcccctttgattcgatttctttttgcccccttttacaaagttttgccttgcatctctgaatttcccccaaaccaaccaataacttttgggggaggaaggggatcttcccccctttcctccaaacaaaggcttttttcaacccttttaaaagaaccaaaagcccaaatgaaaaccagggtttaccagaccttttaggaatcctcgggggttgaaatcaaaggggggtcgggttccccgttccgagcttgggtttcaatttgggggggaacctcctgctggtgcgaaaatagcccgg

SEQ ID NO: 41038 - DNA, 497 bp, Glycine max
  Clone ID: jC-gmro02910005b03d1
acaatgcaaaatgttacttgctacaatggttataggtcttcatttccataacatcgatcgcttaatatttaaacacaatcaaccttgtagagtccatgatgcacctggactaattcttatgaggttcatgtaatgtaagtgctgccacctatttccggttggaaaaattattcccctccacgaaatgtttaagtatgtaatcttctgctactcgcattgcacatcatctcgtgattcacttttggaactgatgccgttgccatccaatcacacctttggtatctggtagcccacaaacaaccattttaaccttaaagcaaagctttcgcaattatacaaatccgtaattattattcctacattgaaacacatggattaattattatcaacaaggatatggtgtaataatcttcatggtgtgatataaagctggaagaccatcttgccctcaacaatctccatcttaattagaaatttccttgtggaaatcatatttc

SEQ ID NO: 41039 - DNA, 566 bp, Glycine max
  unsure (1)..(566): unsure at all n locations
  Clone ID: jC-gmro02910005b04d1
cgtgacaacagttgttttattcttacattaataataataagcaaagcaaaagctggtggctggtaaacaagaattagaaaaggaaagggtggaaggagatgcatttatttaaatagaagaaaagaaggctaaatcatagaggttatacggaaccttgcaatcctaaagtaactgatatcatgggatttagtttctccatggacagcaaggtccgtcaatatcctgccaataaccggagccatcttgaagccgtgaccagaaaagccggctccaagaaccacatccttcccaaagtccccacccaagaaatcaatgaggaaatcctcatctggcgtcatggagtagatgcaagactgtttgatgacgggctcagtggattcaaccatccccttgaacgtaaactccacccattctttgagtttttccatcatcaccgctgctccccacggcctcttatccgggtcgcacggctccnccccgtgcacaccaaccttaatcagccccggaaactccaacgttggcgtgccgtagacgtaaatatctttctggaagctcgcgaatgtcgg

SEQ ID NO: 41040 - DNA, 519 bp, Glycine max
  Clone ID: jC-gmro02910005b05d1
gttaacgaaaatgaaatcttaatattaaaatacaaggtattacacccacggcaagctacacccaccgggaaatgtttggccatacctgcggccaagacgtgcagatataagcaacggaaagataaaacgcttttgagctacaattttactattctagctgccatgcttgatttcattatcggtcacgggtgaagatatactagtatttgcaacctcctttaagcatcttcttaccattgaattaatataaaagaattttaatgtgaagttttctaatgataaaacaatgaatgtggaggtgcaaatgatattactcggcaaccaagatagagaagcatgggcagctgcacacgtacaatatttcaggattccccttatctccttcagttcccacacccttccctctccccaattattttcccgttggagtaccagtttaccatgggaaaatattgtaggggtgagtttctagtaacaaatcgtagatcaacttccattctgcctactactaatatacgc

SEQ ID NO: 41041 - DNA, 347 bp, Glycine max
  Clone ID: jC-gmro02910005b07d1
gcaaaattggaccctaaaattattttatccagagtaacaatttgcaaaggggggctagttttcaattttcaaaccaatggccaatttgaaaacaggcgtgcaattcatgaaagccaaaatttatttagcctaaacccaaaaaccttaacaaacattattttcctaattccttccaaattctaactaggccacttaattaacctcctaaattttggggccagcaccattaccaccagcagggggagcattattatcgacgttaccaccagtaccaggttcgccttgggacattttcgctataatgggattgcctttgccctcaagcttcttcattttggcttcaaatt

SEQ ID NO: 41042 - DNA, 597 bp, Glycine max
  unsure (1)..(597): unsure at all n locations
  Clone ID: jC-gmro02910005b08d1
tcgcgatctagaacacccaacaaattaacaacaaaacaacccatctttagtcagaaaccacaccaagaagtttccaacatgcaaaatctcaatttcctctacctaaccatcatttccctcactctcatccacttccactgcatcctagtccaagcacaaacctcaccctcagacattgcagcactcaaagccttcaaggcctcaatcaaaccctcctccatcactccctggtcatgcctcgcctcatggaacttcacaaccgacccatgctcactccctcgccgaacctccttcatctgcggcctcacctgcacccaagactccacaagaatcaaccaaatcactctcgacccagcagggtactcaggcacactcaccccactaatctctcaactcacacaactcaccacacttgacctcgctgataacaacttctttggcccaatcccctcttcaatctctntactctcaaacctccaaaccttaacccttcgatccaattccttctcgggcacaatccctccctccataaccaccctcaaatcactcctatctctcgacctcgcacacaattccctctctggtatctccaaactc

SEQ ID NO: 41043 - DNA, 463 bp, Glycine max
  Clone ID: jC-gmro02910005b09d1
gacacataaatttgattttttaaaagcaaaccaagcaaaaattgaacacaaatataaagttgacatttaaaaagcaaaccaacaacgcaacggcaaagccctaaaactcgctgcgcttaacaaaaatggtaatcaggggttctcacaaacacaacacattaaaacagaatgataaaaggagtcttgccaccgtcgatcaagaacccaattctgggaacaaaagttgcgagatgatggtggagacttcaaactatgtccgaaaaacaagctacctagaaacgaagacacaagggcaagaaaccaacatttattgtaaccataagaaacgacatcccctgatgaaccaaaccgcacgattcacttcttcttctgggcagccttggtgaccttggctccagtaggatccttcttctccacgttcttgatgactcccacagcaaccagttgacgcatatccctgaca

SEQ ID NO: 41044 - DNA, 441 bp, Glycine max
  Clone ID: jC-gmro02910005b10d1
gcacacaataattcccatgggggaagcttgcataaatccccgctggagcatacaatcacgggtgtattggatggacaaggtattttttgcttaccggcttttcaaaaattttaagaataataattatgctgggttcacaatgaaaattgcatctttaattgagccaagagaaaagaataataatatacatgcctagctattttgatcaagcaattaaattttgaaaacagcctatcagtagcgcaatcagagatgaaatgaaatatggagcaccaaaaagagagaatgaggtttactgcagcttttcccccttacccaccaaagtaacccaaattagaaggatttaaagatttgtagattgattggacagacacaagcaaaactcttcccaggggccagaataagtctaaacatagcaaggagactgatgcaacttcaacc

SEQ ID NO: 41045 - DNA, 463 bp, Glycine max
  Clone ID: jC-gmro02910005b11d1
ctaaccactgggccaaaattctccttcagtcagcgatgactatcataactgacattataaaatttatttgaaatataaatgaagagtaagcccaagtaaacagagaatcatggaactgtccagatcctcatccttatcacaatggacatatagtattaagtggacaagtcaagaagttgagttcatgaaataagcaatatacaatatagcaatactgtaataaaaggaccagtcctttcaaattaatactgtgccacaaacttctcacttgttcctacatctgcatctcttagaagctagggtttccaccaccaatcttagatacttggcttcaagttcaggtgagatgctatcttttgtccaagagaacgatcagcctgagaccagtatgatatccagatgctacggatttcatgggtgacacgtgggtcagacaaagcatcaacccatcggcggacaaacc

SEQ ID NO: 41046 - DNA, 128 bp, Glycine max
  Clone ID: jC-gmro02910005c01d1
aattaacttctccttttccttcaaagctttgactttttgttcatactctatttctttctctttaagcttctctgctttctttcccaaggcttgttcccgtttcacaactttctcctccttggcttgga

SEQ ID NO: 41047 - DNA, 430 bp, Glycine max
  Clone ID: jC-gmro02910005c02a1
aggtgggatattagagtactattattaatgggacacaattgagttcaacacaaaccgaacttattttcaagggacattattacagacccattaaacatcaaagttcttcaaatgttttgggaacacatccaacattacacaacgagcttaaaaccccccacggagacggaggacaaggggaagggttgattccttctggatgttgtagtcagcgagggtccttccatcctcgagctgcttgccagcaaaaatcagcctctgctggtccggtgggatgccttccttgtcctgaatcttggccttcacattgtcaatggtgtcagagctctccacctcgagggtaatagtcttacccgtaagagtcttcacgaaaatctgcataccaccacgaagacgcaacaccaagtggagagttgactccttctggatg

SEQ ID NO: 41048 - DNA, 515 bp, Glycine max
  Clone ID: jC-gmro02910005c02d1
attaaacgacaacaaaacatctttgttgtcctcatggtaacagagaaccttgccgcatgtaccttattaagacatctatagaaaacaattgttccaccaacctaaagacaaaatataaacaaaaaaaaataaaacaaaacttacaaaggaatccgcacggcattttcttttttctctctagctcaaaaaaaaataaaaattgttcaagcctattaacttcagtcatgttctctcaagatgtctattttataatttacctcctgttacacttatttacggccaccaccggtctttctaggaggaggagcagtgtcctcgtcgtctgactgaatatctccatactgccacattccacgcctgctggtctttgcttcatcctggaaattctccaaattatcgagagctgtctgtctgtcttttctgtcccacctgtttcttttttctgtcctagcaagcccttcctgtagcatggcagcattaacgctgatttcagcatccacagcaacaagagttac

SEQ ID NO: 41049 - DNA, 512 bp, Glycine max
  Clone ID: jC-gmro02910005c03d1
gtcgcgcagatctactgaggccagtaagaatattatgctggaactcaatactacaaccagagataactatgaaaagatttgagaaatacaagggaaaaaagaagttggtgtagaatagacaagtcacttatgattattgcaaacttgacttgaaatatggcagcctggtaccttgcaagcttcaccacaagccaaattgtcaagcagcttaatcacacatgtggctggtgaaggatcaagaaccatccatttggatatcagtgccatttggatttgctggatttgcattataggggtttccagccacattcttctgagtctgaccggcaccgaatgtaaactcggttggagcaatatctaggggtgctcgtgcaaagattgaaggagttccagcagtgctgaaggaaggaagctgagctggatcattgatctttgggaaaccaaagctaattgaaggtgctgtaggcaagaaaccaggcggcacagagctgccactatcaatcggtccatag

SEQ ID NO: 41050 - DNA, 504 bp, Glycine max
  Clone ID: jC-gmro02910005c04d1
agataaaaaataattcctttgttaagaaggttgaacctgttggctgaatgctcattgatagggaaaagaaaataccaaaacatgctaacattttcctgagatatatcagtaccactaaatgacattattaaaatcctcataagatcactcatcactagactggtctttaaattggaacatggaaaaacagaacagtgatcacaatcatcatgagaaacaagttgccaataacgtaaaaatcggtggttgaaactttaatttggtataaatttcttctaaattgatcatagctcatccttgcttgaagcatcttcccccattagttcttcaagagaaaactcatcctcctcaattatttctccatcttttccatcccatggttctgtctttacaattgttggagttccttcaatgggcaaattccctttgcctccacgtccagcttctttcacaaattctataatttggtcaagttcaaaagcactcttgagaggagcataaaca

SEQ ID NO: 41051 - DNA, 456 bp, Glycine max
  Clone ID: jC-gmro02910005c05d1
aaccaattgccaaagttgaaggcagatctggcttaacaaaacatagcatactgatgctaattacgggaattatttagcattttacattcacttgctcaaaaataaaacacgctagtaatatatatttgagtcagcaacagagcaattaatttccgacgcataatggtagtagtagattcaaacgtggcaggtgcttaacgaaaaacgacaatatttacatgcaacccacggttttcttagcttatcctttcagcggtgcctgcttctggtctccccactgtacagccagtcgtagacagtgggagtgttgggaagtggtttgtcaaacatttgagcaccgatggtctttgtggcggagttgctcccaggatggaagacgctcctccaaacgttgtcagctttacgcgcggatcccggtgtcgttggagtcgtgggagtcatcggggttgtcggtgt

SEQ ID NO: 41052 - DNA, 443 bp, Glycine max
  Clone ID: jC-gmro02910005c08d1
aactgggaaacgagattgatatttaaaataaaaacataaacaacatactttcgctgaaacgagttcaatacatcattttaaaacataataaacagcagcacttaaaccagagctgcaaagcacaagttcaagggagacactgaacaaaccgataagacatatgagaacacttcataaaagggattccccttagcaaccaccacgaaggcgaaggacaagatgcaaaggggattccttctgaatattggaatctgccaaggtacgaccatcttccaattgcttcccagcaaaaatgagcctctgctgatctggagggataccttccttgtcctgaatcttagctttcacattggcaatagtatcagagctttccacctccaaggtaatggtcttccctggcagagtcttcacaaatatctgcatacctccacgaagccttaaca

SEQ ID NO: 41053 - DNA, 480 bp, Glycine max
  Clone ID: jC-gmro02910005c09d1
gccaatataataaaataggtctttccataagcaagaaaacttctatttttttgttttcagatagtaatacatctccagttaagatgcttacaacttacaagggtgggataaaaggataactatgatcaaaattcagcactatatgtcaaaggtgcagctgtgacaatataccaaaattagtctataacatggattgtcagataaccaacgaatcccactagaggtatccttcattcaagatccttaacgatggatctcgtgttgattattcttctgaaagcaccttacagcttccattattcacctaacaaagttgaaagaaacagttcctgcacaaaaccagatctcccagcagcttgtctcatccgtttctcgcgctcttcagtactcaaggagggaccaaaactgcataaagagacagatcaaagctgtgatacacagatcattcttggataatgatgaagcatgcacactatgcat

SEQ ID NO: 41054 - DNA, 463 bp, Glycine max
  Clone ID: jC-gmro02910005c10d1
aacaaaattattataatcttatagagagaacatagacaagatttatgaacacccctacccaatgtgtgtaccaagtcacaggctcacagctgtagaatattccaaatgatacaaataggggaaacctttatttatatttatagtaaaaagcatcaactgagctctgtatgtcccacaagtacgaaacgattaccaacaagtaataacacacacaggcagtacaactagttttgtagtttagacgacttcggcaaagtcatcagaatatatgtctaaccacacatttatattttatattaggacacacattcacaacattgagcattatagaatcatctcccacatttactcatccggcaacttttcttgcgaaagttcttccagtcgaaatctgctgtgcgggcccaaggatgaagtttccagattcagaaatccaattcccttcagccttcattggtggaag

SEQ ID NO: 41055 - DNA, 447 bp, Glycine max
  Clone ID: jC-gmro02910005c11d1
ccagtaatagggtttaatattataagcagagattcataattcaaattagccgaactttatacagaagcgaccaattaccaaacattaaaaaaaaaaaaaaggaagcaaccatgagcttaacacacccatcacaagtccaaaacacttgaacttgctgaaaggcaagacatgaccactttattctaaggatgtttgtttaacacaaaacaccagagggcacgaaaaccatcacagacttaatacataagtttttagctccacattaataggtaatcattattcctaattaagggctatctttgcttgaagcttgctttcccaacacctaacttgcaagtgcaggggttgcaggagcagtttggtccacatttgcagccatcgttctaagggggcacacccatttcagcaccctcaaatggagccttaacaggtgccactcccatgacc

SEQ ID NO: 41056 - DNA, 268 bp, Glycine max
  Clone ID: jC-gmro02910005d01a1
aaccaacaaagtaaactcatttggagaggaacattggttaagaacaattagatcaaagctcaatgcaacagcaaggatgccgcctaaccctgttattttgtaacctattctatatttaccctttgcatgagcaagagcccccagctctcattggaccctaatccactgttggttgaaacccaacctttatattcacatgaagcacaaactttaaaggaacgaatgatttgtgctcaagcattatcaagagcaaggacaccagggagtt

SEQ ID NO: 41057 - DNA, 534 bp, Glycine max
  Clone ID: jC-gmro02910005d02a1
gatacaatccaaaactgcttggcacaagataaaattacatacaaatttttgtgatcatcaactggacagtgaagcatctacaacaaaatactacaaagttcatttcatcccatgtttggaaagattcctgagaagtttggaatcttatcaacatgcttgagggcacgctcagctgtctgccgagttcgatagtcaccatgctggaaagcatccacaagtgcagtactcacattttggtccccagaaacttcataggctatatcatctgttctcaatagtctctccactgcccaaactgccctcctcctcaatgtttctgttcttttctcaagtagcacatccagtataggcttcactccctctgcttcacacaaaattgccactccttgctcaatatctactccatcctctattaaagtagataaggctgcgagtgctgcctcgaccacaatcacatttgtgtggtgcagtagacctactaacttaagcactgcctgccctttatagagacagaatgtttcctttaaagacata

SEQ ID NO: 41058 - DNA, 515 bp, Glycine max
  Clone ID: jC-gmro02910005d02d1
aatggactcttaatttattacatagaagagttccaacaacaattatgtcaattcaaatctaagaaggcttgttatttaagttacaaacttgatttttcaccaaaaacaaagttacaaaccttgatcttgcattagaagcatccctcatagggaagcttaattacacacggacgacccattcaagacattaaagcaatatgaaagggtcatgggttcaaaatctacactaggtaatttacaggatctgcttcctatacaaaagaagacaccaagctatcactacacactagtttgtcacaggagttggctacatcccaaatatggggaaaccttgttttggaaaaggcaccaagctatgtcttgggtaacatgtcatcttcagaatttaggaattcttctaattcatccagcattgcttgattatgtgtcagcttcatccttctatattcttcttgtgctttcttagaacggaacatggcctgcacacgtatgacagacctctcaacacgttcttc

SEQ ID NO: 41059 - DNA, 489 bp, Glycine max
  Clone ID: jC-gmro02910005d03d1
gaacctccgtaacatcctaatccattactttttaagaacctaatatcagggcaaacacctaatactagaccacccctttttacatttcatcccaatggtacattatttacagagccaagagaagcctcagatgatttaacctcctactagtttctacatgaaaatgtcttgaaattgtccagaagattcaaccttcatggcaaaatatgtgggagcagcaaactgggcatatagttaaaaagtagataatattatgggctgcagaactaaaccaaaatctttccaattaccaaagaagcaattatccgcaccaccatccaatcgttgtaactcctcacaagtcaagggttggatgatgttggtaatgcacggtgtgtggaccgtgcttgaccgctcacaggttcatttatcctactgaatactacttggaggggaatacaagctataacaggacccttcttatctaccactggctttttttcctttctt

SEQ ID NO: 41060 - DNA, 493 bp, Glycine max
  Clone ID: jC-gmro02910005d07d1
ggctagagtgaacaaacataagatagaagaagagtaagagaatagtttggcttgcacaaaagctattaacatttaacaagaggcagcacgatgaatttacatatcatatattcctgggaaaatagctgctcctggctctacatttcaactcataaaaccttaaaacttcagtaacaagatattcccgaaggatgaaattagattacaaaattgatcaggtaggcaggacactccactatcctaaacaaaagaaatttgcccaaacagttaaatatactaaaattgaccagtctaagagcaatccaattcttgcagtaggctgctagacgctatggtctcttcagttataatactttcgtcatctctcttcaatcatctacgagtcccaactctgcataatctatctagtttgaattttagcattcttgaacatctttgtcattgagatcaatgggaagggcaacctttagctgatctgaaccactggaaacta

SEQ ID NO: 41061 - DNA, 420 bp, Glycine max
  Clone ID: jC-gmro02910005d11d1
cacaagttaccacaaaagagggttaatactaatcaccaataaatgggacattttggttgttttgattagctagctgagatttcatgcgtaaaactaacattcatgtttaatttgctggtcttctttgaaaacttatcaaagagtaataagctccacctgggccatgagccaacaaagatgagggggtcccttttttcaccacttttcccttatttaacacagcaattaggtcacaattttggattgggcttaacctgtgagccaccaccacactagttttccccaccattaccctttttagagcattttgcaccaatttttctgattgggtatttagggcacttgtgggttcattcaacaacaacacttttggattcttcaatatggctttagctattgcaattctttggttttgacccc

SEQ ID NO: 41062 - DNA, 446 bp, Glycine max
  Clone ID: jC-gmro02910005d12d1
aacccaatcctaattcaagggaatgcatatttcaacatgcaaaaaaaaaatttcccaaaaaaaagttttacaaacaagcaaacatttcctaacataagcctagattaaaatattttacaagttttactttgcaatattcaaatgagtccctttgggacacaaattttcacggacatgttatttcataagggaatcccattattaataaaccccccaaagaagaaccaattaaaaaaagaaaaagagcattggaacccatggagattgatggagtttcagtaagaaaaacatccatttccttttggatcccgaaatccaatgttctcaatggccccaaccgttttgaacatcctcctcttgggaaactcttccaccagtgatcgttgctgttgctggctcctcaaatcgaccaaggaacggatcctggttaacctgtgcattccatg

SEQ ID NO: 41063 - DNA, 515 bp, Glycine max
  Clone ID: jC-gmro02910005e01a1
gacatgaccatattcaaatttacattgcaaccaaggaatgtatatataaaaataacaaaatcgcccataacgtacatatataccagatacaaatttttcacgacatatgatattacaaatgactaaaacttctagataacaacgaacaaaagctatataatgaattcccacactaccacgcagttcaaaattattgcataccaataatttcaagaacccttattaactttcactttcaaagggattggtacaacaatatcatatgctaataaatataatcttaagatgaagaagcaggtttggaagatgggttgaaaggaacctgctcagcgcatgtaaggatttcatggggcccagcctgttctcgaccaacacctagaaggtcaagataatactggtaatgggaaacgatattgttcatcgagtccacatcaccttgtccacaaacaccatccccatagagaatgttcattgtagtgccaaatccaggaagacgattctccatagtatcattc

SEQ ID NO: 41064 - DNA, 453 bp, Glycine max
  Clone ID: jC-gmro02910005e01d1
agacttaaaaaagcacactgcatattcatcaaagcatgatctaagcacactgcatcctaacatcacacgtacgtagaaaggtgaagttccaggtcttgcacaacatacacaacacaccataatttattttatatacaatcttatggcgcccaagatgcagatgcatggactaattaaacaacaacgttagtctgataggcagtgtccatagataaattgggtacccataaaatggccttgcttccaaggaaatggcaaacagggttagttccaggatcaactcccatgagttcatgaagcatgagatgattcattccagaagtatctgagtggcaaacagcaagtgcctgagttttggttccatcaccagccaccaatggaaccatgaaagcttgtgtttcccggactttatggcagaaaatactgcagttctgaaatttagcccatgacaca

SEQ ID NO: 41065 - DNA, 486 bp, Glycine max
  Clone ID: jC-gmro02910005e02d1
aacaagctcaagcaagaattctttcactgctttctcatttatactagtttaagttaattacgaccacagctctagatacaatcaaaatgctaaaagcaaggatcactacaaaagctagcgatatctaaattaaactaagctactcataaagtacatagtgattgttttgtttgactcactcaccaaattacctaagaaacatgtcttcttaagttactattggtatttgataacaagtattataaccttaggtttttatgatatctgcttgttcctcaacagcaaagcatgctcaagctccacctccacttccccaattgttggtcgcccatttggttcatacttcaagcatctctagtatcaatctcttccatgttagattccagttccactcccatgtcaataatggtggtggaaaataaggtataatcaccattggtgtttctgatatctgcttgttcctgcaaccacagagcatgctcaagc

SEQ ID NO: 41066 - DNA, 518 bp, Glycine max
  unsure (1)..(518): unsure at all n locations
  Clone ID: jC-gmro02910005e03d1
acttaaaagaatagaagataatcaaatcaatgtgtttcctaagaaccttcaaatttttccataatcttttaaagacgccacaaataaaaactcagatatacagggaggatacggtgtgtcagaaacaccagtaaagtagcaatcactcaaatgggattcggtaggactatgatgatatgaatataaatctggaagctacagtgattacaaattagtaagaaagaataaatataataagcttcaagaaggagcctcatgtaaatattgatcgttaaagtgatctagatgtagaactaaggcctctgccggtgactgctgctgcagaagctggacacttcacataaattgcccaaactggtctgaatagaagttatcaccggnggttgtgtaggcgaggcctgttgcagaaaacacggccattggccctcacaaatgctgctatgccgatgctaatgcccgcccacattagcgaanagaagatgtgccggaaatcatattgaacttgcctcagtgacatg

SEQ ID NO: 41067 - DNA, 512 bp, Glycine max
  unsure (1)..(512): unsure at all n locations
  Clone ID: jC-gmro02910005e04d1
aaccatcaaactaaaccatatcgatttcagtaaaattaaatatccaacaaaaccacatccacttcaataaagagaaattcaacattggctactatgccttgtggaaggctgagagaaattggccttacaatttaacaaaatttaatataccataactgaaattgattccatctcaaaaacctaacaaccgaaaatgtcaaatcattgacaaagaaaagtctggttaacaaaccattcaatctcccttcttcctaaatgagcaaccttcggttaacctcgcccgtccccctgttggttggcacaaaacagtctggcagtttccgcacaccacaacagtttgagagtggctaaacacagttgttatgttgaagcatccctggcacttaacatccatgaagaaagagtttggtgactgaacaagacgcttgagtttgtgctttctcttctccaactcagctggaggattcagcanatcaatatcattctgaagaaccattgtgagaaagaagcgc

SEQ ID NO: 41068 - DNA, 545 bp, Glycine max
  Clone ID: jC-gmro02910005e07d1
cgactgaaacttcatttcattcatttatggttctggtcgtgtgtagtagtttcttggtcaggagcaaccactagcatataaatttcaacaatgagccaagaaaatattttctcatgttaattcccgcaaatacatcaatcttctttgcgttcctttttttaaaatcccacatattgtgtgtactgcgagtaggcccctgaccgcttggcaatgggggcccgtgtaacgtgatccggaagatcaaatgcatcaacaagttcccttgcaatattcctcacttggaaactaagatactccgcgagcttgtggattgccttggctttgttgggagccacatagtcaacatttcggtaggttccaatgtcattccatattctatccagagcataaagatcacagacgagcttcagagcagcttgggagcttggatccggacagctctgcacggcttcaataaatttagcaaggatgactgactcaatatgtgactctgcaagtgtcaaaaggtgattcaaacatctattccatgcaccaaaatccccaag

SEQ ID NO: 41069 - DNA, 509 bp, Glycine max
  Clone ID: jC-gmro02910005e08d1
cttatgacattagctgagcatcacttttatttattcatattctgtgatgattcatacgggaaatatatgaatccccacagttttagtccccaatacaaagagcactagatcgactcaccacaaagggaacattcttagaatagcacaaaccataaacaataaaacactagtaatctagtcactatctatattcctgaaatcagaaagtgccttttttcattttaaccaagctgaatttcggagtcaaagacagctccaccctcccaatcactagagataacattctcggattgcacccaatacttctctgcattaccactcaattggaacctcaactttatgtcaccccttggagggttctcagcgtcaaacacagtcccaaatgccctgcgcattcgcctccactcttggcaatcttcctgccacaattcaacagcagttacgtcgtaagttccaccaagatagagaatgacaatggctaagtagtgagggtttctgctgtgttcatg

SEQ ID NO: 41070 - DNA, 466 bp, Glycine max
  Clone ID: jC-gmro02910005e09d1
acataagatgatgatttattctagtttgcactttgccatgccagctatcattgttgaaacatgcgcgagaacacttaacagcaatttatacaaacagaatttcttcattaacaacttaacagcaaacacgagaacattcaatcaccccaaatacataacttaaccatacataggtagatgaaggaatcatattccttctattcacttttattgaaaaccagggaaagtactgcaacaaccatagagcccctagatggagatactgttgggaattcctctgaaagtcaatccctcctcactagaaggatagagcaaagtgtaaggcattttagccggcccactgcggtttctcaacgtctcgtccttgttcttctggataagcttttgttcaatctcttgaagcttctttccaaacctcttgaaggcctctagtggaccagcatcagaagtccaatagtcaccacca

SEQ ID NO: 41071 - DNA, 523 bp, Glycine max
  Clone ID: jC-gmro02910005e10d1
aattaaagcaaatatatatttttatttttccaacttttagcccaacatagccgaagttattcaaaatctataatacttcacaccctatttattcataggatacattgatatggagcacgattttcttcgactgtattatacaattacttgattttcatttaatcactatacttggtagcacttgctttaggttcagaatcgtacttggtatttgacctggatgcaaagtcatcatacttgctaatatttggtctcggttcaaaatcatcgcttttggtaatgcttgatttgagttctaaatcatcatatttggtaacacttggtcttgattcaaaatcatcattctcggtaacgcttgacctgagttcaaagtcatcatacttactaatatttggtctcggttcaaaatcatcattctcggtaacgcttgacctgagttcaaaatcatcatatttggtaacacttggtctgggttaaaagtatcatactttgaacacttggtctcgttcaaaatcatgtcttg

SEQ ID NO: 41072 - DNA, 552 bp, Glycine max
  Clone ID: jC-gmro02910005e12d1
gacaaacacaaagaacaggtattttacatttaactaaagaacttaaaagcttagcagaaaaaaccttaaagtgttactacactaggcaggaagcgtcattcataatcctaagatcagttactagctcaatgaacagaattctcatcactgtcaattctagtgccattggccataggcgacacaagaccacccacaaacctgtatgaggaaggagaaggaggaacttttggagaaaggttaagcatttccaaggcttgtagtctaagctccacagggtagtcagcaacacaaccaattctaggtcctgccccggttgaccatctatgcgaaagttggtgccccaattggtaggattttgtagccttcttggaattgattctttgcaatatcgctttcttcggcacatcagctcttggactctgaagcccacctgagagagtccttttgtaactgccaacagatccaggttgacggtcttacttgattgaggatgccgtgttctcggcttgctcagaaactacaggcttggatatcttaccattgctagaatct

SEQ ID NO: 41073 - DNA, 509 bp, Glycine max
  Clone ID: jC-gmro02910005f02d1
acacaaattattttcataaagcagaaacagtctgcagcgatcatgagcatgttgataaattatgcactacaaaaatgaacagtgataattaactcctctaaaatttactcaatttcatccaacacaacccgataaatattatattgcttggcacatgtttgtatttctcaagataaaagtcaggtctcagggtttccaaccccctttgcaaatgggtagactaaaacttgaatcatggcaaatgcactagctcagtacttttgacaccacaccggcaccaactgttcttccaccttctctcaaggcaaatctttgtcctgcttcaagtggaactgctgaaatcaattcaaacacggcagtaacattgtctccaggcataaccattttaacattttcgggcaactctacttttccagtgacatcagcagtcctcaagtaaaactgaggtttgtagttagagaagaagcagtgtgtcgccctccctcatcctttgtgagtacatatatctc

SEQ ID NO: 41074 - DNA, 531 bp, Glycine max
  unsure (1)..(531): unsure at all n locations
  Clone ID: jC-gmro02910005f03a1
caaatccaaaaagaatatcatatattgtcttcgatacattttacattaatgaaaaatttgctaccttgatttacattgtcaacaacaatggctgctcagtcctcatcatgtcaccaaagagctttgaaggtttgccctcatcagccgttatgtcattgacaaaactacctcatgtaatcatcgatacgtcaagcacattaagagtaaacccatgtatctcaattacacaagattagactagaaattttttcttagaaaccattcagctactgctattagaggagccaagagactaacttaaaaatataaaaaggaaccaagaaaaagacaaccaatgaccattgttcatacctttttaactgtaaacacaaaacggaataaaacatgtgtacgagctttaataatcatattattatagcatcattcacagtgaaagagataccaaaatacgcatttccaccttccttctgaattcaatcgtccatttaattcngtgaaactgacacctttagccaccctccagattgagtg

SEQ ID NO: 41075 - DNA, 516 bp, Glycine max
  Clone ID: jC-gmro02910005f03d1
catattatattcccaagtcgtattcaaatccttatcaataaaaccatgaagccaaattaaaatatttctagtacacacccaaaaattcttcaaaagaaacttccgggaatctagcacgaccaaaaatcataaatttaatgaaattctaacccatcgataattaaatttgatgggaattatgatgtagcagtagcacacgtctcaccattaaaatcaaaataccaggtcaaagtttcaagtaacttaggacagaacgtaaaaaaaaactagataaaatgagtagatagctcggtacattaagtcacttagcacttgacctcctttaaggcatatgcaaagtacaggaatgttggatcagcagcgccgtccttgtagtaggcaaagaccaagcaagcatcatcacccatgctctcaccaacaaaaaattggaaatctttaatcttagagagcaggtatttagttgctccctcgatgtgcttcttaaacaactcctgttgctctgcatcgagcttggga

SEQ ID NO: 41076 - DNA, 537 bp, Glycine max
  Clone ID: jC-gmro02910005f05d1
agaagtacaacaccagattgttcttaatagctgaatttttattacagataaaaaatatctaatgtttaattagaaattttgtactctacttacaatgaagaattaactgagtgatctttcccaaaaaaaaaaaaaggacccaaggacaaatagggttaataaaatgcctcggttaacccaagaataaaaaaattaaataaaaaattagagagatagaattaaaagtctctcttggtgtcacctcaattttcatcataactaacacattttttgtcattatggggacaagtgtatacatgtgtgagcctagccatatataattcccaaccatgattttgctgttaggctatgtttgtttccaacttgtcaccaattttcactctttccaatgaataaaacgcagaaataacgaactttggtcttttgcgttggtgcctcgggatgatgcaaactcccttagaaacatccacacaaacaggcacttaacttgtggcaggaattgaggtgcctgggctgggcaagcccatgtaagcaagc

SEQ ID NO: 41077 - DNA, 532 bp, Glycine max
  Clone ID: jC-gmro02910005f07d1
aaaaaaaaatgcatattgcatttattagatcagaacaaaaataccaacttgatttctctacaaacaggaaaactttaaatatatacggacacacgctgaaatcatcagaagaacacgatgcaaaaatcccaatacaagaacaagagtgacttacataagaaaactaatgaataaacaaattgccttgacatgcagagtgagccatcatgcatatgctgacctcaattcattcaatttaacgcgaatataaccaacacatgcattttgtgctttcacatcatctactcatgctgagcactagctgcttctgctttgtcaggattagctagttctgctttctcatggtggaattgcaccacaatgcatgtaatgttatctgcactcccacgagaaaatgctgcttctgttaactttcgtgcagctgcctcaggctcctcttacgtgcgggcaagagaaacagcatcatcattctgtactacatcccagagtccatcacttgcaagataatcagttcaattggtcatctatctcc

SEQ ID NO: 41078 - DNA, 294 bp, Glycine max
  Clone ID: jC-gmro02910005f08d1
ggtcgttgaattttgtaatgctggtatccgaaaacggggtcagagcaggttgatggcaaacaagaattacaaaacgaaaggccggaaggagatgcctttattcaaatagaaaaacaagaacggctgaaccctagaggttattacggaccttacaatccctaaagctcctgatacgatgcgaataagtaattacatggtcaaaaggggcccggaatatacagccaataaccggatccatctgcaacccgcggccataaaagccggctcctataaccacacccttctcaagtcccc

SEQ ID NO: 41079 - DNA, 546 bp, Glycine max
  unsure (1)..(546): unsure at all n locations
  Clone ID: jC-gmro02910005f12d1
aatacgaaaacatagcattactcatttaattaatgataaatagtttagtacaccgatgcacctcatctagcttgttgcgtggtagaatttgccttagcatgtacgaggcatcatggtcaatctcaactctgaggatccggttaattttaaaacataagtacattcagcgtgaagtcattaagacgaggcaagagcagacaaaactaagtaaataactacttaatgttacataagcattacaccctaacatccagtgactcgaacaagacttcaaataaattcaagctaaatcctgtacacgattgatcaacttttgcagagaacgccctatcaagtgatcgacaaaatatcagctacctaatgcattttagtaaacaaaaggctgcaatttacatgcagcgattgattcaagaatccatgtgtgaccaatgacttgtaaagtgttcgcagctaaatcctctgcgtcgtttagcctttgcccaaagaattgaaacttcctnccccaacttgcatccttgtggggatcagggttgtaacactagcaac

SEQ ID NO: 41080 - DNA, 427 bp, Glycine max
  Clone ID: jC-gmro02910005g01a1
ggctcttaacaactttcattatcaaacccaacacttaccttttatatgaagtaaaaaaggaaatcaacaacttctcacttaatttggtcattacataattgctagtttagatttgaaacatcaacttgctatagctgaaacacataaatttggggggtcttagtgtatggaaacagacaaaacatacaaaaaacacaaaaatgaagtctatgtgttcacaaatctgcagttcttcctaacttcccctgtgaagaagctttctgagtttgtgatatttcccattttcaccattgactccgagaattgtcggaaaaaagcaagagggtctgctgcatacttcttcacaagctgtctagtttcaattccaaacacacttgagtacatttcttggtctgagttgagaagtccctccccatttagtagtaat

SEQ ID NO: 41081 - DNA, 498 bp, Glycine max
  Clone ID: jC-gmro02910005g01d1
gatatcaaatagaagatttagtttatgtacggtgcaataaataaccatacatagcacaatgcccagtggagactggttttatttacagaaacgcattcttcagaatgtcaatcggagagtacacaactatatgcagatattcacaaaatataagagaatcatatttaaaaataaaaaaaaacttacctctgggacatattccaaggcatagtcatattacatcaatgtcatcaacattaagccaatcattggaatccttggtcatagaattacgagcacttgaatgctcagagccaacatgtttgccttctacacagtttaaatccttatcagagttaggtgaacttctacctaactgaacccaatctcgagagtcttttgttgaagaatcagagcctgatctagtttttttataactttcatgtacatcaccatcatcctcctcaagatcactgaatgatacatcctcgtcattaccagtgtgaacaggagttccac

SEQ ID NO: 41082 - DNA, 550 bp, Glycine max
  Clone ID: jC-gmro02910005g02a1
acacaaaattatactacattcattcatgtccctagaaaacagaatatgtcctgctctaaagcattaatgagaagatgcaatcaattacacttgcaaaatcataagcaaacatattattaacataaaccattcggataggctaccccaacaaaattattattctatcccatgcgtcacttgtactcgagaatcatgttattctctggggccaatccaacacaagccctcattatgttttccagcattgcacgctgctttgacaatgcattcaccactggtgtacccggtggaacctgcaagagttatgttgtgagtaaccttgccaacttttttgataaaaaaatgataaggggaaaaaagggaaattcactgaacaatgatttaacttcacaattgtatctcaatactaaaactcatatttctttcaacttaattcctatataaaaataaggatatgcactcaacattgaataagattagattaaactcaccagaggagccttggtcagatagctgagaatggtagcaactgggtggaatgagtggaatt

SEQ ID NO: 41083 - DNA, 494 bp, Glycine max
  Clone ID: jC-gmro02910005g02d1
aaaagggagggacaaccatgaaagaaaattacgggggaggggaatgcccataagttacagtattaatatttgtgcagcaacaagaattttgtaaaggtaaaggcccatccgctggtttcttacagttctatcctttcagcaacaaaatggagttgtggaacacaagaatgtatcaatttttaacacgccaaggagcatgtgctaaaaaaagcaagaattaatatacctaaagagttttaaaggttgaagcctccatttatactgcatgtgtacttttccaacttataccctagctacttgatgtgttcatgaaatccttaagaagtttggattgacaagaagctcagtgtttctcatttgtgagtcttggaagcatagcatatacatgctcatattcttaaagagacaaaatcatagttagataacaaaaagtgaaaatgtatgtctacattggctattacacaaattctaagagctataggtagttaatctta

SEQ ID NO: 41084 - DNA, 437 bp, Glycine max
  Clone ID: jC-gmro02910005g03a1
gctgggttacacatttatttatgggaacaattcaaagttcttcggaggactttgaattatttggaacattacaacaaataaaaagtcaccttacccttcccttcccgaacacccaaacaactcccgaattattcgcaaacagatttattaacaacaatgaatctaactaccctttgcaaatccccccgcactaaaattgcaacttgtgttgttgtttacctccaaaacatgcactgtttgcgactttacatgatcaaccaaagccttaacttaaagcacagaacaatcggtacgaattttcccatttcttgcagtcttaactccaacgcgacccaatttggtcatagcagccacaaagttggagttgaaaacgttggtactggaagcaaaggaattaacggtgttcctagaccttgggtccgtgaaaaggatttggt

SEQ ID NO: 41085 - DNA, 356 bp, Glycine max
  Clone ID: jC-gmro02910005g04d1
atcacttctacccaatgtgtgggccaagtcacaggctcacaactgggggtaaggaatgggggtcaaattgggcaaccttagaggaataccaatagaaaaccgtaaacaggggccttaagatggcccacttaaacaaatcgaatacggccaagttttaacacacacacgtagcggggccccctaccgcgtttaggacgacctccgtaaattcaaaggataaaaacattattcacccataatattgaaacctaggacacccacccacaacattgggcaccctggaaaaatttgaaacatccactttttccccaactttccccccagaaattctttacagcccgaaggggctttcctgt

SEQ ID NO: 41086 - DNA, 490 bp, Glycine max
  Clone ID: jC-gmro02910005g05d1
actgtactgcaccgcaagcccggggcaagattgaactgggcagaatctatagactaaagccgctttagtggccatgattgtcgaatgataccaagtcacttcctatattccataagctgcactgtccgaaatggaaagaacagcctacctagaacttatttaagccatatgcaacaagctcgttcaattcagtaaagcctcatgcggactaaaatttacagaaggcactttactaatcacgtacatgagtagtaggcacttgatctagtcaattctgacactctgccagacaaaatgcgagactatatcagccagatgcctgcacagcactcatacttttctttagatttcccctcatctgcactttgagaaccctcaatcttgcgtgagacctcatgtgcagtttacttcaccttatcaactgagccatttgcagacacaggatatgagtcatcgagggtcaaggggccagtctgccatattctgatgg

SEQ ID NO: 41087 - DNA, 513 bp, Glycine max
  Clone ID: jC-gmro02910005g07d1
aaaattaaaatctcaacttagatataaaaatgttgcaccatagcaacaaataaaagagaactgatggttaacctactgctaattccagtcatagcatgtttcaaatttttcaaaagaaaagactatacctattcctgatcagtgatcactaccaacccactaaaatcatagcaataacaactagaaatactacaactgtgcaaattgcagtgaaagaaacatgagaaactttagaaggttgaattccatgctcataactgacccaaaaaggggggtctcagaacaacctcccaaaaatcatccagtatttcagttggaaacagcattttgtttttgtccacttgaccggccgactctccctctcccttggtgataaccttctccatgaccacgacccctaccagaaaacccgccacggcttacataatcatttcgaccgtatccccgacccccaacataattcccacgacccctgaaagagtcatttcgtaacccaaccctaccagatgggat

SEQ ID NO: 41088 - DNA, 481 bp, Glycine max
  Clone ID: jC-gmro02910005g08d1
gaagaaaaaaaaatctccacaagacatcacagactatattaagattattactaagtagtaataaaaacacaaattaggatgtaagcaatcacaagtttgtaacaaagtacaaaatcaaaactaagtagtgaggataggggggaggtagtcagctttgccaccaagaatgcgagccttggtgtcggggaagaattcaaatcctggcagctcagtgacatctccttcactggcaatcccgatggggtagcggagaaggtgaccaggaaggtcatgctcaagtgactcactagaatacagatcccaatatttgtcagcaacttggttcaccttattaatgcattcttcactttctggctggaggaaggagtcatgaagcatgccaaggtgctcataccacaatgacatgcggaaaccatggatctggccacgtgccggctgcctggtagccaaatgatagggctgataagcacccatggcaatc

SEQ ID NO: 41089 - DNA, 429 bp, Glycine max
  Clone ID: jC-gmro02910005h02d1
agatacacaaatctttactaaaggagctttagggctttcagaatagagaatgtatatattacaattcagtatgaagataattgaatactgtaacctacataaaactctcccatgcactcataatttttctaacttgagtgatcacataagaactaaaacaaccataacaatctaattcccccaaacattcttttttggctacaaaggatagaaatcccaaaattggaagatgtggacaaaattgaaaacaaaaggcaggagcaaatacttccaaatctaaccccaaaaatagacaaagaaaagcgaaacattaaggttgtcgattttttcaacattttggaagatcagaaggtggaggtggcagcttctgattgcgccgtttaccatcttggactatccatgccattttcaagccccaactagtatgca

SEQ ID NO: 41090 - DNA, 444 bp, Glycine max
  Clone ID: jC-gmro02910005h04d1
ccataaaatgaagatacgatccatagggggtatttaaggttaacccggtaacaattcaggataattgagtacaagaaaagcaaaatataagacaggcttcaaagttattccttcctgagaggttaggtagacatgtgatttcatacatcactgggataataaagcctaactatatagatcattttcgtcagccccaccagcagaagctgcaaaggggtcagatccagtagtagtcctatctccagactctggaaacctaaattcacttccaaaccctcttgattgctgtaaggtctgagcaaatgcctgatacttgcgaatatcagcattacttacacttctccgtgcaaactttattgactcctcaaaatgagcagccttgatctccgcaactttgtcgtcgacggtatcttaatccatggcctcagggttttccctactttt

SEQ ID NO: 41091 - DNA, 548 bp, Glycine max
  unsure (1)..(548): unsure at all n locations
  Clone ID: jC-gmro02910005h05d1
gacggaaattttaacacaatctattgtttaacttgtaactctagaactgttataaaatcagactgtaacacaatcaaggcattcccttgatggcgtaggagttgacgagcgccaaggcattgctggtgaaactttttgacgttgctgacgcgatcgcatacacccgttttcatgggacagtccgctacgtcctggaatccatccgtacaggtctcttcgtcggtgagtgcggcactcaaccacgtctgcacgttgctcatctggaacaggaacgaactcgcgccggcgccggcggatccaatctgccgcatctgcttcagcgagccgcggatttcgtccacggcgtcgcccagattcgagaagcagtcgtgcagagcaagagcggcgcgcgtgcttccgccgtagtcggcgtcgcgcgtgaggttggagacgtangacgccgcacggtgaaccttcgagagacttacggcaatggccacacgcgccagatggccggggttctgctgcaccgcattggcgtaacgagagagggatgtgaaacacacttt

SEQ ID NO: 41092 - DNA, 408 bp, Glycine max
  Clone ID: jC-gmro02910005h07d1
aggggtcagggataaattcttattatgatggaggaaaccaacttacacaattgacatagaactaaatgctaaaaaaaagatattttaaaagcactaccatctggcacacttaatttaaaggtttaactgacaaccttgctttttatttacctatttaagaaaccaataacttttattcgtggaagaattaacatagcataatttggttgtgcgcacataactttttaccctatcaattaattgcaacttagtcggggtgccaattctttcacaaattctgcactatttttatcaaaattttcttcctgataaacataacttttgggcagatttttccatttgatggcatttgcctttaaataatttcctttttcaggctccaattttactcttatgcaatgggtgatt

SEQ ID NO: 41093 - DNA, 471 bp, Glycine max
  Clone ID: jC-gmro02910005h08d1
atataattgttgtcaccatacttaacataaagctccaaaagtaccggatcaaggcatgttccacgtaaagtacaacgattcacagagcacgataagaaaaacaacacatactgtaactgtattactgttatcttctaattataattctttctttatgaccatatttagtgcctctgcaccaacttcctaataatccttctgcagggcatcaatgatctttaatggcctaatacaactccccatgtttcataccctgaccaacataccaatgaacgaacgccctcttggcatacatgaggtcaaatttgtggtcgatgctagagaagacctcaacaacactggtgtaattggtgattatgcacactgttcctatgaacattggcaagatcaccacctgcaacatcagtaggaggctggtaattgattccacacttgaacccggtggtgcaccagttaacaaattgaatagtg

SEQ ID NO: 41094 - DNA, 497 bp, Glycine max
  Clone ID: jC-gmro02910005h09d1
ctgccaatagaaatattttcttacctgaaaatcaagcatacatgaagtcttttctgccaaacacattttttaacataaaacaaggcacaagacatacaaacaaagaggaagttccacaaagggtacatggtcatcattgttgagattgacctttattacagaaacccagggaactcattccattcacatgggggcttgtaaaggcttgggaacccacataagatgttttatagggaagaagtggcacactgcatccttcccaggcttgattccaagctgcctaaatataatatgatttgggctccaatcagatgtgtccaaatggcaaatgccaagagcttcaattttgtcatctccattctcgctacctagtgagaccttgaacaccttgctccctgttgctatgaagtggcaatagtaaatggcatagggatatggtaggggatgacaagctacccatttagcagcgttgatatcttcagacacttccaaaatgg

SEQ ID NO: 41095 - DNA, 205 bp, Glycine max
  Clone ID: jC-gmro02910006a01d1
ataggaaataagttcgtcagatgttatataatgtcccttgtctacctgtgtgcaacattgaaagacacaaatgactgaaaatgaaacctcagcctgccttgttcatcttgtgtttttgcaccatgccttgcatctacacctctacccttccgaagagttatgacaattattggactccccattgatgagaatgtaggaggaataa

SEQ ID NO: 41096 - DNA, 492 bp, Glycine max
  Clone ID: jC-gmro02910006a03d1
aaaagtacagtcaagttcaacattatttacccaccaaatgttatggtagttacactatttttgcaatcagaaatttaatcaaaatccaattgatcgcctatggatgagatcaaaggaaagcatgtttattcaggtactaaacagagttcaatacattggccacaaagcacagaaccaaaactcaaaaacagcaatttccgaagcagcttgaaaggcagcattatcagttcctaactacgaatttcaattcttcttcacagtagcagcgtttatgatgtccacaaattccgccttgagggatgcaccaccaaccaaaaatccatcaacatcgggctgtgctgccaattctttgcagtttcctccatttacagagcctccatagataattcttacagatgcagcaacttcagcactcacattgtcatgaacccatttccttaaatcagcatgaacctcttgagcctgagcaggagttgcaacctttcctgttcc

SEQ ID NO: 41097 - DNA, 323 bp, Glycine max
  Clone ID: jC-gmro02910006a04d1
cgcccaattcttgaactatatatcattctttaagtaattcattccttctccaattcaataaatacatacaaatgccaacaaaggtttctattattacattgggggaagaataaatcagggaaagagagtaatattcaataaaaactttaactttaacaacagaatggcaaaaaattacaaaggaggctgaacgcatgttgctggcctcaacacttctgaagcacatttgtacacaggggagcttctctgtttattcaaatcaacccatcagatcctctcaaaaaaccccgattttttaattgaccaataaccctgtcaattca

SEQ ID NO: 41098 - DNA, 323 bp, Glycine max
  Clone ID: jC-gmro02910006a05d1
agacaactgaaatagtcttatttattaatcaagcaagtgttttgcataagcaaatctacaaggaagatctttgataaacaaacaagcatagcataaatcctcatggcagagctttgattcatattttatgagctcaacaaaatcattcaaatgcccattgattttcccgacgaactgactctttttcctcaggggtgaagacattcttaatgttaaaggtcttgcgaatttcctcgggagtcttgcccttgatcatgtgggctactggttgggatgtaaagtccagcaagctcttgatgttcaagtggttcgcagcctggata

SEQ ID NO: 41099 - DNA, 312 bp, Glycine max
  Clone ID: jC-gmro02910006a06d1
caatacaataaatacttctttttaaacacattcaatcaatcgccttcttccagctaaaaggctaaaattatgcttttctttctcctttatctaccccctaagactttgctaaaacttttccaacttataaagggcttaagagaaaggctcctatgtcacccaataatgggcgcaattttattcgagactgcccccatctcaagcggggttaaataaacaaactctgcctggggaatgggattaatggtgcaaagggggtcccctgctctaaaacaagcagcttcgtaagcttttttttatttaccttcccca

SEQ ID NO: 41100 - DNA, 332 bp, Glycine max
  unsure (1)..(332): unsure at all n locations
  Clone ID: jC-gmro02910006a07d1
aaccaaattgcaaataggaatttgccgggaaagaaaagctttttaaaagttgagcctttttgatagcaacaacagcccaccccagctttcattacaaatcacaggtttcaccagaccaggccgcacccattccaaaccaacatacttgaatgattagtgtaaaggaacccagcaatagagccttattccgttagcattgttgcttgtttggggacagcttcaaatcacaatccccttcaaatcacaacccaattcttttattggagttagcattgcatagnacattctctctcccctaagaggctacaacattggattcttcagcatgaaaa

SEQ ID NO: 41101 - DNA, 321 bp, Glycine max
  Clone ID: jC-gmro02910006a08d1
aatccattgcgaaacagtattcataaaggtttaatcaaagcccaaacagtcataacactaattgaacaaaaacattaaccaaaacttttaaataactaaaattaaaatagaaccacagagaattgacttccaacgaatttaagcatcggccttctgggagacataggtcaagccacacttgccgcaatagtggcggtcgaagcgataggccatgaaaggcccggcaccacactcggcgtaggggcactccttgcggagcctctgcacttttccagaatcgtggaccttgtagaactggagaaagccgagcttgaccttctt

SEQ ID NO: 41102 - DNA, 427 bp, Glycine max
  unsure (1)..(427): unsure at all n locations
  Clone ID: jC-gmro02910006a09d1
gggatggcacttcaataattttgtaggcaataagtatggattaacctttcagtcatcagaattcaaaagtgagtccatcagggaaatttgttcaaactatacacgattgagactacctgacagagacttaggtcaaacaaaacataaatgaacttcagtaataggaactcagctgactcagagatacaagtgaaggcgcgcagaaatgaactatttacactgagcacactttggggattaacgaaatagcgcccttaaaaagggatcattctcctcatcaagcaaattggcgncgncatcatcatccaattcatctaaaattgactgggtaatgcttttccgagattggctcctatgcttcttaggttccaagcgaggatctgcttgctgaacacccatgtctnccattttcaaccttacatcccct

SEQ ID NO: 41103 - DNA, 292 bp, Glycine max
  Clone ID: jC-gmro02910006a10d1
ggtggaagcccaaagcagtttttttttttccgtcttgaacaaacccagagcaggttattaaaccacgtttttcacttatcctttggtggatgggcttctaaaggaaagcagcggtaaaggccttttttaaggggggaagagggggaccggaggagctggaaacttggggcctttgccttgggacaggggtaacaaggaattcttcggtacatggtaactttcaattaagactgggggtggctaattctcatggaaattcatttttttcatcacgatataaaagggctttcgg

SEQ ID NO: 41104 - DNA, 355 bp, Glycine max
  Clone ID: jC-gmro02910006a11d1
ccaaagaaaaaggcataattgaggccaattccaaaacaattattccggaataatagattcaaaattggcaaaaacaagaaaagaaagtagtggggggaagtaggtatggggaatgatgtaatttaaccaaaaatctctgaagcaaaaggatcacgacacttttataaaggaataaataagaaaacataaaataaaataaaaagactctaatgcagttgcaaaccaattccctctagatgccgctatctataagaaaaagccggtgtcactcaattcccaacaaaatgaatcactttactgaactttcactgattgacgagtcacttttgctcctcctccattctgataactcctt

SEQ ID NO: 41105 - DNA, 459 bp, Glycine max
  unsure (1)..(459): unsure at all n locations
  Clone ID: jC-gmro02910006a12d1
aattcataaaaaaaaattatattacttttttaattcattatattttttccgtaagcatttactgaaaaaattacgtaagacggaaagatggccattacatcatatcgtttccatggatcaaaatcctgaagattcataggtccacaactcaaatctttagataagccagttctagctagcccctcctaatcaaggatagcctaaatcactaacccatcaatgacacaacgaagtattgcatttagaaaacatgctttccaccatttttctttaaattttttaataaccttcctagtcctacgtagttgcagttgcactcacattgcaagtcaataacctgccacttgtacttcctagcactcagncatgtaagttgccgacgcactcagagcacccacaaaaacaacctcatgcactgccagaatcagcatatcttacaggctcatgctatgagacaaa

SEQ ID NO: 41106 - DNA, 459 bp, Glycine max
  Clone ID: jC-gmro02910006b01d1
ctccaaaatattgtaaaatcaggatattgaaagtttaatccatcattaagcaaccgggtttcttgcacctccaataacatagcaaaataaaattacataaattaaatgttattgtaaaagatctaggaaaaaatgttacgttcctgcatgggaaaacagttttagaataccagtttatactcttaacacttcagagacaagtatggttcttccatgcaagtccaagctccttttgaagtattaatcctcccaagagctgaggttgtactcatgcaaagattatagtcctattgccttgtccataagactctatagggccataggcatgataatggaggcaggaacctgaatagtgaatatacatcgtgttcacaacttatcaaataggcaataggcaaatggataatgctgtatgagctcatggaaggtcttttaatttacttaggccttcaagaagtg

SEQ ID NO: 41107 - DNA, 452 bp, Glycine max
  Clone ID: jC-gmro02910006b02d1
ctagaagcgtcaaacactatacaattgctactttacagtctacattttttcacaagatgaatatatatgtacaaattcaataccatcactggggagataacagagttaatcggagaagaattcttgcacttcagctaattggtccgtgttcattagaagagggagtgaatcaattttagttccattggcattgagcttattatctactacatcataccactcctgctgctcttcaaactcggtaatattgttgtgattttgggggtaggaaatttccccaccaccagagttttgacatatgcaagctgatgggttctcggtaaactcaccactaccgggtctcaactcattcggttctcccataaagcctacctggaaagttcgtactcgagaggcaaattcctcccacgtcctattatttctgttcatgaataacatggtcaacttctttg

SEQ ID NO: 41108 - DNA, 483 bp, Glycine max
  Clone ID: jC-gmro02910006b03d1
acttggcacttgacagtcacaccctcgttactgaaacttgtaaactaaataatgatacgtatgaaggaaaaatccaaattacaacttatgccaataatcacatcagattataaacccgcttccgagtctatgacttgggtaggtgtttagccttgccacaaatcagtgcattgggcggaagaagagtctccgcgtatacgctctgctcattgttccacaccctcagatacaatgcttggcctaaatacctttggggccagattgcagatctcaagttccacatacccttattgtccaaagataccaatatggcactccaataatttggatacacctgaacagtgtgtctagacatcccatcaaccaagttgtaagtctttctcgaatcatggatccacaggccattgccatatgcaacaacatagaagctagatccatacatgtgccatgactgcatgtcattctcattggattggaagatta

SEQ ID NO: 41109 - DNA, 352 bp, Glycine max
  Clone ID: jC-gmro02910006b04a1
gctgaacgatttctctatctttttaacaacgtgaacataacttgaggtgccaattctccattgtgttgtcaacaagattctatgggagcgcaaccttgactaccaatttgcatatctgacattaatgggctgtcatctatcctgataagctaaattagaagggttaatgcatgccatgtcgaactacatatcgaatggctcaattaggcacccaggaaacataatgcttgcaatgcctgagagaccggccagggtccctgaggatcccattgtggcttgacctgtacactttcttagtttggctcaatgagatgatatatctcgctaattctttcggcggatacaactttag

SEQ ID NO: 41110 - DNA, 321 bp, Glycine max
  unsure (1)..(321): unsure at all n locations
  Clone ID: jC-gmro02910006b05d1
agaagctcccagtacaatttattcattaggatttaagatacaccatagcatcgagcttatttatatgaagtcaaattccctgaggagtaaatacctaatggcttaggaaacatagagattcaattaatacattcggaatttttcctttgttctctcaaaaacttcttcagcaatgttagcttctttgccatcagcccttttaatctccaattgagccttctgatagaatccagtacctcgcaatggatctgaaatgaagncatcgaacccaatagcaattgctgcctctgcctttgctccataaaccaacctcttaactcg

SEQ ID NO: 41111 - DNA, 248 bp, Glycine max
  unsure (1)..(248): unsure at all n locations
  Clone ID: jC-gmro02910006b08d1
aaaaccaaagggaaaaattttaaaataaaaaagcccctttaaaattcggggggggggaccccaaatcctaaaggggggggaaaaagcaatttcaaaaaatgggggggaaannggggccctcagccccaaaaacaccccccccaccttgaggaagagggggactcccgggttttagcttggacagggactctgacttcaaatataaaaggcaagagggatgctggcaaaaaaaaatgccaaccttcggc

SEQ ID NO: 41112 - DNA, 364 bp, Glycine max
  unsure (1)..(364): unsure at all n locations
  Clone ID: jC-gmro02910006b09d1
acattgaaacatgtagtagaaatggttttattggagagttgacatccaaacatggtccatgataaagtgaaacggcattacaaaaagctgcaaacctttcgcataatttctttcagatttaatggaaacaaaatcttatgagagaatatgggaattggagtcctttccagagggttcgctttgtaaggacatgagcatcatcatccaacaagatacaaacaatccaattaggttggatatgtccctcccgtattatttacctgagtttgntgaagactcatatatactattagaatggagctcaaagagcggctatgcactcaatttcaatcttggcatccattggcaagccagctacttgata

SEQ ID NO: 41113 - DNA, 414 bp, Glycine max
  unsure (1)..(414): unsure at all n locations
  Clone ID: jC-gmro02910006b10d1
atactcaagtcaacaggatacaggaacttcaatggctgtgtcacattctcgcaagctttttgaactgcaatgcccaggtcaacggctcctttgccaccattcgcatgatgggtacaaattacagcatcataagctccagcagctaatgcagcacttcgaactgcatttagctcggcttcagagtcagttgaaaacttgttgatggcaactacaacatttacaccataagattttgtatttgatatatgtcgagccatgttcacacaaccagcctcaaccagggcaacattttcagtcaaatatgcatggncaagaagtcttccagcaacaactgcaggccctccaccatgcatttttagtgctctgatagttgccacaataatcgcacatagaggtgncaaaccactataacga

SEQ ID NO: 41114 - DNA, 462 bp, Glycine max
  Clone ID: jC-gmro02910006b11d1
aaaaccccaaaaggtcccccagcatttccgaaaaaaggggccccccctcccataaagccccaaaagccccggaacaggggggggcccccgagggggacgcccccccccacggcccgggggaaaaaaaaacacccccaacaccggacccttacgggggaaacccctaataaaaaatttccccccttaaaaccattttttaaagggggccctggcccgaccccccaaaaaattttccccaggggggaaagaaccccacgggcccaagagaaccttccctttttcattccccccccaacattccaaggaacaaaagccccctggggttacctgggggcaaatttgggggcgaggggagagaaaaccccccccccccggggggagggggggatcatgccccccgccccctgaaccctgggaagacaccgccaggaaccaccgggggggggtggggattggcccccc

SEQ ID NO: 41115 - DNA, 402 bp, Glycine max
  unsure (1)..(402): unsure at all n locations
  Clone ID: jC-gmro02910006b12d1
attgatcacaacaaaattttaattaaaaattcgaactaaaatgtaagacttttaaacataaacgcacaaccattgtatagaggggaaaaaacaaaacgcttgacttgaagcggacaatttttcccatttacattggatcactatcgnctaaataaatgactccatgaagcacatttgcagcagcacaaaatgcacagccgctgccttttattaatccatagatgccatcatacacagcactgcattactaaccatgacgttcaaacttcagaggctgaccaacttaagagagttagccttctcttgcagagaatccaggaggctgncaaagctcttcttaaacgagtccactccttcaagttcaagctgggaaccaacaaagctccagncaatacccaattt

SEQ ID NO: 41116 - DNA, 453 bp, Glycine max
  Clone ID: jC-gmro02910006c02d1
gacggaaaatttctttaaaatacttgcagactaacttagcagaaacaaactaaggctagttttacgccctaaaccctaatcaaaactactttcgtcccaaagccagaaattaccaaggttaacattggtttcaacaataaaagacacaacaatacaactgtgtcttcaaatctgaagtatccccaattttcgcatgcacatacagggaacagaagcagaagtgatgagtaatcattaataaaatttcaaaccctaagaatctgaagcttggtggagaaagcaatagcgacccaatcaggctgcgaagacgaccactgaagctgctcaatctccgcacccgcagtgtacgcaagaatcgggtcaagcccgcccttcacgggttgacccatggaagaaaggtcccaaatcagcgcctgcgaatccccggcggtgcatatatggcacgagctatgc

SEQ ID NO: 41117 - DNA, 479 bp, Glycine max
  Clone ID: jC-gmro02910006c03d1
gaaaacataaatcgacatgacatactaccaaatattgtctttcttgagaaactaaatccaaccaaaggacatgaaatcagacatttaaaaataaatagtaaatcaaaagcagaaataaactaaatttagtctacttcctcaatctttggccccgcaccgcttccagcagcaggaacatcatcgtccattgcaccacccacgtctggaccagcaccaccctggtacatcttggcaatgatagggttgcagatgctttccaactccttcattttgtcctcaaattcatctgcctctccaagctggttgctgtctagccactggatggcctgctcaatggcatcctcaatctttttcttgtcagctgggtcaagttttcctccaatcttctcgtctttaatggtattcctcatgttgtatgagtagttctccaatgcattcttggcctctaccttcttcttgtgctcttcatcttctgattt

SEQ ID NO: 41118 - DNA, 422 bp, Glycine max
  unsure (1)..(422): unsure at all n locations
  Clone ID: jC-gmro02910006c05d1
agaaaaagctagaagcaatgatgaaatcttgtacatccacaaaagcattgcatgacatccattcgctcagcatatttattcattccaggtgaattagcaaattgcgagtaaaatatattttcccttccgaaggttgcaaaattgatctcaaatctatatatattctatattacattcatgctcggagaactcctagttaatcacttccaagactgaggttcttctcaatgagaatcatattcaagttgtaggctatttcagccaagcccatgtccctaaaagcaaccataatctttttacaggcaagcatatcaaaatccgagggcgntgattgcttccattgatcaataacttcacccacttctttggtatgaccaagcatcagataggaagaaatgatgcagatgtaattcctgctaatc

SEQ ID NO: 41119 - DNA, 381 bp, Glycine max
  unsure (1)..(381): unsure at all n locations
  Clone ID: jC-gmro02910006c09d1
gatacctcaataatgctaatattttatttgcctctgtcgttgagaaaacaaagaatagtacggaagtttatttcctttaatgagaccatccaaccactctgcatttggactttttcaatgtatacttcttcagtccttcctgatttcttctgcctatgaaatgtaataatacagggaattccagataaaaaaatcttaaataagagttcattatacatttttatgaattcctaaaactggacacctccctcattcctcaatgaggtagtttaatgcttttaaatcagcattcgggatatcatgttcaattatgcaaatattatttgcttaggatatatctcagatgccatatatcattnacactattaaactgtgctaaac

SEQ ID NO: 41120 - DNA, 423 bp, Glycine max
  Clone ID: jC-gmro02910006c10d1
aaaggaaccactactagtgcttcccattcccctcaagagagaagcgccaaggtgccaaaatctgtattccagaattaacatcagtcttcatgacagcagtaaatacctcaagatgtctcacaatacaataaatctaatgtactcacataaaattcaagaaataacatcatgtagctatcaatactatatgccttgtaataaggcaaagattacaacaaccttcttgaacggaaatgaaagcaatatgctcatctctttctaccaccacgctctcttaaagagatgggaagtgtttcacctccaccaacattggaatgggcgagagacatattatccttgagaaagccaggctttccactcaatttctgcttattagcagggagctggatctccccagcaattttttccttcagactaccaaca

SEQ ID NO: 41121 - DNA, 465 bp, Glycine max
  unsure (1)..(465): unsure at all n locations
  Clone ID: jC-gmro02910006c11d1
aataaaaatgtagaaagttcaaatatgatcataaattagttccatgtcaaccaaaaaaataaaaagaaacaacagtaacgattattaaaatacctcagagacttcatgcaaagttgaaccagtgtcctaaagggctagaaggaagcatttaactatcatgctgacaatgagagaaacattctccacacaacaacaaatgcagctggaatctatggtagtggaacaactaaactatagtattttgacgcatgctaaagttacagcaaatgaatgtcacaggaaagaaactcaggtcttgcaaggaacagnaatgaacattaagaagtttgcagcacatctcatccttgactacacttaaaaactatgaactgatatagnctaatacatgacaaatgaacgngtataattatatatgctacaatagaagagccggattcaataaggcaccaagttaaagccaccaca

SEQ ID NO: 41122 - DNA, 386 bp, Glycine max
  Clone ID: jC-gmro02910006c12d1
aatagataacagaattatttattggaagtatatcaatacaatctcaaatgagaaagagagaggttttatacgtaattaacaaacataatgaacataatgagcaagagggcggactcggagctaaacaaatcgacaaaacttaaattcctaatatagttcttatctgattaggaggatgccttgccaacgacctggggtccggataaccattctagggatccataatagccttataaataaggtcataagcttcggccagagacctggccacgccaatagtagcttcagaacgcaaccttggaacctgcatctgctcaaattccggcagggaactttcacttcccaagataaggccaaacagagctttcaaacactccgaaagaaca

SEQ ID NO: 41123 - DNA, 428 bp, Glycine max
  Clone ID: jC-gmro02910006d01d1
aagttaaaataacatttattttgagtttttttttctaatacaattctccgtaactattgcgaaacggaaggagtaaatctcaataatggttcacgaatacgtcgaattccacgatagcgtgtactttggtgaaatcaacagagtaaaatctggcttgagcgtagccacgtgcaaaacgaaaagccccagtgccgccaacaatagccatttccctaacaggttcactcatgatcatgttccttcgcaacacgctgatggtgctgacgacgaaatctccatcggtgaatgccatcgtcatcaccatcattagtcccatctctatttgcgatattgaagtgtaaattacttgggccttgcccacatgtttcgagtcctgttcgggccccacggttaaagggccgtccatcgccacaacggttccgaacgga

SEQ ID NO: 41124 - DNA, 342 bp, Glycine max
  Clone ID: jC-gmro02910006d02d1
gataatcaagaacattttaagttaaaaatcatccaatattcaatcgagagacatgcattggttccaattaaagggcagagagacacattgaaacatgcggaaataggtcccccgatttgtaacagccgcgaagaatgctaccaagaaaataaaaccatacagggcaaagtggttctcaaagattactttttatcctcctcgttagatggcttgtcgtcattcttctgttgaggctcagactgattttgcatggaagccagcaaatccttgacagaagggtcatttgggtcaaccccaggaagcgatgcagggtttgaaaatccaagggatggatcggccaaa

SEQ ID NO: 41125 - DNA, 361 bp, Glycine max
  unsure (1)..(361): unsure at all n locations
  Clone ID: jC-gmro02910006d03d1
ctgcagtggaacatcagccatttctgaataattatatatgtaaaaatgattcatggatactggaatacacctagagattgaaaacgtgaagaatgacaagttacttaaataactccggtagaatcaataatatgacgtgaaaaaaaaaactgaaaaaaatggcgcctccatatttaactcctcaacgtttatacaggccccaaagggaaacaattgaacggacacaaacaccatgacatacagaaaataaactatttcccaaattaggtttaaggctctgggtttacttgcactgttatacatgctgacaagggcattctgacangatttgaacaactgtggcctctttttcctggatgct

SEQ ID NO: 41126 - DNA, 358 bp, Glycine max
  Clone ID: jC-gmro02910006d05d1
caaaacttgggggtggaacccttttgccggaaaagttttccctaaaattaaatcaagggcccctcatcttagaaacctttgagtaaaggttccccccgattttggaaagacccccccctacaacaaaaaaaaggttcttttttcgaataaaagggcccccaatttgtgtaggggcccccagccctgggagaaaatccccttggaggggccccttttggccccggaaaaaaaaaaaaaaaaccctcctccccctaaaaatgccataaataaggggtgggccccggggggtcccttggccccccaaacccagggggaaaaccccctgtgtttaaacaaaagccccccttggacttttttt

SEQ ID NO: 41127 - DNA, 410 bp, Glycine max
  Clone ID: jC-gmro02910006d07d1
catataaaagattagggatggatgttaaaagataaagaatgattacaatcaaacgcttatagatttatggaccccaaaaaaaccatcgcaattaattagaaaaaatggagacaaatgtgagaagcacttttgtattggagataacacaggcacaaagttagtaaaacaatgattttcggaccatgcttgcaaccccaacaattttaataagagcctaaaactcaagtcaacataagatcattccctccaagaagagggcgaaggcaaacacgaacttcatgctcttgtgatcccacacgaagttttggcaccatgatctcaagcactgatcctggcccatcatagtatagctttatataggcatcttcaagaatacgaggtgaaagagggatttcacgaacaaactcacc

SEQ ID NO: 41128 - DNA, 300 bp, Glycine max
  Clone ID: jC-gmro02910006d08d1
agctcttgttatgcttatagcataacttaatttaaaaatagctccacataaacaacattcctacttcgtagtctgagtgaggtttaacacaaatgtttttgtaatcccctctgctgaatttggacaaatgatcatacaggtagaattattaatctcaaaccaggggcgttgctgcttattgatttgtttattatgagaagcaaaaccacatcttacacaggagtgccaaagtccagcattagttagagctacattagcatattccactaaatgactatgcgctaccatttcataaaacac

SEQ ID NO: 41129 - DNA, 374 bp, Glycine max
  Clone ID: jC-gmro02910006d09d1
agtattacatcaatagatattcatgtcttatcatcatcggcagatcataatattgttacaaattccaatgcccttcagtatgtaaatttacatataccagagattacatttaccactgcccattacactatgagggaatacatatatttaattcaacgcagattgagatcctaccacatgacgttattcacgagcagtttgaggcataactcacaagtcccaacaactctggaccttccatacgaggattattctgaaaggtattgaacggaatatgctcgaatggcccggaggtaggaattggaccacataaatcattattggagacatccactactttaaagctagaaacagcagcaagttccttggggatc

SEQ ID NO: 41130 - DNA, 373 bp, Glycine max
  Clone ID: jC-gmro02910006d11d1
agcattaataacacgacttgttcttatttactggtatacaaaaagaagcatttgatgaaatcagggggaaaattcaaaagacaaagaatacatttttcaaactgaactgcaaagaatacataagaaaagagaaagatttgctgtcttaagaaaatactattactgattagacactgactcaattactgattagacagtgacactgcggagcacaacagtctcaacggagagtccagggccgaaaccaaatagcacaccccagtcaaggccttcaccggttgagccaagtccattttctattgatttcttcctcatttgatccaagatgaatagcacacatgcacttgacatgttaccatactcgctgagcaca

SEQ ID NO: 41131 - DNA, 382 bp, Glycine max
  unsure (1)..(382): unsure at all n locations
  Clone ID: jC-gmro02910006d12d1
aaagacaaaagctatcgnctcccaaaattttaaaccgctcaggtagactacaatggggagaagaatcgtaagttcggaatttttaaccccaaaagcgccatgcaagataaggtcaatagtacagactcaaattaagcactacaagtatccacgttgaatatctcccagcattttcgatatcaaaggcaaacaatcatcaagagctgcgattgatcacgagcttccatgagagatggttaatgatgcaccaaaaagtcaagccgcatatgtcgacaagatatttttctttagaggtaactcgccggccttggcaggactaaaggacttgtcaagtatgcgctgnaggcgctggatttcgntcttagcataatcagaacctttt

SEQ ID NO: 41132 - DNA, 487 bp, Glycine max
  unsure (1)..(487): unsure at all n locations
  Clone ID: jC-gmro02910006e02d1
aaaagcaaaccaagcaaaaattgaacacaaatataaagttgacatttaaaaagcaaaccaacaacgcaacggcaaagccctaaaactcgctgcgcttaacaaaaatgtaatcaggggttctcacaaacacaacacattaaaacagaatgataaaaggagtcttgccaccgtcgatcaagaacccaattctgggaacaaaagttgcgagatgatggtggagacttcaaactatgtccgaaaaacaagctacctagaaacgaagacacaagggcaagaaaccaacatttattgtaaccataagaaacgacatcccctgatgaaccaaaccgcacgattcacttcttcttctgggcagccttggtgaccttggctccagtaggatccttcttctccacgttcttgatgactcccacagcaacagtttgacgcatatccctgacagcanagcgaccaagtggngggtactcagagaaagttcaaccaccat

SEQ ID NO: 41133 - DNA, 419 bp, Glycine max
  Clone ID: jC-gmro02910006e04d1
ctataagtctagcaaaaaattgtcacagactaagatggatgatttcatttcacatggaaatagtacagcctaactctttggcagcgatatcaagaaagttaatagacaatccgtttgaaagtcggctgagagcttcccaagtcaagcatttttctatgtcagcttgccagtcaacggcatccaaattgaagtattgataagaagggttgagggtgccatttaatctccgaggtttaggactacatctgattgaaccagtatgcaaaatgtcacgaagaactgatatactcagagctcggacatgtgcacttggatgagaaagacatctaattgtagctgagatgcgacactttaaaaggttagaaaggccatctgccacagccaatccagattctccaaactcgagcactggctgaact

SEQ ID NO: 41134 - DNA, 421 bp, Glycine max
  unsure (1)..(421): unsure at all n locations
  Clone ID: jC-gmro02910006e06d1
cttcatcactaacctttcctggttccataacataatcaacgttcaatccttatagtttcacttttcaagatttagaatccaaaaataagctttaagcttacataaataattaacattattagacagnaatgaacatcccaaaaaacaaaaaaaattaaatcaggcagcattaaagaaaaatgtaaatggcatattcgatatcattttaagaaactatagctcagcttttcctatttaaaactcttctgttctttgcaaaatcccgagtgaatagcaattgactcctcgatttctccttggcaacaattaataatcccacaaccatgatgagaggaatcatgccagaaaagaaacgctttttcactgttaggaaaatgagactagaaagttagatctttgggggcctcaataatctgggaca

SEQ ID NO: 41135 - DNA, 437 bp, Glycine max
  Clone ID: jC-gmro02910006e07d1
aaaattgaatagttacaattttattttaattatattggacaaaaaaagttatcaaacagcaaaactatggtagatataaaatgcattacatctcgcatgaagggggggatctatacataatatcatgtgttgcaagcaacacacaacattccaacatgtagacattgaaggtcatacataacttacaatgccaaaacaccaaccaacaagaatgtcataaaatacagtaatatgagagagctaagcaaattcacgatccagatatacaatccagcagtgacccactcggagccgattcgaacccaaactgaagtccaaccaacatctatgagatcttagctctcagatgtactggtccatccagaaagaagcatggctgaatacatgctagccagggcaaatatttggaggaagaatgaatacgaatagataacggg

SEQ ID NO: 41136 - DNA, 291 bp, Glycine max
  unsure (1)..(291): unsure at all n locations
  Clone ID: jC-gmro02910006e09d1
agatagctcatagttatttgcacaaaactggtaaaattccagatcaataaggatagcggcgaagccgcaaagatacaacattcattagggaaaacaggcgtggggaaaaataaggggggaggggttgaggaagaatcaattgctcacagagcatgctaagacacctaaatattccacacacagcttttgaaacaacccaatatagagaaaattgttctctggcgctttataagctaaagcagagccaaatgacttggaagatnctactgtcgtataccattcagttggcaa

SEQ ID NO: 41137 - DNA, 362 bp, Glycine max
  Clone ID: jC-gmro02910006e10d1
accaactcaataaaaacaatcattgaaacttgacaataaagagcagagttttactgtatcatgctcagcaataatacaagggcccggaaaacaattctgcacaaaaatatcactggccttcaaaaggaagcaactcatgggaatgcgatctataattatgaatcataagaattttttttttctctattaactaacaaaatcagagattaaggggggtcccacttgttctttggacaaagaagagactagcgaattcttggctcattatattatagacgtcaatatatgcccagagcatatctgatttggctgccctatgctagtactccactatactactagtccaaccaccaccattttac

SEQ ID NO: 41138 - DNA, 396 bp, Glycine max
  Clone ID: jC-gmro02910006e11d1
agatattaaactcataatataaagtgtgttaaaagaaatatgtttgacaatatcttgagagtattgctgatatggctcacgcttttctttttgttaggattgttccttgaaactaccacaagagtcacgcaaaaccctatcttcattagctttcacatttgaatcacatcttctgcatcaagctaattatcttggacattggcatttcattttgctttcaacacatccatagagcactttcttttcctcaccacttttgcttttccccttaagcatatcccactgccctgtacattcccccaagaagaaacccactattctttgttggctaaaggatcaagagagacatcaacagtaactaggtgggtctagaagccttatctcactttccctcac

SEQ ID NO: 41139 - DNA, 462 bp, Glycine max
  unsure (1)..(462): unsure at all n locations
  Clone ID: jC-gmro02910006e12d1
catccacaatacataataatttattaaagatcgagaaatcgtaaaacatgtccatatgaatcaccaatcatacatgatacataatttaatattaaaaattcaggagcttcctcttagaagtccttatcttcaggcttgagccacctctactgtttcagaacccttgtttatttcaacaccgtttacacctttgtcttgattggtaccacagggttctagcttggnccccttctctgacttcttttcttcatgggctgtttcatgctcacaaactgagatgccaaccttaggttgacataggacttcttcgagaatccattttctcaattgactggnagccacttcatctaatcgagagacggagtgaccttggggatgccttattatcaggggtttggcaaatgcagatgagagatcctcagatagaagntncagccaatctttttccccaatgaaatgaac

SEQ ID NO: 41140 - DNA, 409 bp, Glycine max
  Clone ID: jC-gmro02910006f06d1
aacaagcgaacaagtattatttattgaattcatcaataacttacaatgtgattgttgtgaattcaccacaaagctctaacgttgactaacccctagccagataaacatgagttacattcacaacagtgtagacatacacagatgaagcatatgataagtttattgttcaaagcatgagcctggaccaacaggagcagttcttgcaataaaattcttgacaggagcagctggaatccctcgtctattcaagagacatctgaagtaatgcaaccgcggcaatgcaattatgttaacatttcctgagggagaatctctccgactccacaagcgttctgctgctgctgctgctcgaggccatattgtttgctgaacatctgatgtatcaggtggctcaccccacatacagact

SEQ ID NO: 41141 - DNA, 404 bp, Glycine max
  unsure (1)..(404): unsure at all n locations
  Clone ID: jC-gmro02910006f07d1
gctgctaaatcggaagaaattgaacataaatttcatcaaacatgacaacagattgtacttattcatagcaaagaactaaatttcataaaagggagcttcacaaattcacgaaccaaacagaatttataaaaagaccagaacaaacaacagtttttcaaaggccactattgaccatggaaacactttaacaagagtaaacctttcaggaacattaaaaaaaaaaaaacccaaagatcttcggaacttccacatgcttagacttcaagacacctacagaacattctcagacttttaaaacccaccacgaagacgcaacacaaggggaagagtggactctttctgaaagttgnagncagcaagagtccttccatcctccaattgcttcccagcaaatatcaacctct

SEQ ID NO: 41142 - DNA, 365 bp, Glycine max
  Clone ID: jC-gmro02910006f08d1
aagcactcataaaatattgttttcaattaatttctcaaatacatacccttgcaaaaaaatgttattacaagaaaacatacgctgctaattgatttttaatcatcaatagcctatcctaaaataatggcgaatataagagtgaaataaattggatagagaggggcattatctttctgtcaaggaggaaagctagagttggctttaagcacaacaactgacatgcacttaagttttttggagcagcaattctctacccaaggcatgagctcaaagaactcttcacagattgctgaagcctttgcgcaagacttatagggaacatatttctcaccaaaattaattccaaagagctaatgctgaaaagc

SEQ ID NO: 41143 - DNA, 244 bp, Glycine max
  Clone ID: jC-gmro02910006f09d1
gaccaaaaataagggtcttaactccaaaaagtttccaaattttggacttaaaaaataaacagtcccggcaattatcttagtggcttcttgggcagctttgaaacaggatccgcaatgaactttcacttatcattttcattattttcagcagcaaattagaagggtggcacgcgtgcaaccaacttatccttcctttgctgattagtaaagtccttcatgtgggcccttttgcgccccttcgggg

SEQ ID NO: 41144 - DNA, 211 bp, Glycine max
  Clone ID: jC-gmro02910006f11d1
cagcttgcttctggaacagctcccatcgagcttgcattgacgcacctgagcagtggttaatctcaactatgtcagaatcagtactgccaaaactacacattcccttaagaaacatcttttgtacagaattcagatccaattgtccatatactgattcagcataagcatctaaacctatgtctagatgtagctgaaagtcttcaccaacatt

SEQ ID NO: 41145 - DNA, 505 bp, Glycine max
  Clone ID: jC-gmro02910006g02d1
catacaaaaataattagtatatatcctttcaagaagaaaggggaaacaaaaaacaaagagttaaaaaaaatacacaagaaaaaaaaggtgttaaaaaaaatcaaacattaacaagtagtgattggagtgcttaatatacagttgcattaaatatttattgtggtgaaagatacctctgatctgatacgaagaatgggtcccctcatgtgttcttacaggcatagatcaacaaggagaattcaactctatctttatctttctgtgcaatcttctcctctaaccacaatctgctatccaagccactcctggtcctgaacatgaacacagcatacccagaagcaggattgaaaaaccagttatgaacatcccaaagcaaatccacaagcaacccatcgacgaaaatcgtgtggtttcccctgaaattccactgcagcctcttcacacgaatcaccgtcttcttatcgatgcaaacagacaaagcaggagccttgagtccttcattctc

SEQ ID NO: 41146 - DNA, 488 bp, Glycine max
  Clone ID: jC-gmro02910006g03d1
tcttcttaaaccctttttttttttagacttaaaaaagcacactgcatattcatcaaagcatcatcaaagcacactgcatcctaacagcacacgtacgtagaaaggtgaagttccaggtcttgcacaacatacacaacacaccataatcaattgcatatacaatcttatggagcccaagatgcagatgcatggactaattaaacaacaacgttagtctgataggcagtgtccatagatcaattgggtacccataaaatggccttgcttccacggaaacggcaaacagggttagctccaggatcaactcccatgagttcatgaagcatgtgatgattcattccagaagtatctgagtggcaaacagcaagtgcctgagttttggttccatcaccagccaccaatggaaccatgaaagctgatgcttcacggactttatggcagtaaaatactgcagctctgaaatttagcccatgacacatcactggttt

SEQ ID NO: 41147 - DNA, 378 bp, Glycine max
  unsure (1)..(378): unsure at all n locations
  Clone ID: jC-gmro02910006g04d1
ggcttataacaaagacagaattttcatttcaagaggaaacaaggataacaataacaagggaagcaggaaactgtaaatccgaccagatatgaatgcagcactatcgaattttataaactacaatcaaactatttgctagaagaaacaagaacagtgatctgtctgagttttcctacacactttaggttgtagttgcagcaactaactggttctttgggcatgccgcatatgcatgatcttactcaccacactcatagcatgtgctcctgctcatatagccacttcctgtggaacttggcttatcaccatcagcttcatttatcctgagacttcctaaggaactaggnttatcaccattagctccattaaccgaggagc

SEQ ID NO: 41148 - DNA, 387 bp, Glycine max
  Clone ID: jC-gmro02910006g06d1
gagaacaataatacactgattgcaacatacattcaacttatccaaacaaacagggtcctataaagattacagactccacaattactaatattcaagggagcttcatagggtattatagtagaaacaaatgtaacacaagcaaaagaccaggaactattctgggacttggaatcatagacaacatcttgaatagcaggtaaccatcaaaacccagcattcaggcatttatatcataatttctctttccacaccctcataatatctccagcaacttcaccttagtaaacaaaacgaagtcaacaggtccaataccaactagcacctgctcctggatttttccatggccctgggagctaagccaatagcatcagaacccttcatgatttt

SEQ ID NO: 41149 - DNA, 382 bp, Glycine max
  Clone ID: jC-gmro02910006g08d1
acaacaagaaaatttttttgggacttgatttggtgaaactcaaaattttctaaggacaaagaagggttttttcatggaattattctttaccttaaaaacccaaaacaaatttgtttaaactggggatttcggagtccactcaaaacatctgatttcgcctcctatttatttggggggcccttttttgggtttcgggaatttcgggggatctctccttggggggctggtaaaaccctggaattccccattttggacattgatgtagcaaaagatttccgaaaatttttaaatccaacagggaactcctaggagatctggtcagggtcctcactttttagaaattggggatcaactccaaagacaggttggagggaaaggaccc

SEQ ID NO: 41150 - DNA, 402 bp, Glycine max
  unsure (1)..(402): unsure at all n locations
  Clone ID: jC-gmro02910006g09d1
gacgaacaacgaatagatttataattcattcatgcttaagagtagccgaaagaggagaaccgaattattaaaaacaataatcaaccaaacctaagaagcaacatgctcaactttaaaaaatctctgacaacaatgattaaatgtgtactcaactaaaattctgttcaacacctcaagaaatgcaatagaagttctgatattaacttaaaaaacatcaaaaggccacaattctctttggcattaaaagtaaaatatagcaactccagaataagaagtttaaagncttctaccccttctaccactctttctacgggtgctatccgaaagaatgggagtaacatcctctatacgaccaattttcattcctgaacgagcaaaggctcgaagagctgatagagcacc

SEQ ID NO: 41151 - DNA, 409 bp, Glycine max
  unsure (1)..(409): unsure at all n locations
  Clone ID: jC-gmro02910006g10d1
agtagccaaagaagcacttaatccattcacttgaggagattaagaataaataagattgcatcaggaaatcaatgatacattatttacagggtaaactaaataacaggaaggagaattttcccctatccacaaccaagtacatttcatttaatgaggtaaattaacatgactagaacatcatgcacaagttaagatagaatgagaagaacaggaacatgcatgcaaggctaggggtctgccttaccagcaacctgttcatcactagaatcatattcatcttcacttagctcttcatcactggagttctcttctgaggcagctcctatgtcttcaagtttagcatacttctcacagnactctttaacccttaggtcataagtggctcgatcacgcatcattaaagctgcag

SEQ ID NO: 41152 - DNA, 390 bp, Glycine max
  unsure (1)..(390): unsure at all n locations
  Clone ID: jC-gmro02910006g11d1
agcaaaagccacatatgctttaagcagggtggttttcttgctggggattccatcaccaacatcacgatcacaattcttggagctttatttacataaaaagggatttgaaggggttcaaaagactcctgccatggaagagagggcgncgaagctccaaaaggtcatagggtttccagcagcatcctgagatgcatcttcactgagcaaagacgccaatgcagcatcagcccaagcttcatcaagaaaagaaaggggctcaaagaacttcagctgggattcaatgtctgcaagctcctcagaaagagtttttgcagaatcatcttgcacagatgccatatccagcagaggaggcttcttctgattctgatcagcagcaccctgcacaaactg

SEQ ID NO: 41153 - DNA, 402 bp, Glycine max
  Clone ID: jC-gmro02910006g12d1
aagaaaaaatcaactcagcccgtcattaacaaggccatggaacaatttcagggttatacatatgcacattattttctcgaattaagatcatcatcacaaattaatgtcccccacaacttattcatgccagattttagaacagcaattcatatcacagctttgaaggcgactgataccagccccacggttcatcaaatatgtacttgggcacttgcttcacacttaaatagttctcgagtccccattctcctagttcacgaccaaaaccactacgtttaacgcctccccatggagcttgaatgaagcttggttgagcacaatttatccatacaattccagcctgaatagcctttgatatgcgctcgcatctttctagatcttttgacattacagcagacccta

SEQ ID NO: 41154 - DNA, 476 bp, Glycine max
  Clone ID: jC-gmro02910006h02d1
actcggcggccgcccttttttgttttgactatattatctccaaatttctatatagcttaagcatatgccacatttttctacatagatcaaaccgggtaactcttagttaacatagagccagctagagtacattccatacagtaatgtcgaaataggttcactctacagctcgggagaacatatggcatgaatagccgatgagccatgaggaacagaaatctatgtggaatttcaacattgcctagatatcgacacaattgcctcgtggagacacccaatctcattcgtacagaaaccagggtcttcagtgatctggcgctatttgctaaaaggtcttcatcaagtgcgcttgaatgcttttcaaaaacgcactttacggcgcttccaccagatgaggaagatgcaaacttatcatccattttagcataagtcgccttattctttgtcaaagtaatgctaccaaccattgtagcttc

SEQ ID NO: 41155 - DNA, 435 bp, Glycine max
  Clone ID: jC-gmro02910006h03a1
gctctcgtcaagtttcggggcttccttagtagcagagaccaacttctttccctcaaattccttaagctgaccaacagcatactcgttaatagcatcaaccctgtagagaacctcgaaccccttcttcttaagcttttcaaggaaaggggaattcttaacagctttcttgctttcaccagtaatggagtagatgtcattctgcccttccttcatcctgggaacatagtccttgaggctgggcatctcattaccactcttgggggagtgatacctgagcaattcagcaagttttgtcttggtctgagaatcctcatgaataccaagtttcagattcttagagaaggcttcataacttggtatagtctttcttggtctcagcaatttcaaagaacatttcaatgcacttcttgaccaagttcttcccgatgactttca

SEQ ID NO: 41156 - DNA, 457 bp, Glycine max
  Clone ID: jC-gmro02910006h04a1
tctagccttaatcatgaagaagtctttttctaaaggaaccgatcgcccctgtcaatcttcgggggcgcaataatagcagacaccaaatgcttcctctcaaatgccttaagcagacccactgtatacctgtcaatgacggaccccgaggtcagaacatacgaacaccgtatgcttaagttcctcaaggtacgggggaaccttaaccggctaccatgcgtcggaaccgtaaggatgtgatggactgcggtcattcttctgtcctgaactgaagctgcttgcggtgggacatgagctactgagtccggggggactgatatctgaaccaccaactcagacacgaaatgatcgaaaaattcgaagaatttctgggtcacagaacattacctaatggtaaggatctgagaaacaagatgggcggcaaaaccaagtcttacgagctgactcgcgccgagtttga

SEQ ID NO: 41157 - DNA, 439 bp, Glycine max
  unsure (1)..(439): unsure at all n locations
  Clone ID: jC-gmro02910006h05d1
gcacaataatagtagtctattatcacattgccactgagctgtgggagaattaagcattttctcgatacacagcatttgcttgagcatcgacgtcaaggtaaataatttacccactacaattaatccaacaacgacacatgctgtcatccactaatttatcagtagagatgaccttgccccagggtttcttcccaaacctgattatcccaactagatacagaagctattttatgccctccaagggaaagaaactagaggagaccaatgtccaccagactgccacatgggtggccgaaagatgaatcccaaggcccgccagagtgtaaagagtgtctatcatgccagcgagggccaaagcattatcggacgcttgtcaagcatacataaatcgtgattctcgacaataactgtagnctgacataaaacaagaatttcaccg

SEQ ID NO: 41158 - DNA, 489 bp, Glycine max
  unsure (1)..(489): unsure at all n locations
  Clone ID: jC-gmro02910006h07d1
agagttaattagcagtaatataattaattaattttgatacattacgatgccttgattggttccttgagttgtcagaataaattcatctctttactcactagtgatgacctgagaatccaattatccaaaatatgagagcatcaagatgtaaactccgacaattccagagtagttatttacagcttcctctaaagcacagtaccaacaaaagtcttaaattttttttatgcatcttcggggaaccaggtcaagatccttgttccattttggctttttatttgaacagaagagcttcgnttggcctttccataagagacaagactgaggctgcaatctgctttgatgaaagccctgcttcttctatctgaacttggggtgatccatgctcaatgtatctatcaggaagcatcattgctctccactttagaggcccatctaggatacctgataagctcaggaattgtgatacatgtgatccaaaaccaccga

SEQ ID NO: 41159 - DNA, 392 bp, Glycine max
  unsure (1)..(392): unsure at all n locations
  Clone ID: jC-gmro02910006h09d1
gagcacaaacataattcagagctctatacatttttattggttcatctcatcaataacataagcgttaaacattttcctaaattattgtagtccatcccttctttaaaaacagggcatatcagnccctttcacaggaaatcatttgcaacaaatattttgaactgtgaatgcttttttccaagggacataatgacgaaggaattcatacatatagtagatgctaaataatcaaacccagtcaccatcattccattacctccaagaacaaaccaaactctccaatttctgcatagcccttgcaggggcaacccacaaaccccaatgacacatgaaaggatccacaagaagaaaaactatacaaagtaggagtcatctcaaaaaccagagaaaac

SEQ ID NO: 41160 - DNA, 366 bp, Glycine max
  unsure (1)..(366): unsure at all n locations
  Clone ID: jC-gmro02910006h11d1
cttcctagttttcctagttagctgattgagcacttcatctgcaataggagcaaaagaagaactatcccctttgggcttggcctcattagcatcttcattcaattgcttttgaagtgcttcataggccttgatgatagaccaatacgctgtacctgctggattaatgtaaactgcatccaaatagtccctagttccttcggggtcgatagtctatggtccaaccagaatccagcagcatctcccttattcgttcacgcagnnnctgtttttctgtaccactaccacgctagatttttccttctttagttcttgagggtgggagtttttcatgcacaggagtctgctcatcctcagatattatttttt

SEQ ID NO: 41161 - DNA, 492 bp, Glycine max
  Clone ID: jC-gmro02910007a01d1
ataaatgaatctcctgaattctgcaattgatcagctaaaaggcatcggggattaatacaaagtatcaagtgcgctccagctagacattattctctcttctgtattactttctagtttctcccaaggtgtttccaaggagtggttatttctccttaaatttacatggacataaagacacgcagagacattaacagacgtccacaccttttataattggtaggcaactctattttaaccatttagctcccacctgccttggtgcttttacaaagccataaataagaaccacatgtagaaacttaattatttataggcaaaaaacaaagtggaatgatctaggtggtggacggcttagctcgatcttgtcagaaattttctttatggaagtcgtacttggtggatgtgttgtgagagaaatccaatgctagctgacgaagctcatgggtgagggctgatggcccacaagtaaataccccaactcgggcatctgga

SEQ ID NO: 41162 - DNA, 444 bp, Glycine max
  Clone ID: jC-gmro02910007a02d1
ccaattaaataagataaaacattagattgttttctttctcttaaccaaaagataaggcaaatgttggactgtcgaacgggataagctaaagaaaaagtaacataaatgtaaaaaaagaaaaagaaataacaaaactcgttgcgaaaagaaaagaaaggaaaagacaaaaaaaaaaaaacagaaatgagatagaggaatgggaaactccgaaatttgtgattggattggttgaagcatgaaagttagcgtctgcaaaagtcaaggtaaatacgacgtcgtgcagtgaagccacccgcttcctagactccacgtgacttgctatgttcaggttcttcattgacggtaacggcgtgataatcaggacttggaaacggaggccgcgtctttgacgacggcgttagccagagtgagcgcggacattcggggagaggagggcccatcacc

SEQ ID NO: 41163 - DNA, 299 bp, Glycine max
  Clone ID: jC-gmro02910007a05d1
ggacatacgacaaatattattaattttaacatgcatagacttacacaccgaaattatgagtattagatcctcacccaaatataccaaataaaatattgttaataactttcaactttgctggcgagtgggcgggctttacacatagcctccaatggaattaaccttgacaaggtgatccaattattctctgtcatatcaagcttcttctcacttactcgtttccagtcaaaacattgaatcattaatcccaaagtatagctaacactttgcatagccatgggtttttctgggcaagccct

SEQ ID NO: 41164 - DNA, 251 bp, Glycine max
  Clone ID: jC-gmro02910007a06d1
ctagctaacactcccatagttatctatttaggtcatgatgataatgccacaccagaaatgagttcaaagatagctactgcctgctaggcatattgttccgcagccagtagcacccctaaagtgtcctttttttgtttacataaatttaggtactagcttataatcaacaccaaaatgcagcaagtacactaacgagggcatgaacacaatcatttacagcaattcacaaaaaaaggccctcttgaatatta

SEQ ID NO: 41165 - DNA, 454 bp, Glycine max
  Clone ID: jC-gmro02910007a11d1
acacattaataaatccatatattatctacatggggttcaacattacttattaccacttttaaatcctcttaagggggtttattcggcctgggccagccccaaaaaacattatggtaacgcactgcaaggaacattatttccctgcttgatcattattccctatgactggaaatgcatgggacaaaggccccattgcaggtgaggcctcctgataagacactaagacctatactagaccatacatttggcattttccatctcttaaaggacattatgcgtttctaggaaagtcatctttgacccatacatgactagcttacaatgatatggggatctgcggatacttcacccagagatttccgctcgtcttacaaaattgtttagcttttctactgcattacacggatgataaggtgaaccttcacaagaggaggaagccctttttaccttacaa

SEQ ID NO: 41166 - DNA, 387 bp, Glycine max
  Clone ID: jC-gmro02910007a12d1
aaaccccacccaacaaaatttttaatttaaaatttgcaagatttgaagtttttattcatccaaaacttacaaagtctaaaccaacaaaaagagattggtcacaccttctttagcagactaaagattttgccggagcttttaaagactccacgtcctttgaattccaggatatgctactcaatttttgaatttttttggcgcctgggtaaactggggtgctttggcaactggggcactgggggcactaaaagtattgtgaataggaccttgggctaagcgctccttcctacgagcaagtttccttttcctgatagccttgttctttgcccgtttggccttaaactgagtaaacaaaggtttttatcttgcctttttaaccttggactt

SEQ ID NO: 41167 - DNA, 484 bp, Glycine max
  Clone ID: jC-gmro02910007b02d1
acacaaaaccataggaatatgatataagttatgatcatcatcgacatattgtgtacaacaatagcaaacgaaaaactaaaaagctaataatatccctattacataaataggattacgaacaagatagtaacaaaaaagaaaataaaaagatatgtagcgataaaccataatcataatcacactgaactattattattattattatttttgggtcgataatgatcacactgaaccttgagtaaccttgtttatgactttaacatcctgacccaacgacaccacacccggtctcatatctgcggttacgggcggaaaaaccccttggtacggaggagcgtgcactaccccaccacccggcacagtataataaacctgtctcccactcgcactatcgtacgccacctgcgagtacggaccaaccgtattatccagcatcccacctggccgaaccattccgaatccttccgtatacgcgggagcctta

SEQ ID NO: 41168 - DNA, 271 bp, Glycine max
  Clone ID: jC-gmro02910007b06d1
atgggcaatcccttcataattgcaaaaatgcactatggaagaaaaattaggagggagggggagtaacacgtttaaaattctatacaacttctgatgttcatcatatctatgagaagagaaattgataattctcagggcttgcctcatctaaaatcacaagctggatgatcagtaagatacctattcattttcatttgactcggtctatacatcatatacaggcattccttttttaatggatccacggcagacagggcacctttttcatttt

SEQ ID NO: 41169 - DNA, 457 bp, Glycine max
  Clone ID: jC-gmro02910007b07d1
aaatggtgtattaaaacccatgaacatttgaatttccaaggtcataatagtcagtaaagggtataattgatacaaaacctcaatgatagaaataaatgcaaaccaaaaaagcaatagaaactaatagcatggcaaaaggatccgtaaagaactgcggggggcaaaagtaatcgcagaagattgtgagagcttaagtatgcatgaaaggcagagttatgtagaagactgctcctcagggggtggtggagcttctttctggggtaaatctgcagtaccgttattagtggtggcatcctttggttgtgatccaggtgcggcgtctggtgcagatccattggctttagatgctgtttcttttccgtcttttccatctttcccatctttggcgtctttagcacgtgcaggaggagggggaatcatgtgagctggtggtgtatgtttcagcttcaacaatatc

SEQ ID NO: 41170 - DNA, 527 bp, Glycine max
  Clone ID: jC-gmro02910007b08d1
agtgttaagaggataaataggaggatattattggaagataaaagctaatcaaaggacattgaacaaaactgagaatcaagagcatagtgctgctaaatctttagtgctgctaaatccctgaactgcacaagaatttaaactaaaccagaaacaaacacaacaatagctatttatttgtttgctcttaattttctatacactataagtcaatattatcttaatttcactacttctatacattggtgttctattagcttaaactcctctctaacagataacaggttgttgtgctaagtctttatgtatctgcacaaagaggcatacccctcaatcctgccaaagggcatgtggttccgttccaccacgctgcttccaaagccttcatgctttccccgttggcttttcctctcttagtcttccaagagccaattaacaaaatggaaagcatatgaagtcaatcttctgttcagatgctcagtggtctcagttctctttcgtgctcttgaaaccagtcactatttttttac

SEQ ID NO: 41171 - DNA, 370 bp, Glycine max
  Clone ID: jC-gmro02910007c01d1
gtcataataatattttaatgtaaaagcaaagaatgagtgaatttaaaaatataatcacaagcatttgttacttagatatgtaaaaatactcagtactaataatggagaagaacgaatgcaaaaaaaagttgcataaccaaaataatgtttgaagtttactagtcttacaacagtaatcaaattgtggaagaccttacaataacaaatacaacttgtcattgtagtatttgactaccataatcagcattgaacttgtcatatttgtgggcatggagatgagcagatggccttgtgtttctcaaagctgtctctatatcttcagatctgattggcccaacttttggcaactcttcttcaggcaccacatcct

SEQ ID NO: 41172 - DNA, 489 bp, Glycine max
  Clone ID: jC-gmro02910007c02d1
aatccaaaccgcaaatgcatatctaataaatccaacaagttatgctaatccatcctacagcaattcagatacgaaaaaaagtgaaaccaaaagtaccaagaacataaacttccttagtactctgactaaaacaaaacatctaagacacctgcaaataaactggggggaagcatacggaataggaataactggaaagcagattccagtcaaaagactaaaggaatctaagacacaagattgtcattgagagagagtgaagctagttgatcagctgggttagtttgctgttgagcaacatttcttaacacatccatggcttcagcaacttttgccttcagagcatctggtgactcaatcagatgtaaaacttcaggctggtccatctccagaagcatgccagtaacctttgctgcagcatcgtgttccagctgatccacaagcgggtataaagcttcaccgagcatagtcctctgctgttcagggggagca

SEQ ID NO: 41173 - DNA, 512 bp, Glycine max
  unsure (1)..(512): unsure at all n locations
  Clone ID: jC-gmro02910007c03d1
gctgaacccaaattaacacatttttctactggttgtcaataaaaaaatccaagaagcattacaagcagaaaatatggcaattactctgctgtgactcatctaacagcagtagacaccaacattaagcagaatatcactggtcctaaacctaactttctctttatatttttctttttcccccttttatgggatagggattgtgaagagggattttctgtcgatatatagcaaacgaattacacgtcccttgttcccaaagccccctcaccaccaaaagacagttggggggcataagccacatcgcatttatcagtcttctatccctaatagggtcgataccttctactacgattgccttcatcattgccactacctcctcctnctcctcgccctggctgcccacttggaccattgctccgatcaattctgcggngtcgggttgctggcacttgtacaccaggttgttgaagaacatagccaattcgaccgtctggtaacaccattggaaccat

SEQ ID NO: 41174 - DNA, 392 bp, Glycine max
  Clone ID: jC-gmro02910007c04d1
aaaataaatataacttataattcatgcccctatagatcccacgattaagctttaaattaatgcacatatacactacaaaattaaacatcctgaaaatggttaatatttcattacattttctatggcactactcaactctatggccacacctaagattacccgattacatgatgataaaaacgtgattttggtggcttcataatacattccagcatcgactctccaatcagacgcaattagaacaatttggctcaaaatgaattcattgtgacctagagacactaattcaaagtctgaaagtactatagcctccaagagcagaagatccatacccaccactatagggttgcgaggacaaggaagatgaggaatacgatgaactgcccaactga

SEQ ID NO: 41175 - DNA, 417 bp, Glycine max
  Clone ID: jC-gmro02910007c05d1
attcaggtcttgtattctgagacagcttcaattggttgccacctcacaatatcatcaccaaataccaccacttattatctccttgcactcttgaggtaatctgcccttattgcccacaattgctcgcccactgatttcatgtcaggtctatctgttcgaatgggggctgcacattgaaacgccaaatcaagcattttcatcagaacatctccgtttacagcttcttccattaaaggatccacaagttccaccacacttccttcattatacttcctgaaggcccatctgagtgtaacccgctctgcaacagttttcttcaactcaacaggacggcgggctgtcacaatttctaaaagcaaaattccaaatgaataaacgtcactcttgggagtgagttggtatgttttcatatactcg

SEQ ID NO: 41176 - DNA, 467 bp, Glycine max
  Clone ID: jC-gmro02910007c06d1
cacaaggaagaaaagattatttgcttactaatcaattatttagacatcaaaattcaaaacaaataatttagagcttctagtgcagtaaaccaccttaagcaccacgaagtgccttaaaaaactatataaaatacattaggaacatcagggcttccgatccaaacatgaacaaccagcagatacataagaaatccttagcagctaattaaaaataaccagataccgctatttagttgctatatataatccaactcttcacttgaaacatttaggtgaatactactacagccatatgttgaccacctcattctttgccatctgctgctcgaagtgagcctagttgaactggggcttgagtctgcaccactttggaagacccatacactgatatatcaataccttgagccttctccttctcgatctgctccttaatccagaagtatgtgatcctcagtccatccttcaac

SEQ ID NO: 41177 - DNA, 374 bp, Glycine max
  Clone ID: jC-gmro02910007c07d1
ggaacaatgaaattacttactttatcattcaataaaaatcacatgacatatgcccaaaaccaaatcaaatcctaagatacatggggtacccgtatcaataaatgccctccaatgtaacattaatgtatacgaaaatttgtataatctccaatatttcggccctgttgctttgaaccaaaaagaagagaaaaaacacccgggggtgacacgggttggttgaccaaagatccaggtcataagtccggcttttaaaaacaatctggggcttcggcggtaaggagtcacctggggggagagtttaccttaacggggatttgcccccttctaagggaccccacttttatattcaccgggggcctaaggcgtaacggaaa

SEQ ID NO: 41178 - DNA, 406 bp, Glycine max
  Clone ID: jC-gmro02910007c08d1
aaacccaaccaaaattttttcatctgaaatttatattttaaatttcaaacaaaaatatcatcaccatagataaaccacttaagtaattatatacccatatggggggagaaaaaaaaagaaaaggatattgcagaaccctttaaaactcttcgaaactcattttaatttaaaaaaaattttggggggtagataacaaaaaggttgtattacgaggcgggggagaactgggggtggaaactttggggggaaagcagagcaactggggggctttgggggagggggggggctaagtcccaccggggaaggatcaaaatcaatctgcgccaacacattctccaattgaaaccctccaatcacaattgaatttctgggattttcaccttcattaacaaaccctaagcacata

SEQ ID NO: 41179 - DNA, 446 bp, Glycine max
  Clone ID: jC-gmro02910007c10a1
cgtccttgtattaaaaactcaatatcaaattctttgtcccacaaaagatggggttcactcccacaagtactgcaacatgctttctcataatagcacctctggttgtgctatggtgttggaagctactaaagtgggtgtggctgaggccaaagagattggagagagcattaagggcacagggccttcaggggaatccctacagcctcttgattggggacactaaggaaatgtacacagtgctcatgcaagctgccagatctcaacaatctacaagttcttttctctctaaggataaggatgcagcaccacatatcacaacctttaaccatcacattgtcaacaaattcggcaagaattcatttttttgggaaggtaccaaaccaaaagtggtaatcactgaccctgagcaaatcaaagaagtcttcaacaagatccaagactttgag

SEQ ID NO: 41180 - DNA, 534 bp, Glycine max
  Clone ID: jC-gmro02910007c11d1
atagaggaggcaatcatttaaccaaaaatatggtatatgtatatatagcagagccaaaaccatgcatacctacatttattacatgaaaagtgaggagtatcacaagctaaaagtaataatcaattgcaactaagtttgctgtgcttgactaagaatgccccatctgttctggagggttatttacattcctaatgttccaccaaaatttggcattacttctgccatcagaatcctttctttcagactgtgcttcctgcatttcagatgaaccaggattctctgtcaagaatcgttcccagaatatgtcattaacaccagtagtcacaggggcttttcccactggttgttcttttgatgcatcaagatcaggaacagcaactacagatggctcagaattcatgttgattccaggtgacttaggctgatcttcaacttctagttgcacacaagatatagctggactatctgcacaacttgtagatgcatcaaaatccaggtttaaatgactttgaacaaagatgtcaccaacatcat

SEQ ID NO: 41181 - DNA, 518 bp, Glycine max
  Clone ID: jC-gmro02910007c12d1
aaacaaaaaaatgcattgaattgagaataacaatgaaaaagtacatcaatacaaaaaaaataaaaataaaagactaaacatacatcaactctgttgtgggtagcacaagaaattctgcttcttattgcaagagcatgatctaccaacgaagttgaaaataagaattacaatggatcccacttattccaacacacatactacaaccataccatatgggatcactcatatgcagccagacaccacatggcatagcataactattcaaaaaacatggcatcgcataaataaccaaacccaaaaaataaatgatacaagattcatccatgaacaagacaagattcttagctattaacaaatgcacaatgctttctgatctctccctctgtccctgtcttcaccttaattcttcccattttctctatggaggttgcaaactcagcaaagaatttttcaactgacccttcagcaattcaatgatttgagcctttgtactgaattagtaacaatgcgcatctgac

SEQ ID NO: 41182 - DNA, 505 bp, Glycine max
  Clone ID: jC-gmro02910007d02d1
aaagactaaaatgttctatcttgctttccaatacaaaggtaacttgaaaagtaaataagtaaatgaagtttatcgtcggtattgagatgtaaaaatttgaccaagctattagtattatcttatagcccatctataatatccaaaacattagatctttggtgctccaagccttctctagtaacaggtgaacttcctacactattgctatgatgccaaactttggcacttcttttcttggttacttcaagattctcgcttttgctaactccagggcttcttttcctcatagttacctcttctaataatcttttatcctcttgagaaaggttagatcccaaaggcttgttaatactgtctaaagatataaatcgcaacatgtttgattgaaaatcaagtcgcctaggagaagttcttgttggcattggcctcatggtattgtgtctgtatcttacaaatgtaaccaaatagtgaaggtgagtcaacaattcgattatgtaaaaatcca

SEQ ID NO: 41183 - DNA, 517 bp, Glycine max
  Clone ID: jC-gmro02910007d03d1
ggcaaaatcttcccccattttcatttattatgcaagtcatttccatacattaagcaggaggtaaaggcctttggatgaaccatattatacaacaatacatctcagcaacctcaaccctaataagttagaagtaagtcaatccaaagttaaaagagtatggcatgctactcttgctgagaacatggaatcaaggtgaactaaactgacttatttttcttgttaagattctagatgtaaaatttggtggggtttattcagattgccatactgtgatttgggacagccctaatgaaaaaattatgtgagcacattgtgtcatcagtaacagcagaagaaaaaccctttagacctaccttcaatattgccaccttttggggtttctccagaatcatctcttctagccattaaagcacttgtaccgggagattccggtggcaatacaacattcttagacatcattcgcattggaacaaccggctcagatggtgaaatagtagttagatatcgaagcagcatc

SEQ ID NO: 41184 - DNA, 458 bp, Glycine max
  Clone ID: jC-gmro02910007d04d1
gaaaagaatcagaagcaaatatattataccatatgtatataatcaagcgatgatgaaattcacccgcacaattcaagcgaaaacaataggttatgtacatcactcagaatcacactgaaatattcaacctgttccttttcgccattcattctctgcaccagcccatttacactttttatatttttggcaaaatcaggaattttgtcctcctaaaattccttcctttccattataccccaccttgacaaaaaccaaaaacaaaagggtaaaataagataagaaacttgaaggtttccccacaagtatatgtataggccaagtagaattttccaaactcatttttattgtcttctctgcctctccggaaatgatttagcaggcctgaggacacgtttattttgcggcaccggcgctccaaaaaccatagtttgggaacgtgtcaccatgtcaaccatgga

SEQ ID NO: 41185 - DNA, 453 bp, Glycine max
  Clone ID: jC-gmro02910007d05d1
aaaaaaaatcttataataataactaaatacatcataaaaaaattcaaagtacaaggaaaaagaacagcatcaaccaaatggataaaatacaagctgtccaagaggacaaagatccttattcttctaaactacaaagaatacaaataggaaactggcaatgtgaaaaagaaaacatggtgacaaacacaaatctgtgctatgattcaatcagaagcaacaatccaggacccagcagcagcataaagcagcacaacatcccttccaaaatccatcacccctgcttgtggtttcttctggaactctttgttgggggtaccctacagctgtaggatcacctttggaaggataacccataggtggtggggcactaacatacagtgctggaggatatgatacaggggattcttgctgattgttgaagcgactcatgttgatgatgatgatgaagtaact

SEQ ID NO: 41186 - DNA, 428 bp, Glycine max
  Clone ID: jC-gmro02910007d07d1
gcaacataatatatataaatattactcaagtcaaggtacattacattcatagatgatgattaataaagctttaataaacaagagaagatgagtacttaattatgaagagtaaaatgagaaatgactaaggatgcacaagacagaaaaggaacactcaaggaatacatacatggaaattaaaaaaaagaaaaagaaaaagaaaagacacaaaagggatacaaaatacacccttggacacaagcatgcttatctacaatttgatgcatgcccccatggttttggccttctcttccaaacacccccaacaactgtagctgatgagaggaaaagacgaaaaagcctaaattagggaactgcatagacagatcactagcactcctcaacatagaaattattattcttcgggggaaacaccatgcatagccctt

SEQ ID NO: 41187 - DNA, 447 bp, Glycine max
  Clone ID: jC-gmro02910007d08d1
gaaagtacatactgctaattgctaactcagtgccaaaattgtaattctgatattgactacaagccacaaggaccttcataagtgctgcagttgctcattctttattctacaattttactgctgtctgaagttgtcccattttaggaagactatgtgcttatagtattccatttatagtgaaatgcaatcaggagaaaagtcctggggtattgaaagggaaatttgggtcaatttccactggatcaagtgagaaattgaaatcaggaattggagaattggttgctgatgtggtggtggaaatgatcgcattgatatcggattccgaatgtggcttgctgtagatcccatcaaacacattcatctggagagttggagatggtaaatagtttgaggtctggattgttgtggataaaaggtgtgtttggtatacgtcgcttaagaaggact

SEQ ID NO: 41188 - DNA, 473 bp, Glycine max
  Clone ID: jC-gmro02910007d12d1
gatattgaaagcattattattattattatctccaaattaagagcaccaccaaattccaaatatgcattggtacaaaaacacacaaaacataatgacacataaattgacaagcatcatttgtgttattagaaagtacgtagattgatccaaaaggtaaccacatactccttagatagagatactgttgggaattcctctgaaagtcaacccttcctcacttgtaggaaggagcaatgtgtatggtagctgaacaggtccatatcggtttttcttggtggaatcattgtttctcgctgtgattttttcctcaatttctgccagcttgcttccaaactttttgaaggattctaatgcctttgaatcagatgtccaatttggattgtctctctccccaagggagatctcatcagatgcatgccttgacaatatctctatgactgtgagatcaataatgtgctggcgcttcggcgtga

SEQ ID NO: 41189 - DNA, 449 bp, Glycine max
  Clone ID: jC-gmro02910007e01d1
agttcatggggatatataattaagtcaattatgttaatattccataataaatacgaaatgaatgtccatcaaattttcctagtgcacaaaccatacaaggaagatcaaaccccagaaaaacggggactaaacagattcgtgttccatattggatgacatctagatttagttgtcaaccccggattcaataccgttggtacttcgtagctggtttattgctatcaggaaccaatctttgtcatcttgttgatcatatttccataaaattgcgcctcctttctattattctctttcaccttttccttcaaagtcctgtactccaatttgacatccctgttgttagggtcaatgtcaagagctttcttaatgtcaagttcagccaaatccaagttagtcaactgcatatgtgctttggcccttctatagagggcttttcacatttgtactct

SEQ ID NO: 41190 - DNA, 428 bp, Glycine max
  Clone ID: jC-gmro02910007e03d1
ataggaaatatattgatgattaaggattacaactagaaatgttaatacacccaacggatacaaaatagagctaggtactagttaagcatacacatttatacatatactatgcatgcaatgtacttttaactagtgtttggagtttgccttaaagctaaaaccatcacaaaccctcaattgattcagtttattttgcggcaattttctcttacttcaccgttggaattgtctttgacatcaagcaggcccatcttgaccatagcttgttggaaatcaaagaagaacatggttggttgaatgcataagcattcacaaagttcctggttctggggctattgtagagtgtttggtctgatgtaagaaccccatttctcctcaacaaagcgttgaagtaaacgttgtcaaaatcgttgctcgtggcatcgaat

SEQ ID NO: 41191 - DNA, 363 bp, Glycine max
  Clone ID: jC-gmro02910007e04d1
aagcaggggcaaagctaaaatattttatatttggatttggatttgttggcacccagctgagatgccatgccgtgctttacaacatccgtgcatttcctacacatccttagcaaacataaagtttagccctctcttttactcattcacttctgtctctattcaaagtctgagtccatgtttcccattgctttcaaacctcttgggctctttttggatatcttcttctccctaacctcgtatcgttccaagggaagatcgcacaaccatgcgcccggactaacaagattgagggttcgttgaatgaatttaactctcttcttgggtctctgaggcagctttgagcccttaatggcgagaaaatct

SEQ ID NO: 41192 - DNA, 332 bp, Glycine max
  Clone ID: jC-gmro02910007e06d1
cttctatgatctttgttaaatattttaatttggtctaattctttctgtttatttattgaaaaaacccagccacgacccaggggagagggagagtatccacaaagtactaaaccagggccaaaactggtgcgggaactgccaaaaactccatcgcattagcacccaccggagaagacactaagacctagaataaaccatacagaatgaagactgatacccttacgtaacaacataggacacttagaaaacacggattgacagagaaacccagtccaacgcataagagggggacttctggagagaaaaaatagccgaatcaccttcacactgcg

SEQ ID NO: 41193 - DNA, 490 bp, Glycine max
  Clone ID: jC-gmro02910007e07d1
attattaggcgaattatagatgtcctaattttattgaaggtagctcatcatgttttttttatgcttctcataacagactccattcactcactctatgaaccccaaccaaccaaccacatgatactgatattgaaaaggaaaggggaagggtttcgaaatgatatccttaacaccacaatcccctaaacgacgacacgagaaagaaaagaagagaaaaaaaaggcaaaaacgacaccgaaagaaataacacagattcagagattaaagccgcgggtcaacgtcgtctaagagagttgaccgcagttggcgatgacaacgggcttggaggtcctgccggagctggatccgaccttctcgatgtccttgacaacgttcaatccttcgatgacctgtccgaacacgacatgctttccgtcgagccactctgtcttctccgtgcaaatgaagaactgagatccgttggttccgggaccggcgttcgccatggaga

SEQ ID NO: 41194 - DNA, 481 bp, Glycine max
  Clone ID: jC-gmro02910007e09d1
ataacaacggataacatttttatatatttttggaaaaagtattgcgcatcccctcagagagattcgctcacaaagcccccaagaactcttttatttggtgataaaataataacacacaagccgaggtatacaacattaagactaatttgaatcaccaaactttaaaagcaggtgatgatcaattaattaagggcaaaacacaagcctataatcagatcctcccatgcaagtgaacatgctgattgcgtcatccatagggtaactcaaagcatttggacacctctctttgaggaacttggaataatcagtgggaccgcaacccgcatcaccggggcttcaacagtactgaggtgtattgtaaacctggcacgggatgttgcatccgccggttacctgttactgagtgggacactccttcatgatgtctgcggcgcttttaactgagctgccatgtgaagtcgggctctcctgcaagggaatg

SEQ ID NO: 41195 - DNA, 462 bp, Glycine max
  Clone ID: jC-gmro02910007e11d1
aaatggtgtattaaatcccatgaacatttgaatttccaaggtcataatagtcagtaaagggtataattgatacaaaacctcaatgatagaaataaatgcaaaccaaaaaagcaatagaaactaatagcatggcaaaaggatccgtaaagaactgcggggggcaaaagtaatcgcagaagattgtgagagcttaagtatgcatgaaaggcagagttatgtagaagactgctcctcagggggtggtggagcttctttctggggtaaatcttcagtacggttattaatggtggcatgctttgtttgtgatccaggtgcggcttctggtgcagatccattggctttagatgctgtttcttttccgtcttttccatctttcccatctttggcgtctatagcaggtgcaggaggagggggaatcatgtgagctggtggtgtatgtttcaagttcaacaatatctgcct

SEQ ID NO: 41196 - DNA, 370 bp, Glycine max
  Clone ID: jC-gmro02910007e12d1
cattgaacctacttaattttctccatccattgcacattcaattatatcaatggactctttcattcgtgatgtgtctatcagcctgataagccaactcggtatttgcgttactattaaaaaatgtacgatcccacagaacagatcttttgtgctgtgaacacaaaactaaggttgtcgcacaaaaaaaaatgtgtacagagttgaatactacaaaaaatgtgaatcactttttttcccccagaatgtaatacagtaacttgggatgcataatttgcctttattcctctcgaatctatcattttaattcaattggtggtgcgttgtgataacctattcattcgggtcagcatcctgaaccctttctgcatct

SEQ ID NO: 41197 - DNA, 298 bp, Glycine max
  Clone ID: jC-gmro02910007f01d1
aatccatggggatatataattaattcaaatatgttaatatcccataataaattcgaaatgaatgtccatccaattctcctagtgcacaaaccatacatggaagatcactccccaaaacaacggggactaaaccgattcgtgttccatatgggatgacatctagatttatttgtcatccccagaattaatacgcgtggcacttagtagctggtttattgctatcatgaaccaatctttgcatgttgtcgaacatattgacgtaaaatggcgcctcctttctattattctacttcacctt

SEQ ID NO: 41198 - DNA, 412 bp, Glycine max
  Clone ID: jC-gmro02910007f02d1
gaattggagaagggtcatatttctttcattatcattacaagcttagcaaaacatgagcaacatatttaaaggctctcattcgagcaaccagtttaacaaatcaaacatacccaaaaatgagggacgagtggacttgtgacttgctgagtccttcatcccttaaatcgaattcctttggtcagggtggagtgggtgtatgaatgcagaattcatttgccaaaccttaactgacgcagtcacagaggcctcggtggcattattaaataaaaacaatctagcagctccatagattgccttggttggataaactcgagatgttacacacgttcttccaccttgagcaaaacttttcactatagaatggtccaccagtatccttacagacaatttttcgtcttttagtactgggact

SEQ ID NO: 41199 - DNA, 347 bp, Glycine max
  Clone ID: jC-gmro02910007f03d1
aaccggagaaaaacaaagatgttgaaatatccatgtaacaagtaaataaccaaaacgaacgttttaaaaataaataaaaggccttagtgccacggtctttaacataaaaatcaattctacagtaaagcaggaactaactttgtgccaaaactcaaaaacagattcggatgtgaaaacactaaaaagcttaacctaataacgaccaatagcccaaactctgaccacaccatcggtatagccactaaacaaagtgcttgcatccgcactccagttcaaacttgtgcaataaataaccttcttcttgttggcgttaccaccaccggaggtggcatcagcctcagtcttga

SEQ ID NO: 41200 - DNA, 328 bp, Glycine max
  Clone ID: jC-gmro02910007f04d1
ctggggagggcaaaaatgtctgcaattagaatcaacaaagagccgggtccctcatcaagtgtttaataatgcaaaaactccatcccctacacagaagagacaactaaaaaaagcttaatgctcctaacagggtaacaacaccggttcccgaaaccgatttattcatacttctcatttctgcccgagcaagaagacactaaatcgcaggtagacaccagcacataatgtctagacaagctacttttttttagaacaaccttaaaaagacttcttggcaacaaatacaagcaggtcaatgacacgtgagctgtatccccactcgttggat

SEQ ID NO: 41201 - DNA, 453 bp, Glycine max
  Clone ID: jC-gmro02910007f06d1
acaataataaatccatatttttataattaaaagtagtagattacagcgatgcacttgagaaacatattaagtggactaattctccctggtcaagcaagaaaaaaaccagctatgacccaaggtagagagagattatacacagaatactagtaattaactaagactggctctgcaattgccaaaaactccattgcagtagcagccacctgagaagacactaagacctagactagaccatacataatgaagattaatacccttacataacaacataggacactaagaaaacacggcttcacagagaatcccagtcgatctcataagaggggtacttctggagattaaaattatccgaatcaccttcccactgcggctcgctgacgtcagcgaaagtcagaaccgaaagcggcgaagaaccttcagaagaggaggaagcagcttcgaccttacaag

SEQ ID NO: 41202 - DNA, 537 bp, Glycine max
  Clone ID: jC-gmro02910007f07d1
acttggcacttgacagtcacaccctcgtaactgaaacttgtaaacaaaataatgataagtatgaagtaaaaatccaaattacaacttatgccaataatcacatcaaattataaacccccttccgagtctatgacttgggtaggtgtttagccttgccacaaaacagtgcattgggaggaagaagagtctcagtgtatacgctctgctcattgttccacaccctcagatacaattcttgtcctaaatacctttggggccagattgcagatctcaagttccacatacccttattgtccaaagataccaatatggcactccaagaatttggatacacctgaacagtgtgtctagtcatcccatcaaccaagttgtaagtctttctcgaatcagggatccacaagccattgtcatatccaacaacatagaagctagatccatccatgtgccatgactgcgtgtaattctcattgtttggaagataattcttgcaagtcatggagggtgaatcctatgacagatgtgcctaatttggcaggg

SEQ ID NO: 41203 - DNA, 481 bp, Glycine max
  Clone ID: jC-gmro02910007f09d1
aaatcaaatattgaagtacgataatttaatttcaaggcttcacgaaattaagagtgaagccaaagagaacgaattcatagacatatagatagagtatagcattagctattacaacaacatatccaaatggaagtctgttttctccacttcaaggaatatccaaatatatgtacagaatgatgatatacgttaaactaaagtataatgaataaattgtttatttgcccttcttatcctcaggcaaagcagaagctgtgcatatgggaggtagtttgggcatagaggggcacttcgtggtggggcgagattgtgatcatgtgcgcaagctttcagcgtgccgacatcgtgcatgttcttgtattcttccaggcagattgcacaagcttcttcttctcgactttgctcagatgaacagtatattgtttctgtcaaatacttggaaatcaaatcctcagacaatcctgtgctcacatggcctatt

SEQ ID NO: 41204 - DNA, 471 bp, Glycine max
  unsure (1)..(471): unsure at all n locations
  Clone ID: jC-gmro02910007f11d1
gataaattaacactcacaaagcactacaacaacaacaacaacaacaaaggccttattctacaagttgtcggctacattgatcacaaagcactaaaaacagtcaaatttacacatcaagggtgaatttattccacttacatcattgaacatcttggctagtgattagggcccaaaagtgagagaagaaaagtcctgtagtgactggaggtgtctgagtgtacttggtggttcaaaggcttggtgtgtttcttggaaggtgcaaatgtgagagactgcatatcaacctgaggccttgtgacaacgaccgtaatgagggtggaatgatgagtccccaagcctttcatggccttatgcaacacctgtgcaaaatactttcctggattaacaggacattggattattgtgaaaagaggcatgttgaaaggccccacatgtttcattgtttactgccttcttcagngaatgaccata

SEQ ID NO: 41205 - DNA, 355 bp, Glycine max
  Clone ID: jC-gmro02910007f12d1
gaaccaaaaccacaatatgaaacttgttattaatttataaaggcggatttcatctcacatcccaattaaatttttaaaaacagggggtacgcaatttacttatttcccggaaaacattcattaatgtcccccaaaactgggtttaaatccaaaaatccagatgggacgtgtagtgaatccgcgcgaaaaaagtggcccgggggtggtaagggcgggtgcgtcttgtggcaggcacattggagggcttggaaaccttggggggccatccttgggacggaggctcaaacgctttctatgttctctttttcccacctgtattgggagccaacacccccacttttattttaaccacccc

SEQ ID NO: 41206 - DNA, 416 bp, Glycine max
  Clone ID: jC-gmro02910007g01d1
gaagtataccaagtcacttcctatattccataaactccaatgtcagaattgaaataaaagcaaacatagaacttatttaagccagatgcaacaagctcgttcaattcagtaaaatctcaaacaaactaaaatttacaaaatttactttactaatcacgtacatgagtagtaggcacttgatctagttaattctaacactctgccagacaaaatgcgagactatattagcttgattcctccacagcctcatccttttctttagatttcccctcatctgcaatttgaaaaccctcaatcttgcgtgaaacctcatctgcagtttccttcaccttatcaactgaaccatttgcagacacagtctctgagtcatcgagggtcaaggggccagtctgccatattctgatggttccatcctc

SEQ ID NO: 41207 - DNA, 444 bp, Glycine max
  Clone ID: jC-gmro02910007g04d1
cattgaacctacttaattttctccattcattgaacattcaattatatcaatcaactctttcgcttgtgttgtgtttatcaacctcatcaaccaactcggtatttgcattactatttagtaatgtacgataccacaaaacggatcttttgtgttgtgaacacaagctaaggttgtcgttacaaaaaaaaatgtctaaagagttgcatatacaaaaaagttgaatcactttttttcccccagaagtagatacagttacttggcatgcattatttgcctttattactatgtaatatatcatataatattaatttggggtgtgttctgatgagtcattcattcagctcagcagcgtgaaccctttttgcatctaagtgatccagctgatgctgttatagaactcacaagtgaagatgattttgctgccaaactggatgctcttgcata

SEQ ID NO: 41208 - DNA, 534 bp, Glycine max
  Clone ID: jC-gmro02910007g06d1
ggcaatcaatgttatttaacacgacgaagtttatgtaacgaccatatcatcctacattgtatgatgaagcatgccaccggtcatttttcttcttagtcaggtggtgccacaattctcaaattcctagacagaagaacataaactgtaggtactttacaaacacaaggtatgcaattacaaatttacatgcagtcaagatacatatagtttctccgtcgattgtactgaagaaggcttccataggtgcgatcccagacaccaatgaaaagtgattctgtgtcagggctaaaagatacaccagagatctccccaaaaaaattgatctcctgctctttctcaaacccactctgtgcatcatagacatgcacaaagtcagctggctcagccattgccatgaaccgtccatcagatgtaaaccgtatagaacgtatagctccaaggttgcccttaagcacagcaatagattttgacaagttcctaacatcccaaacacggcatgttttgtcttggttcccagtagcaaaaatacggcca

SEQ ID NO: 41209 - DNA, 492 bp, Glycine max
  Clone ID: jC-gmro02910007g07d1
aacacgttaaaatcatattttattatctacatgtaattcaacattaattattacaactttttaatactcaaataggagtatcagcggcacgagcctctccctagtttcattatggaaatgcactcaaaggaacttcatatccatgcttgaacatttgtcccaatgtttttaaaaccatggaaatctggccacggctcatgtaagctttgtacattatccataatgttttctttgagcatttaagcttgacattttccatctcttcaaggacattatgcatttcgagtaaggtcatctgtgacccatacatgactagcttacaatgatataaggatcggcagatactccacccagagatttccgcacgtctcacaaaattttctagcttttctactgcattacatcgataataagttgcaattatgcgtctcaaaatacccttggttgttatagaagtcccatgctcaaatgcctcatttatagcattctcca

SEQ ID NO: 41210 - DNA, 512 bp, Glycine max
  Clone ID: jC-gmro02910007g10d1
aaaaaaaataacaagttccttaaactaaacaaaccaaattgcctcaaaagtcaaagccacatagtttttttcctcaccaagtaatgggatcaacgaggattaacaagttcatcattcaacagaaacaaacatgacaggtaaacaggattgcaagggaaaataaaccactttgtgccctcatttaaggagagtcttcacaattgatttgacattgagcttcttgaggtcagtataagactgtccacagcccacaaacatgacaggagctccagatatgtaaaccattgaaagtgcagctcccaccttatcatctatggtgtcaaatttcgtgagcaagatcccatcaatcaatcttggattaggtgatgttgcaaggtcagctaatttctgattgaactttgaaagctgatcaacagcgtcattaccaaccagtgcttctccaacaaataagactagatctggattgttaaggtagatgagttttgacagtgctctcataagtggttcattat

SEQ ID NO: 41211 - DNA, 469 bp, Glycine max
  Clone ID: jC-gmro02910007g11d1
catggcttcaattatcaaatttaaaattcaaatacattacatgctaatgtggcgacagagctatattgggtcttaaacgtgctactgtgtagttatcaaattaaaatgcagcacagaaaatacattacatgcccagtagtggtctccagagtcaacaggtcagctgtgttcagatctccccccaaacaagattatgatgagctacttggactttggtgaggtcgaggtgatgaatttggagatctggatcttgactgggatctgcaaaatttagtaattaacaaaactcaattcaatatccacaatgatccacgatccaatattccacatcaaagttaccataaccaaaacgaagaaactaatccaccacaaatcttgagcagcatccaagtggaaaagcaattgaacccagtatcacacgtctatagtctcaaacaagtgtaaaaattctattgtcaacagcacatga

SEQ ID NO: 41212 - DNA, 329 bp, Glycine max
  Clone ID: jC-gmro02910007h05d1
catctccatctatttccatttgatgtttgtctgaagaataagatctccacatttgcagtccaactttttgcaaatcatgacttagaattgtataaaactcaagggtgggacccagaccattgccaacttcaccaaaatattctacttcaagtacagctttttggctagaatacatctccataacttttgcagcaaaatccaggacacgatttctagagacacgaaccttttggcgctgcaatttcccaactttcacctccctctcagttgttgaaccatggccatcaacaccttgctgctgttgaagtcgatacagtgcacgagataac

SEQ ID NO: 41213 - DNA, 486 bp, Glycine max
  Clone ID: jC-gmro02910007h10d1
aatacaaatgtttctaacatttcttcaataacagcttttatcaaacctgccaacaagaagtttcttatcacagaaatacaattcaatgctaaagccaagagtatgaaagcgcccaaccattttcaagaccaaaggagctgttacaacaatgttgaaaaccagggccagaaaacctgtgggaactagaaacccttctgccgcattatcctaatctgatttcaaaaattccaacaagaataaacagcattgtcacctcactgttccttccgagctttagatctggcaggctttccaggtttaattactttaccaagaagaatcataacaacaggaacaatagttccaatgtaatacacgcttccatatgatgcaagagtttcatgcagacttaacaccatgaaaccaacacaggagtaatttagaaccaaaagtgtataagcaaaatttgtaaacaccaacacattcttaaccagagacattgtcgga

SEQ ID NO: 41214 - DNA, 454 bp, Glycine max
  Clone ID: jC-gmro02910007h11a1
agatcgccgactctttcaacaataacaatggccgataacgcaacaacgcaaggaagcatcaccctattgtctccttacaagatggccaaattcaacctctctcatagggtggcgttggctcctatgacaagatgcagagcgtttaactggataccacaggcagcgcttgctgaatactacgctcaaagatcaacaccaggtggattgctcatcagcgaaggcaccttgatctcccccactgctcctgggtatccccatgttcccgggatatattcagatgaacaagtggaggcgtggcgaaacatactggatgccgtgcatgccaaacgcagcattatcttctgtcaactttggcatgttggccgtgcctttcatccagagcatgaacctggtggagcttcaccaatttcgttcaccagcaagcccatatcggcgaggtggaggattctgcttc

SEQ ID NO: 41215 - DNA, 500 bp, Glycine max
  Clone ID: jC-gmro02910008a03d1
gaagaaatccgttgaaattatggcgaccaatttggtttagcaaacaaaacatagcacaccagaaaaacatctcctgctaatgctatacttgataaactacgggtctaacacattgatcattacaaccggagagtttcaagaactgaaatcagagcataatcttcaaaggaaactaattaaactagtaaaagaaacccagcactttcccaccaacattctttctcctagcttcttcatgatccatgatgccagctgaggtagtcaacacaatatacccaaactgtcttgaggggagcagcctagcagtccaaccttcaatctctttgacaccaacatcaaaacgcggactaataaccccacatttgttcagtctaccattcaattcaacaacaatttttgcagctctgtgatcatcaacgtactcaaactcttcaatgtacccatgcttttgcatcaccaaaagggaatttagtatcacttttgacgatggcctaatcatg

SEQ ID NO: 41216 - DNA, 437 bp, Glycine max
  Clone ID: jC-gmro02910008a05d1
gtcaaaataagggcttaataccattgatttcaaagtgaagggcacagttcatgcgaaaagtttgagcagttattaagctcgatcggcatataattggctattctaagttctaacatatatatatagttgagcctttgtcataatatcacatgtcacatacttggcagaatcatgccagcctaactagtcagatatgaagcatccatggtgggatgagagaattgccactagggactgtttgagcctttcccgtttcttccaccaatgctcttccttggaatgtctcacagagagttagagaaggaaccagtctttgtggtggcggatggagctgtggagaagttaagttaagggtccatgaatttgggcctagagtttttgggccaatatgtggacctttagtcactggtttcgctttctccttcaactttgctagc

SEQ ID NO: 41217 - DNA, 334 bp, Glycine max
  Clone ID: jC-gmro02910008a07d1
gggcccaaaaatttggttttttaaaagcgaaccatgcaaaaattggaccccgaaataaaggggccctttaaaaagcaaacggaccccccgaagggaaggccccaaaactgggggggctaaccaaaaagggaaaaggggggtttaaaaaacacggggggttaaaaccctttgaaaaagggggttttggcccccgtgatcaaaaacccaattgggggggcaaaaggttcaaaaagggggggggaactggaaacatgggccgaaaaagggggttcctaaaaacgaaaaccccgggggaagaaacccagcttaatgggccccaaataaaaggaccccc

SEQ ID NO: 41218 - DNA, 327 bp, Glycine max
  Clone ID: jC-gmro02910008a10d1
ggggggggggccgggcccccggaccaaaagccccaacgcccccccaaaaatccccaaaaacccaaaaacccgggggccccccccgcccccaaaaaatggaccaaaggcccccccgtggggggggaaaggccccaaaaaaccccggcccggggaacccccattggggggggggggagcccccaacccccggcccgggggcccgggaatccctgggggggggccccctgggccccggggagggggcccggggccccccggacccaaattccaagggggggccggggggacccggaaaagcgggaaaggggggcgcattcccccaaatcc

SEQ ID NO: 41219 - DNA, 516 bp, Glycine max
  Clone ID: jC-gmro02910008a11d1
aaaagaatcaattatatctacaattctaaaagtgaagctcccacaaaacagggtaaataatatttacaaaaggtgcacctattaaaactgctgaaagaataatgaaaacaccgaactccaagaagacaataacagaaaataacaataataataataataataatagtaaaagaaagaaaaagacagtgaagaattttacaaacacttgctatgcactattttctactatgccttgaggatttgattgagatcttcacaacagaaatattaatgttgcatgtcaataccaagattggccccaggatgattcttagattagcaccacataaacagaagcctacccaaatgcctgattctttttctttacccggttccttctctctagtttcttctaataagcatctttagaccaagccaaaaaaatgtcaatcatacattagtgcaagagatcatatgcaaagttcaatggcaaagtgtctgtccataagtcacccagtttacaaaagtatctggaaa

SEQ ID NO: 41220 - DNA, 537 bp, Glycine max
  Clone ID: jC-gmro02910008b01a1
ccacagaaaaactcacaatatatagctacaatgtttaaacgtagttaagaaacccgataaacatgtatcataatgcagatagagtcatacaagctgattgccttctcatcatcagattgttaaaatctggaaggcaatcttcagaatgaaaccatctctacagaaccattacaattgttgctcactctaacaacataagtactatattttattaacaagcttataaaatgaaacttaagtagtaaggatcggtggaaggtaatcaactttgtcgccaagaacacgagccttggtgtcagggaagaattcaaatcctggaagctcagtgacaactccttcgttggaaaccccaataggatatcggagcaggtgaccaggaaggtcatgctcaagtgactcacttgaatagatatcccaatacttgtcagcaatttggttcaccttcttaatacattcttcattttcagggtggaggaaagagtcatgaagcaagccaaggtgctcataccacaacgacatgcggaaaccatggatctg

SEQ ID NO: 41221 - DNA, 453 bp, Glycine max
  Clone ID: jC-gmro02910008b01d1
gcaacaaaagttaaatttattaatagtagtaataatagtaacatattaaatactataatcactagccaatcaagacacacccctcttcgagtgagtgatgaaccttgcaatttgcatcaaccttttccaagtttcaaccccaattaaccgaaattggggatccaaccaggtgcttcccatcggaccattctacccttccaaaagcgttttctgtatgctgtggcgaacccgatgacgaaaacgtgacggtgaacgttttcttctcgttctccttgaaactcaacacttgcggttcaaccgagattttaacggacgcagtgtctgacgtcacggaagctttgtaagttcccgcaggccccacgttagtgagagtcctcgtgtgcttaaccacgctccctgatgattcaaacaacaccgcaaacgaagggtagttgaggtcggtcacactgtact

SEQ ID NO: 41222 - DNA, 482 bp, Glycine max
  Clone ID: jC-gmro02910008b02a1
cattaatataatccatttctccattaacgtaaatctagaagatcagccagtgtaaataaagatagtattataatgtacattaactagcacttcaaaaaaaagggtataaatgacataaaacaggtacaacaaaggcaaccaaccaaaagcttgactccatggttggttctgaacgaactagaacccatccttacaaaatggaagcacctataatgtatataattcctgtatctgtaagtagaaattgtacccaaaagggatccctatttcatgaattccaaaactttctgtgtaatatcttcaaggaaagaaacaaaacccatcacactggtaagaccacttccatcaacatcctgctcttcgatcagaaagttctcaaaaattgaggcatcatcatgccctcctcgaataaaaatgagcttgggagtgatgcatctctcttgcttcaatttgttgattggagtccttaacaaacaatcatg

SEQ ID NO: 41223 - DNA, 498 bp, Glycine max
  Clone ID: jC-gmro02910008b03d1
ggtaaattcttataaatcatgagaattagctgttcaatactgcttacaatcagaagcatacagatgcaccggaacaaaaagaaccagggcagtcagtgagctaaaattgctagagacaaacataagacacacaattctattgcaaataacagtgtatggtacaaggttagaaaaacaatgacatacgaaccatactggaatgcctaacaatttttttaagtgcctattatctcaagttaacttaagatcattccctcccagatgagggcggaggcaaacacggacttcatgctcttcaggtcccacgcgatgttttggcaccaggatctcaagcacagatcctggcccatcgtagtatgcttctatgttggcgtcttcaggaattcgggttgaaagagggatttctcggacgaactctccaggagggcagtgctctgacgatggatctgtaagcttgaatgtcctatcatgtctcttgatgagaggctttcgagatgt

SEQ ID NO: 41224 - DNA, 494 bp, Glycine max
  Clone ID: jC-gmro02910008b05d1
aaaacaaatgcctgttattgataattaggctaaaaagccaccaaacacgtattattattttaatataaacgtacacaaacaaactctaaacgagttttttttttttggtggttgttgttgttacaaaccccaagcaagtttgaaaagtggtacacaataatgaaataatatatgaggcatctcagatggccacactatgcaaaacaacagtttcaatggtaagtccaggtccaaaaccgaacaacacaccccattcaagtccttcacctgtggttttatgtccattttcagcagatttcctcctcatctcatccaagatgaaaagaacacaagcacttgacatgttcccatattcactaagcacatctctagtggccttcatcttctcaggtttgagacccaacttttgctcaacttggtccaaaattgcaggcccaccagggtgtgcaatccaaaagatggagttgtaatcagagatgttcaatggggttgaa

SEQ ID NO: 41225 - DNA, 407 bp, Glycine max
  Clone ID: jC-gmro02910008b08d1
ggactatctggttttgggtacccttacaagttacaattgctcaatacattgtctataatgaaaaaacaggagaacttaatcctaatttaagtgataaaatctacatttatggtgaagacaggaaaagagcaacgcattttagaccagagaataacattaagtcaatcatgttttagcaacggccgcttgataaggaataatataattttcctccacctgtataagtattaatagccgttgcagtatgccttatatatcaaaatttcattctttttgctggtccttgatcaattatcggatcagcagtaggagcttgcgtatctgctgcttcttgagtctcagtgcctttctccgattctgcagttggaggtggaacataaccttctggaaatggtggtggaggagga

SEQ ID NO: 41226 - DNA, 535 bp, Glycine max
  Clone ID: jC-gmro02910008b09d1
gaaccaaaccaaacctttatcatcatcccagataaaataaatacataaagcgacattttataagtgcagataataaaattacaggaagaagaagaagaaaaataaaagctagccactagtagagatggtggttttgttggtccacttgagaaccaaattggagatatggtcggtggaggaaccatttggagagagagccttagccgcagcctccttgagatccttgattcggtaacgaagcttcttcccttcatggccttccatgaggcacttgacaacgctggctatttcctggctctggacaagtccagtgtcctcggcaactttgggcctcagcgccaccttgacttcatgcatgagcataaacgcgttggtcctctgctccgcgaacagaggccaggctattaaaggcacgccgttcaccacgctctccagtatagagttccagccgcaatggctcaagaatcctcccgttgattgatgggccagaacctgtggctgcggagcccatgacttaaccaaaaagcccctttct

SEQ ID NO: 41227 - DNA, 232 bp, Glycine max
  Clone ID: jC-gmro02910008b10d1
gcaatcaaacttgcgcttcttgcatatttttgcaaatggacataacatatataattacgtatttaatatatattatgcaaatcactaattagtagtagagctaatagtagtaataatagcactaggaataatatagtaattaaaagaaaaattaagaagctagcatcagatcatacacttgtgattattttgaccctcaggaatgttgactggtggaatcacgtccatcgtc

SEQ ID NO: 41228 - DNA, 493 bp, Glycine max
  Clone ID: jC-gmro02910008b11d1
gccgtataataaactaactgttcattaaattgtccaatagattacacttgcaggacaaaaaccctcaaataaaatctctaaaaacctactcgagtccgagtccgagtccaaacaaattccatcaagaaaataacagggaaaaacaaggaaaaaaacagcatctatttaaagtgtcctgtacaaagataataagataaacacttcatcaacacatgatatgccgatttcatgtccaagattgtgttagtcatgccttccagccaaaacccatgttatcatcaagatcactgttaaggaagggattatccgtgaattcattgccaatatcctgaaccacatcttgcaaatgtagattttgtggcatctcagatgttctctggtttaatccattgttgccaccagcagcagaagaatcactatttgcagttgttttgaagctattattccttgacataggtccattgtttcctgtaacattggcagaacctccact

SEQ ID NO: 41229 - DNA, 542 bp, Glycine max
  Clone ID: jC-gmro02910008b12d1
agaataaaaatttgctttcaacattttccggaaacggaggacacaggtatagaattttgtggtacagctaaaaagatcacaacacaattgataaagcaattaaccaagagaaacaaatgcatgaacaaatatcaagaaacagggaagctccctcccaaattcaaccctatacaagatatcctatgttacagaatgtgcattcaatatatatattaatgaacaaaaatatggttaaattctaaaccccaaaccaggccacctctttgccccctccttctttgtcctctttgagccaggatcaataaggttttccagagattttgcttttctgtcccgtgtcttgcctgcttctttcagaagctcggccagacgacgcttctcatcttcaaaatcaggatttgctattccaagcttttcctccctcaacttgagcacatattctaagatttcaatcgcatctcccactcttcccatagcatcatatgtagctgcaagattgctgtacaccccaagagtatcctgatgacaagggccacactcct

SEQ ID NO: 41230 - DNA, 408 bp, Glycine max
  Clone ID: jC-gmro02910008c01a1
gatcacaaaaaaaaatctcttaatggagagcttgaattgcaatattgaatacaaatccattttcatttcatttttcacaaaaaaagaaggggcaaaaaatcaggaatgatacattttctgtggaacaaatctgcacaataaaggggagggggaaagagaagggttaaaaaaccacccaagaaacaaaaaaaactgtaacactgtttttgattaaaagaccatgtaggagcgctatctgagtgttacatgtttcttgcatcctctctcgtcatgtaggtattatcaagaaaaaagagtgctactttcaaactaactccatgaggagtggatccccttctgccattattctgataagctttataaaggcttgctcacttgatacactcaatggatgaacagcagggactt

SEQ ID NO: 41231 - DNA, 563 bp, Glycine max
  unsure (1)..(563): unsure at all n locations
  Clone ID: jC-gmro02910008c01d1
aaaaaaaaaacagaagtatattaataattataaaggtatatgtgcttcaaatatcaggaaatgttctcggcattatatacacagtaactctgatgatcaaaccttccaaacatcagaaatgactaaaaactggcagagtttctccgtgaccatgttcagatatataagcaatgaactttctcaatctaaaagtcataagatactattaatcctctataatcaaaacatttcttcttgttcattaagtatgtgatcagcgtaattaaaatctaactttcatctaattagaggctgctctgatgaagcagaaggcatgtcttctagctgctccttaatgactatatcttaacggaggaccaaacaagctcaataccacaggtagaaacacaagaccgtgtaagaagccaatgataaccaaggccagatacatctggaagtaatacaccacaaaaatttctgatgttgagaggcaaaggacgaggactccgactaattntgtaagtggtgacttcactgaatacagaagccccatggacacaatgctgcattgctcgttggctcta

SEQ ID NO: 41232 - DNA, 498 bp, Glycine max
  Clone ID: jC-gmro02910008c02a1
agaataaatttcactactagtttccattatatctcatcttcgttataccaatccaaaaaaaatggaccataatatcgttacatttcattctcttccaccagttcaaacatgtagaacaaaaatgagactcactcactcactgaacctgatatgtatgagacaacaacagttatgttatcaagtttgccaccataataacagaatccagctttttcagcagcagtagaaaatggtgtccgactactcttggacagtgctcgctgacgagccaaagctgctatcttctgagcagttacttggggctctagtccagccctaattgcatgttcaacaactccagtgatcttactgttgtacaaattgtcaaataaaccatctgttccagaaatgaccacatctcctgaagcaacgggtatggtaaaaacctcaccagagctgggtagatcagcgccattcccactcttcaactgatatgggaaattgaagtcatgctggtga

SEQ ID NO: 41233 - DNA, 490 bp, Glycine max
  Clone ID: jC-gmro02910008c02d1
aattgtgcaaactgttgcttccaaagtgctaattaaattttacagttgataagattgtaggctacaacaagccccataattagagaaagatctatattcggctccactaccattgggaaaacatcatctgctaaatcaactccacaaggagacttctttgtccttagctctgcaactaccactccaagctcgatagatattttgcaagctgagttgcaagtgttgcgttctattttatgagtatacggatgaacttcgtccaatccaagttcaacttcataggttgaaccccctctacagatcttataagtttttgaaactcgaaagcctggacctttgtggccattccttgtacctggaactggaaatctataaccctaccaaaacctggacaacttatattgctttctcagcatagtgaacaaaatatcgccattttgatgcatgagatgaacttcatctctatgcctgcagttgtcgttatcaactc

SEQ ID NO: 41234 - DNA, 547 bp, Glycine max
  unsure (1)..(547): unsure at all n locations
  Clone ID: jC-gmro02910008c03d1
agcagttattcgattgaacaacagtttcaactttttaagtgacaatgcaaataaaggaaagagtggccagttttcaccgagagtcaaaatatacaattgttcatgatatgaaaggtgttctatagtataaactatgaacgtaaaggtggtataccttgctccattttcttacagatttttattttttaaactcacaattgcataagtaacctaaaaaatgaaaaagcattgagaacgtttcagctttggcattgagctgatgcagcaaatttcagaaacattcgacaaaattacttgcacaagagctgcacgtttaacttatcctttttaatttgaaagagctataatataatctgtgaggtcatttgacatgggttgattcacaatttggccacttgaggaaggaagcttgggttcacggagacgacaaccttcccaacacttttgcctgaatggagatattaacagcgtctgcagcagaatgcaggcctataaanttctttggatcaatagcaacctttaactttcccgaagagtaaagattaaa

SEQ ID NO: 41235 - DNA, 446 bp, Glycine max
  Clone ID: jC-gmro02910008c06d1
atataacattaatttatttacactaaagtagtaaaaaaatcttgacgtacctgtctacattaaagcgtgagaagggatgaagagttacttcccaacaatctcggttcatatacaatttttcacttctttttttacccttataaagaatgaaacaaacattaatactccaataacacccgatacacaaacaaatacaatacacaacacaatctagcaatctagctacttctccatgccctaaaacacaagcaaatcgttcttgatatcatatcccattttctccaaattacgctgcactgcaaactgaatcatggcgtggtggcccacatgtcaaagccaaggaatccctcgacgcttttggaaggtgctccctcgcgatactctctgtgatgaaccctacactgcatttccacccttactttgtgatctgcaccacgtaccatagc

SEQ ID NO: 41236 - DNA, 444 bp, Glycine max
  Clone ID: jC-gmro02910008c08d1
gaatccaaaatataaatagaaaactcttaattattcggagcatcttcaaactaatactacaaacccagtccaattttaatgactacaacattttttgaaatcggaaatcagtcatgcttcacgtgggccatcataaccattagaatataatgttgaccaccaaccttgaatccttgtccttgtatacttaaattccctccaagacaagctgggaatgaaaaaactcgcaaatcaccccaaattaacacccccacctgaaaactccacctcctgagcaggtgccaaggatgagacccagtctgatgtgtgtgtaggaagaagccccaatgcattgagcttccaaacacctagtgccaggccagccaaattaagggctatgaataacaacttatgtccaagaagctccaccttattgtctttgtagggctcaaacatctttccgac

SEQ ID NO: 41237 - DNA, 460 bp, Glycine max
  Clone ID: jC-gmro02910008c09d1
acgaagtagcaccaccataaatggtctttctatcttcgttggtttgcaaaatttaacttaacattccaaaaattccacagctactacttttagtatacaagggtatattaatcacacttgagacacagggaaaggggaacacaacacccttgccaaaacagaacttcaaatctattaaaaaaaaaaaaaaaaaagaaatccccccctccctgtagttagggataacaattttttaccgcgtatttgaaattttaagccaacacagggattccatgttcttgagaagatgaaggttgtaaagcacgaatgcgaatatcgtatttcattggacttgaatttgatgcttcggggggtggggatgggtctgttctgtttgatacgaagggaaaaaatgatgaagtgcgatcgttgtaggcatatccaatatggttgcaacacttgcgacaaaaaagcttggttt

SEQ ID NO: 41238 - DNA, 387 bp, Glycine max
  Clone ID: jC-gmro02910008c10d1
gggggcccgccacctcaaacgaattttttttttttcaagagatgtcctccataatcaacaatacatgggagggtttggtttgccgtttgcacaactccaaactccgttcacgtgttccatagcagcaaacggaacagttttttaccgctggattggaaaaaaaggggggttacctcgaacccaacatttttccaaacacccaaaaagggttcaacaaaatgtttttcatgagggtttaactggaacagccaaagcattcagttgaacgggttggttaccccccctgtctgggggaacaatgaccggagcctgagccccaaaataagaatgaatggctcctttttgggaaaccggtttggaacacactttttttggtgggccggtttg

SEQ ID NO: 41239 - DNA, 425 bp, Glycine max
  Clone ID: jC-gmro02910008c11d1
gggaacaacccatctaattaaatagctagaagcaacttgaaagtactcaaaagaacttggacattattttagcattaaacttaacaagaatttttcacatctattggcaaattacaatgggattttgggcttccaaccaaatgaggtgctccaaacctttggcatgtacgatggatggatttaacttagctggatcaactgaattggagagagggccctgcattaacttaaggacaaatttagttcttaaaatggcccgcaagccaagtttgtaaaagaaacttgccttcgggtgacatggatcatttttgagcttgatctgaagggccaactgaagtagctgccacattggttgcagacccattcttaatcggaggagggacaccccacttgccttcagattcaagggggtcaaaaacatgaac

SEQ ID NO: 41240 - DNA, 473 bp, Glycine max
  Clone ID: jC-gmro02910008c12d1
ggacccgtaatcccaacttgcaaatttccagttcaacaaaattccatcacgtttactaggcaacatgaatcattaaaacaaatcacaatttctctatcaaaactaaatatgctagtcaactgcgactaggacacttgcttaaccgctgttgggctaatagtcatcagattccacagctaataagacagattgatttaaaaccatctattttcaaattatatctcaagagtagcacggttggaagcagccaaccgcaaaatactgaagcatccaagccttgtaaggccgtatacaagtacattatgggcaccagcggcaacaaataacttttcactgaataccaccccaagtaaaagcaaaataaatacccaaatgaatatatgggaaacttgatgctgtcaattatgcctcaaagctgccactccattaatttgggcaggaattcccgtcctcaagtcaaaattgttccaaat

SEQ ID NO: 41241 - DNA, 387 bp, Glycine max
  Clone ID: jC-gmro02910008d01a1
aaaaacacaatatgccaccttacgggggataattttatatcagctccacaaattgataacaaacaggttgaactttaaggggccaatggaggttaaaacaaaccaattttattttgaagggtgtttacagaccctttacacattaaatttttttttaaaaggtttgggaaaatccaacattgaacattacaaaaaaattagctcctgtttaaaaccccccacgaagacgcaacaccaagggcaaagttgactctttttggatgttgaatacagggggggtccttccatcctttaactgtttgccaaaaaaaaaaaccctttgttggtccggggggattccttccttggccgggatcttcgcctctacattggaaagggggggggagc

SEQ ID NO: 41242 - DNA, 380 bp, Glycine max
  Clone ID: jC-gmro02910008d03a1
gagctagagctcctttctacatatttgctatggacctatgcattggaatagcaccccacactggccacacgtgcatgctctggcacatgtatgtacatgcgagctgtcattggtcaaacacaggcgtttgcctcaattcttggcccgacatctgcttagatatccagctatgggagaaagaatgttcattttagcttgcagccactcttaattgggcttaaaattgactgtgctgccgctaaaccagagacagttgagacagagtgcataataactgagaagctgctggctatgcctgaaactgatgtatgtgactgtggagtcaaaatttgcaactcttggcgctgattcgcttgacacggatgacagcgagatggcgc

SEQ ID NO: 41243 - DNA, 523 bp, Glycine max
  Clone ID: jC-gmro02910008d05d1
tggcgggctgtcgcccttttttttttttttttcataactaataaataagtatctattatttattttagcgtagccttgtaaggagttacatgcagatgactagtaagcaacagaagcgagaggtatagtgctagtagcaaattttgtgaaagagccctacatgacagcatgcttacaaactcttcacaagattccaacatctatttttcttattcatcataatactgagatatcttcttatttattgctgcttgcccgtattgccatgatgcatgaggatcctaagaacacagcacattgtatccacagagtagctgagaaatattgaataatcagctttcatataaagaccatcaagacagtctgcttgggtggtagcaactagcaatggtgtttggttccttatctcagatgtggctgttcacgtttgctgagaaggtaatagttatacttccacatcataaacatgatcttttacttctcaacaggcttttaaacacgctacacacaagctgattgagga

SEQ ID NO: 41244 - DNA, 355 bp, Glycine max
  Clone ID: jC-gmro02910008d08d1
agacaacaattacgacaaaatatgcacatttaatactctgagctataaagagggaatcctaccataaaggctaactccaagataaaaattgttatcaatggtagcatacattacataataaagaagggtgtcgaaaggaaataaaaaatacataacatcgacaaccgagtctagctaagcaatgcgggagggatggagcaaaaagtgaggaagatgctgttccaaaacgaccactagctctctaccatgggtcacttcatccaaaaccctatttccaaccctcctagcggcttcaaccagatgtcccctaagccgttgtgaaaacaagcagccacctgtcttgacacactctcta

SEQ ID NO: 41245 - DNA, 537 bp, Glycine max
  Clone ID: jC-gmro02910008d09d1
atcctgaaatacattaatgatatttataatataaatagtaataatgatgatatcaaaatcaataaattggtctataatcttgcattataaaaaaaatatgataacaaaattactctgatttgaaaactaaagtccgcaaccataaaaggttcacttggtagcagcagcaccaccattggctgacttggaagaagcttcttcggatgtggtgctgttaagctcatcccaagcttcaatccaagtcaccatggcatctgcaagcttggtgaagtagggatcaacagccccaagcttctctttgacttgcttggagagttcaatgtagcatttttggacagaagtgcattcttttggaatggtggcactttggaagaatggaatgatctcttcttgccagaaaatgcccttgtactcctttttgagattcacaaaaggattgcttgctttgctgtgccagatgtatggaaggccagtcttcactcccaagcccaaatggtcacagataaccttaacacaccatccagcccacatatcatc

SEQ ID NO: 41246 - DNA, 538 bp, Glycine max
  unsure (1)..(538): unsure at all n locations
  Clone ID: jC-gmro02910008d10d1
gaagaggagaagccaaactcgctatgggtttttccttagttccttgaattgccatttcaaatgtagttacatagacacaaggcaattttcttaatgcaacaaagagtaatccaaggaaaagaaaaagaaagattagatctcagcaggcacacgtttgtacaaatgtgaggggagcctaggagaagccaaagcttgtattggagtcctcatgtatgtgactaaccctggattctctcccatgtcaatttcctcaggcttcattccttcaggtggggtccaacaaaaatggtgcaagaggtggcccaacatggatgttaccaagttgataccaagttgggcacccgggcatacccggcgacccgccccgaatggaagtagcctaaagtcatggcccttcatgtccacatcctcctcaaggaacctctcgggtcggaactccaacggatccttccacactgccgggtcacgggccacggcccacacattcacatgcacattggacccttttggaatatcatagcctncaactttgacattg

SEQ ID NO: 41247 - DNA, 576 bp, Glycine max
  Clone ID: jC-gmro02910008d11d1
ctaaaaaaaaaccctaagttgttattgattgataaaaaaaaaatcaaattgcaacctaaaccattatttaatgtgtaagtgaagatgagatgacaaatctatctactttctaaatgcatacaccatcgatattgcaaacaacataaactacttattctcagttttatccccgagactcaatcccaaacgagagggattgataaacaaaccttaattaaaatttccaaaactcatcacacattggtagtgattgcatattatttacatatatgatgctgcatattataccttaaggtgttatatatatatatatataaagagagagagagactaagactaaacttcagtaaatgcatgtttggtatcacatcctacatctccaaacaggctataagaaatctgaagcaaaatcacgtgaaggatgacagcaatccattcacagtttcatctagggaaacgatgcttggtgagtccaataaagtaggcttccttatccagtattgctgaaacctctgccttccatactccttatagtcaaagtcaattttgttcacataactcgaaataagtccccac

SEQ ID NO: 41248 - DNA, 353 bp, Glycine max
  Clone ID: jC-gmro02910008e01a1
aaaaaaaaacggaatgcccaaacaataaaccctaaatttttggggggtgggggaacaggataccctttttaaacatgacattgccacccaaagctttagaggggggccccaattaaaaccctcccccgaatcaatttttaaccggcattttatcaatatttgccttcccattaaaatggcttaaatttaacaaaattttcttttaacaataaaattttaaccccccctgggccatccaaacgagtttttattttttcaaccaaaaggggggggctcaaactcccggattattagctggtggggtgaaacacccaaaatgaaaatttttgatcgcaagaatttgggttctaagt

SEQ ID NO: 41249 - DNA, 451 bp, Glycine max
  Clone ID: jC-gmro02910008e02a1
ggaatctaaaactcaaattcccaccactaaatggattttagcgagttgaaagtattattgtttacaacaaagtgttctctagtttaactggtttcttgtctaaaccaatctgttcactgaaaaataaagttattctcgttagtaaccaatgaagattattcctgttagtctgttgacaaggagttaaatttccaaagaatttgtaacatcaagatgattaaactatttgatcacaacacaaatatttataatttacaagtaaccagaggctcatcttctagttctcaagtccgtaacatcatatctggatatcatctaatgaaatctcatgcgtcgttatcgtctttaatttcgtaataaattgtgatgggtcatcaatacttgatgagcctagaataatttccctctttagcttttcggtaagcttatggcaaaccctaagctcggatct

SEQ ID NO: 41250 - DNA, 494 bp, Glycine max
  Clone ID: jC-gmro02910008e04d1
aaaaaccatcacagatatgaaaattaaggacaccgtttttacacaatgtcaactaattttcttaaataacggaaatttagttataatcgagacaacaatcaagcacggtggaagaactaaagtccttatgaaaagagaataaaagaaaataatagacttaaaaaagcacactgcatattcatcaaagcatcatcaaagcacactgcatcctaacagcacacgtacgtagaaaggtgaagttccaggtcttgcacaacatacacaacacaccataatttattttatatacaatcttatggtgcccaagatgcagatgcatggactaattaaacaacaacgttagtctgataggcagtgtccatagataaattgggtacccataaaatggccttgcttccaaggaaatggcaaacagggttagttccaggatcaactcccatgagttcatgaagcatgtgatgattcattccagaagtatctgagtggcaacagca

SEQ ID NO: 41251 - DNA, 396 bp, Glycine max
  Clone ID: jC-gmro02910008e06d1
attagaattacagatataccctttattgataataaaaatggtatgtttacatggtagacaattatcatcctttatgaggttgcctacccttacactttggaacctttgaaatcatcaatcacagcttggaacttgttgatgcaacaatcgaacccatactttgatggattgagatctcaaaccacaaagccatgagtgcaagcgacacatttagttcgctttaaactagataactaataaagtatagtctgtagcaataaataaataagcatactcttttaaatgaatctatacgtgtggacgctcattctgatcaaaaatacgattatggacagtagggttgcaagggtaggcacaatctatgtcacggaagggcctttgatcataaaaccaatg

SEQ ID NO: 41252 - DNA, 464 bp, Glycine max
  Clone ID: jC-gmro02910008e07d1
aatccaaaacaagacgtttctgctttattcaacaaacctttaattaataacaagaacaagtttacattatttcttttcatcttacatatgtacaattgcaagcaatcgcacagcttgagagtcatacatatttcacctcctccattcttttacaacattatattatatgttttccaacaattaatcactatttaatttcccccacattattgttttcccttttctatttccactgttacattatgtcatgacaacaacaatagtaataatgaaagcctagaaccaattaagattcctttgtccctaactagcccaaagcatgtttaatcattaatcacttgcacccaccagcaccaaacccaattctgccacctgcaacatcatacacaacctctattggtctctggtgtacgttcccatatataggaacatcactattggcaccatttgcgggaaagccaaac

SEQ ID NO: 41253 - DNA, 538 bp, Glycine max
  Clone ID: jC-gmro02910008e08d1
gaactgattatagaaacacttttattaagacttcaaatcacagggttcaagataatacaatacgctacacttttagaaagccttatatctatatctatacactacaaagctttgccaagataaaagtacactgcaggcaaatttttcatacacgtttagcatagttcattctcccccaattattctttgtcacaactttatattatccctggattgcaacaccaagaggagcagcatccataggtataatcttctcaatttctacacccttgttgttgttctggttttcataggctgaaatgtgcactccaagtgctgctctaccagaaggatcaaggttgttagaccaagcagcatcccactcaacagctttggctgtgctacatgcaacacttgctcctccaggaacggtgagcctagctgagttctgagggaagaacctctcaaagatcattctgtagtaatatgcttccttggtttgtggggtgttgtgaggggagatgttaccagcattaagcatcattttgtcagtcacatg

SEQ ID NO: 41254 - DNA, 520 bp, Glycine max
  Clone ID: jC-gmro02910008e12d1
cggataaactctgttccgcacactaatactttaaatctttaatagagagtctgtcatggcacaacaaacacactttacatattcaaagtagactatgcagaccaaacggggagaaatgaacacaagaaaggagaaaactcaataaagaaggaaaacagccaaaaaaaaaaaagattctcgtaggatatgtagatttggttgcctatctgtagaccaaaggctcaaatggaattaacttgcaggagaaatgtcttccaaactgcaacaaagaatgcaaaagcttaaaaataactcggtcacaatcatgcaaataatttaattccagaatacgctaccttttgcccaaacattcaataatgtcaccagtgactgtggatcttttcttattcgagaaagcaagtgatgcagccttcctcaatatagcggacccggctatgcatcccaaaactgttggatttttaaatctgaaacaaaaatataattatggatataagaacataaacggtatttaaatatgggc

SEQ ID NO: 41255 - DNA, 441 bp, Glycine max
  Clone ID: jC-gmro02910008f01a1
gaacaccaaaggcaaacattttcttttataaataaaaatacgtcacattgttttactcttttactactacgaggtaatccaccgacggtgagtacacatcacaaattttctcttttactaatacaagataggggtagtacatcaacaatgagtaactaaataacccatcaacatttgagtaactacgtctcaacaatgcgaccttctcttaattttcttatctacattcccgtctaattcctatgctacctgtcgtaagggcattcgagatcattttcagtgaccttaaaatgctgaggacgttgaccagagcaatgcagattccacattttaaaatatgatctctcaagattcctcacccagcgggcagtgtcaaatagagggcaagtcaaacgtacagctttaagcttattagtaagagctttaagcttcggccgattc

SEQ ID NO: 41256 - DNA, 373 bp, Glycine max
  Clone ID: jC-gmro02910008f01d1
aaaaacaggggttaaggtgctttatttttattaagtattaatccaatacattaagaaggacatatatatactattacatgcatgaatttgaagtggtggatcaccttaattggtggtgttataaatggtgcatggttattcataatatgtaaagaggtagatagcagttaccgattgtggggtctttaaccaaaaaagttgccagggggatcaaagatgcaagtgaagaaagagcctccgttatcacaaggaactttggcacatccaagacgcaccgagttagcccaaacgacctgtgggtagcgcagggccttttattcaacacaagagttagaacccttgtcattatcggatttctctattaacccacatt

SEQ ID NO: 41257 - DNA, 434 bp, Glycine max
  Clone ID: jC-gmro02910008f02a1
agaacataagaaaggaatggagataattaggtgtgcaggatacaaattaatagatgacactacaacttatgtaagatgatatgagcaccaaattttggattaagagtgagcacagtgactggagcatgtgcataggtaggagaaagctcaaatgagaagcgttgtaagagtaatgacaaaaccaacttcgcttctaataaagcaaaattttggcctaagcacactctaggaccccatccaaatgggaaaaacacaacttggccttttgttgcctttgctactccttcagcaaatctttctgggttgaactctgtagcatcatcaccccaaatatcacgatcctggtgaatcaatagtattggtaaggaaacttgcactcccgcaggtagggaaaggtttccaagtttcacatcattcttgatcgctcgagcaaa

SEQ ID NO: 41258 - DNA, 465 bp, Glycine max
  Clone ID: jC-gmro02910008f03d1
gacaaaccacacatgataaacatattattattttcttaaaatgtagtagttgtatgtatcattctctttttctttacacctcatctgcagataatagctatgtctctaataaacttcctgcctttaccatttatcaaaatcttagtataaaaaaattataattaaattttttgcaatatatgaaggagactatagcatagtacagcatcagcgaggaacaacggtgggaatgacatcactgacaagatcacttcctgaaacatatgaggacatgtgttgctcctcccttgtcacatttgatgttgatgttgttgcagatgatgggggtgctatgttaccagaattgagtaagctaacatctgagaaaagagtttcaggttcaggcaacattgtaatgatatcttccagttctctcaccacatctagcattgatggtctctcctctggattgtcttggcacatctg

SEQ ID NO: 41259 - DNA, 553 bp, Glycine max
  unsure (1)..(553): unsure at all n locations
  Clone ID: jC-gmro02910008f05d1
aactatggaaattaaaagtagttgaagctttaattaactatggaaattaaaagtagttgcaatgtaacatgaatacactaaaataacacctgaaatgaaaggcaaacacaacttcaattctaaccaaataaactcaacaaaagcattacataaattagtcaaacagactgaaacccatgtcatcatcagattcttcagctggttcttccttcttttcctcttccttggctgcagcaggagcaccagactcagcagcaggagcagcaacagcagcgacagcaaatttacttggatccttcagatactccttgaccttgtctgcctcagggaaagaataatctgtctcaaccgcaacagcaagaacattcttgtaggcattgacaaacatgtgtggtgcagcagcaagtgttgggtatgagatagctaatgaaagtgaagtaaccattgagacaccagcagcaaacttctcaataaggtcatcctcagntagatcaagaacctcanggctgaacactgaaccattatcataaacagaaagaaccacaagcccata

SEQ ID NO: 41260 - DNA, 263 bp, Glycine max
  Clone ID: jC-gmro02910008f08d1
gacaattcaacgctatgttgattcttgggattaatgaacatatactattcgggatccaatatttcacatcttatacaaagggaaattcattcatataacatatgaaaaaaccaaaattaaaaaaaaaaaaagaagaagaaagaaattgacccaaagaagtggaattggatgaaaaaaaaataaaattgtgtaatttacgtagttcgacagggtcgaaggtatggttgttcgaggaagctaaggttggaaatttttgatcatgt

SEQ ID NO: 41261 - DNA, 444 bp, Glycine max
  Clone ID: jC-gmro02910008f09d1
aggagaaagtaaataaatctttacaccatggttagccatttaggtacaaagttttctagctgcccaaatggccaaatcctccactccagacataaaattgagaagaaaaatgtgctccatagcaaaaacagctcgcgctcaaattattaaaattccaaaaaaaaaaaaaacattaaccaaaccccatttcttttacacgcaggcaagggataggaattaaaacaagttccctgaccaagctgatgacttgagtttgaaagcctttcaatctggtatttaatcttaatcaacgggaaaggagagaaaaaaaaaacattaaaatgaaaaaacctgatgaaaataaacaaaatcaaaagccatagactgctgatactagtaacgcttcccaagaattatgccaaagacaatggacacaagagctactcccaagatgaacttgaaatt

SEQ ID NO: 41262 - DNA, 512 bp, Glycine max
  unsure (1)..(512): unsure at all n locations
  Clone ID: jC-gmro02910008f11d1
aatgcaatgaaatgagctttgtttagtttaaaaaataaaaaaagtatcaatacacataaatgattcaaagttggcactttctgtgaaagtgtctagctccgactccgatgatgttgggcattgggattgcttatattttggaaagttttgaaggcttattggagcgaaggctttttcttgaacataacttataacttgcatgatttggtggaaaagatacaaaattcaagcaaagtacatatttctttatttttatgtatggacagtgaaactactggaaatcgaggtcatatttcataagtcattccaaccttgagaagtctgttgcgttggattgccatggaattctggccttgtctaaagttctttctgaagaagctataaacatagttgacaacaatcttattcaagatggaggaagatgggtgagcaactacctctgcttctgctagcatatagacgacgcccttctccaatgctntgtctatgaatttgatttcgtcttcagctcc

SEQ ID NO: 41263 - DNA, 322 bp, Glycine max
  Clone ID: jC-gmro02910008f12d1
ggtgcttatttcaatttcctagccggggaacgtaaaaacattataatggaggtagttaaaaaaaaaccaaagggggaaatctctggccgtaccaaacggaaaagccgtggggcacacccttctaatcgccgatggacaaaacccctcttacacctccccctttcgcccctaagagagaatgcccaaacggccttcccaaacggactcccccctaaatggcaaatgaaaaacgccctgtgtaggggcatcaaacacggcgactgtggcggttgcccgcaccctaacccccaaaattgacagttccataccccccggccctgta

SEQ ID NO: 41264 - DNA, 478 bp, Glycine max
  Clone ID: jC-gmro02910008g01a1
agaaaacaaaaatgatatattgtatcttattctcaacaataagcaaacaaaatttaataagtccactcatcatgatcgaggtcctttttcacattccgttactaatttactggattaaggtgaggtcggtgacctaagacttaagagggactacaatagtgctttgttatgtacaaaccaaatgcctaataaagaataaaattattgtattggctttttgacaactccttccacaattccctttgttgtaccctattcgataaaaaagccaaattctttttaagttctaatgacaggacccttgtaaatccctctacggatcacaaagtcatctggaggttgaaattcttccaaccaggacacatcagaaactgtaactccattcaactgaagattacctggaagatctttactctgcgatttccggaagtaagtgcagtgtcttccatgttctgaggaataaagcggagaccacaca

SEQ ID NO: 41265 - DNA, 396 bp, Glycine max
  Clone ID: jC-gmro02910008g01d1
aaaaaaactatatcatagtttcacccttgaaaaaagaaataagtataacaagtctttttttttttatgctaagaatgaaagaaagaaaaaagaaaaaggaaaatatgaaggaaactaaaacactgtatcaaccagaaggtggtggctggctactggtatccgaccatgtggacgttggaaactccggcacgccgccagcgggattgcggctttccggtggctggaaatagcccatttgttgacttgaaaacaaggggaaagaagcagaggttgtgaataatgggaatggtgctggagacacagaagaagaaaatgaaggagatgatgatagcattgaaggtgattgaagtgaagcaaattgtgcattatagtacaactgctgaagcaaactagatg

SEQ ID NO: 41266 - DNA, 412 bp, Glycine max
  Clone ID: jC-gmro02910008g02d1
aacgtaaaatacagaaaatgttcaatgcgaaaaggacactagtttcgtttacccttacaagttacaattgctcaatacattgtctagaatgaaaaaacaggagaacttaatcctatttcagtgataatatctacatttatggtgaagacaggaaaagagcaacgcattttagaccagagaataacattaagttaatcatgttttagcaacggccgcttgttaaggaataatataattttcctccacctgtataagtattaatagccgttgcagtatgccttttatatcaaaatttcattctttttgctggtccttgatcaattatcggatcagcagtaggagcttgcgtttctgctgcttcttgagtttcagtgcctttctccgtttctgcagttggaggtggaacataacc

SEQ ID NO: 41267 - DNA, 485 bp, Glycine max
  unsure (1)..(485): unsure at all n locations
  Clone ID: jC-gmro02910008g04d1
gaaggaaagcatatttaataaagtatttgaactgtttaaagtatgacaggagaactgaacaccttaaatacttaaaatggaaaatcaagaagaaaaaaatttaaaaacacgggatatatatggcaatggcacaataacaaaacactctaggaagcagccttggtctcctcagcagctgtctcaaaatcctggcctggaacaagctctgggacatcgtcatcatcattctcctcttgggcggtggttgaaccagtggctccttcaggagcctgcttctggaattgctcggccagcttcttcaggttttccaagttatctggtcctaattggtggataatgctagggagtatatcctgcaacttctttgtttgtggagaaccactgacaacccaagtattagcagcaatggatgctcgaactttgggatttagaaactggataactacggcatccttaaagatatngacctnctcatagccgggatg

SEQ ID NO: 41268 - DNA, 319 bp, Glycine max
  Clone ID: jC-gmro02910008g05d1
atgaaaggatacaaagttatgtatatgcgggcgtaaagaggtgggatattacaacccttttcattggaagagaacatgtatgcacttgcaccaaaacatggtgactagggagtgtgagatttgcatggggagctatatgctctccatcatgttccctctgaaattatcatggggaatccatttgtacttttgttggaacactgtaggcctacgttaaacaagtggcatgccctgggattttccagggcagagtttcttaccagtgtcaaatggggctcatgtaaaaatagaccactggatcgtgacgtaccttgccttc

SEQ ID NO: 41269 - DNA, 402 bp, Glycine max
  Clone ID: jC-gmro02910008g06d1
aaatcaatggacgcttttttcattatcatttttcagccaataatatttcaatttgaatacatttgattatttgttcaactggccacatcagcattttcttctggcacatcatggctacatattctctagctagtataaataatgtgtgcttattttggagtggtggcgcgcacatatatgcatgaaatcatattcagttttgtctgtgtcgttcattctatgctgggcacattggacattctctgaaccataattttacacaagtagtcaaaaccaaaatccatatacagtgacacgaaccacaaactgatcatatgatgctgccattgcatgtatgtagctctctagtttaccaaatcgagacacatattacgatgaaacaaacgtacgtctaaacgaaaa

SEQ ID NO: 41270 - DNA, 448 bp, Glycine max
  Clone ID: jC-gmro02910008g07d1
gacataaatctacatctattaaaattagcatatcattgacaaaaaccccttaatgcaaaaacacaacttgatataactaacttccagaaacaaacaaaaggttggactaatttgtttttcttctcagacttgttttaatcacgcaacagagttcacaactaaaacactcgagactcagaattgccccacaccataaatattgatcggcatggagactatgatgagttcatgttttacacaaaccttctggtacatgtttactctaagaactcttcttctgaacgatttcttcaataggatctgcagcatcctgaaccgtagcgatgctctgtgcactgtcctcttcaatggcaataccaaatgcttactgaagtgccatcacgatctgaaccgtgtcaagggaatcagcaccaagagttgcaaattttgactccccagtcaccacatc

SEQ ID NO: 41271 - DNA, 523 bp, Glycine max
  Clone ID: jC-gmro02910008g08d1
ctactgttaatgcggacaaagttactgtactttgagtctaactccccattaaatacatctgcaatgtcaacaataaaaagcaaatcttgtttagttgcaaggattagatgtgtgatcacttggtcagccaaatttgagtaaaatgagaagctgctgcagttgttgcaaagtatccccgcattagcatgcagtctgccaatctcatccagtccaaaaagcactgattttgataggccagcactgccaactaacgctacactcatccaagggcaagctgcagaaaaaccttgatgttcttgttctagagatcctctactaatcccaatttttgatacatactcttggatttcccccctagaaaactgaatatatgcagagtgtttactagcaggattggaagcgatgccaataaccagctctttaagggtatttcgatttgaaactgctgcatgccagcctgagcatgtcagcaatcctggaacaagatcctcagaacattcaagttccacttcctgcaaataga

SEQ ID NO: 41272 - DNA, 478 bp, Glycine max
  unsure (1)..(478): unsure at all n locations
  Clone ID: jC-gmro02910008g11a1
cggctcgagaaaaaatccatttggaaaaaggaaagataatcttcctgttgctgttcctagtgcaaatggagctccaccaacaatgacttatcagtagcttgaaggggatgtactctgttctttatgctccgacaaatattactacataataggatgcatcttgctgctgtcacatgcatccattgatcatcaagtcatcgccattagcatccttgctcatgtgaatgaatgcagtggcatcatatacatacatttggctatgttatactagtcggacatgcatatcttggcagcatgtgttggttcctggattactttcataggcgtttagatttgatgcatgggtctaaattttgttacaattgtgtgctttatgtcatatactttctgtttacattggcattaggaatgttattcanacagattttggcttctattttgcaactntaggttcatttggtgctaatttgacatgaca

SEQ ID NO: 41273 - DNA, 496 bp, Glycine max
  Clone ID: jC-gmro02910008g12d1
aacaatagaatagatgtagaagctgttgaaatgagatgaaagttcgagggacaaagaacaaggcaaatactgctattcaccaatattcctaattttgtacaaatgttttttcttttaaaatcaaatacatagaaaataatggaagttttaacaacggcttaacgataagaggaacaaatcatgacgaacaatcttgatatgaaagcaatgtgaaaagctagttttagatgccactgagacacatgaacttctaagaccccaaatacttcgtctctctctaagtcgagcagcaaccagccttctggttcactggctgtcctcgaatttgaactgttggaggcctcgcattgttcactggctggcttgccattctgtttttaatttcagcagccatggccatgaaagcctgttcaacattggtggcatttttagcactagtttccatgaagggaattccaatttcatctgcaaaagcctttgctgtctcataggacac

SEQ ID NO: 41274 - DNA, 478 bp, Glycine max
  Clone ID: jC-gmro02910008h01a1
aacgatgtaaaagtttattagttattttaggagaaagagagcacatcccgccagagagatgcgcgcacaaagcccccaagaactgttttatttggtgataaaataataacacacaaaccaaggtatacaacaataagacgaataggaatcacgaaatttaaaagcagttgatgatgaattaattaagggcaaaacacaagcctataatcagatcctcccatgcaagtgaacatgctgcttgcgtcatccatagggtaactaaaggcatctggacacctctccttgaagaacttggaataatcagtgggaccgcaacccgcagcaccggtgctacaacagtactgagtcgtattgaaaaccgtgcacgggttgttgcagccgccgggaacctgaagctgagtgggacactttccgatgatgtcggcggcgcatttcacggagctgcagttgtaggtcgggctcacctgtcagggaatgt

SEQ ID NO: 41275 - DNA, 333 bp, Glycine max
  Clone ID: jC-gmro02910008h02d1
gaactcaatcgtttactagaaacctgtcaattggtcatagcatttgaaaactaaaactacgacctcagaacaatcaaagtcatgactacatgtatcgaacgcgggactaaaacgtccccaatgggggcctatatatccattagaaaattattacgacctaacgccttaaataatccaacctagctggatgcttacgcttcatgagagcttgggaatgaaaaaactcgccaatcaccccaaatgtacacccgcacctgaaaactcctcctactgagcaggcgcccttgatgagacccagactgatgtgtgtgtacgatgaacccccattgcatt

SEQ ID NO: 41276 - DNA, 416 bp, Glycine max
  Clone ID: jC-gmro02910008h04d1
agagaatactaatatttgtttaatattgaagggcgtactggtttgatgccaataaactttcactttctcaagaggcgacttatacctggcacctatgcagctaaatcatgctggctttctgtcgtgtcctggacttaaatttgcaacttgcctgtccttttgctaaacagggaggctagatcttttgagctttagctgaaacgctggctctgaaaaggacatctactgagcatgaaataacgtctactgaagctcaacatccatggcaaatgcaccacctgctccattgctaggccaccaatttcgtactgatccattcttctgcttcagtacccccaaatgcgtgacctgaatgcgagcaccaatgcaaccgatatgatgacccagtgcaacagttccaccatgtacgttcactt

SEQ ID NO: 41277 - DNA, 450 bp, Glycine max
  Clone ID: jC-gmro02910008h08d1
aggggcgtgattgatcattttacaagactaacaaaaaaaatgatgttgcataatatagaggaaaaaatgcgatgccatgcgcccacccttttatatttatacaactttcaaccccctaaaactgcagctattagcctattagaatgattaatttttgcttctttttttttggtacaagttcttacttctttaacttacaaaaaagagatgaatgcatttttcggtaaagagttggcctgacaaaccaattgtagcagctgccgaaaattcttccgagtccacaggaagcttgcaacaatatatatacatattcaaatttttaaaccaacatctgaggtaccctaaggaagccgagggacaaagaatataaaacaactgagattgttgttgctgtaattaaattgtgtacaagacgtttgtcgtctttgctgggtacaaatgccattttca

SEQ ID NO: 41278 - DNA, 479 bp, Glycine max
  Clone ID: jC-gmro02910008h09d1
gcagcgataaatcatgcttacttgcattagggagggtagtcaaagcgtcaagcaaacgcgggggaaaaatcaacagggattggcacgatctaaataaggaaacaaactatgaaatccacaatctatgaaactacaatctagcagtagcagttgtcccaaacaggatgtcctacgtaacaagaacaagaactaggtctctaatgtggcttctgcatttggatttcccgttaaaaacatcagcagtagaaatcagtagcgatcaagtgatgaacgagaacccctgcttgggcggtcatatggaccaggtctacccctataactccttccttcatctcgacctcccattccacttccatacctatcagcacctcctcgtggaccactgtaccggtcatacccttttttcttgccataaccattttgtgggtagtctgagccagcgccatatcgatcacttgcaaatcgatctccactggttg

SEQ ID NO: 41279 - DNA, 509 bp, Glycine max
  Clone ID: jC-gmro02910008h10d1
agcatgaatccttttctttttttctctcgtttatcaatcaatggaatagaatcgaatagtgaggaaatcacaggctgtatgttatactttatatcatagcagttaaatacagagtcaggtaatgagaggtatctgaaacaaatactaataagcaatctcatagaacatcattacgcaaccgaaaaaggcaaaaagtgaaatccagaaatataaaagaaaaaaaaaaaaacagggttaattgaaaaactgaaaattaaaaatcaaatccaccagcatcatcaaagccagcatcatagcccgcatcatattcagcagcatcagataccatgtctccgatcaacattccacccaaggcaccaccaagcaatcctgctcccaatcccattccaaatttgttcttctttggtttctgagcctgaggtgggtacccatatccggattgttgtggatatccataacccgactgttgtgggtatccataaccggtctgaggtgggtacccatatgct

SEQ ID NO: 41280 - DNA, 526 bp, Glycine max
  unsure (1)..(526): unsure at all n locations
  Clone ID: jC-gmro02910008h11a1
ctcgagcgacgcattgggctcttcgaattcggttcccgatttccgacgagttctatcattcggttcaatcttcggaaatgcctctcagactcgaaatcaagcgaaagcttgcgcaaagatcagagagagtaaaggctggggatctacatgcaacagaaccatggattctagcaagtttgtactctggaactgtctgtatctggaactaccaatctcagaccatggccaagtcttttgaggttactgagttaccagttaggtcagccaagtttattgcacgcaaacagtgggttgttgcaggggcagatgatatgtttattcgtgtatataattacaacacaatggataaagttaaagtatttgaggcacatacagattacattaggtgtgtggcagttcatcctacccttacatatgtgttgtcatcatctgatgacatgctcataaagctttgngattgggaaaagggctggatctgtacccagatatttgagggacattctcattatgtcatgcaagtgacatt

SEQ ID NO: 41281 - DNA, 439 bp, Glycine max
  Clone ID: jC-gmro02910008h11d1
agaaaataaagcaacccaaaattcattattttaacctcatcttacacaacaagtttacaggaaacgttttgcgagaattattccacgattggtcaagcaacaaaacgttgcaaaattcccagccaaattgccgtacaaaattatggaaaaataggggatgagttctgagagtgggtcactgattcactactgaaaatgggcgtgatttttataaattcctctttatttcccaaatatacagcctatttggtggaaagtttttgatacccttaaaaaacaaaacttgaattgcttgggactcggggtagcaattatatgaaaacgggagttagatatggcacttgaaaaacaaccaaccacccgggacaaaacttcaattttcacacgggcccaaccaaatactttttaggtgacgggggtccttcattacttataccct

SEQ ID NO: 41282 - DNA, 413 bp, Glycine max
  Clone ID: jC-gmro02910008h12d1
ggggtattaattatcctagcataaaactgaattcataaaaatgttctgaactcaaaatcgaaaaaacaatggctaaaacatagggaaaacaaagagtcctaacttaggacatgtagaacaactattttaaccatgaaggattgggtttgcaaaaatcaagagttcctcttagatgatcccaatcttgttagctacatccaaggcatcatagtctggagtcaacctaacataggctttttttgttccatcaggcctgattaaaggattcacttttttcgcctgaatggcatacatttttttcacaggatttttaatcttttttttggcagcacgggggtcaacaataaaaaccaggggggtggtatcctcaattttttttattgccgactcagttgttagaggaaatttaagtt

SEQ ID NO: 41283 - DNA, 471 bp, Glycine max
  Clone ID: jC-gmro02910009a10d1
gaaaaaaaaattataccatgcatttaaaacattagtttgtaccgcttggacaatagatattggtaagcatattaagatgaaatgccaaaacggaagcaataaactgaatatgaaattctgctcctcgcatggaaaacacaagaccagtcttctcggaatatgaacttgtctcttcagtattacgtccagatggtattcttcccaacaggagctgagcactatgtcctctcttaacacaaatcccaatctccaagaactagggaatagggtgcttatatcagcactgttcttctaatgttcctctcaactgaatattaagtaagaagctatttttttcagctaaataaatgttgagttgctgtcgtcagatccacatattggtctttcaaactccaagacatgctaaataagagtgtgtttgtaaagtttgctgcagttttttatataatccaactttcaatctctgaagct

SEQ ID NO: 41284 - DNA, 59 bp, Glycine max
  unsure (1)..(59): unsure at all n locations
  Clone ID: jC-gmro02910009a11d1
ncgggctcgttcccagtgcaacatanatgattgacgcagcgcacgccgtcctgaagcgt

SEQ ID NO: 41285 - DNA, 428 bp, Glycine max
  Clone ID: jC-gmro02910009b10d1
gaaaaaaaaccagggtatcccttgcggggggcccaaaacccagcccgggacccagacgggcgaaatttccgccccccccacgggacaaaacaaaaaggttcccccgatttccccaagggaaaagccccccgatgcctaaaaaaccgcttattccggggggcccttcccaaaaccagggcccaacccctgtttttgaggggggggggggggatgccaactgggggaaacccccccaccggggccgctccctaggaggggccccccccaaaaaaccctggggcccccccggccggggctttgggggaaaagaaggcggcccccaaacccccaccgggggaaagccccctccccggggggggaaagggggccaaggggcccacaaacccaaaaatatcgggggggggggggccccacaaaggacccggggg

SEQ ID NO: 41286 - DNA, 469 bp, Glycine max
  Clone ID: jC-gmro02910009b11d1
gagatgcacttttgtattgtagataacacaggcacaaagttagtaaaacaatgattttcggaccatgcttgcaaccccaacaattttaataagagcctaaaactcaagtcaacataagatcattccctccaagatgagggcgaaggcaaacacgaacttcatgctcttctgatcccacacgaagttttggcaccatgatctcaagcactgatcctggcccatcatagtatgcttctatattggcatcttcaggaattcgagttgaaagagggatttcacgaacaaactcaccaggtgggcagtgttcggatgacggatctgtaagtttgaatgtcctgtcatgtctcttgatatatggcttcccagatgggctcacacaagaaaccttaatgataccatgaataagagtattcctccaagaaactttcacacttgaaagatccacacacggaagacttataacaatcat

SEQ ID NO: 41287 - DNA, 572 bp, Glycine max
  unsure (1)..(572): unsure at all n locations
  Clone ID: jC-gmro02910009c10d1
ctagaataataggaggactttatatttataaattattctaccttattatctgacataactttgtgaaaatctttaatatcccacaacctgctccacttccatggcttcctaggtgatttttctctaacaatatactttcccaaatcgcacaacaagtcatgcattccaatttcctcatccatggttataagtgatttatcaacgagaacttgtaggtcatattcgggattaaatccacgaaaatctagaacttccttcacatattccacatcatcatcgttgaagaaacatgcaatatctagaaatatttccttgtgtgtatcctctaattgatcaaaacttattcgcaacacattcataatacttttacttttattttctcttaacgaaaccaatgcactcctccaatgagagaaatctttatcaaacaaatatgagcctattacttcaattgctaagggatgaccttgacaatgtgatagtacatcagaagtcaacttttcaaaatcactcataatataattattnttgaatgctttttgcanaacaattgaagagcatcattgtcattc

SEQ ID NO: 41288 - DNA, 535 bp, Glycine max
  unsure (1)..(535): unsure at all n locations
  Clone ID: jC-gmro02910009c12d1
gaactgataaaggaaacacttttattaagacttcaaatcacagcattcaagataatacaatacgcaacattttttagaaagccttataactataaactataaaagctttgcccagatgaagttacactgcaggcaaatttttcattcacatttagcttagttatcttcattggcgcccaaattattctttgtcacatctttgtattagccctggatggcaacaccaaggggagcagcatccataggtattatcttctcaatttctacacccttgttgttctggttttcataggctgaaatgtgcacttcaagtgctgttctaccagagggatcaaggttgttagaccaagcaggatcccactcaacagctttggctgtgctacatgcaacacttgctcctccaggaacagtgagcctagctgagttctgagggaagaacctctcaaagatcattctgtagtaatatgcttccttggttnttggggtgttgagggggtaatgttaccagcattaagcatcnatttttcagtcacat

SEQ ID NO: 41289 - DNA, 489 bp, Glycine max
  Clone ID: jC-gmro02910009d10d1
aatggtgataataacaattttacatcattttttcaaggatttgacacaagagcttacagtgtaggtgaaaaacaagactacaagtgaaggaaacttccaatgtgatgtataatgaaactacttccaatgtacaacttaacccacttttcagcgcagagttcccacaggtctcttatatgtatacaacatagacaccacaaggaatgctatcaagttcactacacttagcaatgccaatagccagaagaaataatctatgtgaccaaagtttagattatcaggtatccaccctggacttccattcctagtgctgatctttgtcacaattgtcacaagcagagagctcaagtactgtccaagcgcaacagtggtaagtgagagagcagaacaaaagcttcgcatagcatcaggggcttgctcatagaagaactccaactgaccaatgaaatagaagacttctgcacagcctatgatgaaatattgaggaac

SEQ ID NO: 41290 - DNA, 525 bp, Glycine max
  unsure (1)..(525): unsure at all n locations
  Clone ID: jC-gmro02910009d11d1
agaaagaaaaaaacagattttaccactcttgattcaaaagtttttgtcttccaaaagaaaacagaaaatattaccataaaatgtcatttaaagaacaaaaggaaatgaaaactacaaatatagtagtgagaataacttattcctctaagtaacatgcattcatgtcggccagaatccgtaaagccttggtaggattcatcgtattgaattttcaactaaagcttgactaccacgttctctgcatggaggcttcattggattatatatatggcggatataattatatattcttatcaattgagacccctgctaacaacaaattctcaactcatggctcatggaatggtaaaacttgcccagtagaaaagggtagcagcccccccatctttcagcaaaagaaacgaactaggcgcaccctaaaacttgaaggctctcttctttgacttgccctccttttcttgcataattcttttcctcttcttctcgntctctgcaaccatgtcactgaaatcttcacgctgacta

SEQ ID NO: 41291 - DNA, 499 bp, Glycine max
  Clone ID: jC-gmro02910009d12d1
gcaacaccaataatatactgaaactgtatatatacataagtccgttagtacagtgaaaagccaggggcatcaacagtttctttaatcgattccgtcacagataaagtgaaacaagagaaaaaactctatagacagacaagttgtaagagctaggaagtttgaggttcacatggagcttcggttgcatagggtgtaaccagagatgagtgagctgatagcaaaggcaacgaaagcgaggaaggccattccaatagaagcagtggccatttctgtgaactcatctttcccccaattcgatatccaatcgtcaacccgtgttgctgcagatgatgatgccgatatcagaagatatgccagaacctgatccatgaagaaatcaaagtggttgcgaaggtggtgactgattaagcgtttccccgtggcaatttgacatgtcagatcacatgcttgtaatgcagagtatgcaaatccaataacattcacagataaacaataccta

SEQ ID NO: 41292 - DNA, 479 bp, Glycine max
  Clone ID: jC-gmro02910009e10d1
ctacatcaatatatatccctttttctcattttattgcaatcttcaatacagagagcatgctatcattctttcaaagattccagtaattaactggacctgatagtatatctcattattgcgtatattataccacgaagcccctgacaaacgagatgaaacaaacggtaatttgaggggaaaaattatgctaattcaattcaaccttgacaaagaaaaattaaatactgtgattctattaaaaaaaaaaaatcaaactctacaacagatggcataaaaaaaccaactgaatgttgaacttgacatatctagccaggagcaagctgcattcatatcaaactaatggacattgatccattgacaaaacctgtcttttaaccagacgcattcttccttgcagcatataccctataagctgccagcccaactacgaccactgcagctccaactgaaacagccataagagatcgattaataagcct

SEQ ID NO: 41293 - DNA, 478 bp, Glycine max
  Clone ID: jC-gmro02910009f10d1
aaactaaggtaagggttaataaaattttaaaaacagggcataaatggtacagatgttaaaacttaaaagctttgctagagtacatttgttgaaaagcctgagaactgagaagagggattttttataaaaaaaaaaaaaaattcccttgaaacaatgaaatttgacggcatctaaaaagagaagaaatttgtcagataaataacacttttttccacttccttgggatatttatatcaattggggacaaaattaaaaaatagcattttcgtggggggggaaaataatgaataattaactcaccaaaaaaaaaaatgaatatttcaacctgaccgataatgcaaaaggagaaacacccccgccccccccacacaaaaacaaaaactcttgctcttaaattctgatttcttaaatattttgcatgccataagcctccgcgcctactaaattctccccctttttcattcttttttcttttaac

SEQ ID NO: 41294 - DNA, 505 bp, Glycine max
  Clone ID: jC-gmro02910009f11d1
ccttcatgagtacaaaccgaaataaaaccaacaattaatcttgttttattacaacacacaagcttgacatttcagtacaatagtttattttcaagcaatgagattctaaaaccagaaccacaaacgaaacaccgttgagattctcaacgagttcactcctgatcaagcagagatatcagagactaaaagttggcaaagttcttttctttcaaagtttccactgtctctctaagactcacttccaaaggaataaattcaatccccaaggtctttgccttttctttggaaacctgaaatgttgggacataaggcttatcgtctgcagacttttctggaatttgatatgtcgggtactgatcacgtaaaatcctggcgagttcagagtagtgtgccactctctcaactaaacaatatcttccactagctgaagcgatctcatatgcctgaatatgggcgtttgcaacatctttcacattgatccatccatatgtatcatttgaaaaag

SEQ ID NO: 41295 - DNA, 579 bp, Glycine max
  Clone ID: jC-gmro02910009f12d1
gactcgataagctagcttcaactagattagatggcaacagaaagttgtccaatacaattcccaaagtggctgcacaaccagaaataaaacgagaaataaaggatccaaaaaaatcaaatacatgccaaatttctaacaaccagaccttcacagagtcttaggcagtatttgccaatgacaattaatatgactaccaagtaaacacctatttttccctaataacctataggcttcaacaaaaagaaaacttagtaacaaaacaccatccgcagccaccaacaattcatcttcacaaacacagaacgcaccaactcaagcacgctcaccacgaatccttcttgccagctgaatatccttgggcataatagtcacacgcttggcgaatggcacacaagttagtgtcctcaaagagcccaacaaggtatgcctcagcagcctcttgcaatgcaagcacagcatggctctggaaacgcagatcagtcttgaaatcctgggcaatttcacgaaccaacctctggaaaggaagcttcctgattaggagctcagtgctcttctggatttctaatctcacgaagagca

SEQ ID NO: 41296 - DNA, 532 bp, Glycine max
  Clone ID: jC-gmro02910009g12d1
attcttgaaattttggtctttattcaaactcaattgcattaatgcaatctacgtagctatccaatgtaactgacctcattgggataaagcttttagttacttgtataataggcaaaatcggaatgattgtcatgaaaataaattgccgatgttgtatgcaacttttgagttgaccaattcatactcatcaaccaactcaagaatcattaactgattaatttcacaagtaaactcaaacactagacagtaacagatcaaatatatattgaaagatcccaaaaaacaatatgaattgccaccgtcaaaacaaggacctcatattatgcctaagcttgtgcttcaagctccaagagtagagtgtgagtaattacttcagatcctgggccagagaattgaattggacctggactgatgtagcaattcttcagggcccattcattacgcaaggaggcaaactttttgaagggtgccccttcaagctccaccattgctttcttgatcacgggcttgaattaccatgcctcctttcaca

SEQ ID NO: 41297 - DNA, 354 bp, Glycine max
  Clone ID: jC-gmro02910009h09d1
accatgcaacaaattatccatgtcaacatttcttaatgaacaaaacacggccatccaaacactcaaatgctaagagtgaatctgcaagtgaaacaaattatacaagtagtatacactagcatctatggttgatatgatcaaacattgaatttaaccatgtggcagtgcaaaactaaattgtcaaatagttattacaagttcacaaaattctttgatctatgttgcttcttcacttagaatcccaaattcccaatcgaaggatatttaacctttttcttattcatgacatggaatgctctcaaccaaaaccagaagggcaaaaaaaatcaaaagttctagataagctttttagct

SEQ ID NO: 41298 - DNA, 539 bp, Glycine max
  Clone ID: jC-gmro02910009h11d1
agttaaataaatctcaagatttcgacattatcaaacggagacttccgttccaactagtacagtatagtgggtacaaaattgactgctttattaagcttttctcgtaaactgtgatgctcaagcacacagtaataactgctggaaattgacaaagatgaataaggggataaccttcccaaaagaaggcaagcaaaaaataaaagggcaaatttggtagtgcccattagtacaaatcctgtttcaggttttggtcaaaaattatttttaagagcctcaacaaggaaacccctcctctcaaggggccatgagcccatcaattgtgtaggaaagagacttagcccaatcagctctaagcagtaatgtctgcagagtattcatcacatcatacccaggatcaagcttgcgctgccaaccctcaagaaccaaggtggtcaccaagacagtacaaacattgccatcaacgttaactttatgacgcctaactttctcaagcaattgctccatgcactcggcaggatggaccaggtcaccttttggag

SEQ ID NO: 41299 - DNA, 466 bp, Glycine max
  Clone ID: jC-gmro02910009h12d1
caaaaaagattatgttctttttattggcataaaaaaaatccttttggtttataataaaacaggaaaaaaatggaaccatcaccttaaatttcacagtaaagagaacgttaaaactaaaactccccaattatgtttacatattaaaaaaggcctttttcttttttaaaaaaaggccccccatttgccaaccattctatatacccccttaggcttactctcttgcgccacatgacctgcccccttcacaagggcgaaagttaggggaaactcactttttttggattcctcggcatatcaataaaaaagaaatcgcatgtttgtgtttgtaaaattatgaaggtattgaaccacccttggaacgtcccatgtttatgcagccctgccattgcatcgatggaagggatcttttgttccctctctaacttgaagagccttctgaacatgtggatcatttgcccataattct

SEQ ID NO: 41300 - DNA, 489 bp, Glycine max
  Clone ID: jC-gmro02910010a02d1
gccttcgaaactgctcataattatctgttgcatataaaaaagtattacagtctaaattaaaaattttaaccaaccaaatatctaggaagtccaacatcaagaagggctacattattgatatttaaatagcatcctgatattagcctttgtcagccttgctaccctcaattcatgatgacttggtagattccctaaccaaagggttggttgggtgcgtcaggttgagatttttgaatcttttggaggtgtgttagcatacttccatgaaaagtgatccaatccattgtagtatctaccacctgctacatcaccaatgggaaccgcctcagaaatttctctcaggtctttttctgacagtttcactgctaaggcacctatgttttgatccaggttcttaatcttagttgttccagggataggtacaacatcctcgccttgctgaagtacccatgctaatgccaactgggcaggagtggcctgatgcttctt

SEQ ID NO: 41301 - DNA, 347 bp, Glycine max
  Clone ID: jC-gmro02910010a03d1
ggcttgggtattagactttaaattttgaaatttgaaatcaagttcacatccccacaaaacaactgggttacacatataatggccccatgcattccatttatttaatatagtatataggaattgacttttgcatgaagcacaattgaaaaaattatttatccaacctaggcccgagcaagaggttcgcgattgggattctattgtgttcccacctaactattgctgaaccaaaattgcttttgaagggagtccataccttttttgcccacttgaaaagctttggcaaaaacttcatcaaagattggaggtttagatccaaacacaatatttgcatgggtaataactcc

SEQ ID NO: 41302 - DNA, 394 bp, Glycine max
  Clone ID: jC-gmro02910010a10a1
cctcggggaattccaattccacattttcaatttataagtaggcaaaaatgttcatatatgaattggaattatgttgttttcttattaggcctatcctgaagccaaaggaaatgagatcggaattcctcggggaattccaattccacattttcaagaaataaggaggcaaaaatgttcatatatgaattggaattatttgttttcttattaggcctatcctgaagccaaaggaaatgagatcggaattcctcggggaattccaattccacattttcaagaaataaggaggcaaaaatgttcatatatgaattggaattatttgttttcttattaggcctatcctgaagccaaaggaaatgagatcggaattcctcgggggtaccgagctcgaatt

SEQ ID NO: 41303 - DNA, 508 bp, Glycine max
  Clone ID: jC-gmro02910010b02d1
caacatagcaagggagacttttttattgtgcaattgtgtattacaataaatcttctcactcaattctacatcttattaccacccgaggatgatttccattcaaacctaataatcactccccaacccttcccacatcacttggaaaaacaaccaaatcatatgatatctcatatatcaagacaccatagacataacatagaataaataatgagaccaagagtaaattatactgaaaagtagacataaatgcacctagatggtcattattaacgagatccttagttattaactcgtgcacaatgtttccttatctccccttcagttccaagcttgacattaattcgtcccattttctcgatagacttggcaaattcctcaaagaatccttgagttgattgaagttgtctatcgataatagaccttgtgataggactagtaagaaattcagcatctgactgaaacaagccccttctcttaacaacttgtttataaaatccaagatcaaatg

SEQ ID NO: 41304 - DNA, 398 bp, Glycine max
  Clone ID: jC-gmro02910010b03d1
atcaagggcgcagtaagaccaactcaaaacatgaccgttcatgaaaacagcgtaggtgccacacaaaatacagtaagtgaaaacccataaatacataagccattacactggtgttacatttaataccgataaatatccaatggtaaaatggcctagtctgtaaacagactttggtatctatcagcacggttaatcatcagctgcaccgttctgggttacgattactcatgccaccaagcacttaacattgttcccaaaaaattctacgatggcatataggtagaggtatcgatctgctcaggaagttgctttatatccacctcaaaccttgactgaacattgttgagaacatcaacatcagtagaacaggaaacaaatgtgattgcaaggcctttggt

SEQ ID NO: 41305 - DNA, 492 bp, Glycine max
  Clone ID: jC-gmro02910010c02d1
cagattatgaagatgaataatctaatttaacttatgttttaaaatcaaacattcaaattagaaattttcactttttacgaaccaaagtacggatgctttaactttattactcgggagccaagtgccgttcattagtcacggaagaaaaatctgcttgcccgaaccgaattgaagatctgctgaatatttctcccaaatggctccaagtgatccttcctctacatttctcccaattctttctggcagtactcaacatttaaaatctttctcctcgagtgatgcataatttcaacataagactaagagatcttaaccatatgatgttcctacacacgctgggccagtctctcttacacacaaagcttaaaatgtacagcgtgctaactaattctattgtcagatctctcatctaaccagtaaatgtgattttcccataatccactttagaagagtcgaagagagcatagtgagtgaaacggtggcagagagcgc

SEQ ID NO: 41306 - DNA, 420 bp, Glycine max
  Clone ID: jC-gmro02910010c03d1
aggaagaaaacacctcaaatataatgtttggaatatcaaaagagatgtcctaaaaagaacaataataatttcaagcagcaagctaagttatcaaacaatttcacatggatcccacatgtttttgaaaaccaaaaacaaaaaacaaaaaacaaaaaaattacccagttgggaacatagagagccaaaactttgattacagtaaatctcatctcacgttgacgtgcaccatgtcagctataactcttatttccaatcaaaaactacttccatggctataaaatgtagaatttttatggaagaatacaacttccatctgctactctcacagggatgccagggtgttggtataagatgttgacattgcagctagaacttcggtaaccgacgccatgacgcttagagcagctttcaaaacctcct

SEQ ID NO: 41307 - DNA, 502 bp, Glycine max
  Clone ID: jC-gmro02910010d02a1
gaaaacttttttgatccagccacaaagaaattgtttcagcaagaatagtggttctgctacctgcaagggtgggttgtgacagttctgttatgagcccatcaagcagattattaacacttgtatgaatgatcagaaggataagctgtggcctatgctgcaaaagcttgctgtcactatgtaatctgacgatacggacctcatgggtgaagccttgatgaagcgtgttatgcaaacctggctttcagcaagtcgtgctctattggaaatgatgatatttgatgtaccctcttcatcaacagcccataagtattgtgtggagaacttgtatgaggggactcttgatgatcaatatgcttctgctatcacaaattgtgattctgatggatgtttgatgctctatgtgtccaagatgattccagtatgtgatgaggggagattctttgtcttatgccgggtattctctggcagggtaacaactggtttgaaggtgaggattatggga

SEQ ID NO: 41308 - DNA, 387 bp, Glycine max
  Clone ID: jC-gmro02910010d02d1
ggaaccaacaccgatgcagaatcctattagagtaaaaatacatcgatgcaaggaccaaataacagatttacaacattcacgggcaaaacctcagacaaaacttacagaaattaaatctaaagtagcattgttcacaagagaaaataaattcgactaagttcaaagtaaaataattcatgaaacaaatcttaaagcttggcttcaaactcggagagaggagtcatctgttccttcaagcccttcctcttgcgaatgtaagtgacaagctgtgcagcttgggatccagccttcaatgggtcaaaagacatcatgttccaatgatcaaacacacattgttggaaggcctggcctgatgttgcaaccccaaatgtgctcgagaaaccaaag

SEQ ID NO: 41309 - DNA, 482 bp, Glycine max
  unsure (1)..(482): unsure at all n locations
  Clone ID: jC-gmro02910010d03d1
cacataattattagcatttggcatagggtttaattgtagtgactctccataattaaaatcgttaatcacatcattgtaaaaaataaaatacaaatgttcggacgataaataggacaaaaatggcaaaaagaattagaactcctaacatgtgaagattttaagacatatcctataaatcaagagcacaattaaagtacctaaaatttaacaggcagatttgtcaagaaagccaaggtgtaaggagaggtggatttgccaaacaaagaacaccaacgaggaagcttctcaaggactcgttcggttattggtgttaatctgtccacatcagtccttagtttcagaagaggactatcagagttatgagttgaacctgacctccagtaaagagtcagatcaaacaatgttggtgcatttntttcctccagaaaactgaataatgtgccaaccatccacactatctctttttgtcaactgaaatcaat

SEQ ID NO: 41310 - DNA, 507 bp, Glycine max
  Clone ID: jC-gmro02910010e02d1
gcaaagtagcaaagacatgctatcttaattcttataactgataattaaagcggggcgcatcaatacaatacaatacaatatgtaactatgaactatcaatatatgatcgttatttatgtctgtgatacacacaattcaggccatgatattcttacgagatttacagcaacttctaacttatttaatacatcataccaacccaacaggagcaattttcatcatacaatgacacttatctttaaactctgaagcatgacaaggtggtagtcaccagggaccatattcttatgcaatttatgccacaactggataagacgcacaagttgcaacaccacacatgttcttccccaattccattttgaagtagccattctcaccccaactttctccccatgaattttttatgagccaatatgggacgccattctcaactccataccccacagcaaggacggcatggttcacatcctgggaagtgctaccgcaaatgtcactagtgtaaactcc

SEQ ID NO: 41311 - DNA, 472 bp, Glycine max
  Clone ID: jC-gmro02910010f02d1
cataagcattgtcactgccatcataacagcactcacacgcatacataacataattaacaccatgaacatgcccttctacccaactctaagctacttgcatagtactacatatataatatccttattgaaattaaaaaaaaaacaacagtaacatcggaagattaaaaaacatagcctcttaatcctcccatccccatgaacctgcagtggtctcggttcattgaaccagcccatttaaaggaaaagaccttaattattttttgcataatatattacagattttcttcctcgatcatagacaaggggaggaaaattcaagggtcctgatcatggtgcttgttggcaacattgcactgctttctgacctcaccctttgtgccagtgagagggttgttctctgagagcaaggtaatggctctagagaactccttgaagaaatagtcttggctcttggccattttcttcacataag

SEQ ID NO: 41312 - DNA, 533 bp, Glycine max
  Clone ID: jC-gmro02910010g02d1
ggttgttcacaatattattcattttgccccactttcactctatggtacaacaataggagccaaattgagccaaatctaatgctctgccgatggatggttttttatttgaaatttttggttgttcacaataattactcattttaccccactttcactctgtgctacaacaatagcaaccgaactgtgataagaggttttggatcctttcttcaagcttcaacggcattctgatccactctttctttcttttctgctaacatggcagcatggtgctgtaagtattccttgctgttaatctctgtcagtctactaatggtgcggtcttttgcaaaccccaattcattgtccacgcaaaggttagaatcatcatttttcctcgatcttgaagaggttcggggtgccatatttttagcctcagatattgttaatattttttcaaagagatcttgagggctcccttcagcagtacataatagtctggctttgttctcatacatcacatcaactaaagtgacaaacctatgtgcagctga

SEQ ID NO: 41313 - DNA, 536 bp, Glycine max
  Clone ID: jC-gmro02910010h02d1
caagcatgtttaaatttatattatagggacaaccataacattagatagtcgtcttacgaatggatatgtcaattatgtacacatcggaaaggagatttgttcaacattctgatagtcatgactcaaggacataatttacatgacatgtacaccaactgtgtgatgtgacaatcaacgattatacgcagaaaaataacagaaaagtattggtgatttggatcaatgaaaagcaacaatggacaatatgcccgtgttatacccgaacatgcagctaaaatcttagtcaatggctggagctaccaagatcaaagtccatggtataatcatactcaattgttggaattacagaagccataaattttaggaataaaaataggtacttgtcaacttcaggctcaactccgtgtgacatcaacacatcaatgattttcttcatcactgctccatgtcgacatggatgaatagatgcatgcttccctggcaagtgaggatggtcctcaattgttaccgttttgtgtgcatgatcttgactaaca

SEQ ID NO: 41314 - DNA, 438 bp, Glycine max
  Clone ID: jC-gmro02910011a02d1
aaccatgtggcagtgcaaaactaaattgtcaaatagttattacaagttcacaaaattctttgatctatgttgcttcttcacttagaatcccaaattcccaatcgaaggatatttaacctttttcttattcatgacatggaatgctctcaaccaaaaccagaaggcaaaaaaaaatcaaaagttctagataagctctttagctgcagcaacaacagcttccttagtgataccaaattctttgtatattcttccagctggagcactagctccaaaacgatcaatgcctattgcttttccctttgctccaacaattttctcccacccaaatgttgatcctgcctcaatgctaactctggctgaaacagcagcagggaaaacactcttcttgtaggcttctgagtgctcatcaaaaagttcccaagaaacaagggaaacaac

SEQ ID NO: 41315 - DNA, 429 bp, Glycine max
  Clone ID: jC-gmro02910011a03d1
ataattaagtgcaaaatttcatcgctaatccactatttatgaacaacttttgacaataatccattgtatacacaagacaccttgcgacaaagcaagccccaaagatttattaattgacaagaatttgtttttcagaacccaccctcatcacagaaaacaaataatgtgcaggcaaggaacggaatatttgaatatgacacaatgatctaactatcagcggctctaaaaatagtgagcagagacaggaagaggttgatgatgtccaaatacaaggagatcgaagcccagatgtattcatcgtacgagtatctcttgatcaggttgtctgtgtcatagatgatgtagccacaaaatataatggctgccaagcaaccatagatcatcacggacaatttacccagtggaaacaaacctgaatcagagcaaaga

SEQ ID NO: 41316 - DNA, 368 bp, Glycine max
  Clone ID: jC-gmro02910011a04d1
aaaactgtcgaaaaattagaaacagagagacctaaaacgtggtcgtgttgacgaggttgttgttattcctggcagcaccaactcggtaccgattccgagtcaatccggccgagtcgtaaaactcgtcaatctcatcaccgtccccatctcccacagtcctcatcatatgcaacaccttcctcgccctctccctcgccctctccgttcccgtttgttcgatctccttcaaaacctccaccactctcgcgttctttggccaaaccttggaacctcaggcttttatgactaaccgcgtacaaagccgccacgcatttttcccgattcgcctccgagtccaactcgttccctcgtaataaccccaccagaat

SEQ ID NO: 41317 - DNA, 429 bp, Glycine max
  Clone ID: jC-gmro02910011a05d1
ggaactaaaccccactttaatttatttcaatgaatttaaagcaacagaacgtacagaagcatcttactttgtttttggtacaacacaccatgcatatttattacaacaacaacctacatttacgatctccacccagggaggggagaaacaacctactatcccagtaataatgatacaatagaagaggattagaaggaagatacttcttggttcttgccaaagctagcattcatggaaacatagcagaagcaaaagtcaactaaatggggaaaacacaacaaaaataagacacgacttagtgttttagtgttattttttaataaaaataaaattgtatctcgataataatacaataagagccgataataaatattaatattaattatcgagataaaaaaattaatttttataaaataaaataacataaaa

SEQ ID NO: 41318 - DNA, 366 bp, Glycine max
  Clone ID: jC-gmro02910011a06d1
gacaatatcaattagctgcacataaaatcaataaggataatatatggcataacactattcccctgagaacagtcaatccccttaaaatgtccttatcaatagttcaaaagtgtaaccaaattgtatggttgcattcaaagttcaaattaaacacaccatacaaacaaaccaagacctacatcagtgtgcgttgccatcacctttgtcttcagtagactctaatgccggtttctttggtgtgcttccttctgccggagtggcatttgatgctcgcttaactcctcttcccaccacaccaaggtgtgtgactccaccagatccattggtgtgggcagttgaaatggttggggagtcaaaaccttcact

SEQ ID NO: 41319 - DNA, 251 bp, Glycine max
  Clone ID: jC-gmro02910011a07d1
gaggtgagttttttttttatttttttttttcttttttttttctttttttttaacaaaaagggggaaaatcacccctcggggcttttgacagataaaaacttgagaaaaagtgccttgtctcttggggctcttttaaaggcccttgggaaactgagcccccttctggacaagacgttaaaacacaccccttgtattcaaagggcacccccccttattaaaatgggggggcatccaacacaaccgcggccccc

SEQ ID NO: 41320 - DNA, 485 bp, Glycine max
  unsure (1)..(485): unsure at all n locations
  Clone ID: jC-gmro02910011a08d1
aattaatactcgcgagatttttcattgattgcttgatcttttaaatacaaatacacttaaaatcaatggataatagnnatccatcggtcaacttctcattcatttaagagaaataaaacaaaaactataatttataatataaaaatctaatcccattcaatatagtcttttaaccgctttagtttaaagacatgtttagatctacttgggccatcctaaaagtaacagtttgtcccttaactgctattgtactatagtacttagtacgaaaaggaccaagatcttaattggtcttccaacaattggtcctgatttcgccactagagccagtaagtgggctaatgtttcccattttaaccattgcattggcaaagtcagtgttgaagcttgaagggtcgctggcataaccatttacttgagagtctgtggatcctccattgaaaagcacttgatctgtgtgcaagagaccctttggctctgcaaat

SEQ ID NO: 41321 - DNA, 402 bp, Glycine max
  Clone ID: jC-gmro02910011a09d1
aataaacaaactaagattacttgatttacttcattgctcgtacttattagaactttctccttatacacaaagaaaccaaaaatatgaaactgaattaattaatgataacaggatagaaaccattcttgctaaggaaatcttagttgcctagacacattgctaatattgactatttgaaagttactttggtgtttgagggcgatggggagagtaatgcagatgcagatttgtgctgctggtgcttatcattgacattggttcttcaatggaatgatttctttcttgttgatcatttgcagaagatgcatcaagaagcatgtcaactttcacacattcctctctctcctggctaatttccttcatcattgctaccacatctttcatggttggtctgtcatctgg

SEQ ID NO: 41322 - DNA, 521 bp, Glycine max
  unsure (1)..(521): unsure at all n locations
  Clone ID: jC-gmro02910011a11d1
aaaaattaaatccttactctcatttttaccataaaaattttcggatgatatgacaatttaatcacgatatcagctgaactaggatacgaacagaaatccaagcatcaacgctgtccaactgataaacataatggacaatattagactattactgctacaagttgatagttctaccatccaagaaggaaaaagatgaaaattacgattctgtgatgttagaaaaaacttctcattcttcatcagagcctgaactttctgcagctttgccatgtttattcacggcgccattgacagcttgtttcttattttttgtgttctggccatcttcttcatcttcactgtactcactctcatagtcatcatcatactcttcatcctcgttgtcctcatcctcctcaactccatcctccatgataggtccttcatcagccaaaacagcacccctggtgccagcccgagttcgtttcaaaactttgagctntaaatttgtccttctgtcacagcccaaccaagaatcacac

SEQ ID NO: 41323 - DNA, 406 bp, Glycine max
  Clone ID: jC-gmro02910011b04d1
aatcataagaatatatattgaaagataggaacattaacatatagtaccaaaaattcccagacccaacaaatataagaggcaaggaataaatatcagacataatgggtaggtatccagtacttggggattggcactagaaacccacccaaaaattcgactttgcaattgggacacctcaaaaacatggacaagaaaaaaggaaagaaccgtttcattataaaatggcttatttgttgttgctatggctgcctatatgaacctgtcgtttgttgatcagacttattaggtagcaagatgaggatttcatagagggaaaaatagccgcataattctgtattattttcgttcagtctcttgttaacttcaaagccaaaatctgtacatgtcaaagaggccttaacaaggg

SEQ ID NO: 41324 - DNA, 491 bp, Glycine max
  Clone ID: jC-gmro02910011b05d1
gaaactgaaaatacatttgcgctttataatattgacaaaataatttagaagttttaaaacaaactctgtcgccacttattgtatggcacaatgataattatcatcaggtaacatatcggagtaacaaggctacttcacacattaatgttacatgaaaacatgaatacaaaatattgctgtgtgccaaatttgacatctatgtacagaacaggagccaagcttgggaagtctgttttataccgcacaatcatttgtagtcacctcaggaaagaagcaacactaaatggcctcaaaataggagctatgcaatctgttaattttctagcacatttgcagtctccatgaataaatgacttgaatattcttgaccaaacactttgggaaaagatgcacagaatcttcttcaaagcttcatagcatatttggcaatcatttagcagaagacatgcgctgcagagatgacatccagctacttgaagggcccattttac

SEQ ID NO: 41325 - DNA, 536 bp, Glycine max
  unsure (1)..(536): unsure at all n locations
  Clone ID: jC-gmro02910011b07d1
cagacaatggtcaaaatatatattgccattccgtttgggtctgtaacagaagcagcgaagcataaaaacaatgcatccaaattaaaacccacaacggtactggtacatctgaacatcaaacacaacaacagaaaaagaccacaagaacaagaatctgaagtagattctagtagtcttcgtcctcatcctggccctcaccagactcagcacccacttcttcataatccttctcgagggctgcaagatcctcacgggcttctgaaaattcaccttcttccataccctcacccacgtaccaatggacgaaggcacgcttggcatacatgagatcaaacttgtggtcaatgcgaccaaacacctcagccacactggtggagtttgaaatcatgcaaactgccctctgcaccttggcaagatcacctccaggaacaacagtagggggctggtagttaataccacacttgaaaccagtagggcaccaatccacaaactgaatcgncctcttggtcttgatggtggcaacagcagcattcaca

SEQ ID NO: 41326 - DNA, 506 bp, Glycine max
  Clone ID: jC-gmro02910011b09d1
catcatataaaatatatatgttctgaaagaacacatacaagtacacaaaaaaaagggggaaattcataaaaaaatacagaaaaaaaaaaacagaattgagtaagagggaaggaaacatagagaaaattttagcaatcagataataagaagccagtagtagtgcaaaagtcccttgccaagagtgttggaaccccttttagttaagcaggtaccttctcccccttgagtggcttcaccacttcccatgtgaagtcagggtcatctctgccaaagtgtccatatgcagcagtcttcaagaacctgccatttccacccctcttgagatcaaggttgatggagatcatgccaggcctgaagtcaaaactctccttcacaatgctgaggatttccttgtcagggatcttcccagtgccataagtgtcaacaaacacagacaagggctcaggcacaccaatggcataggaaacttgcacaattgccctcctagcaagtccatttgcaacaat

SEQ ID NO: 41327 - DNA, 486 bp, Glycine max
  Clone ID: jC-gmro02910011b10d1
cagaattaaaaatgaatcaattacaattagctgacaaaaaaacaacagcaattttgagaaatattacagctgtcaaaaaaaacagactttcacgttgtatcgatcacaattcacaaaatttgtcaaaaaacctacagaattaacatgaggcaacttcacgatctacatattctaatctatgcacgtgtgcaacgtaccctgatcaacctatatattataaaactaattcctacctctgatactgtccatgtggagctacgcctaccatgtgttgttacaacttacaagctacacagaattatgagaataaaacaatacatgtatcgttttattcacatttgtttctccaacaaccaaactgtacctcagcaaaaagaccctgataaatcccaggaaacttgtccaatttacatcgtacctgcatgcatactgcaatcaactgtcctcttgtcaagctgtgttgaaacacaccgcggtcaatattca

SEQ ID NO: 41328 - DNA, 496 bp, Glycine max
  Clone ID: jC-gmro02910011b11d1
gtcacaagagataattttattccaaggagaaaatatttaatacaagtgggaattttattgattgatcccattgatcctctcaataacagagataatcccttggctgccaagcttcccctgaccattagccagcatgctagaaaacaactgtttagacaaggaagcccctggcaagacaacaagatgagcatcatctcctccttccacaacatcaacccccatccccaaatccttaacctgatactccgcaaaaccccctggtcgaaaatccctctcaatcatcctctccccgaacaattcaagcgccttcgaacccgcagcaccgtcttttatggcttccacgaactccctcaggtccagccccgcacgcttggcgaacaccagcccctcgctcagcccgatcaagttcgcgccaatcgtgatctggttcgcgatcttgcagctcttgccgcaccccgcggggcccatgtaagtggctcttccgaggatcgagaac

SEQ ID NO: 41329 - DNA, 469 bp, Glycine max
  Clone ID: jC-gmro02910011b12d1
aatgtccaaaacattcacattcattcacataaaagctggtccttagttaaggacacaggaaaatgtcacaccttaaaaggtcaccaccaccatgaccatatgagccagtggccaaattctagaaaactggtgtggtgttgatggttaaagtaattaaagtaaaattcaaatcaaagacagctactacaatttcccagttcttgaacaatggcttccatgcttggcctctcaaatggagactcatgggagcaaagtaaggccattctcgctagtttggccgcctcgtattcaaagaacttgccatgcaagttcggatcaataaattctgggaacttgaaggactcagcagcaaggcgcattgcgcttgtgatcttctgcttccccgtgaggatctggaaaagaagcaccccaaacgcataaacgtcacttttctctgtgaaccgcccagtagtggtgtattctggagcta

SEQ ID NO: 41330 - DNA, 329 bp, Glycine max
  Clone ID: jC-gmro02910011c04d1
ccagggccaaaaaccggtttttttctttaaaggggctggaaaaaaacctctggggaaggttggggcccccaaattgcccccccccccctttaccaatggctttttaccccccccccccctcaaacccaaaaaggtctctttttttggattttttaaccacccccccccaaccaaaaccccaaaaacccccccttttacccccccccccccttctttttttttttccccaatttaccccccgaaaaggtaaccccccccctcctcccccccattaaaaaaatccccccccaagtttttttttaccccttaaaaaaaaaaaaactttcttt

SEQ ID NO: 41331 - DNA, 377 bp, Glycine max
  Clone ID: jC-gmro02910011c05d1
gacttgaaacatgtttataatgttttcatatcaagaatatcattcagcataagagtacatgataatgaacactgttcacaaacaagtcaacggtaccaattgacaaaggcatctttgacctatcgtaagcatgagaaacaaggcacagagtatatcataacggtattcttagtagggaaagctttgggggtttcccaccttttttttgaaaatccatgggggaaaacttgaagggattaacgagcacccggctttaaacaagttctacccaatccaagggttaatgaacatgcccccaaaacaattcccatggacatcaatgaatgagggaaatgatgcaggggcacgctaagaacatggaaacagtcgcacgggaa

SEQ ID NO: 41332 - DNA, 499 bp, Glycine max
  unsure (1)..(499): unsure at all n locations
  Clone ID: jC-gmro02910011c07d1
aaattagaatgattattttggcacaagcaatacagataaacatcaaatgttttacaacctagtgtttaaatacaaagaagcaaggaagaagcaactttatgctctcaatggaagaatcatagaactctagtgttgtaggaaccacaactagggcatttgtggtagagccagtggaagggggtctctcctttcttttcacaatcattacataataaaacctgagttggactagaaatctcatcaaaaattcttttttcagccaacaacgcatctaacatcctaaaatatacctgcatgtctccaagtgacttgctacatattgggcaggtataattaaagcaggtatattcctgaaaacatgttgagtgcattacatgaccacatgggagggcttttaccggagagcaggatgtgaagatatattcatgacaaattggacangtgtcctctaaatgtttctccctgcatgtatgtgtcataagagaacgagacatacaag

SEQ ID NO: 41333 - DNA, 392 bp, Glycine max
  Clone ID: jC-gmro02910011c09d1
ccactatatataatattatcgataaacaatgggaatcaaaattttgggagatgaacatttttcccttcaaaggatcataacttacatttttaacaccaacaggcatcattttgctttaagcatgaacttattcggaataattttaaaataccacaaaatggtccagggaaaattcccacggtccgtcaatttgtagctgaaaacgttgttcgatactcaagctcagcgaacttgctgattctctatagtatgtatcgggttcatatcatcagaccagtgtttgaatgtcttcagccttagaacatctttgatgctgcatgggtttgaggaaatatactttctacctcattgggtatgaaacaaatgccactggcatcttatttgtctactac

SEQ ID NO: 41334 - DNA, 442 bp, Glycine max
  Clone ID: jC-gmro02910011c10d1
aatgacaataactcaactttattattaagcaattgatatccctgagagacacattgattttatttgaaagacgattgataatacttaatatcttacaatattcacatgtcgcaaataattgcttaggggggccacgttacttactgttattggcttcgctattggggggctgatactatttatactactggactattatttttaattgcataaatagttgggttggttgggaatgtacatttttgtacaacgtcaattttcaagctccaaccagagcacaagcgagtacggcctccaattcactctttgaacgtgtcatcgttggatcaccaccgtccatttcgtttgcccatatttctgggatcacttgtgccaagttatgtacactcttcacagcataggcagctcctttgcttttcattggcttcccaaccagaacagt

SEQ ID NO: 41335 - DNA, 296 bp, Glycine max
  Clone ID: jC-gmro02910011c11d1
gggggaaaaacccccaccccaattttttttttttttcccccccaaaaaacccaatttttggccaaaccaaatttaaccccctttaaaaaaagggtgcccttttttttttgggcccaattccgggctttcttcccccgggttggaaaataataatttttttataggggcccccaaaataaattaactggcccggtgtttacaaccgtgggaatgggaaaaacctgggggtacccaaattaaatgccttggagaaaaaacccctttttccaggtggggtaaaaaaaaaaagggccccc

SEQ ID NO: 41336 - DNA, 572 bp, Glycine max
  Clone ID: jC-gmro02910011c12d1
aaaccataaacagtttataaaacttcgttataaattaaatgcgacttaaaacatccctcagcagcaaaggaaatggactaaaaccctatagctgcttgtgaaattcgaaatatctcagactcttcttaccatcaaaacaaaaaacagtactcatcaaaaacaaacagcaatgaaaattgaccaccgccgatcaagaacctagttttgaaagttacggctacatgaaatcggcagaaacttaaaaatataacttaaacaaaacacctaagactctgcaaggataaaactactataaaggagtaaccacgatgatgatcacatgtgctagcaaaattgcccaaatgcaatcacttcttcttggcagcggccttggtgaccttggctccggtggggtctttcttctcaacactcttgatgactccgacagccacagtttgacgcatgtccctcacagcaaaacgaccaaggggaggatactcagagaaagtttcaaccaccatgggcttggttggaatcatcttaaccatacctgcatcaccattcttcaaaaattggggctcttctcaagctcc

SEQ ID NO: 41337 - DNA, 417 bp, Glycine max
  Clone ID: jC-gmro02910011d02d1
actcataaaaaggaagaaaatacatatataatcacagtcttcatgcaataaactcgatcagcgcctgagtatgaaaggtgcttcatgcttggaataagcttttacaactatagtccatataataacaatacatcaccatataggactctctttctatgaaattccctatatttaggggcacaattaattagcgtgggtaaacaaaaaacagaaattacataaacagtgaaccaaaataagttaaaataactgtagagagagatagaaatagctagtataggcaacgatatctacaccgtctctgcctcttttcgcacgttttactaattttacacgtaaaatatagagagatagagattgaggcaacaacactgatcttccaattccatcaaacttcgcaactcaccctctcctctg

SEQ ID NO: 41338 - DNA, 364 bp, Glycine max
  Clone ID: jC-gmro02910011d03d1
ctaaaccgaagttgtcaagaaaaagttgacatcatctcatgcataaagggttcccaccaatctgtgcaaatctggataatcatgtgagaaaagcaagaagccacagaatccaggttttaaatttcatactgagctcgatcaccatagtttatttttgatccagaaaagtacgaagacaactccaaaaacaatagcaacaggggcccacttccgaatcagagcctgccggtttaaatctctagccttatcagcatatatgcgagattctgatgataagcgactggacatttggctgacctggtccaactgttcaccaacaccaagaacttcctgcacattccgagtcattatctggtggacttca

SEQ ID NO: 41339 - DNA, 530 bp, Glycine max
  Clone ID: jC-gmro02910011d04d1
aacttaaactatgtattaaattaaataaaatcaacaacactaagtaaatgggatacaatacaatacaaccttacaaatacaaacaataaatgcctaattactagtaattcctaatattatcggttggttgcctgactagtgtgactactgcctagcactagcactaactaaatatcatacaaaaaccgaaccggttcaaaccgggtttgtattcctaaactgcaaatttttccctagactctaataaaatatcagcaggtgggaaccatttgagtctgggccaagccggtatccggttcagccacctctttcctcttccgaatctctaacactttacggtgactattggagtgaatatcgctgcagaaggtgggactacacgccggtctatactccgaaaataaccgacccgacttgtaccgaaccccgcacgcgttgcaaaaggttttggcgcccagtgggccggtcctccacttgggcgtcttctgcacctggcagtgactgcaccgccgctgaatctggactccaac

SEQ ID NO: 41340 - DNA, 183 bp, Glycine max
  Clone ID: jC-gmro02910011d07d1
aaaaaaaagggaagctggtcattactatctccaacaataagaaccaagtcctttctcccctgattagggtagctacaaggatcaaacaatgtcgtcaccagctaattgatacctttgatattgacttagatcataacttgaaaatcgataagttttatgcacccaacattcataatccatgac

SEQ ID NO: 41341 - DNA, 483 bp, Glycine max
  Clone ID: jC-gmro02910011d08d1
aatgcatgtttagaaaaactaaaattgcatcttaattaatgttttgacaacacttattaataacttattgggttaacctaattagattagagacagtacatcataatggataagttttttttttcttcaattcatgaatgtcatatagcatcgtgagcaatcagccttttcattatcacagattgactgctcacgatgttatatcatccataagttttcttccatgctgttaaaatccacttccatatgctggtgcccagtaatcagctccattttcatttccaacatgttgggtacaagacacaggaaccaagcacagtcctctactcttcaagtcgcttggcttatcttttgcatcctggtttggagctccctttcttttcaggccattgtcattcaacagctgaccggggtcctcaggaaatacagaatttctttctccgtgtacctgttgagactgtggattcctcatgttttttgatc

SEQ ID NO: 41342 - DNA, 419 bp, Glycine max
  Clone ID: jC-gmro02910011d09d1
gctccaaaaagcccaaacgctcaccaacatgagttttctacagctaaaagctttccagaatacagattgagacaagctacaaagtcaaggagggggggctgaactttttgccgttggacctctcttccaagacccaatctgcactactgcagaatttgaaaatctaacctaagagaaacaaaaacaattatgaaacaaacatttgattccattgtggcttcaacatgaactggttagtcaaaacttgaagagcgactccatcttccttgcaaatagtcctccagagagacactctgctcagtgctactgatagaaaccgtatcatcctccaagtctagtaaagcaaggttcaggtgggactgaatgttagttggaactggttcctcatcacatccatcaagttcctgtggagcattaac

SEQ ID NO: 41343 - DNA, 509 bp, Glycine max
  Clone ID: jC-gmro02910011d10d1
caaattactatcaccctcatcaatttcacctgaaccgccaacttcatcaacagaaaaccttactgtattgaactgaaatccatgacctgtggaccccaatgtcacatcagagtctaaattactacgagcatacttgtgtgactccataggctcccaaactttctttgattgaggcaaatccctgctggaatagttccctgagatgactctgcctttggttcttccattactctcatgcatgaagtctacatgattatacttgctaccacgataaaattgcttagatgtatctactgtggattcagacttactagcaggttttgtctcccaactaactctattggttctattattcgggctacaattgcatgaatggaaatcatatctgtcgttcatccagctgttggaaccataaaacctctcgctgcacttatgaccaatgtttcgactattggattttgcaacatttattcgagattgcctgttcaacccattgattcccctggaag

SEQ ID NO: 41344 - DNA, 350 bp, Glycine max
  Clone ID: jC-gmro02910011d11d1
cctctgttctcattttatcttttttttctattcctcgagcaaaaaaaacggggggggggcgcaccacttcttccaagggccgcccaaaaaaaaaaaggggcccccaccccccacaacccggggaaaaaagaaggaggggaccctttcggcctaccccccccaaaaaaaaggggggggggtctcccccccccgggggggcgcccaaaaaatcccccaaaaaggggtcgcaaccccccaaaaaaacaagaaaaaaaaaaagggggaaattcccctcagacccccccccccccaaaacaccgccaagaaggaaaaatttttttcaaaaaccccccctttacttaacccccccc

SEQ ID NO: 41345 - DNA, 201 bp, Glycine max
  Clone ID: jC-gmro02910011e02d1
aacgagtaagcacaaaacaattttgctcaagataccgaacagttcactaccttaaggaagaaaagacccatgggggacccggtatgctctcttacccaacgataaggacctgcttaatagaactgacctatatttacattatacaatactttatttatatccactcgcgggacctgctatacttttaaaaattaaaacccc

SEQ ID NO: 41346 - DNA, 432 bp, Glycine max
  Clone ID: jC-gmro02910011e03d1
catggaagaggctggttttataaaacaaaatatggtagcaaacatgcatttcaaaactgaaatgttgaagcaaattcagaactataatctattatattggcatctgaatagatttacagcaaaattgtctcatgaggaaaaaatatcaaattcctcaataatcagcatcatgtagaaatcaaattagtgtacaacatatgaagagtaagggcaaaactgtgagaccaatatttctgtctgccaacatgattatgaggctgcagcagatgatctttgtgtcttcaatccaaacagattctcaaacaactttcggagccatgggaggaacattggcaggtagtggggccctaaaatttactaatttttcgggaacattataccttatctttcgactttttgaggcgcgacgatcaacaatttttcttttctttg

SEQ ID NO: 41347 - DNA, 434 bp, Glycine max
  Clone ID: jC-gmro02910011e04d1
ccaaaaacaagtgaaacatctttattggcatgggcacaacatccagaccaggcaagcatcattgttttcctgattcccaaacaattcttaagatcaatctattcagcacccaccatacaaggtacaagtacatacaatcaccatgtgacagaatatatatacctctcaattaccaaacatgtaccagacaatgtagactgcagcagagcctaaaatatgttaaatgatggtttgttggtagaatcaactgagaaagaaacatagcaacattgtatgttaaaaatgctctaaaatcctattacatcagagatgcactacggttacaatttagtcatacaaaagctgagtaacaacaattgcctactcccatgatactgataatgaaaataggaaaagaaaagaaaaacaagggaaatatccctcaacatcattgt

SEQ ID NO: 41348 - DNA, 265 bp, Glycine max
  Clone ID: jC-gmro02910011e09d1
aataaatcatgaagaatatgacccccatttaggaaggcacagacaaaaaattttaacgacaaataattgtaggaacaaagcttctttgaagaaaatggtaacaagaaaacatgaaatcggaggctagctgtttgcgatattagacaccttagtacagaacacgacccaaatttgggaatgccggggaaggccccacaagaaaatttattagcctcattaaaaaaacaggactaaggggcctaaagataagagctattaaaacctc

SEQ ID NO: 41349 - DNA, 410 bp, Glycine max
  Clone ID: jC-gmro02910011e10d1
aacagattcagattaagataattatttcggaaggtggagtataactcctagacagtacatccattttcgatccaggtgttcttcctgggtgcattagctaaggggcagaaaaacatgtttgtcagacagctaggttatcctacgtatcctaattattgtttgtattaaggcaaggaaaaataaaatactagcttggatcactaaagcgaccagattggaagaaacgccaaattgaagaattctaatgctgcaaaatgactccaagacattaaatccataattgaaactttacaataaaaggtttttgtttcctcctcaaagttgaggcagatgtggtctcttttccaacatttcataatgaagaacaaaattatcctttcggacggtttcaaatatgcttggatcgaaac

SEQ ID NO: 41350 - DNA, 517 bp, Glycine max
  Clone ID: jC-gmro02910011e12d1
attcaacaaacatttaattaataacaaggacaagtttaagttttttttccaccttacatatgtacaattgcaagcaatcgcacggcttgagagtcatatattcacccctccattcttcttcatgctacaaactatattatatttaattcccacatttttgttttccttttttttctattgccactgttacgtacactttgcaataaaaggaacaacaataattatgaaagcctagagccaattaagattgatttttctctaactagcccaaagcatatgtttaatcttaatcacttgcagccaccagcaccaaacccaattcttccaccaccaacatcatacacaacctctattgttttctgctgcacgttcccatatatagtaacatcactatcgtcaccatttgcagcaaaagccaagcaaacttgcttggcactggccacgtagagtatcccttgcggcggaagctgcaccgtgacgccgccggcgaaggaaaaatctatcttgggaatagaaa

SEQ ID NO: 41351 - DNA, 425 bp, Glycine max
  Clone ID: jC-gmro02910011f02d1
catcattgcatatttttattaatataatatatgtgtcattacaatattcaagacaagttgcaacagagtactaaaaacagatatttatagaggtaaaacaaggtgactgactagaggcatttggcctcgatctcctctagtgtaagccccttggtttctggtttaccaaagtttttaattccaaaaaagccccgggttttacacaaaatgggtaaaacaaaaattccacttccaaaaatggcctccagggggaaaaaggaaaagtgaccagggcatttgccccaaaattgacgagtacagctatacttagtccttgacctcttaagcgcaaggggaaaatctctgctatcattaaccaaccaattggaccaaaggaaatctgataactgccaacgtacaacagcagaccaattacagcaacaact

SEQ ID NO: 41352 - DNA, 522 bp, Glycine max
  Clone ID: jC-gmro02910011f03d1
ggttcatagcatgaacttttctgctgtcaaaagaaataaaacacaaagtccataatgtcatgttggttgtaggaattaggattaaacactcctgtcacaaactatatttctaatgttgaaactgtacaaatcgcgaataaatagaagcaaccagctaccgctaaagcttaaaattaaaaccatagcctttataaaaggtagagtgaagaaagaatttacacaaaatagaattcacttttcatgactgtcttcagaagaatctatcttaattatgagaggttggttaagatctgctgatggttcagcaacaataggtaaatctggcgaggaagtaatcccatcaatatcttcattttcggccaaggctttatctaaagcagccttggcaactctagtaacacatatcatcagaacaaccgatatcacaagaccaagaatgataaacgcccaacgagtctttgagaactcgccccaaccatgtgtaacatcagaaagatctttaagagttgttccaacatatac

SEQ ID NO: 41353 - DNA, 504 bp, Glycine max
  Clone ID: jC-gmro02910011f04d1
aaaaaatgttcctgatttccttaattctcaagagtcgggaggcagcaatagaaggtaaatgtttcctaaaaactcaactgtaaaaccagtaaaaatgtaacaaggaattttcatcctcaatgaccaatagaatttttgaaaaagaaaatcacatttcttcaacaaacgacagtcataactcttcctcgtagtagccatctagttccttggtttattgatacaatagctgaatagcaatggatttccttgtagcaggccatactagattattaagaccaaagttaagaatcagcgccagtgagtgctatcaattcaacctgcaaacttggtttatatctgattcaatgtttagcattgaccatgtttctgatgacatattgtaagatgcctccatggttgaagtaagctagttcaacctctgtatcaaatctcagtgtagatacaaatgatttcccggcatctgtcaccactgtgacatcttggcccggtcgtatttcattcaca

SEQ ID NO: 41354 - DNA, 339 bp, Glycine max
  Clone ID: jC-gmro02910011f08d1
acctccaaaaaatacattagcacatcaaatttttgtcaagaaactcaactttgtaaaaacaaaacttgagctaactaggtttacaaacttaacttcacaaacttttattcaaacatacactgactctttaacgcaaaccttaattagttacacctagattgaaagagtcaagcataaaaaaaaggtatgaattcaaagccttgtttcacaaaagcttcagtcacccataacttcaagttgggcaggttaatttctggctcagggcctttcgcattcaatgaaaatgtaagtagaaaactgcgatcagaaattgtggtcaagtttgaattctgaacattg

SEQ ID NO: 41355 - DNA, 281 bp, Glycine max
  Clone ID: jC-gmro02910011f09d1
gaaaaaaaggacggacaaatatctactataacaatcaataacaagtacattagcaagtattcaagccaagtacatcagcgagtatataaaaatccaaaaactcgatccccctccacaagagaaaacatcaaaagtccaaaaaagagctaatgctcctccaacaagtaacaccactggtttcagaaaccgatttattcagacctctcattttttgctcgagcaagacacttaatcgcagctaaacataaacatacgcggataatgtgaagacaagctacttt

SEQ ID NO: 41356 - DNA, 456 bp, Glycine max
  Clone ID: jC-gmro02910011f11d1
aaatctaataataacacttgcacaaaataatttctttacctccaaacatttttttatagttcatacagtacaaggaattgtctgcgtctctgaacctttctttgaggttcatcatacattacaaaaagaaaactgaagtaaaatagttcatagtctaggtataaacagtatataataaattacacgaaccaaaaagaatcctttagaaaatatagtgaaaaagaatcgtaggaaatgtcgtcgtgatggcaacaagcaccccccctcaattttgagggcactaatgaaaggtggcacaaataaggccctttcaaaatcctctagccacaactctatgttttattaatatcttcgtcacccccacggcttgcattcagatatcatcaccatacatcgcgcaaatatctgccagtagtttgtagattctttaccatgctctcagccttggaactatcg

SEQ ID NO: 41357 - DNA, 490 bp, Glycine max
  Clone ID: jC-gmro02910011f12d1
caaggtcaacatgttttctgtctctcctattactaaattgaaagttgaaacaatgcccaactctggtgaagctttagaatgctgtagttctagtctctaatcttagtacactaaaactagtagatgctcatgaatctcttattctattcctatatgctatacataaacatatcagtgatatttttattgtaacgttctggtgttgtaaattgaaagttgaaacaaggactaactcttgtcaagctttagaatgctgtagttctagtctctaatcttagtgcactaaaattagcagatgctcatgattttcttattctatgcccctatgctatacataaacatatcagtgatatttttatgtgtaacgttctagtgttcttctgcttccaaatataaaagttctttgacaaaaaagactgatggaatgagtcattagccgaaaatccgatgcttccagggctcagcaacacgtccattggaaaaggttctt

SEQ ID NO: 41358 - DNA, 159 bp, Glycine max
  Clone ID: jC-gmro02910011g01a1
caacgtaatttttcatttcgctcgagataacatcattctctctctctttttctataaactatggactccttaagcgcctgaggagggcatgattttaccgctaaagatgccaaaggaaatgatcttaaaccttggtgactacaaaggaaaggtccttat

SEQ ID NO: 41359 - DNA, 297 bp, Glycine max
  Clone ID: jC-gmro02910011g02d1
aagatgtggctaaatcctaatgtttctattaacaaagttacaaatgcttacaataatattgtatataatatatccataaaaaataggcccatacaggtaaatgaattcggtggacaccaaaatcacagaaatgtaactttttttatgataatcactatcatatcaaccccatttatttctgaagtaaatgacagattataggggttgctaaacaaatctaaatacagaaaagaatgtgaaacatattacactccaagtggaagacaaaccccaatcatatttacacaagttaaacac

SEQ ID NO: 41360 - DNA, 471 bp, Glycine max
  Clone ID: jC-gmro02910011g06d1
agtaaaattgtgcctccaaatttccaatcaagggaaacagcgaacagaactagcagttactagaaagtataaacacatcttacaggctaagaataaattgggagaacaaattaggcatagttacatttccaacgttgttgaaatcaggtggcacggtgagctctcaaaagaaactaacagcttcaacctactaccccattcagctgcatttgatagttttcctacacaaaccactatgatgcccacttatattaccagaatatattggtttctcaccattttttcctacccctctttatgtacaaacatgaaaaagcaagaagccgaagtggataaaatgtacagcaaaatctttccccacttcaatatagctttgcaagaacgtatcaattatggttagtgccgatatgattctcacacattcatagacaaagattgggcatgttccttatcagtattatgactaccact

SEQ ID NO: 41361 - DNA, 478 bp, Glycine max
  Clone ID: jC-gmro02910011g07d1
ataaacgattaatcacctcaaacaacaaaaacattctgatttctgagtttaatgcaaacataaaaaccaattaagcatataataaatataaacagaaactgactcaaaaatccctctgggagaaaagatactagactatcgttctcctaactcgaggcacctaattcttggccacaacaagaaaatcgaataaaaggaaaaaaatcaaaccaatcagaacctacaaagttccaataccatccgccaattgcataaaaaagtctggcttccaaggggacctaacggagaaacttataacatactcaacttacaaatccattcattaaactagatatatctattaaaaacccaaagcttcaaatatcaaataagtcaaccaaacttgactgaaatatggcacaggactgggtgcatgaagaacttgatcaccatccagctcttgacccaacttagaagcacttccgatgaacgatagctg

SEQ ID NO: 41362 - DNA, 341 bp, Glycine max
  Clone ID: jC-gmro02910011g10d1
aaaagccaacataactttttatatgtaataatgaagagcttcaaaactcatgctaaacatgctaggtttttttgatccttaaatgaaactttgaaaaaaaagaaattacgggaaaaaatgaaaaaaaaagttaaaaaaaattcccctgggcctaaactcactccaggcaaatggcagcattattttatctaattacaattgctaactttggcacactaaaaaaacttccatccttttgctatttacatgccaaaaaatcaagcacaagtcctaggggaagggttctcattactttgacatttgcactttgccttacaatatgagagtatattgactttttg

SEQ ID NO: 41363 - DNA, 360 bp, Glycine max
  Clone ID: jC-gmro02910011g12d1
agaaagaatataaagggtaaattggggggaatattaatttattaacacaaaataaagtacatgttacaaatgaaaactagaatagaataattaatgcgcccccaaaacgtatggggggggaaaaatataactttttcaagagcttcactcctcacaaaataatagatcctcttatatggatcgcactatgaatacctaaagcactatttattccactgtaaacaccttttggagataatgtgagacacaattatggttgtcgatccatcaagactcggcagataagatggtgaatcttcatgctattcatgtggcattgacattcaatggagactatgttaccaatctacttgtcttaaa

SEQ ID NO: 41364 - DNA, 293 bp, Glycine max
  Clone ID: jC-gmro02910011h02d1
aagatacaccaccgacagcatctagttcttttggaaacgagaccgatacaacgaattttgatgaatacagatggacaggaatcacactcccacagactttcgcatgcacaacactgacgctggaaaaaaagagtcgcagaagagagaaacccattcacacctctcacaatttgcttgtctaccaacattacgaattgttgactgtaggtgagagacccataacctttgcggattccccagcaaagacacaccatgactcgatggtggctgaacgccttccatgcacagacatg

SEQ ID NO: 41365 - DNA, 510 bp, Glycine max
  Clone ID: jC-gmro02910011h03d1
gaaaaaataaagccttgattgtacttattgggcaaatatttatatgtacatatatatttagcagttgagctttattaattgtttcccattagatatatgaagggttaacatagttttgaaaataatcaagaagccaatcagttccatcaatgtgcgaaatattcgtgtaggagtttgcttcgtaatccctgagttgcttggcataagggactctggatgtataatttgctccaggtccaagacaacggtactccccaaagaagacactctggtctctagagggatctctccaatcattccatccattaggagctacgacatcagacatgtatgttcttgagaataccacagaggcataggctccccatgctgtttcaagccacactctcccactcccaacaatgctgcaattcacaaaggaaaatccactttcctcattcatcgattgtctcccttgagcggtgatcgacccgctaatcccatccttctcttgtttgctacacagtttat

SEQ ID NO: 41366 - DNA, 470 bp, Glycine max
  Clone ID: jC-gmro02910011h07d1
gggaaacaaatttaaaacagtttgaattcgaatattatagattacaaccaggaatcaagtgctagatcgagactgaaaaattacaaattaaaatgattcaaattttcaacaatctttcttgaagaacaagagcattctctattcacatcagtaatgaaaacctaactacaactacagagcataattatcaaaactaaaaaagaaactacaaaacagagaggccaaaagataatctaaatttgataataaaaaaatcaagaaaagcgaatccctatttaagagtcatcgtcagcagcagcgcccttggatgagccaccggccttcttgggaaggagaagattgtgaatgttgggcataacgccaccgttagcgatggtgacgtcaccaagaagcttgctcaattcttcgtcgttcctcaccgccaattgaatgtggcgcggcacaattcgagtcttcttattgtctctcgc

SEQ ID NO: 41367 - DNA, 392 bp, Glycine max
  Clone ID: jC-gmro02910011h09d1
agaaacatacaaactggcaaaccagaagttcgtactccaataaatcaatccactaatactaagaggctctaatgggacatcaaaaacacaattagagcctcagttatcctgctatacaaatatgttaacaaaaggccacgaatcactcaaagtgtgtgaaaaaaataaaaaacacaaacggcaaacccaagacgctgcttaatcattgattagcaggggctaataactgaactaaaaaataccaaaattggagcctatcttttttttcttcactcagatttttacaagctacgaggcaatttgccattgcctttcttcttcaacgagttaagcttttcgagcctccattcttctctaagccgagcaatgaacgttgcggctttaacattcac

SEQ ID NO: 41368 - DNA, 468 bp, Glycine max
  Clone ID: jC-gmro02910011h10d1
acatctcaagtaaaaatataattttgattaggaagaagtaactagatacactatattgtatatagtagggaaaaagaatatataagaccgtctaaatttttcttaatttacaatattccgtttttatacacttattccttaattttcaatatatcatgtaataaatctataaggccatgtttggtaatccgggggttactcttgaactcacagaagctgccacggccacgtttgaaacgacgtgttgctcggggatgaacatagttgaggtaggtggcttataagacatgggtatgcaagtttacatttgtggtctggtctggacaacatagactttgccatccttgatgacaccttcaatgtcctgaggagtgccatacaactcttcaatttcatttcctgcacgggcaatgctggacaagattgactgggcgaaactaccatcaaggatcagtttgtctgatgaat

SEQ ID NO: 41369 - DNA, 472 bp, Glycine max
  Clone ID: jC-gmro02910011h11d1
cccaagtcaaaagcttctttaagcactttttctccctttttgcaacttgcaaacagcttgtgactgactctgatgcacttaatttagaagcctctaactctgctttgatttcagctttctccgcctcaagttttctgacagctgcagttgcttggtccatttgaccactagtctttctcaaggcattctccatttctgagagtctcatcatggttgggttgtccagctcctcagctgcccctgtctccttcggcagaattttattctcctctctttccatcttgaactttttcagctcaatcagatcactgcttagcttttttgccgcttggattggcttctcatgagcccaatctttccgctccttgacctgtttctcaagatcctttatctgattaactagagtgactatcacctcctccttgtcgtcttctggcacaaactccacattattatcaatatttatatcaag

SEQ ID NO: 41370 - DNA, 397 bp, Glycine max
  Clone ID: jC-gmro02910011h12d1
gttcctatattattactcaattttttttataaaaaaactacgaggaatattacatctttttttatttacaatatcttctcaattttattcatgcactaaaatgaaaagatacaacctgttctaaccaaaatcatgcccaagatttaattttaatttgtttcatatacaacaataaaacttcgacgacataataagaatttaaccagctgactaatctgcatttacatttaatgaaaacctttattatgcagattattattgacatgaaactacataaacattaatgccaattagagaacaataccacaagcactcacttacgaagctgcgtctaagtttcagcttcgaaggtggtgtctacttctaaagtttctccatttaaattatctccttctgg

SEQ ID NO: 41371 - DNA, 412 bp, Glycine max
  Clone ID: jC-gmro02910012a02d1
caagataaggactccatacattaattacattatccaaaaagtccaaaccacattaccatgcagcaaaggcagtgaagcactgccctcctataatcagtcttgtcatactaaatgtcgacttgacataataggcctccaacaactacaattactgataaataaataaaaattaaggagtggcctttattaatcttgcactggttttattgaacacaaggcgatcatcatacactaattcttcaatgctcccaatgtccaagtttcagtactaagatctatcattacacttcacagcgtggcttagcaacttcacgcctgagcgactgctaacgaagcctgatacaaattccgacagcgatcattgtccccaagcacaggcagccccaagattaaacatgctatttatggggat

SEQ ID NO: 41372 - DNA, 228 bp, Glycine max
  Clone ID: jC-gmro02910012a05d1
ctaaactgggcttttactccacaaatttaaacaaatcatcacgagttacattacatggtggttcaatgttaccgtgtaggaagctaaaattcaaccaacctttcaaataacaaggtaaaagccctacaccacaaaaataattatggtaatggcctatctatgtgctgaacctgagaatgtcagcataagttgtgatcaacgaaaataaaagcatttgcttacaacatt

SEQ ID NO: 41373 - DNA, 477 bp, Glycine max
  Clone ID: jC-gmro02910012a07d1
gacaaatcaaatccttactttaataacaaaaatggtcaatacaagcttttacaatataaccaattcgcatagttcacccctccatggaactggaatttgatcagcagaaccagcaattctaataagggcaacttacagaactttgggggcagggaaaatatactgcaaaaattatatatagcctgatctgatccttaaaggggttcaagagaagtgtctgagtggaactgtggaagtgcattgggcttcattcataggggtaacttgattttctcagaccacttgaagatatcagaatacactttatcacctcctagatcttctcctttggctccagcagccactcttataacatcctcaatcaatgcaaaatttcccatgatgtcaacgtgagcaccactttgtgtgccccttccctctaaaagggtggctggaggagaatgatcatattctctaacgtaggtgcggataccggat

SEQ ID NO: 41374 - DNA, 510 bp, Glycine max
  Clone ID: jC-gmro02910012a08d1
aaaataaccctttttaatttataggaacaattcaatacattgacaccaccaatagtatgatttaccaacaaaagctaaaacgctagtcattgagaaaaataaacaagtaactacacttctttgatagcagttcccctccccatctcaacaccattgccataatcatcattctccacgaatctggaccagaaggggtgtgccttccaaacctggttcatttcttcaatgggaatgcccttggtttcaggcaagaagaagtagatgaagaatgtcatgatcaacacgaaaaaggcaaagaagatgaacaagccgaacttcatgtggcaaagcattgtcaagaagacttgtgcaatcaagaaagtgaaaaacatgttcaccgacacatttatactttgagcagccgaacggatctccaagggaaagatctcactaggcaccaaccaacctaggggaccccatgaccaggcaaatgctgatacgtaaatgcaaatgaagagaaccacaacaact

SEQ ID NO: 41375 - DNA, 489 bp, Glycine max
  Clone ID: jC-gmro02910012a09d1
agcaaaaaaaatctcataattttaaaacaaaattacccaagctcatgaccatgcatgctatttaaggcacctccacaatccacataagtaaaattcattatacagtatacatattgctgaagtttgggggagagggggtgcgaatcccaaatactttgtaatgatgcaaagtttcaaacataacatatgaaatgtggcccattaactcacgttcctcaagctaagtcctgatacacaggattaacctctagctgctctgcgaatttctcgaggatattcttcacaagttttgccagctcttctttatctaattcagcaccatctttttcttttgttatttcagcaaagacagcgtcataaagaagaacaactgcattgtcagcttgagctggcggtaaacccaattcctttgcgtttctctcaaggaagctccttattatttctgtgttccctactagtccatcctttgcttccggtttttccagcaat

SEQ ID NO: 41376 - DNA, 459 bp, Glycine max
  unsure (1)..(459): unsure at all n locations
  Clone ID: jC-gmro02910012a10d1
ccaaacatacaacatatattcatttcactagctgttcaaatctaaggatttttttgtagatatacatactgacaatacaacatcccatttctacatgatattctctaactagccatacgacagataattggagcctacataagtcaggttggtagcacggcttttggaagacaagcctgaccatcagttgtcatgtccgggccacatcaaaatcaccaaggcttttaaaacccaacaaccccttatcctacgcaatatagaacatatgttcatttattttcttcttttccccgtgcttgcataatcgtccatggttaactgcttgcgcttcttcaaagaagatggactctctgtctgtcttgccaaagcacgctttgatggggtcatgcttttagcaagtttcttctctttgcgagcttgtctctccctctcatcgnattcttggttttccttttctac

SEQ ID NO: 41377 - DNA, 527 bp, Glycine max
  Clone ID: jC-gmro02910012a11d1
ataaaacatacttcattatttcttgtccctaatttccaaattatatattttctcacatatataaaatacacaatacatatacaagaaaattatttctaagaaatggtaccgacacattatgtaacaacttggctcctatattagactaccccttgctcgagaaattagcattaatgctttccatggacgcccaagagcaacagatagagcagattgttgtcgaaagtggaatttacaaatttgactctagcttctgttcttgcacttttccactgctcttggtgctagcccgattgcctcagatcctttcattatacgcaggcgcttgcgtgattccacgaacatttcccacggtacgtcaccaacgagcatccagtcagcatctttgtcttcataggttggtacgtaatcagagccgttgagaagatcaatcaatttgctctcgttcatgaagtctttcatgccttgggatccacacttgtcaatggtgaatgaactgaacattttagccagcgcatccaacaact

SEQ ID NO: 41378 - DNA, 512 bp, Glycine max
  Clone ID: jC-gmro02910012a12d1
aatcacctcaaacaataaaaacattctgatttctgagtgtactgcaaacataaaaaccaattatgcatataataaatataaacagaaactgactcaaaaatccctgtgagaaaagatgcttagactatcgtcctcctaactcgaggcacctaattcttggccacaacatgaaaatcgaataaaaggaaaaaccaaaccaagcagaacctacaaagttccaataccatccgccaattgcataaaaagtctggcttccaaggtgacctaacggagaaacttataacatactcaacttacaaatccattcattaaactagatatatctattaaaaacccaaagcttcaaataccaaataagtcaaccaaactttactgaaatatggcacaggactgggtgcatgaagaacttgatcaccatccagctcgacttgacccaactttagaagcacttccgatgaacgatggctggcccagattcatcatattcacccttggagatccacatctgttgg

SEQ ID NO: 41379 - DNA, 448 bp, Glycine max
  Clone ID: jC-gmro02910012b03d1
ggcaaaactaaaaacgtagattatgatagtgaagaaacaacataatacaaccataactctactcatctaacaaaacaggaaatcacattctcagaatgactactacaattatatttgtgaggaagattatctaaacctatacagggatacttctagctgagaatcttcgttttgctgtcaaaactgccattcccattttcagtgaattgccaaaactgtgaagaaatttattgccggtattgtacgacggaacattgagcaagatactcaattaaccatcaccgtaaagcattcacgaatgccgtcaatgaatcaacatctctcttttccgaagggtacttaattggttgagaagagtgtttggggaagagtagtattgggggggaagcttcccaactgcagttcagtctttgcatattccttctggtctccatcccgctctgaattt

SEQ ID NO: 41380 - DNA, 339 bp, Glycine max
  Clone ID: jC-gmro02910012b05d1
ggactggtaccatcctcaagtccaggacagatcttgatgtaattataaaattaagcaggggcgttccatcaacatatataacatgataatatgaaaatgtcgagataacactccacatcaagagacattaggaagtagattaataatatactgaaattaattacgtaattaattctcattggcgaactcctggtattgcctgaggatctcagcacagccagaagcaacctcctgagacatgaagcccatggcattggcgaacctatcgtcggaggcaatgccgttgtagcgggtgaaaatcacaacggtttcgtcgcggcctggggtgacttccttgca

SEQ ID NO: 41381 - DNA, 367 bp, Glycine max
  Clone ID: jC-gmro02910012b06d1
aaacataaaaccccatttttaaaaaacattttggccaaaacgtttggaataaataaggggaagacatggaaaaaatcccttccttttgttttttaaaatggaaagaagccggatttttttttgccccaggggggaactttgtaaaacgtttaagctttttgtttcaaaactaaacagaaaataaacgggggggggccctaaaaaagatttcccaggggaaaaaaaatttgcccttttaaaacccaaaagggggggcctgaacaaaatttaattcttagccaacatactttgtccaaagggggttgaacggggccattgcaagggcaagccatggtttcattttgccattgaagggcacaacgggggg

SEQ ID NO: 41382 - DNA, 417 bp, Glycine max
  Clone ID: jC-gmro02910012b08d1
aaaacaaaaacttggggcctttttttttttttaaggaaaagggtttgggcaaaaatccatgacaattgttttaccccttcggaaagaattttgtttcaccgggaaaaaaatggaaacccggctttctgaaaccccaaaagggccgttttttaaaaccaagttgattttccctttcaaaatttttttggaaccaacgccccccgtttaaaagaaaaccggaaaaattcttttaaaaaagggggggaaaacaaacccgggtgcccattgggggcccggcccccataaaagttttcccccccccctttgtggcaaaaatgggtcagctttttttcccggtggagcaaaccaaaattttgttgttgaaggcccccaccattcaatttttcccagggcaaaaaattccccaaaaaaaccaaa

SEQ ID NO: 41383 - DNA, 575 bp, Glycine max
  Clone ID: jC-gmro02910012b09d1
atgttcacaacttcacataaagctccaaaagtaccggaacaaggcaagttccacgaaaagaactaccatacacagagcacgaggaaaaaaaaaacaacacagacaaagtaacataacagtgcaaacttctaatcaataatcttctccttcatcaccatcttcttcagttgcctctgcaccgacttcctcataatctttctccagggcagcaagatcttcacgagcctcagagaactctccctcttccataccctcaccaacataccaatgaacaaaagccctcttggcatacatgaggtcaaatttgtggtcgatgcgagagaagacctcaacaacactggtggaattggagatcatgcacacagccctctgaaccttggcaagatcaccgccaggaacaacagttggaggctggtaattgattccacacttgaaaccagtggggcaccagtcaacaaattgaatagtgcgcttggtcttgataattcccacagctgcattaacatctttaggcacaacatcaccccggtacatgagacagcaagccatgtattttccatggcgaggatcacact

SEQ ID NO: 41384 - DNA, 497 bp, Glycine max
  unsure (1)..(497): unsure at all n locations
  Clone ID: jC-gmro02910012b10d1
aaagactgaatttgttattttttatccatattataagaataaagactgaattagttctacaaagcaaagaaagaggaagctgacacgtagaattacagtggaaaaggacagcagagaaagggagaagaaaacttatgactacatttgtataaacaaaaataaacggttggataaactgcactaagccgaccgtccaatttttggccggaatctgaagcctaatttttccgggcatgcgctttccaagctcctgcaaagaaaagccctccccaccacggaaaggcccttttcttcatactggctcgaattgtacttagaataatccaatatttatcacaacagccttttgtatcaatgactctctggtaaccgccatggaaattcacttgtatctattccagcttggtgaagctcatcaacatactgcaatgcctctcggcactcttctcgatcatcaaagaattcctttntatcaccttctacttgatatgtttcat

SEQ ID NO: 41385 - DNA, 529 bp, Glycine max
  Clone ID: jC-gmro02910012b11d1
gacatataatcaagtgttattaatgatcttaaattaaatttaaaaacttaaatacatgtcttgtaaatattgatcaagaccatagacagcagaacaaccaaataatttctctaccaggtgacccaaggaggggaaggagaaagataacacaatgctatatgaaaatgttgaaccctgtccgaaactaacatgcaaatgttccaaccaagcaagttaaattcacagggcaaatttatcagcttacaagagttaactttggttaagtgggcggctcaagattgtattatacaacttcaaaataaattatctaatgtatcttgcatatataataataacaagaaacttgtagacagactgatctagaaacttctgaaaggagggaatacacagaagttggacattaattaccaaaaactgcaggtcaaatgctgctttaatcagttctgatgagcagatagagcgaaattggagacattagtgtctattgcccaatagaattctcatgtagtaatacatattctcgactact

SEQ ID NO: 41386 - DNA, 498 bp, Glycine max
  Clone ID: jC-gmro02910012b12d1
cgcttaacatggttacattaatacatatgtaatacatgacaacaacataatcactacattatgatgccattaaggtagatcacaatttcaaacatagagaaatacattgtaggctgatatagtacatcagatgcaatatggaaatgcctacttatttaaggacacactaacaaataaagacttaagtaacctatttggcaaaccagagaaggtggccctcagggaagatgtgacacactggagcagctccaggcttggttttaagcatttgtaaaaacacatggtttggatcccattctgatgtgtctttgtggcatacagctgcagctttaactctggttccatcttctccctccaaaggcataaaatgcgcagtagtatttgatatctcatgacacataaacacaacatatgggtaatccataggatgacaaacaatgaccttatcttctgctaacaacttcactccatctttcaccgagaattttggggacttac

SEQ ID NO: 41387 - DNA, 370 bp, Glycine max
  Clone ID: jC-gmro02910012c02d1
ccaaaagacgcttcattcatacaatcaatatgatccacgtcaacatggggggaacttttggggacaagttaaaataaaatttgaaataaatctaaacttttactaaagcttgactgcataaaaaaaataaaattctaacttggggggggttactagtataattgaagaactcctgcgactaaaagctttgggttggggaaataaatctttgggacattttgcccaaaagcccttttttctgggagaatcatttttcaataaggaccggcttcactttgatcccaaaaaaaaatgccgcctcaggaagggttttccaaatgaactcctaatactggagctactaggctccatttttgaaactatatttttt

SEQ ID NO: 41388 - DNA, 484 bp, Glycine max
  Clone ID: jC-gmro02910012c03d1
agccaaccaaaaacaaattcaagcatttatcttttaaagtattttcggcaccaaaaatacaagagctggggaagcttttctcaacttccacctgttataaaaactttaagactccgcttaaactacactactgctcatcattcattgctacgcaagaacatctctagagctcgtcatgagaatcaccatcctcctcgcctgatgcaccaccacctggggctccacctgatctctgatatagcactgatgattgggttgcaaacagcttccacctctttgagcttctcctcatattcttctttctccacactctggttgtcatccagccattccaatgcttcttttactgcagtctcaattttctccttttcatcagactccaacttgtcagcgagcttgtccttgtcaccgatctggtttttcatgttgtagacataggtttcaagactgttgcgagcatcaatcctctccttcaccttcttgg

SEQ ID NO: 41389 - DNA, 302 bp, Glycine max
  Clone ID: jC-gmro02910012c04d1
aaaaattgaaaaaatttaagtgtcgggctttaagggtgttggatcattggatagaacaaagaacaaaaccgggaaagagagaaagttctggggggggaaaaaaaagggccactaaaaaaaaaaaacaaaacggggggggggggcggatcggaaaaaaaaaaaaaaaaaaaaacgcacgaaaaaaaaaaggggggggggggatgttgcgtaaaaaaaaaaagaaccaccccaacgaaggccgagcaaaacaatgttttcgggtgggggcaagaactgcgcaaaaaaaaaaaaggaatggtttt

SEQ ID NO: 41390 - DNA, 544 bp, Glycine max
  Clone ID: jC-gmro02910012c06d1
gtcgaaaaaatggtatacaatatacggtaattgcttttacacgcacccgcaatgatttatctcataaatttagtaaaccgctatatctacctcgaatataaatacgtataaagtagacggacgttccagtcaaattttttcgtagaataaaatgtatgcctcacagcgaagaacttcatcaagggaaacttcacgcacatatgcatcacttgcctgataccatgtggaaccctcattctctttatcacccttcccacagttcctctggccccctctcacatacgcaacatagtgaccccctctcatagttccggagtgctccactaagccaaccaagtggtatgcatacttctcttcatttatgcacctgggatcaatatagggtctaatatccattgtttctctgaaattgacatggccatttaatttacttaagcgcccacgggcatcttggctgaatctcttcaagtgaatggtcaagacaggaggcgctctataaatgaggaccctcttagttgcatccctcttcactttcacacttttg

SEQ ID NO: 41391 - DNA, 488 bp, Glycine max
  Clone ID: jC-gmro02910012c07d1
gatgaaggttcggcttaaaattgaattgatgggtaagactgccccaatttgaagcttttccaatcaagatccaaatcatgcaacaacaaaaaaaaaagcaactttttttttccttctttttctctcctcttatcgaaagcttaatcacaaaactaaaatcacggacattatttataaaactcaagtgcgacaaactccaaatgagaaagaaaaagccggttcctccatttctttatccaactctttatcctcagtttactcagcagcaaggggcacagactcagccaatttgcggtacttgagagcatagaacatcttgagatagcggcggctctcacggcggtcaaggttagacacatgcttccagaagccatagacaccggtgagagtgagaagcctctgagagtaaatttgccatgtgtacttctcttcaatacgctggagaccagcctttgagatcttggcccagtgagttgggtcaagcttgc

SEQ ID NO: 41392 - DNA, 410 bp, Glycine max
  Clone ID: jC-gmro02910012c11d1
caaaaaaaggggggcggggcccccctttggaaaacatatccccccaacccttaggaattccacaattggaacccggacataatgggccaaaaaaattccccaaaactaatttttccaattttaactataaaaaaaagggaaaaagcctttcccggggtttttccaaaaaaattatccaagcccccctttcctaaaggcctacatattttggggataaaaattcagttccaatccttaagggaaaaccaaaaaaggaagcattggggacggggcccgccaaaaaaaaaggaaaaaaatcccccccataaggttactttggagggggttttttcctaaacggggccataaaaaaaaacaaaaggggggaagaccccctccaaaaggtaagggagccggttaagccccaaacc

SEQ ID NO: 41393 - DNA, 483 bp, Glycine max
  Clone ID: jC-gmro02910012d03d1
aattaaaagctcatattcaaatttatgagagccctatttcctcaagggcaataaataaataaccaaggataacataaataaaggacaaatgagatgaagatactaataatttccaaagagaacagcatacaatatttcattccaagcatcaggaacaccagccagacaccagtgactgcagtcatcaaaagaagtgccacgccctgtgtagatagaggggtgaccatccctcctcagttgtgtgagcagagtgatgtctagcaattctgcaggctttgccatgttacttataacgctcttcacaatgtccgcaccaggatatggtggcattggtccttcatctggttgagtttgccttaggcacccctttttatcaacatgggaagcagcgattccctgaaacaagactctagtctttgaaggatcaatgttagaatcaacccatttagcccaagtactcagcccaatcttgaaagcttccat

SEQ ID NO: 41394 - DNA, 501 bp, Glycine max
  Clone ID: jC-gmro02910012d04d1
aaaagatataattgacttaaaacattacttattttacataattgtgtgtcttcgatctatatttttcatgatttcggcatttgagactcttggaagaattttcttattacaagacataaaatcaactttgtgaaatcaccataagattgaacaaaagtgactcaccatcaatgcatcgccacccattaccaaatatagcgagggtgaagcacccacctcaaaccatttcccatccttcaatttgacccctaagccttctaccttctgattcaatatagttatgaaagctgtgtcagaatgaggagccactcccaaattgctctcacccacttggggtattctgtatttgtaggctcggagcacatactcggttgattcgagtaaagtgtcaaatttctttgtctcgattccatagttctcaaacaccattctcttcacaatgtggtccaattccactagtttctttgcataggaattgacactttcacagaaatggtcatt

SEQ ID NO: 41395 - DNA, 424 bp, Glycine max
  Clone ID: jC-gmro02910012d06d1
agagcaaaaattcttcttttattactaaatattcctgaaatgtaggggcgtgattttcaccagcccaagagaggatacatttgttttactcaaggaaaaaaaagtcgggtaatgtcataccttcccacatctatacatcaattggctgcttctaatgtaatttatacacaaacatgcccctaaagaagagcattaccctgttcctcgcaagcatatctcattcttcgcatatgatcgtccacacgggagacccagctggaaataatgaccccccaaatagcattgttctggggatttcatgcgttcggaagagtacctgtcctatcactgccaagaaggagaaaattggtttgcaatcaaatgttgtaagaggggctttatggaacccatcctgaaggagagcatcttctgctgttatactgtt

SEQ ID NO: 41396 - DNA, 95 bp, Glycine max
  Clone ID: jC-gmro02910012d08a1
aaaaaaaaaaaaaaaaaaaattaaaataaaaaaaaaaaaaaaaaaaaaaaaaaagaaaaaaaataaaaaaaaaaaaaaaaaaaaaaaaaaaaaag

SEQ ID NO: 41397 - DNA, 495 bp, Glycine max
  Clone ID: jC-gmro02910012d10d1
aatgggaaaaatggaattaaacttttactataaaagtaacagtaacattttctgtcataaaaaaaaaggaacataacgtagatttttccatcccttaacgctgtttcctctcatttctttcccaaacaattcattaacacataagaaaagatataaccatgatctataaataattgggaattcactcctggtataaagaaaatgaaccagctcgcctaatgggcacctgatttttttcatgcagttcaccagaagtttcatcactttttctctaattagtttctattattttctattccttcgtatctggttcagaggacacaggtagtgaactataatcttgtgttttggggagggaaaagctacgacgctctttcccccctggcttggaagaagcactgccataccaaaccattcctgctattgcgatgatcatgcctagaacaacatgtagattgagaccctctttttcaaagaaaatgaatcctaagatca

SEQ ID NO: 41398 - DNA, 501 bp, Glycine max
  Clone ID: jC-gmro02910012d11d1
gattccatagtcaactagtgaaagatttgaaaagttgaagcaggattcttaacatcacttgcaaaactaagttctgaacaaaagtgctcaagtagcctacgttttctattctaaggtactggttaatattacaaacaaatgacatgtaaaatcacaagggcaattacaattgagggttaatgacatagagttagtataacaaagaaaaaaactttatatcctattctcaattaagagacctggccattgataagaaaattctagctgcagattcgtcttaattaagaatctatcaaattttgccgttaccatcaaacactaaactgaggaactgaaatgcgttgctttctcatccaaggttagcaactgcttctggaccacacaaccgctccaactcttccttgatagaattattttctgatgtaagcttctcgcattcttcagaaagtctctgaagctcatctctgagagtttgattctcacctcccagcgactccaccc

SEQ ID NO: 41399 - DNA, 501 bp, Glycine max
  Clone ID: jC-gmro02910012e03d1
gcaaaatctaatttggctaattgattgaaagttttggtttacttgtacttcattctctgtattttgatttccctacctctggcgataaatataaccgcggtgtgggaaatcaaaaattgtatcgagtaagatgatactgaagtcatactagtaaggtgctgtataactcaatgaatgtagtgggttgaaagaagcaatagtagtatacataaacttgcaactaaaaggctaaaaggaaggcacaacaaatacacagacaagttaagagaaaagatatgctaattctttggaatgttcttgccgacaatcttggctggagttatccttagaagattgcctggcttaccagggacagcacctttgatcatgaccacattaagatctttatcaatttttacaatcttaagctttcttatcttcctcttggttcctcccatccggccaggcatcttttttcccttgtacacacgaccaggtgtggttccagcaccaattgatcct

SEQ ID NO: 41400 - DNA, 491 bp, Glycine max
  unsure (1)..(491): unsure at all n locations
  Clone ID: jC-gmro02910012e05d1
gaattgacttattagaatgtgtatttataacacttaatcaaaactaaactatggtaaagcgtgaaaaataccattgcctaattacagttaaatgaattttaaccgttcacaaaactgatacacaaagtcttcttaattgctaataggtcctacacaagtttgtaattacacaacaataatataaacatgttcaagcaattttccatccgcttctgaagcagtcactttcttatatctcgggtgcagacttagacttatgcacatactcgttgatacatatagacagagattagtttggagtttcaccagcaggcccgtgtcttgcgttcaacaaaggttgaagagctttaactacgatgctcatgtttggtctgaaatcagcttcgtattgcacgcacagggcagcaacagcggccatcttatcaacagctntgggcaggtactctcctcctagtcttgcatctacacactgtctgactttatcctcactg

SEQ ID NO: 41401 - DNA, 272 bp, Glycine max
  Clone ID: jC-gmro02910012e06d1
aataagaattgggtcattggaggggtggaacctcactccctcctagagaacgaaaatgctgtctactaaaaggaaagcaggtcttttcaagtcatattatgcgccgtgtaaatataacaaggaggcttttgattgaacatctccaacctgcacatctggaaaagaccatggatttattctagccccatggggctgaggttacaattttgccggagcctgttccgcacccaactgaagatccggttcccctgcattatccaggtgagaagact

SEQ ID NO: 41402 - DNA, 571 bp, Glycine max
  Clone ID: jC-gmro02910012e08d1
ccactcaagctttatagttgatttatttaactaaataagtcagacagtaataacattcattatacagaccacgtagaagctttacttccccttaatttgactcatttaaccaagtgaatcaaagtttgaaatcttcatacaatctaagccgaaactttcaagagcttaactcgacatggcttatttacaccacccgcaatatgtacatagaaataaagttgaatatacagaactattcaagaacaaacgaaaaaacgtgcaaaagcttttcatgagtagactaaatactatgccgtcccaacatcaagcaaaatagttgaacaaactcaaccaaacagtaccgctgatgacaaacaaatttaaatgtataaaatgcagaagcttgtgcgaagatccatataaattgcagcttttggtgtcaatccatggttatatgtattcaagacatcgtactatacataccacaggtataaaaggagggcctcccaggacccacttcgagggggatcctctcttgaacccggaaaaaaggatcactcatgagccctcataggcagggataatgaataat

SEQ ID NO: 41403 - DNA, 485 bp, Glycine max
  Clone ID: jC-gmro02910012e09d1
aagagataacatccttcacatggaaggccatgtattgatatttgcacgcaaagctacggcaaacaaatggaattctattacattatgaattacaagttccttgcatggcatacatcaaggaaaactgggaagttgttgtatgtggattgatttgccacagccttatatagacaaaccaaatgcttaatatcaacacaaacacgtgtacagaaaagaaaccactcttcaagaaaacagaaaataagaaaaactaacatattggaagaggtgccccattccactccccaaggcattccaaaagtggatcaatgatcttcccttggcacaaagcagtgaacactttgtcacactcttcacccggtgagataaccctttcaccagttagcaatgctgtccccaactcctctctcacaaacttgtacaaggggtaagacctgcattccttgatcttgtttggaattgcacattggtcattctcatatgca

SEQ ID NO: 41404 - DNA, 442 bp, Glycine max
  Clone ID: jC-gmro02910012e10d1
ggcccatgacgcaacacatgcaccacctaataatcataattttacatttttacatacaaaatacaaagactttaaattaaaattaaaaaaaaaaagataaaccgatcattttggtgaaatgaaaccgaaacccaaaaacattggtttgattttttttggtggtcccaacttgattaaacatgaacggtttgattgaatcacttggacttgaagggaatggccctgattaccacctggtggtaaagtgctgcaagtgcaacaccaatgaaagggcccacccagaagatccagggatcatcccaaccaaggtccttgttgaagatgatagcagcaccaagactacgagcagggttgataccaatgccggtgatagggatggttgccaagtgaaccaaaaacaccgcgaacccaataggcaaaggtgccaaaatggggacgtgag

SEQ ID NO: 41405 - DNA, 507 bp, Glycine max
  Clone ID: jC-gmro02910012f04d1
acaaattgaaagggagaacacactttattatatgaaaaccgagagcattcaaatacaatagtgcagaagttcaggcaataattacgcatagacatgcataaagtctatgttattcagaagtacaacatagataaggaaaccacaaactctttttaattagatagagatactgttgggaattcctttgaaagtcaacccttcctcacttgaacgatggagcaaagtgtatggcagctgaactggcccagtccggtttctcagacttggatcactgttccttgcattgatttttccttcaattccagtcagtttgcttccaaaccttttgaaagcttctaatgccttcttatcagtagtccaatttggagtctccctctctccaaggtatatctcatcagaagcatgccttgacaatatctctatcactgaaagatcaataagggtcttaaacttgggtgtgattggtctcagataagccttttgaggattcttcaccaattcatcata

SEQ ID NO: 41406 - DNA, 341 bp, Glycine max
  Clone ID: jC-gmro02910012f05d1
gcccccttagaaggggaatgaataggagctaaggtgagctcaactatggcacagcgtcagaaaaacaattgcctatttaatgttaactgcaggtaatccgatctcgacgctgaaacacaaaatctacactaaaagctcacatgtcctacatacgtttggtatgacacatccttaaataaatccaggacaagcaattttccatccgttgccgaagcaccagcttcctgatttttagggcgcacaattagactttggcacagactggaggacgcatatggagggggatgaagggtgtcccccacctgggggaccgtgtcttggggaaccccatggttggggag

SEQ ID NO: 41407 - DNA, 433 bp, Glycine max
  Clone ID: jC-gmro02910012f08d1
aaaacaacccccgggggtttttttagcaaatcgatcatcacaatttcccacaaaccggcctaaggttacatgcctacctgacccaacaattattaacgggccccccaccccaaatcctcgatcaaagagttgaaatcggtggaaaaaaaaccttcttccttcacaaaacgctttgccatttgagcaagcctttttgctctggtcctaatttccttgggctcctttccaaccatgaacctcctcacagcctttttaaccgggttcttttttacaggggcccttcccattatcccaatccacgtttgaacccctaccctccccccaattttaactatggccggcaaaaacttaacattggaaaattgctttgggaacattggccatgtcaccattgggacccctgcacaccccccctccaatactgagttccacc

SEQ ID NO: 41408 - DNA, 506 bp, Glycine max
  Clone ID: jC-gmro02910012f09d1
gaaaagaaaagtcgcataacatggttacattaatacatatgtaatacatcacaacaacataatcactacattatgatgccattaaggtagatcacaatttcaaacatagagaaatacattggaggctgatatagtacatcagatgcaatatggaaatgcctacttatttaaggacacactaacaaataaagacttaagtaacctatttggcaaaccagagaaggtggccctcagggaagatgtgacacactggagcagctccaggcttggttttaagcatttgtaaaaacacatggtttggatcccattctgatgtgtctttgtggcatacagctgcagctttaactctggttccatcttctccctccaaaggcataaaatgcgcagtagtatttgatatctcatgacacataaacacaacatatgggtaatccataggatgacaaacaatgaccttatcttctgctaacaacttcactccatctttcaccgagaatttttgggac

SEQ ID NO: 41409 - DNA, 454 bp, Glycine max
  Clone ID: jC-gmro02910012f12d1
catatattattattatacttcacaatcagcatttctttgttcaagactgataataaccattaaattattgtcattgtaacaatcggaaaacgagggaaaggaatagaagaaaacaatgaacaacccttgccagttagttgcaccaaccaacaaggcaccaaccatagtaccaatcaaaaggtaaaaagagagagagaccaaatcctactaagaaaagcataactgttcctttccatccaaagggagaaagcatgcaggttttgctcatggcttccacagaatggttgtgtctgcaatcatggaagtaaccacgtatgggtccatgttggaagctggccttctgtcctcaaaatatcccttccctgctttctctgtgtctctcccaaccctaacagaagctccacggtttgcaactccccataagaaggtgttgatgtcagcggtttcgtggcgt

SEQ ID NO: 41410 - DNA, 500 bp, Glycine max
  Clone ID: jC-gmro02910012g02d1
aacaaaaaaagaatcaaatttctaaggcctggggattgataagaaaacttgcaatgacttttgtacaaggaactacgagttaaaatggtacagaaataagttttatacatgtcaaaacaatgacccatcatatccttggtactttttcgtccccagttaaccatctcgtcagccagctcggatcatcaacatagaatttacaagatttgggaataatcccaaggtcagcaccaacttggtcatactcctttagagctgcttccatttctgctgcaacgacagcatcattaacaatttcatatgaactcgtgcttaaagcatctgcatagtgttgctccttctcagggtcattttggaaaagttccaaggcaggtccctgacataactcagcataatgtttatatatctcactgctttcatcttgatcgccgaggagactacctccataccaaccgttggcctcatttgttgaggtcattgtaaggtacctttggaaaaca

SEQ ID NO: 41411 - DNA, 323 bp, Glycine max
  Clone ID: jC-gmro02910012g04d1
ggaatactaattatgattggcattcttggcagggaacatacaattggagagaatgagtctacagtcttttttttttatgcagacaatttcccagaaaattgaatgaagcaaagattcaattagcaaaccacttttcaaaccaaaggggagcaaaaattttgactaacagaaaaatagctccacattgcaaattctaaaattatcccaaatctgaccatcatcaattagttagctccataatggcagcaacaatgtcgccattggcagctttgagagccttaacagcttttgatctcaacacaccagcttgagtcatcaccagc

SEQ ID NO: 41412 - DNA, 613 bp, Glycine max
  Clone ID: jC-gmro02910012g06d1
aaagtaatcacattttaaaatataggaactatccacaaatatatagcacccaatctagcccatcttcaattggaaaaacacaataaaccaacagtgctgtgatttttacatagtttgaacagtatgttttagctagcaaagagagttcactagatatacagtaacaaaatcctgaatgaatcacacgagacccaaaaataaaagacaaggcagttgaacacgtaacattactcaagcagaaccctcttctttgtttgactcttcttcctttggcttagcaggggccacaggtgatggagtgctctccactcccatctctgatcttaaatcattgatgctttgctccaactcatttatacggtctcccatctcatcaagtgcaatgacgatgtcaagaaacacattacttgagcaatttgaaccaataattatgtaatagaattggcatcgttgcccatcctggcttagccaacatatgacaacttgcacaggtggatggcttgagtttatagatgtaactgtgtgcagaaatataaaccacctgagcttgtgggaaatatgccattgtttatatgttaaatttgattctattatatagatatgagttgcctaa

SEQ ID NO: 41413 - DNA, 444 bp, Glycine max
  Clone ID: jC-gmro02910012g07d1
gctgaatctttcaacaactaaatctttcaccaatattatataataatacaagacaatccaacagtaacatgtaacccacaagaaaaagaaaaaaaacaatttttaatttacaacataaattacattatccatgagactataaatgcttgagatcagaacaagaatcatatattctatctttgaatatttgacatgcatgctataacatcaatttctatcatcataaggcaaataactataatatttaaactataaaatttgttagtaagttttgctccttgcagtcctcctctagtaactcgtggcttttcggttccatttgcaaacactatactggacatactgcattgctgccattttcgtcgcagtaaagaattggctgcaagcctgcatgtgatctcaaatatatgtattctccctcaacaccttatatacaagtatact

SEQ ID NO: 41414 - DNA, 553 bp, Glycine max
  Clone ID: jC-gmro02910012g08d1
cattccaaaaaagttgtgtggccatcgcattcaattaagtaatgttcatatgagctacacaatatggtatgatgaatgtttggttatttacaaagaaagaaggatgaatctgttttcaatgcttatgactagatcaatccccactgtacagcaaaaatattggccctaccaaaagagtattagaggaaaatgatttaaccatgttctccccttgtacttcatgcagacttggaacttctgtatctatggtcatacagcaagaatgaagaggaatgtggatttcggatgtcaagatccatcccctgtcacatctgattattgctgagcatggacgcatggtatgtgctctggattataggctcctgcagcagctgagattgaccaggagaatcctgttggttagaaaagatgtttggtggttgtaaggtgttagaattagattgatggtcgagcacacgattactctgttcatacatgcagtgaaccacttgattggcttaaaaccgtacaaaccctgcagaatgggatttgtgttgcagaatgagatgaaaca

SEQ ID NO: 41415 - DNA, 521 bp, Glycine max
  Clone ID: jC-gmro02910012g09d1
aatcaggtcaactaaatcaagatattttataaacaataagttcaccaaataaattaagctcaaggccttatgtttccaagtttgagaggggagggggactatgacgatatcaatattcatgcaatcaatggccatatcttacagaaaaacaccaacgaatatcaatttaacccatttacaaaacacctctctaacagcaaaggatttatcggatgttattttccagcctccaatcttcaaccaagcagaagtttcaaaggaacaatcttcatgtatcatttggaaatacacaattttcttacaataatgtataaataatgaggggcaccacactctcaaactatatctcaggattaagattttgtgaggccaccaggctttttgtaagccatattgctgtttctctggatgatacagatacagcatcttctccaaatggtctcagcacagcagcaagctcttcaagctttccttgctgaagtagctgcgcacataactcgagcagagattccagagcatca

SEQ ID NO: 41416 - DNA, 225 bp, Glycine max
  Clone ID: jC-gmro02910012g10a1
ggacggggaccatcctcaagtccaggacagatcttgatgtaattataaaattaagcaggggcgttccatcaacatttataacatgataatttgaaaatgtcgagataacactccacatcaagagacatttggaaggtgattaataatttactgtaattaatctcccaattaatccttattgccgaactcctggtattgcctgaggatctcagccaagccagaaac

SEQ ID NO: 41417 - DNA, 545 bp, Glycine max
  unsure (1)..(545): unsure at all n locations
  Clone ID: jC-gmro02910012g11d1
ataaaacaatctgatatcatttccattattcttttttttctgacacaaattcaatacatctgaaaccactataagatgtgttagcgaggagctaacactcatccacagatttattaaaccactacaagatgtgttagtgaggagctaacactcatccatataaattaaaccactataagatatgtgttagcgaggagctaacacacattcacaaatttattctcactgataggaaggcaagaaaaccttataatttggcactgatcttccttgttggtcaactaggcattgaccaacatttggtagtgccattgtcctacacacttaattttacaagtcttcttcacaccaactttgtattatcctttttgtttgctatgcccaatgcaatgcactctagaataaaatatatcactgactggaacagaagcctaagaatcccatgaactcatggttgtttatcatttgaatgctgttctcaatgccaaccacacccatggtgagggcgctagcaaanatgacacctgagaggatgaaatacatga

SEQ ID NO: 41418 - DNA, 498 bp, Glycine max
  Clone ID: jC-gmro02910012g12d1
aaggcacatctgaattgatattgtttattttaaaatacatgcccaactacagtactgtaaaactgtagatgtcccaggatgactgaactattaccaaactgttccactgtagtcattatcaaggaattaaaagtaaggcttcttattgagcacagagatgagcaaagccacatgccaactcgtgcagcatgtgttgatatttgagataacaatgggagctctccaaacttacaggaaacaaaagcagccattctctggaaaatcgcacataaagataccataagagagaaaaaaaaaattaagccttgggaactttgtctagcaaaacattatccggaacgttaagctctgcaggagtttcttgaacaccacctagcactgaatgatattcctcaccacgacgagcaaatttcttgtaaagaacttttacaaattcagtctcatcaagtccttttgcattttcagcagcatgagcctgagccaaattagaatatttta

SEQ ID NO: 41419 - DNA, 470 bp, Glycine max
  Clone ID: jC-gmro02910012h07d1
gacaggaaaaaaatgaatctctgcatttttttaatggaagggcaacttttgcagatgctttgaatccttcattggaaattgcatgcaatatatttatttctaccttcatattaaaatacctggccctgggaaattcaacagagcaaggagaatcacagagtcacagactgaaattgaagaggcaaccaagtttatgaatttgattatgaaattataaccaattgcccagcctcaaaagcggattatgggtcaatttggtgattttcactgttacaaccttccacaagtattctcttcatatgatcaactagtccttgaatctgctctcttgaatgaaggggggatggatatatacaagcccaatccaactttccattccgtatggggtcgaatacggcaatggatggaccaacaccatgagcagaagcccaacctacatagtcttccaatccaatctcttcatgcatttt

SEQ ID NO: 41420 - DNA, 430 bp, Glycine max
  Clone ID: jC-gmro02910012h08d1
gaaaaaaaaaaggaaaaattttttttttccacccaaaaaaaaacgggggcccccccccccaaaacccggggaccccggccaaaaaaccatccccccaaaaaccccgccccggggggggggccatttaaaaaccacccccccaaaatttttggggtccccccggggccaccccccgggggggggcccaaggggggggctcacccgggggggccccccccaaaaaaccccccgaggctggggcctttttttataatttaaaaaggggcccccccgggaatgaagggaaaaaaaaaaagggggggttttaaacggggggggcaaaaggggaagcccgcccccccaaacggggggccttttaaaacggggtgttcccacccacccgggccaaaggggaaagcttaagtttttcaaaaaggaccccctgtggggg

SEQ ID NO: 41421 - DNA, 530 bp, Glycine max
  Clone ID: jC-gmro02910012h12d1
agcaaatacatcggatgcattattccaaagatcaccgacaaattaggcacttgtatatgtttgttattacagaatatgaatccatattgttacatgaacttgaaatggcaacttctagctactaataccacctaaatctaggtaatctcgccaggcaaatggtcctagacttgccaaaaactaagagctagtagcttacaagagataaagagaacaatgagttgaagcatcatctcatcttgaaacctgcctggcttctatgtactgaagtctcaaggtaactgctcgcttgtgggcttcaaggccttcaacttcagccatggttgctacatatggcccaagccttcttagaccttcctctgagagagactgcacagttatgtacttcaggaaggagtccaatgacacaccaccatacattcttgcataaccgtaagtaggaaggacatggtttgtcccacttgcataatcaccaacactctcaggagtccaaggccctaaaaacacagaacctgcattctcaataaact

SEQ ID NO: 41422 - DNA, 452 bp, Glycine max
  Clone ID: jC-gmro02910013a02d1
aatagattccattatttatatataacaataaactactatgtacacatacaatgtattctagtttagtcccctaaaacacgagcaagttattctgggtgtcgtagcccaacttctccaaattcggctggactgcaaattgaatcataggtggtggtccacaagtcaatgccaaggtatcaggagatgcatttggaatatgctccgtcaggatactttcagtgatgaatcccacactgtattcccacccttctcttatgctttcttgtgtcacgtaccacaccttcaacctatcatacttcttagcccactcatcaagctctttcttcagcaatatatcatcctcggttcggttcgcgtaaaccacatgcatctcggtgcagtcctttggatcctttagaatggcttgaaccacttggtaaatgggtgtgattcctgtgccaccagccaacatg

SEQ ID NO: 41423 - DNA, 380 bp, Glycine max
  Clone ID: jC-gmro02910013a03d1
cccaaaagaaatgggggggggggtaccaccacacttttttccccttttccatgggtaaaaaaaaagggggccgaaaaggggcggctagcctttcttttggatatttttacaacccttatcccgaaaaattttttcaaccccccttccctaggaaatttttttttaaacaagggggccggggggaaaaaataaaaaacccctggctttttaattttcctacgccctaaaaacctctccgggggggtttaaaaaatcttatgccccacctttgggggggccacttttttaaaaccaaaccaaaaaacttttttggttaattaaaaaaccttttggataaaaatcaaacacacaatggtcccaccctctgtgatatttttttt

SEQ ID NO: 41424 - DNA, 354 bp, Glycine max
  Clone ID: jC-gmro02910013a04d1
ggcccacaaaaacaaacatcccattccttatcatatttggtcctgaaacattgaaaaaaagtttctcccccttttaacaaaaaccatttgcaacaaaataattgggcccaccccttttttaaaagaaatcaaactcccgataattatcaaaaccttttggatatgctttgggaaaaggggtaacagccttttcccccccccttgatgaagctgggggggggttttttttaaaacttttcccccttggggatcccgggggggggagcacatttgatcaatgcccactttaacccttaaaaaagggggggttgtttgatctcaaaaccccctttttattaaaccaactgggggggg

SEQ ID NO: 41425 - DNA, 262 bp, Glycine max
  Clone ID: jC-gmro02910013a05d1
cctacaattcatgtatcaagttcgaattataatttacataattattgcaagcggtggataatagataaagtagagtttaaaatgcaagaagccaagaggctcatgacatgaaacggtgaacagagatgaaacttgaaggaacacacaagtgaagttgaagctcaagggtaggtttcagaggctgggacaggggcataggaaccaatgaagacgtcttcataaatcaagccagccaaacctccttcaatcaatgggccaaccc

SEQ ID NO: 41426 - DNA, 415 bp, Glycine max
  Clone ID: jC-gmro02910013a06d1
agtaaaaatcctgctatgcaccagtaaataaagattatcatctgatgacctgtgaattaaaatgaaaaataccattttttccagctaaataaaagataaggttaagttttacctagcacattatctacatatgtttatagtctgcattgcatgtaaactatcagctacagcttctgctcgctatgtagtatccaccttccgaaccattcagtttgacattcacaactgattccagtgcctggttatcttaatttccacgacacatcagctaatgttctggagatgactgtcgttggtctgggggctgtggccacatttgaggcgccatgtaatggtgagactgttgacatacatgtttgagtccatcacaggcttacccagattcacaccagcagctttcacttgagaccgatgc

SEQ ID NO: 41427 - DNA, 492 bp, Glycine max
  Clone ID: jC-gmro02910013a09d1
ggaaataacaaaaatgcacacttttattgattgcatcagatattgcttaaatagattaagttaaaaaactgaaaaactgaaaataacaactaactagctaaacttcagcaactaagcttaagctgctaagttactcacacataacaatcagacaacctaacaacaaactccttaaaacttggtaaataattaaacataaaaataaaaaataaaaaaccaaagctactgatgcatacatttgcacacgttcaaacaatcacaaatagatttacaagaaagaaatgaattttgcacataaactcacaacaaaataattaatacaaaattaaagcaacttttctccaaagtctttaatctctcttctccaagtaagaagaatctaggcccacaggataaagatctgctacagaagtagatgaagctgtccatgggtcttcctttgagttactcagctcttggtaatacaatctcattttctccattttcttctca

SEQ ID NO: 41428 - DNA, 468 bp, Glycine max
  Clone ID: jC-gmro02910013a10d1
atactaacacaactctctttattaatgacaaatacaaatacattcagccactccaaatacatgacttaagcatacacaactgattaaggaatctggttccttcaatttcacatttatttaaaaccaggaacagtacttaagcaaccatagggtccttagatagagatactgttgggaattcctctgaaagtcaatccctcctcactagaaggatagagcagagtgtaaggcattttagctggcccatagcggtttctcaatgtctcatctttgttcttctctataagcttcttttcaatctcttcaagcttctttccaaacctcttaaatgcctctaatggaccggcatcagaagtccagtagtcaccaccatctctctgcccaaggtagaactcatcagatgcgtgccttgacaagatttctataactgtaaggtcaatgagggtctccttcttgccagtaatagtc

SEQ ID NO: 41429 - DNA, 419 bp, Glycine max
  Clone ID: jC-gmro02910013b02d1
caatgctacaatttaccaaattttcttccacaaacccttttacaatgtatcctcttcaacaaaaaagaatgaagaaaaagaaaaagatggctacaaactatgaattgttagaaaggacaaacaaaactatttctgactgtattacaattacacaccctaagcatagaatgaaaccccatttcacgtataaaatcctagattctcttacttttttataatccagtaagagaattatgacggctaaataacctcagattcaactatagttatgacagcttctttgcaccattgggctgaagtgtaggactttgtgcatgaattattgccgcagcaatggagaaagactgtagtgcaaatagaggtggatggaaatgaatataatataaaccatcgggaacattttacaatccttaaggggg

SEQ ID NO: 41430 - DNA, 401 bp, Glycine max
  unsure (1)..(401): unsure at all n locations
  Clone ID: jC-gmro02910013b03d1
aagcagcggcaaagctaaaatattttggatttcgatttggattcgttggcacctagctgagatgccatgccatgcatttcctacacatccttagcaaacataaagcttacttagcaccttcactcattctctattcagagtccgagtccatgtttcccattgctttcaaacctcttggtctctttttggatatcttcttctccctaacctcgtatcgttccaaggtaagatcgcacaaccatgcgccaggactaacgagattgagggttcgttgaatgaatttagctctcttcttgggtctctgaggcagctttgagcccttaatggcgagaaaatcttcttccttctccttgttggncaaggcaatcacgaacttgggtggccacaccggcggagcagcc

SEQ ID NO: 41431 - DNA, 522 bp, Glycine max
  Clone ID: jC-gmro02910013b04d1
agacataaacattatccttttaagtatattgaaatatcaatgaagcttatttctgtttgtataaattataaagcactcaaaaggtcttcatatactataactataactataacaagaattcacattgaaagtcttatgtctaaattaaagtctgcgcctcttaacaaccagaaaccagaagggtataagcaagatgatgatgatagcaagtatttgagtgaaaagcatagagctgggcacttccatctgttgaatgaaaatgtggtctgcggagaaatttacttgttgaatgaaactgtgatctgctgaggtgtttatttgctgaatgaaactgtgatttgctgaggaatttgtttgctgaatgaaactgtgatttgctggggaatttgtttgttgaatgaaactgtgatcagctgaggtgttcacttgttgattgaaactatgatcagccgagctgtctatttcttgaatgaaattctgatatactgaggaagttattggggtgaccccaaacccttttaa

SEQ ID NO: 41432 - DNA, 189 bp, Glycine max
  Clone ID: jC-gmro02910013b05d1
acacacaggagagaagagatggcgacgagggtggtggcggaacagaagccgaagacgaagattgtgtgcacgctggggcccgcatcgcgctctgtcccaatgatcgagaagcttctgcgggcgggcatgaacgtggctcgcttcaacttctcccatgggtcccacgagtaccaccaggaaaccctcgac

SEQ ID NO: 41433 - DNA, 395 bp, Glycine max
  Clone ID: jC-gmro02910013b07d1
aaagatgaacaaatgaaacatcatctggtgttttttttatttagcactatattattgacaaagaatactaaaacggactaccaagggttatcaatcaatgtgcattgtgaaagggtgtcctctcaatgccataagactgcactgggcaacgaatatttgaatccctgcccattccttggctttgggtggaaaatgtcacacaaacatgggtgagttttcctttaagctgaggtaatcccattctttccgattaattggggaaatagatagaaaattgactgaaaatcaaaatcattagcgagaatttcttgctgactccaaccaaaatttaaagatgatcaatgattgcttttgtgaatacagctgtctttgaactgccaccgagatcagctgtt

SEQ ID NO: 41434 - DNA, 491 bp, Glycine max
  Clone ID: jC-gmro02910013b09d1
ccatcataagtaccgttttttattttatacaaaggaagttagaaaatacaaatcgtttcaacattttcttattaaaataataaaaaaaagcattgagctttattcataaaattggagaaggaaagaatgctactatggttgtgcagtgggttttgcgatgttaggacggaacttgcagctagttttgaggtcttctcctggcttgttcccggcaaatccagcatccacccacgcagagtagcctccccccatgttaacaatattcttaaatcctgaatcaagcagatcaacggaggctcggagtgatcttcctccactattgcaagccacaatcaaatgatcctcagtcttgcatattgctgccacctggtcaacaaaatctggatttttcacccgtcctgcttctgtgatgaagacataggggacattatgagcattctcaacatggcttttgttgaattcctcaactgacctaacatccagataacgat

SEQ ID NO: 41435 - DNA, 511 bp, Glycine max
  Clone ID: jC-gmro02910013b10d1
agagtaaactcacaagtgaatgcaactattattaactttccaaggttaaaaaggcctgcactctgcatgacatttatatatgcggagagcacagcaaaatgccccactgatcacaaaaatatccattaaatttgatgaaaatacagtaaaaataaaaggactaattaatacaagaaaacaaattgataatcatagagcagttctgagttctacaagcaaattttaagcagaaatgctgctcagtcagagaagagacctatatgagagttgatcataaggaggacacgttcccgtgtttctcagtttctccataataattatgaatgaacgacaccaatcttcttagcaaaatcatccccatcttcttcttccatgtaatcttcctcttgattttcaccctcttcaccttgttcatactcatagtatccctcttaccttgttcatactcatagaccgcatctctctgatcatcaccttcataatactgatcctcacccgaatcatgtacact

SEQ ID NO: 41436 - DNA, 524 bp, Glycine max
  Clone ID: jC-gmro02910013b11d1
aacacgttaaaatcatattttattatctacatgtaattcaacattaattattacaactttttaatactcaaataggagtatcagcggcacgagcctctccctagtttcattatggaaatgcactcaaaggaacttcatatccatgcttgaacatttgtcccaatgtttttaaaaccatggaaatctggccacggctcatgtaagctttgtacattatccataatgttttctttgagcatttaagcttgacattttccatctcttcaaggacattatgcatttcgagtaaggtcatctgtgacccatacatgactagcttacaatgatataaggatcggcagatactccacccagagatttccgcacgtctcacaaaattttctagcttttctactgcattacatcgataataagttgcaattatgcgtctcaaaatacccttggttgttatagaagtcccatgctcaaatgcctcatttatagcattctccattttcgctaccagtcttcctggcatagagtta

SEQ ID NO: 41437 - DNA, 521 bp, Glycine max
  Clone ID: jC-gmro02910013b12d1
ctagttggtaaaggtattaaatagtatggctggatattcatgaaacattttccttaagaatatctcattttggacaattcttatgtcctttaaggcaaatattttccttcaccaataaaattttgaccatgtgatgccaccaactaggtggatcccactgttagacccaaataaattcaagggtggatgctcttggtggaagaatgggcacataaaaacttcacttttaagttgtatcattcacaccttagagcatcttcttgggtttttatgcaagtaacttaattcatgtcgcgtccatcttaaacaggttaatgaattttctctctaataaaaatttctattaactaactcaattggttctctctcctatatttaataggaaattaagtaaatcatgagtcaaaattgttgatataaacaactttttcttaaagagactcaaaatcgcacatatcaaaataataatttttttggttaagttcattaattaattgattctcattatagatgatcttaaa

SEQ ID NO: 41438 - DNA, 312 bp, Glycine max
  Clone ID: jC-gmro02910013c05d1
gggaaaaaaaaatggaaggaataaaaaggggctttaaagggcccaaaataaacaaaaacggctctccaggggcaaccccattgggaaccggagggctcccccgggtttttttttaaaccccggacctggggggggggcaaaatcccccaaatcaaaaaaggggggaaacagattggggggaaaaaaaaaaacaaaccgaatccccgggggaccggaaaaaaaaaatttttttgaataaaaaaaaaaaaaaaagggtttccccagaggggggggccccaagggggggggggccccaaccccccttttaacctt

SEQ ID NO: 41439 - DNA, 499 bp, Glycine max
  Clone ID: jC-gmro02910013c08d1
gaaattctgaaatagtgaactttgcattcaaagttaactgaacattttcttagaaatccagtacattatgatagtgctcagatgacataaatagaaaacgaagacaagatgtggatggcacaaagacgactagatagagagccttatctatttatatatagccttgcctgaataaactacacagcaggccaaattttcatttatgatgattaatgagtgattgatgactagtataataatatattttggttctagggcaactactagtttttgctatggctcatactagctctatatggcaactcctagtggggaaacttccatctttggtatgatcttctctggttctacagctttgacctgatttccataagctgatgcatgcactccaagtgctgccctaccagatggatcaaggttgttagaccaagcagcatcccactctacagctttggctgtgctacatgcaacacttggtcctccaggaacactcagcctg

SEQ ID NO: 41440 - DNA, 476 bp, Glycine max
  Clone ID: jC-gmro02910013c09d1
gaaatcccagcaaaatgcaaattgatgaaaaatcattaattacagaatagctaatttttccaaagaaaagcatcatatgaaacccatcttccatgcaggaggtatagagaagcacaacatcaggtgaatacaaactaagtatacacatcaacaatgacaatacactatctatacccaaaacccaagtctagctcttgaccatacatcccctggctgtgacctgaagcatggattggctttgggttttttgacctcagctccatctcaaaaagcctctgaagtgcttctggatgatttcttccaccaccaacatcaggagcttgtaattgcattccagggccaccaaaagtaggatgctggtgaccactaaatgggaagccttggccttgcattgggtttggttcctgcatgaagccagtcattggattgctagcatgagatggcataggtgcaccccttgggaatccacgtaataa

SEQ ID NO: 41441 - DNA, 512 bp, Glycine max
  Clone ID: jC-gmro02910013c10d1
attgattgtgtatggttaattaaaaggtccatgtaaccagtagtttggataaaccaccgaaacgtcattactggaatctgtcttaacatggacaagtatacgagaaccacgtggaaaaatagaggacggccaaatatctactataacaatcaataacgacaagtacattagcaaatatataaaaatccaaaaactccatcctcctccacaagaggcaaagtccaaaatagagctaatgctcctaacaaggtaaatccactggttccagaaaccgatttattcagacctctcattttttgcacgagcaagacactaaatcgcaactagacaagcacataatgtgtagacaagcaactttgcagtacaccaccttaaaaagacttcttggcaacgaatacaagcaggtcaatgacacgtgagctgtatccccactcgttgtcgtaccaagaaacaagcttcacaaagttcttattcaatgcaattccagcctttgcatcaaaaatacttgatct

SEQ ID NO: 41442 - DNA, 477 bp, Glycine max
  Clone ID: jC-gmro02910013c11d1
ggactatatcattgtgctgccaaaaatttggttatcaacgagaattttgtattccgaccagagaagaaagggaaggacacaacaccaagacaaacttagctacttgatatatcttcgtgactgttgtcactgtcatcactatattcaggaaacttggataggtgccgagcatccaagccagtgatatacttctgtgctgcttgaacattttctgaaccctttgttagctggaaggcatgtagcgcgcattgttctgcagcaagactaactggagtatttccatctttcatacactctgctagtgcaggaccgacaatagtgccgtgagacataatggctgaaggatttgccttggcaacagcttttatagcagataatgctcttcttctaacttcactggactcatcatgtgtggatgatactagcaatgaaagacatctttgtaaagaagtgtgtcagaaggatccacctgagatc

SEQ ID NO: 41443 - DNA, 517 bp, Glycine max
  unsure (1)..(517): unsure at all n locations
  Clone ID: jC-gmro02910013d02d1
caaatgctaatgatatcttggcataataaaggtatccatttcatatttaacagcattaagcttgcaaacttgcaacaatgcagtgagagagaaataaaccaaaaaagtaaaataaaagaaagaattggtccaggtttctcttattatatttctctcactttttccttgcattgctgcagtaactattgaaaaattgcaactcctcaaatacgactttcgcagaacattgcatactatagcagtcgagaagaacaactaacaataatgcctgtaaacagtggtcgaacgcaatccgatggtgtccttatttaacaacgaaagtctacatgtatgaccaacataagcaccatgggtccaaaagacaaaaacacaagcttcataacagtaggaggagattgcattcagcgaagtttacaggatgctatcctacaatcccaccttcgttacttagtgcgcactacgcataattccatgncagtaaccaccagtcattatgagggacacaagtgacacaaca

SEQ ID NO: 41444 - DNA, 495 bp, Glycine max
  Clone ID: jC-gmro02910013d03d1
aaattataaatagtgatgtcatcaaggtttcatatttcagcagaatgatcttgacataaaagttaacatggctaatctgaatattcctggggtaacgccaacacctacaatgatgatggacttgacataatatacagaaggatagcatttatgctccaagtgacttacattggcttcctcaattacattgttgaggttttgctaagttgaaaatacaagcacttaatagtttacagagccacatttccttctaatttgcccttgtattcctgtaagtactccaacattactaagcttcaccatggatgcagcaaaatcattatagaaggaatattggtcggtgctgtaaaaataagccatagaagaagtccttcgatccgcaagtagtgccatgtcagattctagaagccctttgttgtataagagatttctataatactcattgtcgaaggtcaaagtagtattagaatcaagaggtgcaatgtagctgtttga

SEQ ID NO: 41445 - DNA, 309 bp, Glycine max
  Clone ID: jC-gmro02910013d05d1
gtacaaggaaaaatcttgtcatttcagctgtcaaatttgtactcaaacacgtgaaaatcttaaacccaaaagaatgacacaatgccacaagaccatgaagtataaaaaaatttgcccacctacgaacactaaactcaattccattcgcaaaggccccataggatttgccccttaggacattcactcacagttctataatgatattagaaacttccttcagcaccatgaaatcattggaaaaatcagtctctccctttcctttctcacctttttggtatgcattatataatgccaaaaatttgtagctta

SEQ ID NO: 41446 - DNA, 480 bp, Glycine max
  Clone ID: jC-gmro02910013d07d1
aaataatagcagttttatattgtcttccctaggaacaggttatacataaaaacggaaacaaaccagaatcagttttatagaacagtaatagaaactagatctagccggaacaaaaccatcccctcaaaagagacaatcatcaaccggcaacaggaagttgcagcttgttatccatcttcttgtctaaagccaccgcaatacaccacacccaagttcaaattcacatatcatgttgggcaaactcctcctcctcctcttcctcttcatactcatcctcatcagcagtggcatcctggtactgctgatactccgacacgagatcgttcatgttgctctcagcctctgtgaactccatctcgtccatgccttccccggtataccaatgcaagaaagccttccttctaaacatagcagtgaattgctcactcactctacggaacatttcctgaatgggggtagagttaccaatgaatggtgaag

SEQ ID NO: 41447 - DNA, 469 bp, Glycine max
  Clone ID: jC-gmro02910013d08d1
aaccgttaacttgagtataaatatcaggaatttcagaaaggttcagaaaaaaatataaactccaccctccaaaaacaaaccaagtcatgtagccaaaataattgtgatcactatccatgttcagaggatgtctggttttggttttgaggtgaatgtatagaattttgagcgacattaattgtctctccttttgtttatgtcagtttccctgccatccaactttgcaacatctgaagtgcagcttttggttgatccatagggaccaagtgtccagcctcatgtaccttgaggaaagaaagaggtccatagctattaagagaccctgcttttgaaccatcaaccacaaatttcactgtaggagatttttcaaaggcctttttgcctgaccacttcattgcatgtacccaccttgaattcccaagccaattgcatatgagatcttctttccctacatacacaagcaacttga

SEQ ID NO: 41448 - DNA, 578 bp, Glycine max
  Clone ID: jC-gmro02910013d10d1
caaaggcatattaatttgtgcaattggattaatatagaaaagtgtcctgtaaacttgcttcatatgaagaagcaggggatacataagaaaaataaccctttttaatttttaggaacaattcaatacattgaaaccaatagtatgatttaccaacaaaagctaaaacgctagtcattgagaaaaataaaccaagacgaggactaactacacttctttaatagctccctttcccatctcaacaccattgccataatcatcatgctccacgaatctggaccagaaggggtgtgcctgccaaacctgccccatttcttcaattggaatgccctttgtttcgggcaagaagaagtagacgaagaatgtcatgatcaacacgaagaaggcaaagaagaggaacaagccgaacttcatgtggcaaagcattgtcaagaagacttgtgcaatcaagaaagtgaaaagcatgttcaccgacacattgatactctgagcagccgaacgaatctccaagggaaagatctcactaggcaccaaccaacctaggggaccccatgaccaggcaaatgctgatacataaatgc

SEQ ID NO: 41449 - DNA, 403 bp, Glycine max
  Clone ID: jC-gmro02910013d12d1
ggcggcggggggctaaaaaaaactttatttggttaaaagctccccaaaattcattcggccccctgaaaattacagccgaactggggggaatgtaaaatgcaaaaagctcatagcttaaggcatgggacatttgattttgaaactacctattcagtaaccctgactaatttgcatataacaactggtgttctcgcagacttcaaatactcaaagggtttattttggttgattccaaaattacctgttgcaggatctttcccaatgccgggggttatcattcaagttttaggaattggtttccctacccccatgagaatttcctgacaattaaagaaaccttcacttcttttcaaggtttttcagccaataatcaaattggctggcaacacatgctgacccgggg

SEQ ID NO: 41450 - DNA, 534 bp, Glycine max
  unsure (1)..(534): unsure at all n locations
  Clone ID: jC-gmro02910013e02d1
ataattgttgaaactgaaactgaatcttaattctgagataacattcaaaatcaaaccgatacatgaaggatcagctataacatattaatttatagctgtgctggtgcaggacacttagtagtgtgccatgaaattattctaacagaaaacaacaacctaatgacttatacgtggaattagctacaactacaaacattgagcttaacctaaccgtttttaggtgctgcatagctttcaaacggtgggtctaacactagtttcttttcagaaagttcttgtaccattgagcagaaagcttagggtacctttttaagccatctttgtaatctacaaagtttaatccaaaccgaacagtgaaccctgcaaaccattcattacagtccaaaaatgaccatgcaaaaaatcccttaacgtttgcgccagccttaattgctgatcgaagataaaagaaatgacgataataataatcaattcgataaatatccatgagagcttcttccacggaaaggggtggatcatngaattcgttcatac

SEQ ID NO: 41451 - DNA, 450 bp, Glycine max
  Clone ID: jC-gmro02910013e03d1
agtacaagctacttcaaataaatttcagtgactacaggaatcaaagttaaatcccatggttccaaaaacttcctcaagtgcaagcctgtgcagttatagagatagcatgacaccaattcatgaatagagtctaagcttctctagtttccaggtacacactatataacctaccttatgacagcaaaagaaaaaaataataacagacccttttctcttctcctaacagaaataatatgaactttaccaacaccttcaaaccccagctactcacacttgatggaccggtatatgtgacgaacaaagagcagggaggcacggaatcctacgctaccgagcatgaggaagaagccatagcagatacaggccatgtaaccaaagaagaacgaagtttgcataaaaccagacatatctgatcgtgcatagtagtaatacaagcaatagccgtagatg

SEQ ID NO: 41452 - DNA, 293 bp, Glycine max
  Clone ID: jC-gmro02910013e04d1
catcaagagaaatataattttaaaaatgaccaagttctctctttatgaaatttaatacaagttacaaatggaagatgacttttcaccaatagatcgtacaacactagtctaacagctacaaaaccactccagcatatttcagatgtgcatgatttcccaaaagattgctaatttgaagcatgtcaaagttcttacagtcgcacaaaactttctcactttgtgtagagaacatcctcccatgggtgacggtaaagtggttgcttcaatcgcttttggtcaaaggtgtgcccaat

SEQ ID NO: 41453 - DNA, 495 bp, Glycine max
  Clone ID: jC-gmro02910013e05d1
gaacaaaaccaccgaatttattgacctttttccttttctaatgataatgaagtatgggagtcatttctatggtcctacttgaaactgtagcacagtgtatatcttaaaacaaatatcaataatcagtaataataaaaggaaaacaaagtaaaagatcagagagtaagagaaaaaagaactctcatactctatttcttcttttttgtttcactgtatactattctactagcagggtcctattaaacaacaggaagttcatctttggtatcttcattttctcctcatgctcagaaattatatccagcatgattatttcactagttcttagtaaagagtctatgctttgcctgtatattagtagcttttttctgatagagctttccaattaaccaaaaggaaaatctccttatctaacagccaccttcgcctaattttaacactcatgcccctaaagagatatatttaaagcacattttttgtctcatcactttcata

SEQ ID NO: 41454 - DNA, 443 bp, Glycine max
  Clone ID: jC-gmro02910013e06d1
aaagggctcgctgaaaataaattttattgaaccagatggtaaaaatagctagaaagtctcgagacagcaaaggctagatatcgttttgttaaaaaatttacaacaatgacttagtgataaccaataggagctggagcctcttttaattccttcccttgatgatgaatatcagaagcaaagtggttaacatccctgtgatgagccttatcagcgcgaatcacagtgacaacatccttgagagttgcatccttgggaagcctccagtagtcaatagcactggcaggggcaggggacaattttaacttttaccactctcaatggcattcaaatgctgagtgtatgaaatcacagcttcttcctccaagtaaccaacaaatctatgtgccgcctttggcgagaggaggtagaacacgaagaaggcgttgaagaaaacaccctgcgcg

SEQ ID NO: 41455 - DNA, 404 bp, Glycine max
  Clone ID: jC-gmro02910013e07d1
gggttggggttttttttttttttttttttttttttttttttgggaacaaaggcgagggttattagccccaacaggtaaaaaaccccgcccctatttatttttaaaacaaaaaaatttgggaatccaaaaacaaggtccactaaaggtttaaaagcatttcccccgacccaaaaatccccccaatggccgaaaacctgaaaaagaaccgggggagggggggggcaaaacccggggggggggggggggggggatttttttttcgcaaaaaaccgggggggaaaaatggttatatttgggggccaatttccctttaaaagaaagggtttcaaaaaagggagcccaaacataaactctgggtttaaactttttaagaagggggccctggaaacctcaaaagggcccgg

SEQ ID NO: 41456 - DNA, 541 bp, Glycine max
  unsure (1)..(541): unsure at all n locations
  Clone ID: jC-gmro02910013e08d1
ataatcaaaagcagttgtttaaattgcaaattggtacaaaggttaatagattcgctacactatggaatctgtcataactcataagcatcaatcattattacacgttgtcctaaattctatatatctgttaacaataatccaaaatgttatatactcctgtcaacatgttaaatttacattttgcctacttgtaataggagcacagagtgctaaatgcactctactcactatcctgcataaataaccaatgctccaattgactaggtggggtaaccctcttcctaattaacacttcaacagtgggacatgttctcttccttcctccccttggccttgacctgaactcttcatcagcttcttcaaaatccccaagggtaaaaacatgtttagcagttttttcatgattatctcgcacatgtttgtaagcaaatctcatgccacaatcaggaaacccacaagcaaaaggctttacatttaagtgcacagccttcttatgctngtctagattagaatttcttgagaatgtgcagctgcaaccctt

SEQ ID NO: 41457 - DNA, 435 bp, Glycine max
  Clone ID: jC-gmro02910013e09d1
gttaacgaaacctaacatatagtaaaaaaaattcttgctgttcatttgaagtacaaatgtgattcatgtggctgagtaagggcttgtgtgggccgaaaactacgtcgtaacaaattaaaaatggtcccgtcattgctttatctcgtggattggttcattgaacgtttgtataccctacatctttagctgaaaatgaggaccaaaattttcaccttcttcttcttcttcttcttcccttttctaaaggattaatctaaaacccccacgagttaagcccaaagaatcccccacctatttaccgatttaaaagattactactattattaatcgataacagggttcaattcctgaacccgaaccccaccggttgaaccgggtacttaaacccagacgtgtcaaccgaattctgaaacccctgtgtgaaatcattctgaa

SEQ ID NO: 41458 - DNA, 503 bp, Glycine max
  Clone ID: jC-gmro02910013e10d1
agaaaaagggttatgcatgcattaatagtgtaaaaagttttacagaatcatctaatcacaacccagtgcaaaaagttttacagaatcatctaatcacaacccagtgcaaaaagttttacaaaatcatctaatcacaacccaacatgtatagactgtcacgacattgacattaaactcattataatatacaccaaaacaacaagtgtataaaatacacagcaactatttaacatactaatggtatctgacatgactgcatacacaggaatgcttataaagcacaagggcacgcctctcaattcgcaggaaattttcacaacggtagagataaaaaaaataaaatcagacgatattctcaaaatacaagtaaaggcaaaccattcgaacatccatcagcctttgtacatatcatttctttagtacgttgtataagtaggcagcaattcccaaaattataatcaacaaaacaatatccatacagaagtttcgactggatcgaagct

SEQ ID NO: 41459 - DNA, 521 bp, Glycine max
  Clone ID: jC-gmro02910013f02d1
gagaaagagagcagcaaaataaattttcacatgtaataaacttagaagcaacggttgagtgagatttttcccatccttagaaggacataagcatgattagaaagcttaacactactgcgacataggcttgtagatttcctttactggttgatgaagctgagaagtctgatgaatgttgtgctagaggtgaagtagaagcaggaaattcagtggaaggaatgactggagagaatgtaggactttctagatgtgtctggaacaatggacttggggatgaggagataatgacttcaggagattctgcaggtgaagtagtagaatcttcaggagatgctgctggtgtgacagaatttgttgcactggcaagagtgtctatttcaaccttcattccttggctgcaatgtcctattgtcccacagatgaagtatcttttccccggtaaagtgagagggatggttgtggcgccatcattgtaagactgaattgggttagttggctggcaagagtcataatctggcttt

SEQ ID NO: 41460 - DNA, 384 bp, Glycine max
  Clone ID: jC-gmro02910013f05d1
cacatggcaactgcaatagcacttattcctatatcattaaaaataaaaattgcttaacgaaaaaattctcccccctcctctgtattacatcagcacaatacaggatatattttgaaatatcctcccctcaggtgcctacatgttacaaacaacagttgaatttacaaaactaaaaacttacaagcatctgtgtgtcatcattagattctaagattacaaattatggtactgccatgatgtttgcttgtagccatcccatcccccatcaggttccttccttttaagaacatcactgcttacgtgaaagatccgtgcttgctcttcaagttgggcctgcgaactagcaacagaaagttgccgtggtacaagaggtgagctatcatc

SEQ ID NO: 41461 - DNA, 465 bp, Glycine max
  Clone ID: jC-gmro02910013f07d1
aattatgggcactataatatttagtttatttacaccgaaaccacattattaaataatccaaaacatcacgcatcatcatcatcatcttcttgttcttgttcctcatcatgttctttcagatccgagaggctcctagacttgaagctcccaaatcttgctctcatgtgatcaacataagacttaggaaccaaaacatgatcttgtttattttcttctgatgaataagaagaagaagaagatggtgacacttttttgggcttctcttcctcttccaaataattgtcttcatcttcatgaacaggcaaaaggggcatcgattttgggttggaccaagcgtaaaaagaagattttcttgtcaacttcgtggctatttgaacccttcttctcttgttgaaagggttcttttgcttttgaagctccttcactgtgttgagcgtgttcacttgtgatagatccgtgaatgac

SEQ ID NO: 41462 - DNA, 495 bp, Glycine max
  unsure (1)..(495): unsure at all n locations
  Clone ID: jC-gmro02910013f08d1
acagntgcaatttactttaatattagcagcagaaccctacgaaagaacaggatatcacaatttgtctaacagcacctatccaggggcacaattttttttgctatattgaatgtcatatttcaactattttactccagctgtgcagactaaataatacacaggcaaacagaaaaaatgtttatcctcaccaggattacaatccaggaggcaactttaatcctaaatatattacaaatattggcaaccatatgttacaaaattgggtgtctacatgggtgtgaataagattaaactattttagattttactattagatctgctggcttaacatttacaggttaattgctctcagcagaaacaaaattgcagatataatattctttacagcactataccagtaccatcagttcctagctgaaaatggggaataatagcatgccgctggccccgacctttcagtatgtcatatggacaacttgaatatcaagcataaag

SEQ ID NO: 41463 - DNA, 430 bp, Glycine max
  Clone ID: jC-gmro02910013f11d1
aacgggagaaaaactggtactattctttacgggaattggaatagcagttgtgtttaatgggggatgaaaggaaaatgaccatgcggccccattttaatcactggtgccccctaaacacccccctttttattatatatatatatatgaaacaatatttgaactggcactgaggaataatgctaactctcacttctctctagttttggttcagggtcaacttgtcagtttgaaaaggacttttttgctggtacactggactgagcaggttttttgaactgcaccacaatcatgggcatgttgtcacatccttcaccactggcaggtgatggggccaaacaccgatcaagtactttttcacacacgggagaaagttttgtttcccagtgcaattgttcatgaacaaaatcaaccaggtgttgacttgacatgc

SEQ ID NO: 41464 - DNA, 512 bp, Glycine max
  Clone ID: jC-gmro02910013f12d1
acagacttattgagaccaaactagttaaaaaaaaaccatgtgattatttcattagccaaaactacaaaccacagtatgcacaccaaaaacaaattacaaaccacactatgttaaagccacagttgcaggcacgcttgtaaaactaagttattccactacacactcttgaagagtaagtgggtagctttaggctatggagaacatgtactaatgtgcctcactcttttaacacaaaccttaaatcacagacagaagcatgtagattgtaggggagcttatgcatgttcatggaatgggatagacaactatttttccagttgctctgtttgtttccagatgggcaaacgcttcaacagtctgagaaaatggaaacgggctcttcgggtcaagtattggcttcagcttaccactctcaaaataggggtttagtttctctaagatcgccccatcagtagagagtatgaaaaggatagctggatgaaatccaggtggaactattgtcacaacttttc

SEQ ID NO: 41465 - DNA, 438 bp, Glycine max
  Clone ID: jC-gmro02910013g02d1
attcaaaatacttcattagcattgttgttttgtgtagtcgaagtgttgaaccaagaatgcaaatttacttgtgtattttatagtgtacaatcgtatgaaaacaagatgatctcgccacaaaacagtatgagcctgggttaaatatcctgatatttctgatccattcagctacagatgccatctcaagaaatggctcagaagccagagtgagttcaatcctcggtaataagcaacctagccatgacggaaccatgaatgtatgattaacctggattcttcaaataaaaaaatcaaatgaggtcattgttcgaagttggattcaaaagtcggaaccacgtgtttttcggagctttaaactccaattaaatggggacccaattcacaagcagaggagagctagagggctcctttaaaatgatctaccatacttaaaaacgt

SEQ ID NO: 41466 - DNA, 514 bp, Glycine max
  Clone ID: jC-gmro02910013g03d1
gtcagtggactcatcaggatcctcatcagcaatcctacggatcatatcaagggctttcctaataagtttcttcttgattgtctttagactactatgttgctgaagcatttctcgcgatacattaagtggcaatgtgtcagaatcaacaagacccagcaaaaagtttaggtacttaggcaacagttcattaaattcatctgaaatgaacacacgtctaacatacaacttcaggttggatttgtttgcgttataatagctctcgtataaatcttgaggtgccttaggtggtacaaacaggactgccttgaactcgacatcgccctcagcagtgaaatgactccatgctaaaggtttctcatcactgaaatccttggcaagagagtgcgagaatttggtgtattcttcttctgtaacctcctttggattcctcagccatatagctttcacatcatttaaaagttcccattcataagttggttccttcaccggctgtcgcctgggctttttttcttcg

SEQ ID NO: 41467 - DNA, 441 bp, Glycine max
  Clone ID: jC-gmro02910013g05d1
aaagaaatcaattgagaacaagaacaaggttggcaattaatccaaattaaagatttgcattcatatgacaccacagtacaaaccactgtttattaccacatcataaattcccagccattgttatgcgaccccaacaaccatatgatccagctacactgcttcataatagagacagaaccatgaacctgacgagttacgagcttgaaagagatcattcaaattttgaggctgtaccttgaaccctggtacgtgtgagtccaacacatgcatcaacgaaatactgggctatggaatctgtaggaaaaatctgcggtctatctgaataccctttggagaagcactgactaatgaagaggcttgcaaaggcatgaatgcgctgagtgacaggcttgacacacacaacggagttattcgccacaggcgtaacgggatttttcaccc

SEQ ID NO: 41468 - DNA, 348 bp, Glycine max
  Clone ID: jC-gmro02910013g06d1
gaataaaaacacacatcatattactatgtgttgtcatacatgcattgtaatgagtggatattccaaagcaattggcccctttatccctccttaatccttatgccgcaaatggcaccatcccttgtaaattggaattgcttcttcagaaatagaattatacaaaggttgttgcaatatctatttgccaaactataaatgtaaagacccttcttcccaatcctagtagtgtcccaattgtatttacaaaggtgggacaagatatgtatattcaagtgcaacccgtgtacataagtgaagcaataagcttactttgggctttactagggcacattacagggagttattatg

SEQ ID NO: 41469 - DNA, 477 bp, Glycine max
  Clone ID: jC-gmro02910013g07d1
cttgcggggaaggaaaggccaaagtagcattagcaatagcatgtttgttgctcccatttgagtttcaagtttgagcatttgcttttgtttttttcctagagcgcagttatggttcagcttcctccaaacgcgagccccctcaagtgactgctttataagccaacctctttcacaaacaaacatcacaatctctagagttctacacacaagcacgttctagagagagataggaaattattaaattaagcaaatgggtcgcaatagcatagacatggacagggagagattaacggctgagatggacttcaaggactcatcctccgccgtgatcagaatccggcgccggctgccggatttccttcagtcggtgaaactgaaatacgtgaagttgggattgggatacggttactcatactcatgcaaagcagccagcattgtgatgctagccatcaccctccctctcgtgttctctctaac

SEQ ID NO: 41470 - DNA, 390 bp, Glycine max
  Clone ID: jC-gmro02910013g09d1
gccaatgctacaaaaaggggtacacttttcaattaaaacaactttagaccgtaaaattcaaaatccaaaaggggctagttttttggttcaccaaaagcctcatacaaaatcttaacaaaggaaagcacggtggctgctcgccacaatgattaggcgaatgtaacaaaaaaaaaaaaaaacggttatttaagatatgtgaaaaacaggtcacccatcctgataaatgcttttgattgaagtttgcatccaatgtagatatgaagagggataacgagacctcttttgcaccatctaaaaaattcgccaaaaacagcagaagaattccctgtaatggggggatcatttcacaagcaaaatcttgaggacagaagcttggcccacaccaagaag

SEQ ID NO: 41471 - DNA, 407 bp, Glycine max
  Clone ID: jC-gmro02910013g10d1
agccaagacccgaatttgggattcatgattaaatcacgtttaaatcttaccagcaactggaaagttcagcaatacacatgaagttgaagtctcaacttaaaatatgtacataatatcatgttcataaaggtctcccgaggatataatataacgcaaccacactcggttttgcgagtcttggacactttgacagatataagctaaggcaatagagggacagtgacaggttaaaacgtcattccattatgccatgcaatagctagtatgaaactggatctactccgtgagaagcatggaaatttcatccaccggagcaggaagctgaattgacgtggaaggaaaggggggcaccagagggatttgcggcaggaacgaacggttttgaactggtcaacgtcaagtttttt

SEQ ID NO: 41472 - DNA, 189 bp, Glycine max; identical to SEQ ID NO: 41432
  Clone ID: jC-gmro02910013g11a1

SEQ ID NO: 41473 - DNA, 500 bp, Glycine max
  Clone ID: jC-gmro02910013g11d1
aagtataactatttttatgttgctatatctcgcaaatggggaccaagttttgtcactaaatctaattttatcaccgctgtccataataacagggaataagctcgatcgatggaacacagcagcaatatttatatcaattattctcgtactacttttgccttgtttatgttatactggttaaactttgaaccaatccaaagcaatgatctatgagaagacaacaagaaaagaaaacacatatcaacgtttattacacaatccattcagaaaaacaaaaaagaacaccctgagcaaaaggacccaatacaattatatctcctgagccaattccactacttcttccaccacagacgccatagaagatcttctcttatttgcaacaaagcacttatcacgaatctcccctttcccaatacgatccgttatcacatctagctggctcaccttcacaaaagcatcggaaaatttcttaaaaaacagtttctggtctgaagcgaact

SEQ ID NO: 41474 - DNA, 451 bp, Glycine max
  Clone ID: jC-gmro02910013g12d1
aaaatccaaaagtggctagttttttggttcaccaaaagcctcatacaaaatcttaacaaatgaaagcaggtggctgctcgccacaatgataaggcaaatgtaacaaaaaaaaaaaaaaaacagtattataagatatgtgaaaaacaggtaacccatcctgataaatgcttttgattgaagtttgcatccaatgtagatatgaagaggtataacgagacctcttttgcaccatctaaaaaatttgccaaaaacagcagaagaattccctgtaatggggtgatcatttcacagtcaagatcttgatgacagaagcagtgcccacacgatgaagtgccacaaccgaatccccgttgtggcagagacccttggacttggcatgttgcatggcgaattctattgcttcttcagttgtttcagcatgagaagctctagcagaagctgcactcaatac

SEQ ID NO: 41475 - DNA, 518 bp, Glycine max
  Clone ID: jC-gmro02910014a02d1
cataaaaataaaattgtctctgtccaatgaacaattcctaacatatgcacagtttaacattcaggggcttggctataccacaggtcaaatgtccaaagaatttcttacatgagatgaataaacaatatggttacaacacgtatattagacaagcggaaggaagatcatcttccatttttcaagtctgtgacgtcatatctggagatcatccaatgaaagttcctgtgctgtcagcatcttcaatttcgtaatatattgtgcaggatcatcgatacttgacgagcctagaataacttccctcttcagcttaccagtaagcttgtggcatatcctaagctcagatctggttgctccaccaacaatgaatataaatattcgttgccccattttcttgaaatcactggatgcatgttttagcaccgagtcgcttgaatatccatcatcagagcctttaggtcgagcccaagttggtgtgcgccttgatctcattgaatgagcaggaggattgtgagttactg

SEQ ID NO: 41476 - DNA, 504 bp, Glycine max
  Clone ID: jC-gmro02910014a03d1
aattaagcattgctcctgaaggatccaagagctttgattgcagaacctctaagaatgtattgatggtagattgcagccaccgcagctccaacaaacggtccaacccagtaagatctcattggtcggcccacgctttgtcgttgttgaagatcacagctggtccgaaacttcttgcatggttaatgccggttccagtgacagggattgtagccaagtgaaccatgaagacggcaaacccaatgggaagtggggctaacacaggaacatgagagtccctaacgttcctcttaggatcagtggcggagaaaacggtgtctacaagaacaaaggtaccaatgatctcagcacccaaagcggtacctttgttgtaaccatcgctgacagtgttaaccccacctgcgtacctgttgtagaacgatttctggaaccctctggccaacccagcaccgcagattgcaccggcacactgtgctatcatgtacaacaacgccctcaccaaagaca

SEQ ID NO: 41477 - DNA, 474 bp, Glycine max
  Clone ID: jC-gmro02910014b02d1
cgtctaaaagggatatacgtaaacatttggggtgaggctagtctcagccatcacactaaaacactataggtatccttcccgaacaatttagcccgaagaacccaaatgagtggccaacatgaccctcttcttaagatccacaattacatgtgactctccatagctacattgttcaaatacacaaccgttaaaaccaggaaatactcatataaatgtttacaacaaacagaaatcaagtcctattcacgggttcaagcgcctcaacagtgaccacactatttcctctaattaccaccatccctatgtcatttttctcattgccattcacttacacagtgtggtcaacaactaaattcataaactggtcaaagccacggagagtaccaacaaccatgcgatttgcgttcagcttgatctgaagcttcttatccatgtacttcttcaaatccggtggttgccctgacctgctcatgg

SEQ ID NO: 41478 - DNA, 562 bp, Glycine max
  unsure (1)..(562): unsure at all n locations
  Clone ID: jC-gmro02910014b04d1
aaatcaaaactgagaattcaatctataaataaaacgaaactcaacaacatttgtcttatccgccaccatataacccccccggaatgtccaaccatagtaacagaaaaacacaaggaaaaggctacaacgtatgaagaacaacctaaatttacattttaaggcatagaagtcaaaataataacccttctaattcaggaaatccaattaccaaagtttttttcctgcttttaagtccaaatccaagaacccaaaattgacaaaaaaaggacagggaaatgtcagaagggttcaggaaaacctcacttgccacccaaggatgggaagtgcccaggatcctcaattgatggagctggagcattgctgtatgcatttccactgtaacctcctctagaaccacggccacgtccccgaccacgcccaccagggtagtacctttccccttcagctggcttcagaaactcagtgatgttgacagacttcttggatttctcctccttctncaaagcatctttgcgcttatccttgtcagatcccaatttaataaagatctcatcattttctt

SEQ ID NO: 41479 - DNA, 554 bp, Glycine max
  unsure (1)..(554): unsure at all n locations
  Clone ID: jC-gmro02910014d04d1
catatattagattttaaatattgatcaccgtcgcggagcgttgattaaaacctcagtacaagtgaaacgcatatataactaaattaacttgtcaccacagtattatccaaagagctgtacttccatgcagaaagggttaacactcatcataacctcccagtacagaaagactataaggtctcagactctcagtaactatcagcgatactcaacagagaggaatatgttccaaggattccacaaatgactccgaatgcagcaattgcaacactgagtacaacctgtgtccttgtagcttttttcccaataattttcagaaaacataaacttggcattatcgctgacacaagtatactaaagagagaaccaattaaagccatcacaagcccaaaaaagggaaccaaaaaggcaacacaaacggtagatgcaacaagtgttgtcctaagaagaatgaagcaccaatatgaggatgaaattctatctggcagcaactcctctagactccttgccagtgggttcatcaacaaagcatatntagtcaacgggttaataac

SEQ ID NO: 41480 - DNA, 465 bp, Glycine max
  Clone ID: jC-gmro02910014e02d1
ggagaaattgatcataaatatatgtagaagataatgggacgagcactttgggttaaaatttataaagctaaataatactaacaaaggaaaaaataaaataaaaaccccctactataggaagaggatgattatatgaactgagcatgctgagctttttttttattatcagcaaactgaacatgctgatgattatcatttatctacatctagctgtggagatcattctagatattgtgatgaactttattagaaacctctggttgattatccaaaggcttgtactgatgaataaattgacgtatttgcgaatacatatatatagggattctgaactatgaaaatgcatatactgccgcaacagcgacaaccaatacgaggattatcacccagatattcagctctgaagcagaatattcaccggaacacgtgatattttatcgagagtagaacacaccacttttgcat

SEQ ID NO: 41481 - DNA, 469 bp, Glycine max
  Clone ID: jC-gmro02910014e03d1
aaccaagaaacattagctaaaaatctttgggtagctccgtcagggaaactaagttttcgcgaacttgtaaaaagtaaagaaccctgcaacatcaattgagcatgtgtaggacttcaactcttccgctggttttacccctacttttctattctcagacacttgtgccatggccctttttctacgtccaccaaaaatattgttaaaaaaacagggtacacaattaccgcatctaccagaattctatttttcaaccaatgaaaaggtttactaatccactggcaacgatttctccagatagcaagaggcaaccgtatgtacttgctatagtcattcaatagcaataaacacaccataatactatctacagcatctaatcatatgatagcaaaattttaaaagcaacttctagagctcggaaattttaaaagaacatgtgttccagcaaaacatgaactgcatactattcatg

SEQ ID NO: 41482 - DNA, 435 bp, Glycine max
  Clone ID: jC-gmro02910014g03d1
gcaagatattaacttgacgaaatgaaacgcttgtgtgcgcaattaagtggatcgcaaagaagggaagagaatggagtttaaacgtcattccatttttcccattccgaggcatcaacttggattgggaccttttaccattcccactaaacaaactacccttctaattcacacttggctccaaactactttcaaaaagttgaataagaagactttggtgggagaagattaagattcccctgtaatataatcttttcttttaataatgtcagatttacattgcaaccaccctcacgttgactcgaatcccaaacccactcccccggaaatgttctcctgcatcgagtgccggtgctccccttcatatgtcacaatcaacatcgtcggatcgtacggagcacgctccacgtgtttcctcgccggacaccctctaacgct

SEQ ID NO: 41483 - DNA, 457 bp, Glycine max
  Clone ID: jC-gmro02910014g04d1
atgactcgggggttatttttgattttgcaaattacacaatcacagccgtacatcacacgtgagctgggcctcttccaacttaaaagcagaggataacattggcccatgacgcaacacatgcaccacctaataatcataattttacatctttacatacaaaatacaaagactttaaattaaaattaaaaaaaaaaagataaacagatcatcttgatgaaatgaaaccgaaacccagaaacattgttttgattttttttgttgttcccaacttgattaagcatgaacggtttgattgaatcacttggacttgaagggaatggccctgattacgacctggtggtagagtgctgcaagtgcagcaccaatgaaaggtcccacccagaagatccagtgatcatcccaaccaaggtccttgttgaagatgatagcagcaccaagactacgagcagggttgata

SEQ ID NO: 41484 - DNA, 551 bp, Glycine max
  Clone ID: jC-gmro02910014h04d1
ggaaaaaaaattaagtgtatgtttataattacccaaaatatatcacaatttaatacaagtctaatatgaatagaaaggattacttgagcagtggttgacattatcactaccatggaacaaagctcttgagatttcttatttgatgaccaaatatagagagtgtgaagtaactaattctagcgagcatccttggataaaagaagatcatccactttccgggcattgcatagctcatcagcacaatcaccactctcaaaaacagcagctgcccccattccagtacctatgcacatagatataactccaaatcgacagtccctgccacgtttcttcatttcatgcaacagcgttgcaacacatcgagcacctgttgaacccagaggatgtccaattgccattgcacctccattaacattgatcttttctggatcaagccctagattgttacaacaatatacgaactgggaagcaaatgcctcatttatttcaaaaagatcaatatcatcaagctctagacctgcagccttaacagcaacaggaattgcagcagc

SEQ ID NO: 41485 - DNA, 516 bp, Glycine max
  unsure (1)..(516): unsure at all n locations
  Clone ID: jC-gmro02910015a07d1
catgtaatctatgattctgtaagaagattaatattgacactagcaatcattcataagttacaattagacaaaaaaagagaaaattaacacagtttctcacgcttaaacaatggaaaaacttactaattatcccctctcgtctctccctaccccccaagacacaaacacacagacatatttgttataaaagaaattgaagatctctgtggatagagactatataacaggccatatattgatatatcatgtctcaacatgcactctttcactttttaagatgaggaaaacaaacatggagatcagatttggggtgtttggcttcagcatgctccttgcacttcacttctgatgtggtgcatataaatgtttgcatgcacaccttgcactgaatagacatggctttcttgtttgaatccaactggcttcccttagcggcagccctctgcttctcgaggttcttctcgcgagccatctttgacttctgggcattgcctnctcccatgtctgagtctgtct

SEQ ID NO: 41486 - DNA, 498 bp, Glycine max
  Clone ID: jC-gmro02910015a10d1
caaattgaacactaaccttttatttcaaatctgaatattcaaatatttcttcagtttggaacaggcatcaagcagggttaataagccaaggacaatttctcctttttcttggcaatactaaaggatgcctattctgttgtgaaactaaaatttgtcctccaaatatttttcttttctaagtctattttttttttacatattttacaaggaaatatgctttggcaatagtgtgtcatcctatcattgacaatttccactgcagcatcaacaatgatctggactattcagtgaatgcagatttccaaccatagtgctaattggttaacatcagtatttggatgcattcaaaactttgcgatatgaacccctatatagagccttgatcagtcatggcttgagcaatggttagaaaggcagagatgactgctccatgtaccagagccttagggctttctttatgataaccaaaatcagttgcagctttcatagctctctgat

SEQ ID NO: 41487 - DNA, 403 bp, Glycine max
  Clone ID: jC-gmro02910015a11d1
aacaaccctatcattatttttataagccccatgatagggtttaatattagtaacatttgacagggaaaatatttgggattttcaaaaattttaaccccaattaaaccagaacaacaaacaaacagtaaagcattaaaaaattgggggtttaaaaagggttgacaaaggggaacagcccctttaattggagaaactttttggggggatgcaaatttagctggattgaatttatgaagggttaacaagggttttaaaatgggctccccatttagctcaagatcccttttaaactggaacattagacttttcaagacgatgaaaacccaatggaagaatgcaagccgttacccccgtttcacatgaagtcacaactgggcttttacagaaaagcctttttggaaaa

SEQ ID NO: 41488 - DNA, 482 bp, Glycine max
  Clone ID: jC-gmro02910015b02d1
gtcactcttgtcttggtaccactggcttgttaataattaattatacgtactcgatcacatcaaaatgaaatgctaaattatttctttattccttaattggcacaaagtaaaaactggaatagtattgaatcgatctacaaggaagaaacaatgatgctaggttggacgatgtggttgttaagcacactgttcaactccttctgaaacctctccatggcctcagacggcaaacaaaccggtataaccaacccttcctctcctttagcattcttgaaaggtatgtaaaagctagcaacaccaggtatggctccaacccctcccttggcgggtcctccataaacagccttcccccacccaaactcaacgttttcaaacccagcacgagtcacatctgacacaacataggatctcacaacagtgaaggaggccgtcccttggccaccattaaattcgccaccgagtgcatgtattcctcagtcacg

SEQ ID NO: 41489 - DNA, 516 bp, Glycine max
  unsure (1)..(516): unsure at all n locations
  Clone ID: jC-gmro02910015b05d1
aaattaaaagatcaaaacttacaagaatatcttaaaatttcatggatcaaagtcaaaccaccaaattacaatggttgaaaaaaaaaagattgaaacaaaaagctcaacaagtacattgtcacataatccgtaaattgatcaaatttaagaacaaacttaacaacgttattgcctaagtaccattatgaaccaagctagagatctcacgtttatatttatgtagtatttttaacaaaaatctaaaattaaatccttgacttagacataaaatcgcaagcggagatactctagtttaaaaataaaaaataaaaactaaaagagtgtccctgctcttttatccactagcaactctgaataagactgaaaccttcacgcaacttttaaacttccattagttatccaatcaccatctatagttggaaacctgtcatttttcctcacatgtagtgaacccgaatgggtgcctaatccttctcgtaatagtaccataattcatcaaatgagaanattagtcag

SEQ ID NO: 41490 - DNA, 482 bp, Glycine max
  Clone ID: jC-gmro02910015b07d1
agcaacatctaagcagtacctgttatacaaaatagaagcacccgtctatatgacaagcctgaaaatatagcatcttattttctcaaagaattgtatattgaaaactcttctattacatttgaaacataattggctggcatatgtaaaaaactccaaagattctcttaaatacagagcatacacattttagaggattcggtcctgaagatctgtcatcaatgtggaggccaatgagctcagcttctttccagtctctcctgcaatgttcttaagggaagagagatcctgttgtgcctggaaagataatcgattgatgaggtcaccagcagtaagatcaatgttgttgtctcttgagtcaccaaaaagatcagcactggagatggcacttgaacccgaaaacttagacaatgtagcttgagaatccacatctgcagccttggtctgatctccaaaatattgggatgaagaaatagatttagcat

SEQ ID NO: 41491 - DNA, 539 bp, Glycine max
  Clone ID: jC-gmro02910015b10d1
aagaacgaaatgatattgtggttgcttttctcgttcaactataaggtagattacatttgaagtttttgaacagcacacaatcatgttgggaggagagaaaaaaatacaaaagatcttatttctaaaatttggcctacttacaaatattgctacccattgaatccaaactcccgaacacggggcttagattttatgatatctgagactttcaaagaaggtgccatggatagcaaaacgcaacaacaccaattttgtcaactgttgtgcccctttcaatcattaacatgtggcccatttgaatccttcggaaacccaccatcactcaaacatgaaagaatgcttaaaagacatggcaagtgaaacaaccactcaaagaacgcatctggctggttctaagaaatgatgaagccttgtgtgaagttcttacaacccgatcggtttggttgtgtggaactgaacttctcatttcctgagcttttttctgggccaatctaaagcttgtcataatcttatccatagaggatgcttcgccttttttc

SEQ ID NO: 41492 - DNA, 408 bp, Glycine max
  Clone ID: jC-gmro02910015b11d1
gacaaaaataacataactatgattaattagtcagggtcagtccattaagttcccctcgcatgacatgtgtcaggtagggaaaggctcttaaactgagtacacacttagagaccattacatttgcccacactgattatataaccataactgactaaacccacagagagtttaatacataaactacaattaataatcatagaatgataaccaaattatgcaaggctatcattatcatcttataattaataagttgagtatatatatatatggatgaggtacttaatcataatctggagacctgcgagtgtaggaattgagactgagctccaaggaagcacgggaagcattcttgaacccttcttcagtatgataccagccattttcatcatagttataggaattagactt

SEQ ID NO: 41493 - DNA, 537 bp, Glycine max
  Clone ID: jC-gmro02910015c02d1
ctcggttgaaatagttcatttgtagaataagcttcgtttcctcaaggggaaatcccattcatccacgcttgttaacaaccaggcaaataaatgataagcacaagaaatagtaactaaaaaaaattattacggatctctgctcgaacaaaaatcataaccttttaatgtaatactactacacaccggcagcatccacactcgtattgtttcagtcagataaacccgccttcgactttagatgcgccttgaattccataatgtcaccctcccatctggtcacagattgattagcacatacccatatctcatgcgccacctgatttatgagcctaaaatcatggctgacaagcaccaagccaccgtcccattcattcaatgcctcggccaacgagtcaattgtctcaatatccaaatgattagttggctcatccaaaagaagcatctgaggctgtctccaagctaaccaagcaaatatcactcggctcctctgtccatctgacaagttcttcattggcatcacctgcgctttacctgaca

SEQ ID NO: 41494 - DNA, 495 bp, Glycine max
  Clone ID: jC-gmro02910015c05d1
agtctaaacttctgcatgttgatatatgctaaaaataaaatggtgtccaaacatttttccaccaaaccaagagactttagtaggagtaacaagagggtaacataacaggaaaaaaaatgtcctacttattctgtgaaacgaacatataataggcaacacaacaatgaagcattatctctaccataattacgatgattttaggggaaggctacctaggctcttggtctccaccatgtccatgactaaacataactaccacctacaaattctgactggacatgccacgtcccctccctcgtccattatagccataccctcctactcttccataataaccacctcgggtacgtccaacacggccagggccacggcccctgcgaccaccatggtgcctcacaaaatcaccaaacgtctcagtatcaatcttgatttgttcagagtatctagtccttccattctgtgaagcattaccatgcatgttggaagagagcgagt

SEQ ID NO: 41495 - DNA, 477 bp, Glycine max
  Clone ID: jC-gmro02910015c06d1
aaaaaaaacaccgacctctttttgaaaaaaaacaaaagaagcagggaaaggaataaataacccccccccaaaaaaaaaagaataaaaaaaaaaccccccccccccctaaaaaaaaagggggcaaaatgggccccccaaaaaaaacctttttttttatgggggaaaaaaaggccccccttcccccgcgaaaaacggggttgggaaggcacccaaaaaccgcggccccccttaaaggggacaagggctgggcccccttggggggctttggggcaacaagaaaaaaaactggaagggggcgggggccccctttgaggggtcataggggggggaacctcccaatctaaagagggaaaaaagggggctttttcccccaaaaagagggtgtatttggaaaaaaggggcggggaaaaacccccccccaaaaaaaagaaaaaaggggggggcccccccccattgggaaacccccccccccccccc

SEQ ID NO: 41496 - DNA, 430 bp, Glycine max
  Clone ID: jC-gmro02910015c07d1
aagcagtcaaaactgtttccaaaaccttttataacataatgggtaatccttagggacataaaacaaaaaatcccttgaaaacgaggtttttgagttcacaaagggatcccctataaaaaaaacctatttatagccctttccttctgctttacctccaagataaaataaaccccacataagctttaagcaggttttttgttggggactccatcaccaacatcacgatcacaattttgggggctttatttacaaaaaaggggaaataaagggggttcaaaaaactcctgccgtggaaggggggtcgtcaaaactccaaaggtttatagggtttccgggggcgtaatgagttgggtttccgccgaccaaagaccccaaggaggcatcagcccaggcttaataaaaaaaagagggggtctcaaagaacttgagc

SEQ ID NO: 41497 - DNA, 395 bp, Glycine max
  Clone ID: jC-gmro02910015c08d1
aagaaactaaacttacttattttttattaataaagcaaagggaccgaacccaaaatgtaaaaaacccaaaaaaaagggcaaacattttcctttaacgatctctactacataagggccaaagatcataacccactacataaaacccaacaaaggccgcaagaaaaatgagccctggaaaaccagatttccaaaaggggccctccaacgtgttccatgaaaaggaggaaagggagctaaagttgtaaaaaaagttcccttttcttgaaagcaaacataactgcggcgatttggacaaacagctcggtatacaccggtgctcgcagggatgaaaaagtctttgttgttgccttccccaaaagaaaaaatgggacctaaagcaggaaggtttccagggg

SEQ ID NO: 41498 - DNA, 491 bp, Glycine max
  Clone ID: jC-gmro02910015c09d1
ttccgctcgatttttttttattaaaacattaagaacttttgataatcgtattaacaaaataagacatgtgtccagaataaagaatcaatcatctataagggaaaagtcaataaaattttcacacaaaaaatgaaagaatacatgtgtccagaaacaggtaaaaaatgtagaaaagttaataagaacaaagaaaaaggagcttgggtgacttggtagttcagtcattcattctctacaggtgtaactccaagtccaagcacataactctggtgctattcgaccttttcagaaccgggattttcgcaataacttggtcgatagaaggaattataggaaacccttcgttgagagcagctctgtgttttctcatgtggccacccagagcctggcccagagagaattcaagtccacaaatggagcactcgtgcatttttggtttgttccacaagctaagagttttggcttggtctttgagttcttccccctctagc

SEQ ID NO: 41499 - DNA, 552 bp, Glycine max
  unsure (1)..(552): unsure at all n locations
  Clone ID: jC-gmro02910015c10d1
ggaacaaatcaaaccaaaactttcttatgaatcataaacaattaatattatatatatagcattctactatatactatatataatttctctttccctctctaacatctaaaatccaatatcttctatattttcccttcatccacccccgcttgagcgtgaccttgggtttacgttgtacgtacagttagagcaacatatccttctttttctatatattgcttttgtctcccaagacatattagactccaagcagcacgtagtagagtatggttatgggcaatgcaattagcatcccaaatataaccgcagtactaagtatatctgcatggagattgtattctttggcgaacacaaagggaacgataccttggggaagtgcagcctggacaattgcaacatgcaaaagaactccacggagtccaatgcctattgaagttgcagcaatcacagctggacctgtcaagaacctaacagccatagaaaatgctgccacagattntccacaggcaatgatcttgggttgtaatgccatgaacagacctagactgaaca

SEQ ID NO: 41500 - DNA, 514 bp, Glycine max
  unsure (1)..(514): unsure at all n locations
  Clone ID: jC-gmro02910015c11d1
gaaggaaaataatcaaatttttttcttgacaaatgataacataatccacttaacaaataattgtatttcccaagacattctaaacactatcttccacgtttctaattggcatcccatctattgatcaaactaaaaacatagacaaacagttgaattaccaaaggtgtaggataaaaagctgcccttctatggttgttgggttcagagaagtataaacttaacaagcatgcttgaagacctagaagaacaaatcatctccatattattgaaacaggacagattaatgcaccaaagtgcgagtgtcctcctgattgccaaaatcagggagctcagaactatgggaaaacttcatccatctcttcttctcaacaaatttgagacaaggctgcatcagaaggccaattgccatagcaataaggcttacaaccattactntaagggtggagaaaaacaacaccacaccaatcaatattgtcggagggatacacatgataattgttcagcagttcccccc

SEQ ID NO: 41501 - DNA, 535 bp, Glycine max
  Clone ID: jC-gmro02910015d06d1
gatagaaaaatcaagataagctgacccatcatcatgacatgacttgagccacaaccaaaaccaatagttgtcccagcagcaattttaatcttaatcttctagaagctttcattacatggaaatgaaaaaagagagaataagcaatagtagtatttgttttcttttcagctcctactactttgatagctacgcctgtgacactgaaaaggattgagaaaacaggcttcttatttttatttatttatatctataagatatgagatagagagagttgtgattactattactattgagacatccaatacttgctcatctcaaagccattcctgccatagtgatagtcttcaattgtgttctcaatctcagactgcgtgttcatcacaaaagggccatgctgaacaactggctcattaagtggttggcctccaatcagaacaaatctcaaaggctttgaagagttattccatacgctgaggccatcaccttgagtcaaaacaaggacatggtgtggcacagttggggatgatgttggaga

SEQ ID NO: 41502 - DNA, 468 bp, Glycine max
  Clone ID: jC-gmro02910015d10d1
aaatgaatcaatgactttcttgaaaaccattaactacaatcaataatgtttactcaatgtagattacaatttgcgtgtttcaccatcagaactctccaaattccaacattgccaggaaaaaaggaaagacaaaaaaaactatatatttaaagagacccaaggagaaagacaatggaacccgcatctaaattcatgcacgcagatatacaaaatacacaacaatgaatagacaacacccaaaagccacaattttttttcttccccatgaacctgctagtcttgaacggcatcaattgctttgcctgtcctggcttgtgagattcgatttgcataaatggtgaccaacttcaactgtgtgctgttaagcccttgcaaatatggcaagaatgctttcccaagcatgatataaatatccacgagacagaaaacaacggtctttcgaacatctgtactctggttaccaaaagc

SEQ ID NO: 41503 - DNA, 541 bp, Glycine max
  unsure (1)..(541): unsure at all n locations
  Clone ID: jC-gmro02910015d11d1
gtgttctggccatcttcttcatcttcactgtactcactctcatagtcatcatcatactcttcatcctcgttgtcctcatcctcctcaactccatcctccatgataggtccttcatcagccaaaacagcacccctggtgccagcccgagttcgtttcaaaactttgagctttaaatttgtccttctgtcacagcccaaccaagaatcacacaaacaatagcaagtcaaattgtagttaccctctgatggggcctggaacttgcccaatactaatctagagccccctttcaccttctcaactgcttctgcaactaccttactggtctccttcacatttgctcctgacccctccatagactcctcaattgccttagatgcagcagttacagcagcagcttcatccatgaaactaaccttctgagaaaaccacacgttgtttgaaacagaatccgcangcaaaaaccagtagttttcttccttatgaaatgggtagtagggggcatgtggaagagcaccaatcaggctattacccctttaacatt

SEQ ID NO: 41504 - DNA, 505 bp, Glycine max
  Clone ID: jC-gmro02910015e02d1
atgaagagtaaaatgagaaatgactaaggatgcacaagacagaaaaggaacactcaaggaatacatacatggaaattaaaaaaaagaaaaagaaaaagaaaagacacaaaagggatacaaaatacacccttggacacaagcatgcttatctacaatttgatgcatgcccccatggttttggccttctcttccaaacacccccaacaactgtagctgatgagaggaaaagacgaaaaagcctaaattagggaactgcatagacagatcactagcactcctcaacatagaaattattattcttcgggggaaacaccatgcatagcccttgttggcaaattaatcaaggtagctagcttaattgattaattaattaagcgttgctcctgaaggatccaagagccttgatagctgctgctctaaggatgtattggtggtaaaatgcagccactgctgctccaacaattggtccaacccagaatatccactgatcatcccagattttgtc

SEQ ID NO: 41505 - DNA, 505 bp, Glycine max
  Clone ID: jC-gmro02910015e05d1
cggccaataaaaatattttcttacctgaaaatcaagcatacatgaagtcttttctgccaaacacattttttaacataaaacagggcccaagacatacaaacaaagaggaagtccacaaagggtacatgggcatcattgttgaaattgacctttattacagaaacccagggaactcattccattcacatgggggcttgtaaaggcttgggaacccacataagatgttttatagggaagaaggggcacactgcatccttcccaggcttgattccaagctgcctaaatataatatgatttgggctccaatcagatgtgtccaaatggcaaatgccaagagcttcaattttggcatctccattctcgctacctagggagaccttgaacaccttgctccctgttgctatgaaggggcaatagtaaatggcatagggatatggtaggggatgacaagctacccatttagcagcgttgatatcttcagacacttccaaaatggtgaactttt

SEQ ID NO: 41506 - DNA, 499 bp, Glycine max
  Clone ID: jC-gmro02910015e06d1
catccaatcgttcgtctattattaatcaaaagatttacaggggtaaaaagagattacggtatatataagcgtactaagatgtctagaaaatgagtttccaaaaatcattactagctgttatataagtgagaatcattacgaataagggagaacatagtgtgtttggtagacgagtttaatgcttattacagtacccacggaaactaaagtgacaattcaggtttccatattcatcaccaagcacagcacaacatcaacgccagaaacagagaaacattaaggatatatgacgtagtttcatatatagggacacactgcatgcatgcacttgaacacaaaagcctgtttagttatggttctggaagtagatgtagtctacgtcagcttcctccataaaccttctactggagcacttttcgttcttcacgtcgcattcctgcatgagattaggtcgtgaaagaaagagaagtaaagaaggcaatgaggggtaagaaaatta

SEQ ID NO: 41507 - DNA, 504 bp, Glycine max
  Clone ID: jC-gmro02910015e09d1
accccaaagctaagaaccaaatagtacaggaggtatgaaactgggatatgcaatcgttattgcgcgccttgtaccaaaacatttaattttcatatattacaacaaaaaacagactttagaaatctgccaagactaaataacgttaccagccaaaacctaaagggtaaatttatcacgcagttataactgcattatgcaaacaaaagataaaaaccatgcagaaattatagaacctctactaccataaattgcactactgttgagcacattgcactcgttgaccagatggctcatcatcatcttcatcatatgcctcgcgatattgctgttgctgctttcgtctcatctcctccttaaagttgacatcatgcaaagtggtcttcttacaatcatccagctccatgtctgacacatgcttgctgctcttttgaggtaacaccttttccagtaactggcattggtcaggggaaagaaaccctgagtctgggaaatcaacattaaact

SEQ ID NO: 41508 - DNA, 535 bp, Glycine max
  unsure (1)..(535): unsure at all n locations
  Clone ID: jC-gmro02910015e10d1
agnggccgccctttttttttttttttttttttttttttttttttgaacacaatgaatattttgaataatggagtatctgaattccccaccgaatcactccatgacttggcaagcaataaaataaatgacacctaactaacactattgtagccatggcacgaaattgaagtcaattttggccaccttggttcttggctttggtagggaccttgaataataatgtaaatacgacaaaataatcttccaatatgtgctatgacccgtatttgcagagatcctcaaatcccatgtattcatgattatcgatcttgtgtaccatatttacaatgccaacttcacctaatgagactgcactgacaaatattgtagaggctagaataaagatgataagagatgctctcccaaataagatgattagttttctcacaatgtgctgtccaacgaaggcagcaatagtagccacaaggacgaagttaagagcataaggaattggaaaacgtttcaacaggtagtattctataacagacatagatga

SEQ ID NO: 41509 - DNA, 364 bp, Glycine max
  Clone ID: jC-gmro02910015e11d1
gttagctaaccttaatgatagcacaactcttctacttaaacagggaagaagaagacaacacccaggaaaaaaaaggggagaggggagcattaccacccccggcggataaaaaaacacgcgcagggaaccacccaaaaaaggggccccggggggaaaaaaacccgagagctggggagaaaacaacgagaaccccccataaaaagaagcggtttccccccccccacaaaaaagggggcaaagaacggggccccgctcgccacagaagaaaaacacgggcgagtctaaaggggggggggagtttcggacaaaagggccaaacaaaagggggggggggggggccaaaaaaaccggcgccccgggggaa

SEQ ID NO: 41510 - DNA, 532 bp, Glycine max
  Clone ID: jC-gmro02910015f02d1
aaaacatatgactatttctacattacttcatagagtaacaccacagccatgacacaaataacatcttgttcatgcgttcgcatcatgataaaaacatcacagtggttgttgaacatagttatttttatcaaattaagacaccgcccttccctatcccctcataacaaacataatcttaccccagaaaaacaggaagagaaaagcaaacccacaaaagttttcatagatgccatccatttcaatatacattatctaaacacaaatcagcccatggcatacttctgggtccagctgcgtgcagtggcctcatacttggcccggtcagttttgtacatgtgagcgatttccggaacaagtggatcatcaggatttggatcagtcagcaatgagcagatagaaagcagtaccttagagatggtgagtgcagggctccactgctccttaaggatatcaagacaaatgctaccattgctgttgatgttcggatgaaacaccttagtcctaaaggcaaccttgggaggtttgaaaggat

SEQ ID NO: 41511 - DNA, 488 bp, Glycine max
  Clone ID: jC-gmro02910015f05d1
ataaaattaaattggactgtgtatccaatgcagactgtggcagctgggggaagggggaccaatacatgcagataactccgcgtattcttatttttaacttgtgcattaagcaaatgaagtagccagatttatcattacaacaaacaaacaaatggatgaccaaaataatgttgtgagggaagttgcaagcaattttatgtacaaatatcgaagtataaagataacaaaataacccgtcgttgttgtagttcaatcactttcgtagtcttcatcatctccaaaggtaaaaacagaagcatctgcagccatggccttaaactcactttctgtgctgggcacctcgagactggacactgtttttccttcaacgttagttcttggctcactagcatgacgaattggcgtagagctcttgtttcccaaggaaacttgttctgttgcatgtgataaatttgcatttcatttgaaactctgcttgaatcggagac

SEQ ID NO: 41512 - DNA, 604 bp, Glycine max
  unsure (1)..(604): unsure at all n locations
  Clone ID: jC-gmro02910015f06d1
gttattgattgcatccattacatgtttattcaatttattttggccaaataggaatgagaaatccgtacacagaacatttaacaacatagcggggaggaacataatgtaattccaccagaagttgataatgctatgtcatcatagctttattcagcaaacaacacgcaaaccactaaatacaattacaacgatgtctgaggatgttcataaatataaacgttaagtgtgacatacacatcataaaaatgttcaaggatagacctcaatcagagatctaaaaccaaagatgggaaatattttgtagtgtttgaatcctgcttcgatgaagagttgtttccattctttttccgttctctctcttccattcatcgtcaacataataatgtccaaactaagctttgtttgtgtcatatccgggtcatctagcttctcatttattacggcatctatgataatcacttttccactgttgcctttgcttgaaatagaatctctacacttttgcaggatctttatgcaattntcgtcggccaattatgtaaaacccacntagtagcactgcatcagcttgagggatagagtgaacatgttaccacaacaaaac

SEQ ID NO: 41513 - DNA, 360 bp, Glycine max
  Clone ID: jC-gmro02910015f11d1
gaaaaaaaaggtttatcatctgggggccccaataaattaaacttttccaatattttttacgggcaaaacttggttaaatacctgggaaaatgaacccaatgagggggaaaatttattttatagttgaatggaccttttgggaaacacccatttctttccccttaattaattttctgggtttggggcaaatttttaaaaacctgaaatataaagccccttggaaaaaataaccctgtgccttttaaaattatcgggttgtttctcaggataaaaggtagttactccatgcggtgggactttgaaaatactggccatcttcaacattttcaagaatctttgggatggctcccccttttttgg

SEQ ID NO: 41514 - DNA, 412 bp, Glycine max
  Clone ID: jC-gmro02910015f12d1
gggttcataacaaagcattttccattatacattcctttttatggaaattcggttacaatctcattgaataacctttataccaattggatttggtgcaacttaggaagcccaaacctttttgatgaaagtccggtccacatgtgtgaaacccacattttttaaacccacgacaaacagggttaaccatgtttttgttatatccggagaccccactgggtattttccttagccattggggcaaaaacgtttgcagccttggtttttttttctagttcgctaacttccttttatttggggggtttaaagcaccccctttggaagtcttgattttataaacttacatatatatataaacaaaaaatatcgggtcccatgtcctaacccatgggtttccgaatcccggtccgggctt

SEQ ID NO: 41515 - DNA, 450 bp, Glycine max
  Clone ID: jC-gmro02910015g02d1
gcaagactcaactgttgttcactatatataatattatcgataaacaatggcaatcaaaattttgggagatgaacatctctcccttcaaaggatcataacttacatttctaacaccaacaggcatcattttgctttaagcatgaacttattcctaataattttaaaataacacaaaatagtacatggaaaattcccacggtacgtccatttgtagctgaaaacgttgttcgatactcaagctcagcgaactggctgattctctatagtatgtatctggttcatatcatcagaccaatgttgtaatgtcttcagccttagaacatctctgatgctgcatgggtgagaggaaatatactttctacctcattgtggatgaaacgaatgccactggcatcttatatgtctactacttgaggaatgatggctttgcccaaataaacttgttgcatc

SEQ ID NO: 41516 - DNA, 424 bp, Glycine max
  Clone ID: jC-gmro02910015g05d1
ggggaaacaaaaaagggggcccaaattttatttccaaacattcatgaattatgactgctttaaaacaaaataaaattttaccgaatataccatgttaaaaataattttttgccccttataacaaacttaaaaaaaaaaaaaacccagttgttttgctacaaaaaaactgatccatattttacttttaaaaaagacaacttaattgaagggccgggcaaaatctttgccttaaaaaacactttttttttcccaccccgttggttggacagagtcaattcccaagggaggaaccgggatttgttgtggtggtggaacaactttaccccaattttcttttgaaacaacagcaggtgcttttggaggggccccccagttgacaccaagtgctttttgaaaaggttggggaactgcatcactccatgat

SEQ ID NO: 41517 - DNA, 559 bp, Glycine max
  Clone ID: jC-gmro02910015g06d1
cgttgatctgcagagactcattactattagttcttaaataacaatagacagcagagttacatcccgaataagacaaccttggagagaccaataaagagggaaaaacaaattataagacacaactacaacaagagaaaaccctcaatttcatccctgaagtattactctctcctaaatggttagtaagaaaattatacaagtattctctcacattagaaatcataataagtaatccttcaagtattgtaaaatctatcaaattggtccctaaaggtttgtaaaatatactaattcaagcactaaactgatggatgctcaatacttagtggattactaatataattttattacttttagagagtaaataggagagaatgcaatacttcggatactaaattgatggttttattcaatgcaacaatatccaaaatcttctaatcattcttaggtatagcttatgtttccctcacggccaatctccgcttgcttcatgctccaagcattcagttttgagaccaccacactctggctttcattggtaaatgcataaagatgggca

SEQ ID NO: 41518 - DNA, 495 bp, Glycine max
  unsure (1)..(495): unsure at all n locations
  Clone ID: jC-gmro02910015g09d1
aagttaggccaacatctagcaagaacaattcacgagctaaataaaagtgacataaaatcatgtctccttagaaagggtattctttgcagcctcagcagccgttttctttgcatcaatctcagacacaatggcatcaattattagcttcagtgattacagccaatacctagcaagaacaatgctcgcataacacaaaacagaaaattatgtctccttaggaggggctttcttagcagcctctgcagctgccttctccgcttcgatctcagcaacgatggcatcaatttcggcttcctccagttgacgcagaccctgctccttagtcatcaccgcaacttctatgttcttccctccactctcaacaacttcaagcaatgcgcgaatagccaacttgacagtcttctggccagaagtgtccttatagttcttctccaggaactnccgaatcgaattcgagttccttcccgtggcgttcgcctttcacgccgagaacgt

SEQ ID NO: 41519 - DNA, 534 bp, Glycine max
  Clone ID: jC-gmro02910015g11d1
gcatgtatggtaaataaaattcattccttggtgaaaaaatgacaaataacatgaattagaagcgcatttttatccaccaaattattttggctcagactaagcaaacctaaacaaataaaggactcacgaaatatataactataaaatctcacaaaacaatctatgcaaacaaaatcacactgtctctacttcatgtctaaggctctaatttaaccactttttgtttttggtacatcttcatagctgcccttaagcctgtgtaatgcaattctagtaataacagcactttgcctgtgatgatttgtatcttcttgatgatggatgacaatgaaattttggaaaggactttttttttctttccgaattgaaaattatttgagctaaactagctgtagatgatttggtacagagtttgttgcttgaagaaatcagcctcttttgatgtattttttttaggagaaactagaaaaatatggacacaacattgatgaaacttaagtaacttgagaaatttggctcaacgaggtttacacg

SEQ ID NO: 41520 - DNA, 523 bp, Glycine max
  Clone ID: jC-gmro02910015g12d1
aacagaaccaactgaaaatacacctacaattcataatatcgtcaatcaatttaaactaaattgggtcaccatataacatatggcccaatgataattatcattaaaacagggctacattcacgcattaattttacataaaacatggatacacaagattgccatgtgtcacatttgaaatttatttacagcaaagcagccaagcctgggtagtctggtatttataccaaacaatcgtttgcagtcaccttagggaaaaagcaacacaagatggtctcagaagatgagctttgaaatttatcaaccttgcagccatttgcagtctccctggatagatcacttgaaaattcttgaccaaaaatgtacagttgaagcaagcaaataccacaaatttgcaggttaatgaatgtatacaaggaatcttcttgatcagaatcaaaccatattgggcattcatttggcagaagatatgcgctgtacagatgaaatccagctatcttaaaggccaattttattactacccttg

SEQ ID NO: 41521 - DNA, 527 bp, Glycine max
  unsure (1)..(527): unsure at all n locations
  Clone ID: jC-gmro02910015h02d1
ggtagttggaaatctttttatttacaaatctaaacagatacatacactgggagttttatatgggaaaaaattagagtgaaaacatgtcaactgtggatccacgagtgtagtttctataaatctgtgattataaacatggtataggtcagtccgtgcaatgtagtccattaaaaggaatcattcttctgtcattaaaaggaaccattcttctgttatgcgtctcttcccaccaggtcagagccactagttgtcgaggattctattgatttgtccaagataatcccttctttaatctcatctgaagctgccagctgttctaccgtcctcccaccctcaagacaaaccatgagatcaccaagctgcatttccaggtccgctactctatcacccatcagtctcgtggtttttttctccctctcttcaatcgcaagtatcttagttttccaaatgtcctcatttttcacaagattctcattaagatcatccagaaatttcttctctttcttacatctgncaatcttggactg

SEQ ID NO: 41522 - DNA, 557 bp, Glycine max
  unsure (1)..(557): unsure at all n locations
  Clone ID: jC-gmro02910015h03d1
accaaagcattcaattttcatatacttgaaatctgccaagaactgtaaactaaataacattaccagccaaaacctaaaggtaaatttatcacgcagttataactgcattatccaaacaaaagataaaccaagcagaaattatagaacctctactaccataaattgcactactgttgagcacattgcactcggtgaccagatggctcatcatcatcttcgtcgtatgcctcgcggtgttgctgttgctgctttcgtctcatctcctccttaaagttgacatcatgcaaagtggtctcctcacaatcatccagctccatatctgagacgtgcttgctgctcttctgaggcaacaccttttccaataactggcattggtcaggggaaagaaaccctgagtcggggaaatcaacattaaattggatgtaaaggcgacccttcatgaatggcctattgtgttgnggcattccctcatcatttaatgctttatattgacctggcttgatgacttccccaggatttgatttgatcaatagttgcctaccatcaagatgtttgac

SEQ ID NO: 41523 - DNA, 530 bp, Glycine max
  Clone ID: jC-gmro02910015h05d1
aaaggaatcatcataaattattatttgaaatttgaagacactaaactgaaggtgatgatttacaaagaactcaagctaacaaaaccagctacggtttcaagttacagttcaagcaaggatgatgatgatgatgaaaatgttacaagtaaacaacaaccattcttttggcagaagtgtacacaaagtaaaaagagagactcacacttaagacgtactctacaaccaattatatccttcttctttcggttcttttctttttcttttcatttcaattagtctgtccactctcaacacctaaaccatacaagacaccagcatatttctccgtggagccactgaagaacgcatccctcaactttctaaatgtacaagaagtgagtaaactatcagacccagcctgatggcacacgccaaccctttcaacctccaacaactccgcaagcttgttcaaccctccgtggaggctgttgcagaacttcatcaggtgcttgatgtcatacaccatcggaaaatacatcttgatcagatcg

SEQ ID NO: 41524 - DNA, 539 bp, Glycine max
  Clone ID: jC-gmro02910015h06d1
gacaaaatggctttcgttactttgctacctggggaacatataaaagtaaaagaactatataaattaatccagctgaggaacccaaaaattcagatctgggccaaaacaaataggaaaaactgagtaaaaaaaatctccctcatttgctattacgctgctgtggcagaggtgggggctcttaactcgattttctatcctttctttccgcaatacccaaacttaacatacttttgaaccctttattttctccacaaaagaaaattcgaccagaaccttaaagaattatgttttaggtcttccttattcttcaattcatgaggctccgagcttctctttgttaagaacaaaggaaagaaaggaaaagtactgaatgcaacagcacaacgcaggacacacacatcattggtgaattccccaaaccaaagtccagaacccataaaatgtcaatctctactattatctgtcctcatgattggacagccaacctttgcagatgctcaaagaaaacttgaaggctcacatcatcagtaaagattaca

SEQ ID NO: 41525 - DNA, 328 bp, Glycine max
  Clone ID: jC-gmro02910015h09d1
aggggggaaattaaaggccttttattaatgggacccaattgagttcaacacaaaccgaacttattttcaagggacattattacagaccccttaaacattaaagttttttaaaagttttgggaacacattcaacatttcccaacgggcttaaaaccccccacggggaccggggacaaggtgaaggggtgattccttttggatgttgtaaccaacgaggggcctttcatccttgagctgtttgcccgcaaaaaaaaacctttgttggtcccgggggaagccctccttggcctgaaaattggccttcacaatgtcaaaggggttaaaactt

SEQ ID NO: 41526 - DNA, 553 bp, Glycine max
  Clone ID: jC-gmro02910015h10d1
actcaatatgcaaatatttataaagaatgcaaaaacatcaatgtgaacaggacaacatacagaactaagtaaagcatgaacaagactgacaaaattaaattgaagatcctacacaaatggaagaaccacccgataggtttacagagaattacctgttgaaatcatttgcgtttcagcatttacttaagtaaaaactgtaactcagccaattgctcaaacgcaacatgatgaaactcatagcagcaacatccaggttcagttgacctttatatagaagctttacctaaccatgacaatttcttcaattacacaagagaaaatcaacccagcataactgtatctcaaagctccaacagatttcaatgagaataacctgcatttgttttggatttaacatacccaccataccacaaaacatgagtaaacacaatggagcctatcgatggccacatcaaataatgatgcttgaactaaacaagattatacaacaaaattggccacatcaactatagaatctagatatgaaagactgatgaggagattaacttaaata

SEQ ID NO: 41527 - DNA, 532 bp, Glycine max
  Clone ID: jC-gmro02910015h12d1
gcagctataatggagcattttattttcagccactcaattttgagttgaatgacatttcattttcaagtcataatcggagcatttttatggaacagcctctcaattttgagtacagtgatgatcatcaaagcaataaaaaccagcacggagaccatacatataaccagcattaaccaagaggccatgccactttccacctcttgagcatattcagcacaagctagtccaaggaaggttaaagggaatgaatacgcccaccatgtaacgtttaacctcttcatggatttcttgaacatggctggcctgcaagcctgagacataaacaggaataaagacagaaagaggagcatctttgatggggtgacaaaagcacctgtgatggatttccaggctagacttgctatgcttggtgcagcaaaaaacaacaagtaagttggccttagcactgtggggaactggctgccacttgtcagacgctgatacagcgttacaaatataattagataatataccaaaccgagtgagaacatta

SEQ ID NO: 41528 - DNA, 460 bp, Glycine max
  Clone ID: jC-gmro02910016a03d1
aattcaataataatttctcaatcgaattaaatgaataacacaatagttcatcatcttgttggttcccttgcgatttacataagccagcatcgggaactttatttatcgcaacactccaattaacgcatacaattaaaattccaccaaaaaggaaggaataacgatcggaagttaacccttcatgcacgtacaaattaatcagaatcacacactgatgaatagaatttgaaaaataaaaattaaaaatggaaaagcacaactagagcaaacccgaagcagaagaaggatataagatgatatgtgatagtataagcttaggcacattggaaatcacgtgggactttccttgagcaaactttgagaagcaagctgaatgagataggaaggttgagggtgctgccgaaaaagtttgctttgagggcagtgcataggcacactgcagcttcaaggtcaacgagac

SEQ ID NO: 41529 - DNA, 538 bp, Glycine max
  Clone ID: jC-gmro02910016a04d1
gggacaaaattctgataaaatttccattgcatcaacacagtgacattgcatagccaaacaataaattgtgagtatagggagaaaaaaaaaaacgaacagtttaggtattgatgagatggcattagacattgaatggagtagtagtagtagtagtcatgaaacacgcaaattattcatccacacccagcaagacatgcactgaagggagtgattaacttaacaacactcttaagcttgaggcttctctgacttgagtggcttcacaacttcccaggtgaagtctgcatcatccgttccaaagggtccataagcagctgtcttgaggaacctatgaccacccgtcttaaggtccaagttaatggtgatcattgcaggtctgaaggcgaaattctccttcacaatttggataatctgattggaaggaatcttgcctagttgcataagtgttcacaaacactgactagggctcagggacaccaatggcttaggaaacttgcacaatgcaccttctagcatgccatttgccacgacactcttt

SEQ ID NO: 41530 - DNA, 525 bp, Glycine max
  Clone ID: jC-gmro02910016a05d1
gtgaatctacaattgtcattcagtacatataaagtggaaaaaaacagaccatttccaaggtaggaactggagcttataatacaaaacaagaagagaaatttcatattgagagacacttgggttttgataatgtggacattccagtgaaaacaaaccaaggcctgagttaatgctcattggagtgcacaacaagcgcacctttacatgtaactttttattttcacttatagaatagggaccccaaaagcactaactagcacaaattaaaggccactagtaacaactttttgtagtgaccatgctctcttgacaaaggtaacacagctgaaagccacaggttggtctctaccaccccccaacttcattacttcacctcatttccatgtccactatggcaaaatcacattttccaaattttttttcaaggttcttcagccagctttgttgaacagtatgcaacagcctctgcaacagtgaggaagatcttgtcctcaccagcaaagtagcaaagtttgatgtgtggag

SEQ ID NO: 41531 - DNA, 557 bp, Glycine max
  Clone ID: jC-gmro02910016a06d1
attggctaatatcttttatatatatatatatataaataacaacaacaaagattgaacatatgtccttagataattggtaaataatgttcgagcatgatactattttttcaagcaacaagcaaggataatagaagaacaatttgagcaacactcgataagtgtgtttacttataaaattccataacccagaagccagagacactgcaaacgattttgatgccactgaatccagaacttaatgccaattccatgaattcatgttgggttctctcttttcctcctgagttttgagtcatcattaagaggtcagcttggaaaccactcttagcagtaactgtgctctcgggcaaaatgggaagaattaagtccacaacaatcacttttccatcactaggaatagctttatgacaattcttcaacaacttcaagcattggtcatcactccaatcgtgaagtatccacttcataaaaatgggcgtctccgtgggaacactctcaaacatatctgcttctacatgttcgataccggggtatgtaggagcatgctctatgacatg

SEQ ID NO: 41532 - DNA, 515 bp, Glycine max
  unsure (1)..(515): unsure at all n locations
  Clone ID: jC-gmro02910016a08d1
caaactcctggttgaaaggaataatatcaccttggtattggatatacaacatttcctgtacactgaagacaaccaaaactattcacactggtcttcagtcaaaatgtatatctatatatttactatagtaatccttgctgcaaaatttgtacttaagctaagcctttggctattgcaatcttctaggcatcacaggatgactgcaggataggctctgttgtaatactttagccaaagcgttggaagttgaaaggatgtgtatgtacaaatagcaagttgctcttcctatagagggatccagcccttgattagtcccgtctcagtaccacaaaaaattatgtcattggctgcgaggatgcttgttatcttgcttccagctgatattctccccaactttttcggtgcctccctcaaccatatctgaatgttgttcggtgaagagctggagattaggtacaagaagtcttctaccacttccatgtccaccacattatctnctttgtccgtaagaaatg

SEQ ID NO: 41533 - DNA, 340 bp, Glycine max
  Clone ID: jC-gmro02910016a09d1
gatactacttcaataatcattaatatattttattacataaatatcattcaattgtttatatagtggaacttgtaaggacaaatctaaaactaaacaaaaaagtaagaaataaatattatattgaggtacttatttatttaacatttatctatatttttttccaataaaattttggcaaaaggagggacatgcagaaaaaattgacgcggcctgctgtttcatggataaaccgaatttggcaaaggaatcagcagcagcattgtacggtatgtaaaacaagtatgaactatttgtagcagaagttagagctttcaacttttgagagagtgggaaacaatgc

SEQ ID NO: 41534 - DNA, 458 bp, Glycine max
  Clone ID: jC-gmro02910016a10d1
gatcaatgatcatgcctttattatcaacgaagtccagttttttggcctgctttgttaggacgtgaattccatatgcattaaaactttagaccataaactttatattctatatatagacttgccccgttacataaaatactttagtatacaaaaattggcctatcacttcacttacgaaaagaaaacccccacaaaccagaattctactattagggacacttggttccattttttttccccttaggagcaatgcagggggaccaattttgggccccacatggaaatcatagatacactttttgcaaagtcaacagggagctgaaaagaaagaaagaaggcccaccagcggggcattgatatatgtagggggctcaaactgctgaaagaaaggcctggaatcagggaaggaatctgggttattggtgggcccacccaccacgggcccaaccaacacattt

SEQ ID NO: 41535 - DNA, 565 bp, Glycine max
  unsure (1)..(565): unsure at all n locations
  Clone ID: jC-gmro02910016a11d1
atcttcaaatggtaatcacagtaattactaattagcatccttggctcaacaagttaatacgttctgcaggtattcagttaaagacaagtaagaaacaagttccgggaaacaagttgtgggaaacaagtctgatatccttctaacaaattaatcaacctcctcgcatatgtgcaccaagctcgccaaactgatcatcagcctccactgtatcttcagatagcctcacagcatccagcttctgcttgagaatttctatggcatttagaaccaattgagaagctttaaccgctccagtagactccacagtgaatatgaagctatcctgcctcgcaatgatttctacaagcccaggcttgcccatagcttctgctttcttaagcacctcatcatcatatgtgtatgcctcagcatcaaccaccatcacctgttgtgtcactggatcaatttcaaagacacgggttggactactgtcaacccattctcttttctctttcagagtcaaggtttccatcaaatcctcaattatatgaatctncggttcatacatgaaagtgacagttgcagc

SEQ ID NO: 41536 - DNA, 553 bp, Glycine max
  unsure (1)..(553): unsure at all n locations
  Clone ID: jC-gmro02910016a12d1
cacagggcaaatttatcagcttacaagagttaactttggttaagtgggcggctcaagattgtattatacaacttcaaaataaattatctaatgtatcttgcatatataataataacaagaaacttgtagacagactgatctagaaacttctgaaaggagggaatacacagaagttggacattaattaccaaaaactgcaggtcaaatgctgctttaatcagttctgatgagcagatagagcgaaattggagacattagtgtctattgcccaatagaattctcatgtagtaatacatattctcgactactgttaccaaatttaatggtgtccttttccttaagttcgtaatatcgttgaggttcaatgggactatcanttatgaaagttttgtttgtgcttccaaggtccataacgtaaggccttacttgctttaataatgtaccatcaggttgctccttttcaacttgccggaattgaataacagcatgttgcttgctgcaagaggaatgatctgtagggatatcagcaaccctttttccctttcaaaagata

SEQ ID NO: 41537 - DNA, 544 bp, Glycine max
  Clone ID: jC-gmro02910016b02d1
aagtctataaatcagcataatttcgtattggaacataagaatcagttgcatacttgcattgtctcattttgcggcagctatctctctgtaatatcttataatggaaacatgggtacaggggagggaaaaacaccctttggtgcatgcagctaaactcgttatttctgataaaggaaacagaaaataaaagtggaaccaaagagaagacaaaaactcagatttagccagtgttttgcaagccagcagcaatacccttcatggtgagaatgagggtgtcttccaaaccaggtgcatattcacttgttgggttaagtgttataagttcatcagcaggtttacttatctctatagactctttggagatgtgagggcgcagcttcacattatagttcggatcacggatacgtttcaacgtgtaggcttggcacacgtttagggtagtaatataagaatcacgcaagcgcagtctttgcttcaagtatggatctccttcaagaagatccctatggccagccacctgaaggaggagttccttggtttcttc

SEQ ID NO: 41538 - DNA, 521 bp, Glycine max
  Clone ID: jC-gmro02910016b03d1
gcacaaaactggtaaaattccagatcaataaggattgcggcgaagccgcaaagatacaacattcattagggaaaacaggagtggggaaaaataaggggggaggggttgaggaagaattaattgctcacagagcatgctaagacacctaaatattccacacacagttattgaaacaacccaatatagagaaaatttttctttggtgtattataatataaagcagaaccaaatgatttggaagattctactttcttataccattcacttggcttgttcgatgcggatgagttttgctgcggcaaccatgtttgtgagggctggcttcacctcagtgtacttacgggtcttgagcccacagtcagggttcacccacaagatgttcttctcgagcactgccagtatcttgttgattctgtcagaaatttcttcagttggtggaattcttggtgagtggatgtcatagacaccatggccaattccagcaccatacttcacaccttcgtggaagactgacagaagct

SEQ ID NO: 41539 - DNA, 500 bp, Glycine max
  Clone ID: jC-gmro02910016b04d1
aaattagaatgattattttggcacaagcaatacagataaacatcaaatgttttacaacctagtgtttaaatacaaagaagcaaggaagaagcaactttatgctctcaatggaagaatcatagaactctagtgttgtaggaaccacaactagggcatttgtggtagagccagtggaagggggtctctcctttcttttcacaatcattacataataaaacctgagtttgactagaaatctcatcagaaattctctcttcagccaacaacgcatctaacatcctaaaatatacctgcatgtcttcaagtgacttgctacatattgggcaggtataattaaagcaggtatattcctgaaaacatgttgagtgcattacatgaccacatgggagggctgttaccggagagcaggatgtgaagatatattcatgacaaattggacagttgtcctctaaatgtttctcctgcatgtatgtgtcataagagaacgagacatacaagca

SEQ ID NO: 41540 - DNA, 585 bp, Glycine max
  unsure (1)..(585): unsure at all n locations
  Clone ID: jC-gmro02910016b07d1
acagctaaaagacaattatccaaccacgagctgttaattttacatcccatcatcaatggagcatttataggataatctgatagagaaattcatatatccttaccattattaccatgcctgacaagacgtatgtacatttgctaactgtaattgctattaagatacacgatgtctgtctgagaaattatggtccagatatccacagccacaactacatcctctataaacttatatatagcgagggataggaaaacctaagaatcacggaaaattggttgcggcatccacttgagatgcaaattcaaaaagccagatttggctccatctagcacaaaacgttctttgtattccccttccagtattaccctggtaagcgtcaatatgcatctgcccatatagtcctttccgaatgtgtcgtggtcccaaacttcaacaattagcatatcatgtaatccatcctcaacaacaaagtcaaatgtttgattccaaacaggattcaagctgtcattcacaaccctggttttggtttttgtttctgcttttttcagggtagaacaacanaaggatcagattttcccatgaaat

SEQ ID NO: 41541 - DNA, 612 bp, Glycine max
  Clone ID: jC-gmro02910016b08d1
cgggcatcgtaacatgaaatcatttatttatttcttgactggatatgaaatttactatttgaagattgcaattttgcaggtgaatattcaatataatgaggtgcagtctgaatccttgtataaaagaaagaagaactaaaattatttgatacattgctcgctcgccagaataattatctatcaatctcctcaaaaccttggcttgaattcaaatggttcaccatctaaccttggcagggaaatacttctcaatgagtgacacatagtatggcttaactttctccacatcaactagaactttgctcttgctgtagagatcatatttgttaaaaattttgagccacttcaaattctcaacgtcttcttcattcatgaagtgagtatatgcaccttccttgtgtaatggatagaaagaatgatatctgataatgaacaatcctgcagatggcaaagtggtgtcatttgccttggcaaccatatacatgtaatcatcatgtccccatgacatcactatgttgtctaatccacacccttttgtgagatcccatttttagtgctataagcagggcatttgtaatcccggttgtccttgaaatacttatgatgaacatt

SEQ ID NO: 41542 - DNA, 561 bp, Glycine max
  Clone ID: jC-gmro02910016b09d1
aatattataaatacatttagattgattcattttattaaataaaacgagagtaccaaacatacaaatgtttaaattataatttttttctctaaaagcttaaaaaattaattcagacttaaacgatagatcagtttaacaagtaaaaagtcattgacataaatatatgacttattcgtccaattgcagaggtaaaatcacgggtctattaaacagtaaatatcgaaacaagtaaaatttgatccgaattgaaggctagtttagttgttggaagcggcagcattagcaatatcaatgacgaaacggtagcgcacatcattcttagcaaggcgctccatagcctcgttgattctgtctggtgtgattaattcaatgtcactcgttatattgtactttgcacaaaccttcaacatttcctgcgtctcttttattccccctatgatcccacctttcactgatctcttgccaaatatcaatgggaaagctggcaattgtaagggcttgtctggtgcacccacgagatataatgtcccgttgactttgagcaatttcaagatgggcaac

SEQ ID NO: 41543 - DNA, 530 bp, Glycine max
  Clone ID: jC-gmro02910016b10d1
gggaaaagaattctcagcttattcatttaacatttatttaagatatcttatacattgaaactgtcatatcaaggtgccatccttacagcaagcatgtcttgttaagacaacactttgaacccatgtcagccagactaacatctcggtatatatagaactctcttcagactgcaaaatcgcattattttgtgcagcctcatgtgctaggatagctttctagccaaagtttatcccctgagctaatggtagttcacttccataattgatggtacatgtagaacgccgcatgtattgcttccatgagtcacttcccgcttcacggccaccacctgtcgccttttctccaccaaaggcaccaccaatttcagctccatttgtaggtatgtttgcattcactataccacaatcactacctcgtggcccgatccatttgaatatagttccaggtctttgggtaaagattgaactacttaatccttgaggtacagaattgttcaaggcaattgcttcttctagagtctgaaatttca

SEQ ID NO: 41544 - DNA, 611 bp, Glycine max
  Clone ID: jC-gmro02910016c07d1
aagagaataaaaatcttttatttatatcacagtcgtacatatgatataagtaacatagggctaacacataaagagacacataaaaagggttacattatgggaacacccatgatttattaacccataatataatgccaccagaccagaccagacctcccaaagcataaaatatctaagacctaaactattacatgggaagaaaaatgcattaactgctttttgagtcaagggactttcacatgaccctctttaatgacacaataaaagtccgtgatacacgagtttccctcttcgcattttcactggtaccaaattgaaacctcttgctgtttttgaagagaatccattcctactccttgtatatcctccttgaaatcaaaggatgacaaatcacaaggggaattaaacatcaaatggatattattgttgttgtggttggtatcaaaaggagtgttcatgttcatgttcatgttcatggtggccttgaaccggtcaaattgaccttcctctcgtgcaaacaagttcccttccaacaccattccttgaccagggaaaaaactgttctgtcgttgtagctggcctgagaaggttatgattttagcagtacacag

SEQ ID NO: 41545 - DNA, 550 bp, Glycine max
  Clone ID: jC-gmro02910016c08d1
gtggatattataaacattttcactctcatcgataacaggactacacgcatacattgacatcttgccatcgatagcagcactcacatgcatacataacatagtaattaacaccatgaacatgcccttctacccaactctaacctacttgcacagtacttattgaaataaaaaataaaaaaacaaactaacaaacaagagtgacatcggaagattaaaaaacaaagcgtcttaatcctcgcatccccatgaacctgctgtggtcttgatcggctcattgaaccaatcaaccgacccatttaaagaaaaacaccttcatgaataattgtatcatctgttacagatttcttccacatagagaaggggaagaaaattcaaggcccaaattaagcgggaagcaattaaggctcctcatggtgcttgatggcagcattgcactgctttctgatctcaccctttgtgccagtgagagggtttgtctcagagagcaaagtaatggctctagaaaactccttgaagaaatagttctggctcttggccaatttcttcacat

SEQ ID NO: 41546 - DNA, 556 bp, Glycine max
  Clone ID: jC-gmro02910016c09d1
agaagaaaagttataccaaccagaggctgggcattatattatttattattattgactcattgtatgttgaatacacatgtaagtataacgaatcaactaccaaactccctaaggacgaccaaaaagaaaaagaaaaaaaaaatcctgagcaccatgtaaaagagcagttgatggccaactgcttggctgaatggctagaaactcagattgcagatgaaataccgtaaccgttacgatgagctttttgccatttccatgcaacctgcaaactcttctcaaggtcagtgtattgtgcggtccaattcagttccctgttgatcttagaagggtcactatacacctcggcataatcgccgggtcgacgtggaaggtagtctactttgatgtccacccctgtggcctttttgcaagcattcacaaactccttcactgatctaccctttccagttccaacattgtagatccctactttagcaggttgtgccttctcaagagccttcacgtgagcattaaccaaatcagttacatcaatgtagtctcgtatgcatgttccatc

SEQ ID NO: 41547 - DNA, 558 bp, Glycine max
  Clone ID: jC-gmro02910016c11d1
tcgcgattatgtctcttgctccttcccctgccttgcaatcagtctgttttgctgtgccgcaggcgtgaccatgcctcttcaagctccaattcctcatagctgagagctgactctagctagaggataataagattacaagagagaggaattgtttttgattggatccacaaaattcaagatgactccagttaatttggcaggccagtttggtgacacgacatacactaaggtgtttgttggaggcttggcctgggagactcaaaaggagacaatgaagaagtattttgagcaatttggtgagatcttggaggccgttgtcatcactgacaaagctactggaagatctaaaggctacggatttgttacttttcgtgaaccagaagctgccatgagagcttgtgtggatcctgctcctgtaatcgacggcaggagagctaactgcaaccttgcttctttgggtgtccagagatctaagccttcaaccccaaagcatggaggagcagggaggaactttagagtaatgggttctttccagacaggatttggagggggagtggg

SEQ ID NO: 41548 - DNA, 500 bp, Glycine max
  Clone ID: jC-gmro02910016c12d1
aagaatataaggatgatgcatgaatatatgtcattgatcgaccattttaccaggccaatgatcatatcatatatagccaacaagggtcgttatttaaatagcactccacatatatttattcaatccttacacattgcttttgcctctaaaatcaggtacaacacacatgtcatatcattattacatatagagaagcattgatacatatattaattaacttaagaaagccaaaccatgtaattactgaaagcacatgcacctgagagcttacttaacaagagtacatgttactaattcttcatacatgtatagctatagctgctagcttatttggatggacatgcatgccattaaacttatcctcatcagcctccttaattatgatcgagggtgacgccattaaactttttctcagcctccttatgattcatgactccatagccccgtctcttgcattatcataattcggacgttttcccccattaccgaaattgaagcgt

SEQ ID NO: 41549 - DNA, 569 bp, Glycine max
  Clone ID: jC-gmro02910016d02d1
gacgaactaattttgaatagctcaaatatttggccttttcaatcggtacaacacattaattaattatatacaagctttagctgctatgaaattaacagttaaatatgtagcgatattctacattgacaacaacccgtgtggatctgcaaacttatcaggatgcagaagatacagtatggaagcttggttacatcggaattttgtatgaaataaacagtgagattaactgagatattatgactgcaactctgtatattggccttgctaaactataggtattcatagaaacttattaatggcaaggcaagtcggatcgcggatgatatacaactgtttaggtgtcaatatccaaatcccgttctccttcggcagaggttcatcactcaagtggatgtgcatgtacttcattaaggaatgatcagatcattatgaatcagctatcatgcattttactctctcttgtccatatttaggtcctgactgcatagagttagctgctgttgcaactgcatgtattggaacttttagcaggcagcttatcagtcaaagtgattatccgagtctgaagc

SEQ ID NO: 41550 - DNA, 552 bp, Glycine max
  Clone ID: jC-gmro02910016d07d1
acttgaaattttctacgataatatcttataattgaataaagcaatactacagggtaaaaagtcagatcctatttggtgcgaagcacatacatacagcaccgctaaacaatcaccacaatcttcctgatgacatcaaggccaatacataatttaatgctccaacaaagcctcgtaaccttagctgaattgattgtacaccaatcagctaagtctaaccttactctctccacacgatcaaaaaatgaaaagggaaacaaaaaaacttaggctccaccacagaaaataaaatggagcatatgccactgtttaagttaataacaatacattcctttttcatggatatctttcttaaatattatcttctctgatccactgtcttcatcatctaattagatcacgtaacttgccttttgacaaacttgattgtgcaagctgagccaggaaaccttcattcatatactcgcttccgcttcaaagtgttggagctatggaaacaaaaccaatgaggaaaagtactgataggtcttaaaatcatatagatccttaattgac

SEQ ID NO: 41551 - DNA, 604 bp, Glycine max
  Clone ID: jC-gmro02910016d08d1
agaaaagtactgctttatgatcaaataagacaaacttttgagtataaaaaacataacgaaattcagtatcactcatttcatgaaagatgccatcttgaaatcattccctaataccatgaaagtgctccagctcaaataaactaaaactatcattatcagtattgtccaaactgcgtttgttgatgataaccaactagcttctttaggagagggatgagaccaatcaaagcaatttgaagctgttctgaactatttaatcgaatacttatttgccctgcccctcgattattcaaatttgcccgggcaacaaggtttgtatgtcgtcctactgggatctgagattgcacattgcacccaacagcaagatctccatgccaatccataacagaaaggccaagcgtagttaagaaacgaccaagaggataatccttatctctcagttgggcctccaaactgccaccataagcaatgtcgccccgccctgtcattgcaccaccactgacaacatgcttgaatcgcttactagcaaccaatttgtcttcaatcttcaacccagatgataaggcatcaccagtaaagttaatgagagaccagcagttgctta

SEQ ID NO: 41552 - DNA, 528 bp, Glycine max
  Clone ID: jC-gmro02910016d11d1
actaacaaaaactagcagaatgagaaggtttacttatttgcaaaccatttaagttcctaaacatagattacatcaaggttttatacaaatcttgagataatatctgtcatgaaaagcttaatttaagttcctaaacataaattactaagatgattacatatggtctcatttcatttcagatagaaatagcaaagcctaaatcatccgcagctgtgttaagatattcaatagacaatccatttgaaagccggctgtgagcttcccatgtcaagcagttttctacgtcagctcgccagtcaatgacatcaaaatttaagtactgatcatggatgccattcttttgcagtggcttaggactcgatccaattgaactagtatgcaaaatgtcacgaataaccgaactgctcagagcacggacatgtgcacttggatgagaaaggcatctgattgtagctggtaggcgacactttaacaggtttgaaagcccatctgccactccaagtccagattctcccaactcaatcactg

SEQ ID NO: 41553 - DNA, 436 bp, Glycine max
  Clone ID: jC-gmro02910016d12d1
gcaaactgaaaagggtaactatgttgattaatctttcaagcattcaccaaaaaattcgcagtttatcagatgcaatgtatgcaagaataccacagcatgaggcccacattaatgaaagcacaccgaattgtaacagctgggagaaataaattactacagaaagtggagatagcaccggcaacttaaaatcatattttgcccagggcacaagattactccgtcaatgcttcaaaaaacattctcccacaaacccgataaataatcttgtatgttttcatccgcatcctggtgagacaggattatttaacacgcccttccatcttcctatcttcgagaagggtacacagcaccagttgccctggtctgctgtttagaagcaaagcttgagactagcctcccatttgctgagcctgaaatttgggcactggtcatactt

SEQ ID NO: 41554 - DNA, 417 bp, Glycine max
  Clone ID: jC-gmro02910016e05d1
agaataaacctggggcatacccattcacattccctaaaatgcctttactttcaacaaacttgacttacaagatgggggttgctggaaaagcccatggaattcccaaggggtaccttttactttcaaaaaccccaggggcttaaaacctggctgaatttttcaaaaaagttccccccccctttggaaaaaataatcccaaaaatattctaaaatttagtagatggccccgcccctttttaagaattttttaaaaacatttaaccctttaattttaacctttccgataccggggggggggcaaatgataataaaagggattggcctcttaaagcttgggaggaacagggttttttggggggcccactttctctttctccctttccccttttggggggcccactgggactattttagggg

SEQ ID NO: 41555 - DNA, 368 bp, Glycine max
  Clone ID: jC-gmro02910016e07d1
acaaaaaatataaaatacaattgaggggtccatacaatatctgacatgtacttatacttgacacaattacaacacgacatgacgtgaccactatttagaagtgtccctacttctcaatattattctgaaaaaaaaattaggacatcttttgtacatccttgggccaaagatcttaccatttccaaagtagctagacttacatctattttttcatttcaattcaagagttctcatatgtttccaggccccttggagactccaaaaaaaatggacaaattgcactcttaaatttgtaaatatacaactcattgtacatatcaatatggtgccgatactcttcaactgcttttactttattccttttcttc

SEQ ID NO: 41556 - DNA, 455 bp, Glycine max
  Clone ID: jC-gmro02910016e09d1
aaaaaagcccactggatattcatcaaagcatcatcaaagcacactggattctaacagcacacgttcgtagaaaggggaagttccaggtcttgcacaacatacacaacacaccataatttattttatttacaatcttatggggcccaaaatgcagatgcctggactaattaaacaacaacgttagtctgataggcaggggccatagataaattgggtacccataaaagggccttgcttccaaggaaatggcaaaccgggttagttccaggatcaactcccatgagttcatgaagcatgggatgattcattccagaagtatctgagtggcaaacagcaagtgcctgagttttgggtccattaccagccaccaatggaaccatgaaagctgttgttcacggactttatggcgtaaaatactgcagttctgaaatttagcccatgacacatcactggtt

SEQ ID NO: 41557 - DNA, 391 bp, Glycine max
  Clone ID: jC-gmro02910016e12d1
ggggcaactaaattaaaattttttataaacattaagttcaccaaataaatttagcctagggccttatgtttccaattttgaaaggggagggggtctttgccaatttcaatattaatgcaatcaagggccattttttacaaaaaaaccccaacgaatttcaatttaacccttttacaaaaaacctttttaaccgcaaaggatttatcgggtgttattttccagccctcaatttttaaccaagcttaagtttaaaaggaacaatcttcatgtttcatttggaaatccacaatttttttacaaaattggttaaataatggggggcaccccacttttaaactttgttccaggattaaaattttgggaggccacctggttttttgtaagccatatt

SEQ ID NO: 41558 - DNA, 494 bp, Glycine max
  Clone ID: jC-gmro02910016f02d1
gaaccaaaaaccaatgtaaataaaatacacttgtgaattttcaaaagcatgtgtacacttgtgtatcaacaatcatgactaaaggaacaaaagacttgtacaagcactgccaaagaggcttaaaccagattcaagtattggcagcacaaaaagcttccaaaacaagcaaggttcaatatatacattttacagcatgctatctgtgagagaaggcaacctacggaagaaattgactggtgctcctggggtcttgccccgaagcatagggtgcctcattaggtaaaatccagatagaataaacaacatctttggtggtgtaacatacaaaactatagcagtcacaaggcaaaacaccatgaatatcgaagtggctctcggatcccttcaatttataagagcatgtaatctttctccctgagttgctatctgtccaacaacactttgaaccttccctgccaaacttctcaacctatcataccttcaacgaacgatat

SEQ ID NO: 41559 - DNA, 394 bp, Glycine max
  Clone ID: jC-gmro02910016f03d1
aataaaagaataatagaatatcttcctcatgttaatgctgagttcttcgcagccatcttttcatcgtgtaagggcaaaaagataaactcaaatatattacttacaatgcaagatataagataaaatgaatacaataaacatgtacatatatagcagggtgaaaaatgctgtcgacttctttctaagccaaatggttatttgaacaatgcccttattcagagatatgaccgtttgcttcttcttccctcttttcttcagagacagtcttagcaatggtaaagctgggctgatttgttgaagacagaagcctagcccacattctatcagtaattatcactttattctgtccctcagtgattctataaaagggtatgtacgtttgtcttccattgac

SEQ ID NO: 41560 - DNA, 504 bp, Glycine max
  Clone ID: jC-gmro02910016f04d1
aatcaaactccagcaagtaagatacataatgaggcggtctcagaatagcttatccggtacaatttaagcaattggtatacaaagtatgattttcaataaggaacctccgtaccaaatatttagtcacatttatttgtaacctattaaaaacttttgcgaatacgcgaatagctcccctaataaaaaaaatgccgcatgattaatcattaacaggaaaaggctatctcacttgatgtcatgaaaagatggcaacacagcaataagagggtctccataaccaacaggctctccatcctcaacaagtagtttcaacacttctccagccacatcagacttaataggaagtccagtgccaaattgatccaaataccctatgacttgcccttctttgattacatcaccctctttacagataggaggttgcttcttccctttcactggtctacctcttcggaataagcccaaccgtggagatgatactaagacataggtattggtaccaga

SEQ ID NO: 41561 - DNA, 449 bp, Glycine max
  Clone ID: jC-gmro02910016f05d1
ccagtaatagtatttaatattataagcagagattcataattcagattagccgaactttatacagaagcgaccaattaccaaacattaaaaaaaaaaaaaaggaagcaaccatgagcttaacacacccatcacaagtccaaaacacttgaacttgctgaaaggcaagacatgaccactttattctaaggatgttggtttaacacaaaacaccagagggcacgaaaaccatcacagacataatacataagtttttagctacacattaatagtttatcattattcctaattaagggctatctctgcttgaagcttgctctcccaacacctaacttgcaagtgcaggggttgcaggagcagtttggtccacatttgcagccatcgttctcagggggcacacccatttcagcaccctcaaattgagccttaacaggtgccactcccatgaccaa

SEQ ID NO: 41562 - DNA, 525 bp, Glycine max
  Clone ID: jC-gmro02910016f06d1
aaagagacataagaccttcttaatcgatccaatcttttcttacattcacctctagtcctggcactagatatttattttaataatttgatacccttaaaaataaagtgaaataaagcttagagataagttccataattatacgataaactcatctctaaatatttcactaaatatttgagtaccatctttaacatcaaacatcagatacaagctcgatcattctataattgcacatcaaacatagttcagctaaaaggcttactttattatattttttatctacgaacaactagacattgcagaggtggcttcatttccatggaaagcctaagacactccgaaagatccacgggttgcgcgggaagccatttgaagtggcgaagaagttgcgcgagccagagatgggtcgtggccaaacccaaggcccggtccggacacaccctacgttcagccccgaagggtgcaagcctcaagtccgatcccatgatagaaacatcttttttgaagaacctcttgggcttgaaa

SEQ ID NO: 41563 - DNA, 566 bp, Glycine max
  Clone ID: jC-gmro02910016f07d1
cagtggcacttttgtgctctactgacacaagacttggactggaagatttacgagtaggagacaatgaggaactcctacttctatgtcttctgtatcgtttagcagatggagatcggcttctaccacgtcttggagttgtagaaggacttctgtgacctcttggtgaaatagaacgactttttcgcctgtatgatgacaaatgatcataagcaatgaacctcagcaactaaacagctatctttagagaatataaatgcttcccaccatctagcacactaaatacaaaaacatgtacagttacctcagaaattgctaagattaaccattgtgtgctccatcttttatcacatgaagaagcaaatgtcacaatcgagcaatgaaaaaacaccctatcagcacccaccacctgttcatatccctcacttcccatgttatgggaagaaactgatcttttttattgttacaaatagcatatatcctatcttgttctctaaattatgctctatatgtggtattttgatgaagttctgcctccacatataagtgggaaatcccacaaagaaaga

SEQ ID NO: 41564 - DNA, 516 bp, Glycine max
  Clone ID: jC-gmro02910016f08d1
ccaaaaagacccttttggcctagtctctttcttataataaggtaaccaaaataaacccaaatcacaggtcaattaccgaataatccagattgagggggaaaacaaataagagtacaggggtcctggagaatgtaacaatacgtaggtctgagaaggaagaaaaagtgaaaataattatatctcacatacacggagcagctttatttctatctcaaacaaaaatagaacaagcttcagttactccttcaatgaatttgacatgaagagacaactttagcatctgacaaaattattgtcaacaataatctttcctgatgtaaaaaatgaaatgaaactggaaggcagctagttgacaacatcaagaaccagcttgcgagactttagaacggaccacctaagccgacggtaataggcagcttgaagtaatgccagtgatagaacaaatattcatttgaatcccatcagttttctctcttccatctcaggttccgcagcccaagtcaggaatgatacaat

SEQ ID NO: 41565 - DNA, 523 bp, Glycine max
  Clone ID: jC-gmro02910016f09d1
caaagttaaaaaatttcctagggtactttgaggtacatatgtacacacttaatgcatacataaattattctaaattattttcatgtatgccaatcgctccgattgggtataacactcaccaaaaatatctaattgagtttcagctgacattatgatatgaatcaataatagcatcggcaaggtattcacatttagccaacgacaatcctgccagggaaatccttccatcctttgtcatgtatacgtgccacttgtttgtcatgttgtcactctggttcttgttcaagccagtgaatgagaacatgcctatctgcttaagtatgaatgaccaatcctttccacttttgtcttttgaagtaatactatcatatagctgctgtctaacattctttatccttccagccatcatttccatctctgctttccattcattaaagagaactgggttttcaacaacatcggcaactatcctagccccgtgtaccggtggattagagtacattggtcgggcaatcctttcaac

SEQ ID NO: 41566 - DNA, 523 bp, Glycine max
  Clone ID: jC-gmro02910016f10d1
aaataatattgaaaatgtccttctttttttttttctcagattaattttgccgtgaatgatgaaattaatatactcaaggtgggttatgatcttatgcacaaatgggattattacctgaacttacattcatggcatctaaaacttaaataggtgtcggcacgttggattatgatattatgtgcatatatgacatagaagtagccatattacaagcttaatttctacagacatatataaacactcctctcatcccaaacagctggtaatctgattgttgatcttagccttttcacttaggggtgaaagcagcaaaaatggtagcatggccaggatctgcaaggtgggcaaagaggttgtcaataggaccggtggcagcgtagatgtgctggaaccatgcacccatgacagcaagcatggccagtctgccattcttgatctccttagttctcaagtccttgatcttctgaggagaacctgttcctcaccaagggggtcaaaccaaaggccaccagggttacccaca

SEQ ID NO: 41567 - DNA, 510 bp, Glycine max
  unsure (1)..(510): unsure at all n locations
  Clone ID: jC-gmro02910016f11d1
attctgtaattaatcactaactaaccaaatgattgcaatatacaaatcctgactaatgaactttattggagcaagcgcgaaattggaaaaaggtcttacctagtaacaagattattgtgaagaaaaaccaagctgtcgaacacccaaaattggatacagaaatgacagaaaggcttattttgtgttcagaaactcgatcaaaatgatgaaccaaaagattctagggaaagccgtttcaaataaaaaataataaataacccaaacattagtttagcctaaccccagagttactacacagtaacaacagagttgtgttcagtagcctatccacccttcctgtcaaccataaagcagcatcacatacatcttccttcgctaagtaaatggaattattcaccctttccattttggttggtagcaacataattacggataacttccatggccaactgatgagcattcttgntttgaagctttgctaattcatccattgcttcatatgtctcctta

SEQ ID NO: 41568 - DNA, 542 bp, Glycine max
  Clone ID: jC-gmro02910016f12d1
aatacaaatgtttctaacatttcttcaataacagcttttatcaaacctgccaacaagaagtttcttatcacagaaatacaattcaatgctaaagccaagagtatgaaagcgcccaaccattttcaagaccaaaggagctgttacaacaatgttgaaaaccagggccagaaaacctgtgggaactagaaacccttctgccgcattatcctaatctgatttcaaaaattccaacaagaataaacagcattgtcacctcactgttccttccgagctttagatctggcaggctttccaggtttaattactttaccaagaagaatcataacaacaggaacaatagttccaatgtaatacacgcttccatatgatgcaagagtttcatgcagacttaacaccatgaaaccaacacaggagtaatttagaaccaaaagtgtataagcaaaatttgtaaacaccaacacattcttaaccagagacattgtcggaggcacggcttgctgccatctgtaaatcactctggaacccagcatcattaatgctga

SEQ ID NO: 41569 - DNA, 557 bp, Glycine max
  Clone ID: jC-gmro02910016g02d1
gttccaaaatcaatatatattaaaacattaaggatttttacaattatctaatcatagcaactacgtaagagtttaaacgctgttttcgtgataacacgtttatttttccattacagaagatgacttagccattcggcaataacattatttgttttcattgtatcaactaaaataacttaacgatgagggtaccatttaatcttactccatcagaaattgcatctaatttgtgtttagatctcgggaagaaagttgcagccataagaagggaagcgggttaaagaacactaaaacttgaagatagccgcaccacttgatggcttggaagcaaatacataaaggccaagatcgttcttcttaataacgcccttgtctattctagactggtagaaacattccttcaaattaaggataaattgtggaactatgctctctttcaccaaagcaacagcacaaccaccccatccagcttcagtaagccttgccccaagagcaccattgttacgacaaatatttacaaggttcttcactccggacagctgattcatataaacgct

SEQ ID NO: 41570 - DNA, 375 bp, Glycine max
  Clone ID: jC-gmro02910016g04d1
cttcaatgaacaagaattttgacaaattatacaacgaatctttccattagattgcgttcttaaactaccaattgggtaccaaccaattcccctaacaggtattttgaagcgcacccaaggttgatggcaacagtggcatagcaatgatatcttgattgggtttccctgaagaaaagaattagctggaagaacaaattgcgttttacactgaatctactgcttgaacttgttgccgggccaagtacttttcccttctctctttccattcatcaattacaagccctttggcagcaacccgaggacctgcctccacgggaggctttttccgagccttaactgcggcatcagctttagccaattggcttttcaggtttt

SEQ ID NO: 41571 - DNA, 521 bp, Glycine max
  Clone ID: jC-gmro02910016g06d1
aaatcagaccgaactgattgcaatttttattatatataaaaaaaaaattacgacagcataactatttaattacaaggaaatttagcggggggggatgggaaggaaaatgtattaaaaaatggtgtctatcgtaagtttccttttgggaggagttttctctatgatctgcttctgtaagtccataaatgaagaacccttgttagcaaatagtcttcgcaagttgatcacagaaagttcactaaagttagcaacggtaagatcagcctgccccaaatcatacgcaggatgagctccaattaatgctacggccatcattgtacaattgtgcgcagcagttactcctctaggatcatcttcaaaaaccacacacttggaagggttccgatccaacttgacagcagcagaaagaaatctatgagctattgactccattccatcctcttctgtcacaattgcctggaaatacttgctgagccccattcgctccaaagcctcttacatatttcttctatcaagacttg

SEQ ID NO: 41572 - DNA, 548 bp, Glycine max
  Clone ID: jC-gmro02910016g07d1
gaagtcatattatcttatgagcaacaagatttaaaatagaacaatttccagggaagaaatttctcctacaaatcgatttttgttgaagttgctattacaaatattttcagtaaattccactttactgaaacaatatacatatgatttcattcaattatgaaatttaattagtaaaaaaaaatattaaaatacatatagacaggaatagcacaaaattaagacctaacctatgcagaggttagccctttaggaagagattcattgtctggatcaggtgtaagaaaccttcgacaagcataaaaaacagctgaatggaaggcagttgggttgtcaatgaacgcaaagtgcccaccctgaggaatcctgatgatttcgcatggaaccttcatatgcttgcgagcttcttgggcaccttgataattcatccagtcttggaaaccatacatgaaagtggtgggcaccttccactctgcggcactgagaagaaggggcatcctagcaaatgctccaaatgaaaaaatatattttaagcacagctcttcactagc

SEQ ID NO: 41573 - DNA, 403 bp, Glycine max
  Clone ID: jC-gmro02910016g08d1
ccctaaatgggccgtatccaagtttttttggcccggaaaaaaaaatcccggggcccaacactcatgaaggcattcctccacaggagtaaaaataggggaataaaaagaaaaaaaaaaaagggggtagtgggggggccaagggaaagaccgtttatccgggggtaaaagggggctttgaaaacagagggcaaaggttgtaccccgagattaacgggcttatagcaagggcaccaaaagccagaaggggcaacccaattgaagcactcgccatttttgggaaaacattttttccccaattggatggccagtcataaacgcgggtagcaccaaatgatgcacccgatcccaaaagatcccccaaaacctggtccctgaaaaaatcaaagggggaacccaggggggg

SEQ ID NO: 41574 - DNA, 514 bp, Glycine max
  Clone ID: jC-gmro02910016g09d1
gtccatacaattgatcgtaatttgatgttagtaatttgtatggtcactatttacaacagcataaaagcactgtaagaattacaacaatgaaagaagggacaaagccaacatgttctctcttatgaattcaagtggtacttgaatagctatgaactatataaagagcaaattttaaacataaaatacaaagtgaaacttatcacataagaattgactaatggagatacctcatcatgaagagcgtcccccactttccttagacatcattcctttgagactcttggctaaccaaatggctggctcccttggagagaccttggctttcccaaagggcttcagaacaacttgaagttcctccaatctgttttgctgcagcaactttgcagacaactccaagagcttttcaagtgcctctgctctctgcctgaaagatttcacatcccatgtttcctttgccaccggtagtttctcttcattacaggaatgttgcatttactggcctcagcagaatcag

SEQ ID NO: 41575 - DNA, 505 bp, Glycine max
  Clone ID: jC-gmro02910016g10d1
atcatcatcattagtatcctttattaggtcccttgcaccatcaaaccaaacaacgaaataccatgaaagagccatacattttccatgatgactaagagagtatttttctttgtgttctagatctggctacaatagttgtttcttaaaaggtaattaattaacaagaatatgatatgttgtactagactagggtcttcaattccttggcagtggcagcaatagggtagtcttggcgccctctcttgcggcatttaccaattgaattctctttcccattttgacccttcaaccaaaccccaaatagtttcaaactttctccattgtcacctttgggtggtggttgttgtggttcacactcacctaccgcattttcgtcgtcatcaagatcattattaataatagcatcaaaacgcaccgcatcattgttgctggacacacacgttccttgccgaatgatgcgctctatcacatcggtgctcacgttcagcgagtctttaagaaacgc

SEQ ID NO: 41576 - DNA, 388 bp, Glycine max
  Clone ID: jC-gmro02910016g12d1
gcccttaatttttttttggtcaaaaaagtttttaaaattcaattctgggggggaaagtttccattgaaagctcccaatgttgttaaaaagaaaaggctaaaatggaattttcgcccctttattttttcaaatttgggattttaggccccccattttttaattgggacatttcatcccccattttaaaaaggtttcccttttaagcccccattttttaattaaaacggcccccacttttaaaaaaattcccaattttaggctttgggggtaatttcaaaccttggtttatttcccttggaaaacttaacctgcccggggctatttattatctaccggacaacttttttttaaatatttaattcccaacaagctttatttatttaaaaag

SEQ ID NO: 41577 - DNA, 484 bp, Glycine max
  Clone ID: jC-gmro02910016h04d1
gggataacaccaggcttattaatttacataacctcacccgagcaaaagcgggtttaacagataatggtccagtacgtgttaggaatctaacatgctggcaatgtcaaaaaaataacagcattggatggtgtaagatctaaaatacttacaaagctaggaggaggacaaaatggatacatatttggatgtacatgtaataactctatctagacaggctagttgagatacataagaataagaacgtgtctgtctcagtaaagggcagacacaagtagaagtagaagaaacaaatagcagtgccaatgtacccggcacgatgaaatcatccgagatggagcagccgaaggtttgtggggagctcttccagcaacagctggagcaactgcatgcccgttcgttctttgttgctcatctgtaggcaatgggtttgatgaagtctcatttggagaaaggggcatcctcttgcctagactcagatcctgac

SEQ ID NO: 41578 - DNA, 516 bp, Glycine max
  Clone ID: jC-gmro02910016h05d1
agaaagaaacacaaattttagtatttaataaagcaaaatgcacacatgccccaaacaaaacaagccttattcaacccaaattggtttcatatcacagaaaccaacaggatgccgccttcctccttactggtcccacccactcgaacaaaagttctacagaaataaaaatggctacaattcttctaccacaaatctgaaaagtctaacaccaaaaatcaaaaaaaggaaaattaaacaatcaaatccgattgataaaaccgatttttgtctttccctcactcacttttcagttgatcatctcaatcacttagtacctgtagtgagcaggcttgtatggaccctcaacaggcacactgatgtaatcagcctgggacttgctaagctgggtcagcttagctccaagtttgcccaagtgaagtgcagccaccttctcatcaaggtgcttgggcaaaacgtaaaccttcttctcgtacttgccggtactcttctccttccacaactcaagctgagcaatga

SEQ ID NO: 41579 - DNA, 520 bp, Glycine max
  Clone ID: jC-gmro02910016h07d1
gtgttcaatcacgtaatttgtttcaactattattttgaaagcataggacacgacaaatagtacacaatataaagccagaacaaacattggagatattatatatatatatatatatatatatatataatcgtacaatttttcattttggaagtccaaatatacagaaaaataaaaaacataaaagcatttcaataagaatatatcaactatgctccctgctttatttctttttctgcactcttttcttaatagattttttcttcttctcttattcacaccaatgaacaatgagaatttttctccctttgcactaggcaatctataaacaacttgtgtgttgtccaattattccttggcagtgctgtttctttgccctgatgatgccattagcacagcaacagccactataaacataaacaacatactccctagcagtatatatgttctttctgatgatttcctgtactctccaaacagaatcacgccccaaaaagtgcttacaagtggaagtgcctggact

SEQ ID NO: 41580 - DNA, 394 bp, Glycine max
  Clone ID: jC-gmro02910016h09d1
ctaaaacccccctttggattcttttttttaattctgggtttcttttttcgggcggggttgtggataccggggtataccccctaagtggacctccaaacttaacgggggaaaccctaaagacccaggctaaatttctccacttggaactttaatcccgctaagatggccaattttcccctcccctcctaactttgggcctccaaactcaggttccccatcagggggggatctcaatcagccttggagttatccaactccgcatttacgggtttcccccttaatttatgcaggctttctcttggggaaaggctccagctgtccaaagacttgaaattttccctggaacaacttgggactaacaatttaaactcctccctccaggggttatgggaag

SEQ ID NO: 41581 - DNA, 503 bp, Glycine max
  Clone ID: jC-gmro02910016h10d1
accatatatatatagagagagagaatacgaagcacactgatcacaggatgatgctctctttaagtagggaagcagatcttatcagtacacataggtaggttgaaattctagctctagcaatctagctagagaaggtagtacttgcacaacacacagcacatgataatttattttatacacaatctcattctcatggtgctcaagatgcatggactaattaagcaacaatgttggtctgataggcagtgtccacagataaattgggtacccataaaatggccttgcttccaaggaaatggcaaacagggttagttccaggatcaactcccataagttgatgaagcatttgatgattcattccagaagtatttgagtggcaaatagcaagtgcctgagttttggttccatcaccagccaccaatggaaccatgaaagctgttgtttcacggacttcatggcagtaaaatactgcagttctgaaatttagcctatgacacatcact

SEQ ID NO: 41582 - DNA, 409 bp, Glycine max
  Clone ID: jC-gmro02910016h12d1
cagtagcatttaataaattagtaagtagggccttgtgttgataatcgaatacaacaatagtagagttacaatatatattataaaaaagagcaaagccaaagcggaaagccatgtcagggttttcaaccattcaggccctgcctgtcaaatcaaccaccgcatccttcacaagttcttctagcagcttcccctctacttccttcaccaaaatatccatctccaatcccataagctcaacccaccctttgcccacaaccttttttctgacaacactctctaccaccaggctgatactgtccccacaatccaccatccaaacagaacttatagcactagatattaactccttcatctgtgccacaatgaggttcaccaatgggggagatgcagtttctgggacttggaccct

SEQ ID NO: 41583 - DNA, 81 bp, Glycine max
  Clone ID: jC-gmro02910017a02a1
aaaaaaaaaaaaaaaaaaaaaaaaaaaaaaaaaaaaaaaaaaaaaaaaaaaaaaaaaaaaaaaaaaaaaaaaaaaaaaaag

SEQ ID NO: 41584 - DNA, 382 bp, Glycine max
  Clone ID: jC-gmro02910017e06d1
actgtaggaacagcgggggcggggtgtgacctcaaaataaaaattactataaacctatggacaaatattactgcgtcattgattacgaccagttaaacaaaccgagaattgaattgagggcaggacgtcgctcctcacattgcaaattttttaaattttgtaccaaaatattacacttgcccttattttacaccctattaatagccctttgggaacaaccaatgaaacaaacccgaagtttccatcactactaaagagatcaccttaaatgtggctaaattcaccaggggaaatgtgatcaggaagcttttgctaaaattatagacaaccactggctggaggcgaggtattaacaaagggtgcaaggaattatgtactgagg

SEQ ID NO: 41585 - DNA, 379 bp, Glycine max
  Clone ID: jC-gmro02910019a01d1
atgaacactgcatggttcaaaattaaaaaaagaaagtgtaacacaaacccagtacacaacaagtagtggcgggcacatggcattgaatgtgcctatagcttctttatttggggtctctaatcacaccattttaagggaaaactattcatcctaatccatttagattggggtaaccataccctttggtgatgattcttctgaggccacacttgcaatatcaactttaacagatttcttggtaacaaagttacaatggtttctgatttctcctttttttccagtgagcacaccaatgttacccatcttaatcattgaagcctcaaaggcgtcaaagaaaactttctgggcactggtgaacctgttgacaatggggatggta

SEQ ID NO: 41586 - DNA, 526 bp, Glycine max
  Clone ID: jC-gmro02910019a02d1
attaaacacttggtttttactcattgcattacctgcagatgctagaaatattatgttcgctggctaaatggaatttgccacgcttgatatcgtaaaagtatattactacttccatcaaaaatttctcctgtgaaagacagaatataaaaatctaaacttacgcttccccgcaaaagaataaaaaataacaaaacaaaaatgaaacatagaatatgttgataggggacacattgaatccatcttgaactcgaatcctccgtgggccttaaccaacatcaactgtttcttcattcacgactgaagtattcatccccacgtggtcgtcacgcagttatgatcccacaccgagcagagtgaaaacactcaactcccaaagtcccttctcagcttcaccatctctttccaccccagttgccgtcacgcccaccaccattggagaacctaccattcctgccttctccacctctttcaccaaacctgtagttcccaccaagaccaccattatcaccaaatctgccaccttttg

SEQ ID NO: 41587 - DNA, 513 bp, Glycine max
  Clone ID: jC-gmro02910019a05d1
cattctgttcttacttaataattataatgggagaacacaattatttctggcagaatatagcaaatatactctccgacacattttgcgtgtctacagattctttccattgtatcatagtaaattaaataaatgtgtaagggctcaatcttcattgatacaagccctgtaatacatggggcaatattcagcacaatagcctgacttgactatgtacagtatacacagtctttgcgcatccaaattctcttatataaatctttgtttttggccaggcagtgcatgattaggccttggcaatcttttgaggtatacttgaacaaccagaagacaaggagcaccaattatgaacttcaaatattttttatatactgaacctaatatgatctaaaccacacgtatttggtaaattgctgcatcataaggtcctaaccgcataggactcacttgacagcttctttgcatttcctagacatttgttacatgatatatattgcctgtcaatgctgctccttt

SEQ ID NO: 41588 - DNA, 395 bp, Glycine max
  Clone ID: jC-gmro02910019a09d1
aagacccggggggtatttttgattttgcaaattaaattacacaattacagccgggcattaaacatgaattgggccttttccaacttaaaagccgaggataacattgggccttgacccgacacatgccccacctaaaaatcataattttacatttttacctacaaaaaacaaagacttttaatttttaaaagaaaaaaagagataaaccgttcttttttatgaaatgaaacccaaacccccaaacattgggttgatttttggtgggggggggggtccccacctggttaaacatgaaccctttgattgaatcacttggacttgaagggaaaggcccttattaccacccggtggtaaagtgcttcaaaaacttcccccataaatggtcccccccaaaa

SEQ ID NO: 41589 - DNA, 504 bp, Glycine max
  Clone ID: jC-gmro02910019a10d1
atatcaaatttttagtattattgttttcattgctagtaaacatgaggcaaggtatatcattcaaaatatagctacaatgacgaactttattcttctcttccacgcacaattatatgacgtcccaggcccttcatgaaacgatgaagtgatggtaaaaagacaaagacaacttaggagaacaaacaagacagaatctaaaggacccaattattatgcataataaagaaccacttccttagttcaaacttcaaagctttgatgtttccctcgggtgatgcacgacaatgtaattataagcatccagagtgagaaaatcatcaagcattggtgacgtgcattggcgagtgaagatcttgcaagcctccttgtacattcccttcttgaacttctctgtccccacttccttttcaatcctagccatctcttctttaacaaccctaccaaaaagttctttgttcactttcactccaagaccatccccattgagcttcactccatacttga

SEQ ID NO: 41590 - DNA, 346 bp, Glycine max
  Clone ID: jC-gmro02910019a11d1
agcatcaatttgaggtggacatatatatctacatctcgcatgccatatttggtcctttaacattaaatttctctactccttttagctaaaggagaagctttctcgttattcacataaaactcggattccatttaatttttaccaaacctaagagacacaagagccgaagattgaaaggaaaaaaaaaaaagatatttattttttggggaccctgacacttttttcatttcttttaaagccgccccaaaaaaatcccctggccccgggtttaaattcctccccatttttttttttgttttttcaaaaccttggaaaaggttttggaaaaaatggacccttttccaat

SEQ ID NO: 41591 - DNA, 433 bp, Glycine max
  Clone ID: jC-gmro02910019b01d1
agtaagaaatttacctttgtattgcatccactatttagtggtaaatctatacaggttacgttttaagtttaaagaagcactgtgaaggaactttccagatataataaccaacaaacttctagcattagttaatttaaccaaaaagggtttcctctaatagtagcctgtggaaatcatatgcagtaatactcagtaagagacattcctgtaaaaattagagccaattagaaggtgacattgtaacttattgccatcacgggtgagcactgagcaatcatgctgccgaaactgattgagacttttgttgaggtggtatgccaagccaagacttcaccatgtcgtatgtggtgaaactaattgcagctgaaggaacaatccttatataggtaatgcttacgccatgaaacagctgcttccatccttgattaccaac

SEQ ID NO: 41592 - DNA, 490 bp, Glycine max
  Clone ID: jC-gmro02910019b02d1
aaaatgaatttatttcagtgaagggtgacattaatattagggaagacagaatgacgagaaccaccgaacattaccatatatgatgaaggatatagaatgacaacaatcttaagagatgcaatgtaagatgacgggcccacttgcatttgccttactccaacagttgtgaagcatttgttagagattatgagcttacagccattcctcggctccacattttttagactgtcagccaattctgggtagagctggaacacatgcacatgcaccagtcgtaaggcagtcattgaccaaagttcttctggaagctttgacaatttatcacaggatttaatgaccagatgtcgaagtcgaggcattgcacctatctctaatctccattgtacgacaggcatattcttcatatgaagcacttgaagctgcgggaacttttccatcccaatatcaagaacctttaaccacgtaacactggaatattcatcaaaatcaa

SEQ ID NO: 41593 - DNA, 485 bp, Glycine max
  Clone ID: jC-gmro02910019b09d1
cttattgccttgaaggctcggtgcagttagtactagtacgtggcacactatgtaactctaataattcacctatgtacagaaaagatctatatgtgtctactaacccatgcttggttgagcttctgatgcattgaatgtatcaggtgaattagacccactttttctaccattttggtggtcatcattctgtgactgatctgatggcattggtgtcttaggagattaaagtggatgatgcctatgaccattggggcgaagatgatgatgacgtccgttatgatgatgaccattttacctcttactctccttaagggtttcactctcttttgcgactctcattgtattgtggtagacagctggaacagctgttacaaagggtccaattggaacatcattcaaagcctgaagtggttcgagaacattaaccacagtgctcatgaagggtctactccttggcctgtggctaaggcattggtaagccaatg

SEQ ID NO: 41594 - DNA, 446 bp, Glycine max
  Clone ID: jC-gmro02910019b10d1
gataaaaagggaagctagatggggaatttggaagaccctacggaaaatcagaaaccaagtgatcaaaatacaacaataacataccaaagccacagaactttcctttacagaatgggccactttatatgactaactacaacattactttcacgctgtggtatgtcaaggctgtcagatattccatccatggaagccgatgcaaatacattctaatgctttttagtatcccttatttgaaattgatggagcataaaacttttgcacataagcaactattggaataggtaaagaattacattaaattcataagcctgccacagaacctttatttacagaatgggccactttatatgactaacgacaacatttctttcacgctgtggtatgtcaaggctgtcaaatattccatccatggcagccaatgtagaaacattctaaagcttttt

SEQ ID NO: 41595 - DNA, 450 bp, Glycine max
  Clone ID: jC-gmro02910019c01d1
gcaccaaacaaaattcaacttaaatgttcataatatataagagtttacattaatggccactcaaaagaagacactcagttgaaagtaaaatcttaaaccttcagcctgtatactaagatgaaaaaccctaaacagcaacttaaaagccaccaaagcccaaatatttggcatgatcaagtgaagttttggccaatatttgaccaaagagtgaaaccaatggtggctgcaaccgccacaccatagcacaaccgcactaggaaatataaaaagctgttagactcaaaatttggttcatgctggagacaagtccctatctaaaagacctatccactcactaacttgacaagcaaccgaggacaagaagaatgcccttggatatagttataccacgattattagcatgcaccaaacacttgatatgaggcctaacaactaccattcacatacacc

SEQ ID NO: 41596 - DNA, 442 bp, Glycine max
  Clone ID: jC-gmro02910019c04d1
attaataatgtagcaagttaaaaaaaaaggggctcatacaattcaggagattgagcatatcctgttgtccgacagagtcacacacaacataatgtgtacatgatgttaaaaacaaattaacctataaagggtaacaatgaaattgccagttaattacaagccgttagtaatcaaactaatagaagttatctactaaacaacattgcttgttctgtcagtcagtccaacagctgatagcacacgccaaaaacaaacttgcgacaacctccaatagacctaatatggctatctcaacctcattcttacacaccaatgacaattaccacccaaatgtagaagttagcatgctcacaatggcagataaaaattatactagtatttactatgctgctagaattctatattactatgccgtattcgagggccaagtagacctttttcc

SEQ ID NO: 41597 - DNA, 561 bp, Glycine max
  Clone ID: jC-gmro02910019c07d1
attaaaataattattcaaaatttagcaaaagaaaatatgttaggcaaagattgccccattatccaagattgtcactacactaatgacttggtttttcaattctgtatccatcaagaacacaatatatcattgcaatttactaatgcagaacagctacagttactcagctgcttaatgaattttattgactaaatgcaccaaacgcaaaatgttcttttttgttttgtttcctttcagagacagaaggggactactactctgcaaatcctgcactagagaatctcaatagacttcaacatgccattgtttgttcttcttaagttgtgaaagcttctcttcccaactttctcctctttgctcagcaaccttctttagtgtatcttggatcccaggcatcatccctttcagaccacagaaataaatgtgggccccattatccaggagtttgaagatttcatcacttgactcctctatcttatcctgaacatacattttgcccccatttttggtcttttggtctctgctgagggctcgatcatagcggaaattgtccgaatagtc

SEQ ID NO: 41598 - DNA, 490 bp, Glycine max
  Clone ID: jC-gmro02910019c09d1
atgaacggtatttatacctgtctatgaatgcatgagttgcagcgggcaagcaaatatctctgcatcgtcacaataatgcacgtaacataagcccaataatcataatacatgtacttgtgcacgtgagcatcactgcttaaaaaataatgcaagtctcgctctgcaataaaaatatgaatgtcgcaacccacaaatgaagattctggtaggatgcatccattcttctataggaattaaacattgcttctgattaagcatcttctgatctttggacacacccaagctagtcaatcactcttatcttgttgtaaaccaacattttgtaggtaatgttctgcatccaaagctgccatgcatccagtgccagcagcagtaatagcttgcctatacttcttgtcctgaacatccccagcagcaaacactccctcaacactggtcttcgtcgtccccggcttcgtcactatatattcatcagaatccaattcaagct

SEQ ID NO: 41599 - DNA, 496 bp, Glycine max
  Clone ID: jC-gmro02910019c10d1
aaaaataaaatgacttatattttggtctgggttttggaacttgttgactcggtaataaactcgagagtctaccgaatttacttagaatttataaagtttgctcagaatctactaaaaacagaatttactcaaaagtcaattcgcagagaacaagtcaactcggaagaatttgatatccatgcctttagggacacttcctacttcgctggtcgctcgctcctcaaactaatatcttcatcccatttacttttgaatagcttaggctgggttgtttgttccttaactcaggtgtgagggttcgtccatcttccacagtttgattgccttgggaaaaagtttgcgtaagggatgatagttttctcaactctacctccatataaatagaatctgatggctcccctttgaatagaaggaaaaagtatgtcctgtgaaccaatgaaacatttcacgcatcccagaattcaatgatctttctttgtagcccctggaattttga

SEQ ID NO: 41600 - DNA, 476 bp, Glycine max
  Clone ID: jC-gmro02910019d06d1
aaaaagttggttaaaataaatgtatatatataccaatgaaatgaagaaaaagaaaaaccaaatatgtataagacatatggagctaaccttgccaagggtttggggttaggttatgttgggaggagttgatgcaactttccataccagcaatgttgaggatatcagtgtgagagagaggtctaagacccaagaaatctcttgtcagggcttcattattgtttcctctggcaccgtcatcggcggtggttgttttcgtcatggcatcgccaccagcaccaccaaaagtgtcctcaaaagaagtcccttcaaagggtgaagagacagagttgatgatatggtgaaggagtgaaggagaaacaccattaccaacagcaggaacagttttattcccgaaaggtaccaagccatggagagtgggggtcatctggtggtcacgtgaggacaaattcaaagcggcattggcagacacgtgagcc

SEQ ID NO: 41601 - DNA, 565 bp, Glycine max
  Clone ID: jC-gmro02910019d09d1
catacaatattatgcattttcataattctcaatttttatcatgtatatgtaatgaggctttcaccatcgtccagcccccaagactggacaaaagaaagtttttgttttacaaaagaaaaaactgactaataattttccttccacaaatcatcagcatgttcagccatagtgtgcaaaacttaatggtttaaccgtttaatttaaacaagctgcactacagcaatgacccttagggcaccgttttgaagaagatcagcaagctcatcaaataacagggcagttcgccatccccatcccttaggagctttaggtagaagagtgcctgtttgtttaaagcttccaaacaccgtcatttctctcttggatgggacggtcaactggtagcgtgcagtcaccttttcccgcgagtcaacatacatatgcacctttctatgtatatcagttacctctgccttccgacggtgaagaaacaacccaagggttcgccgtccctgggggtcttcatcattaaaagcttgtacactgaccttccacagagaaccagcttagaaaacttttggagaat

SEQ ID NO: 41602 - DNA, 579 bp, Glycine max
  Clone ID: jC-gmro02910019d10d1
gaaaggaaactttattattatttcttttaaaagataaaaatgggtcttatatgtataaattagaatcccagtgtcatacgattattataggtacatccaaagcaaatagtaatatatatgacaatgtgagtaatgattatataaatagcatatacaacaaaaattcgtaggttactctataaaacggtatatggtaattcttcagcaatttcctgaataaactggaatcccatttatttttctgtacaatattgctgtttcttggctgtatacagggtgaagattatcagggtaaacttgttcaccctttaacatcagcaattatttgctgcaaacatttcataacataggagaaagaaggtcgtctccagtgttccgaggcccagcagagctcaatcaaggcagccacttgaggattcacatgccctggaatctctaaccttttgcccataaaaccaacagatgcgacaacctgtgaaggatttaatagtctccatggctggtgcagggtcactagttcccacaggatacagcaaagctgaatacattacatttttcgttgacagttttctcaatgac

SEQ ID NO: 41603 - DNA, 492 bp, Glycine max
  Clone ID: jC-gmro02910019d11d1
aaaataaattttattgtatacaaagaaaaaaaaacggcactggacgaacactttcaaaacagctaaacaaaaactccaaattccataagcctattttggcttcaacatacttcccttttattttccaatttccatttttcatcatcatcatcatccatattattatttcggcctgttattggtcacctgaaaagtgaagactgaaaaacctccccggaatcacgtacagaaaaaccattatattatttgggccaaccaccgaaacactcaaacacagcctaaaaaagagaccccactccccgaacgtttgacctttgactgacacaaaacgacgcccacaccccatggtactattgtcgtgcaatcacccacccaccttccccgtcgtttcatcaccgacttataatttttttttcactccctccctcctcccaggtttactatcactactactgtgccgaaatttcatgaacaaacttattcaaacgaatt

SEQ ID NO: 41604 - DNA, 442 bp, Glycine max
  Clone ID: jC-gmro02910019d12d1
aattccatgttccagctatcaattcaaatttgaagcctgaccttgaaacatctaagcacataaatttaatttaaacacacagcaacgctatcaaaaggatattcaaggaacatcacgacactgcttatgacttcctcaactcaccacagaattgatcaattgacactcctgttttttaatgcagtaaacaagaggaagaaaagtaaaatgtaggtgcaactttcacacgtgtcacatgacaatgatatcactacatcacttgttaattcctctgcagttctttctgatctctccccttgaccctgttaaaggagtaatgtttcccatcttaaccatggacttggcaaattgttcaaagaaaagatcgttgttttctgcatactgcttcactaaatccgctgatacttgattttttgtcaagagaatttcgtcagaacttaag

SEQ ID NO: 41605 - DNA, 419 bp, Glycine max
  Clone ID: jC-gmro02910019e07d1
cggggacaaggacccatgaaaatatttcaaatattaactaattctgcaaaaattttggaacattttaaaaaaacctaaactttttaattctttttacattttaatgaaacttattaaaattccggctgacttttcctttaccactgttccttttgaaaaaaaacacccccaaacccaaaatttggaaaaaaggattaactgaataagggtgtccttcccccaaaggttaaggcctttttcactgaaaccaggttttaatttccacggcaaaaatttgttttatttttagcatcttcctaaaattcctcccaaccttaaaagttttcctgaacccaattacaagctccctatttttaggaacaaccttttactccctcataaaaaacattttctgactttataaaaatttttttgacaaa

SEQ ID NO: 41606 - DNA, 369 bp, Glycine max
  Clone ID: jC-gmro02910019e08d1
caaaatatattttttattttgaatctttttgaggcttttttgggggcaaaaacccctaaagcatttttcacacaacattaatgacaacatggttgggtcactttttaaacaacccagactttttaggttcaattaatagcttattgaacatgacaaatgccccgttgaacggttccttacaactgaacctagggaaagaaaatacgcacaaacccaaaatcacgaaaaacaggttaactgaaaacagtccgcttcatagcattgctgaagggctttatatcttaaactaggtatttacactttgggacggaatctttcatattacatggcgttccgccaaatttacctccagcctttgcatttttcctt

SEQ ID NO: 41607 - DNA, 514 bp, Glycine max
  Clone ID: jC-gmro02910019e09d1
ggtaaagattcaaggtatgctgcataaatttgtgaaatacaacaatattcaacatatcctgtaatagttgagaggctatgtcaatgtctgctaattaaattacagaacagagagaataaaacaatggaaaggaaaagaagaaaaaacatatgtttaccatgtgcaaccattagatacaagaatcacccgatattcatggcatcctacacaaacctcccaaaatctcaattctgttaaatcatgaaggggattgaaccttgatgctttccaaatgccattgctgcttggctccgtaagtaacgaatgcccatcggtcatgcatgctcaatgaccgttttttactttagatgaaaagaatctactgaaacctcgggtgtgtttctccggtgtaggagtggaagaagctgacgaagaggttgacttagtaagcctgtggtttggattctgtacagaagatatggctggaaagtttgactcattatctgatggactgtataaactgttagaaaaatgt

SEQ ID NO: 41608 - DNA, 410 bp, Glycine max
  Clone ID: jC-gmro02910019e10d1
aaaaaaattaaactacccttttttacattggattggaattttaaaaaaaccccttaatttccgaacggggggggacccaacattttccatttttaaggaacaaacccaaagcaaagcctccaaaattttactttttcaacccttcccaaggggggcataaaaaaaaaatttttttttttttacaccccctcaaaaaagggttttttaaacggcccacgaagggggggcctgaaaaactcaccctaatgggtttgatcattatatcaacggggcaaataaaaacctccggagcttttcccctttgaaaacgggaattgcccgtgtttttttcttttttccccccgcctttaaaacaaacccccacgccttgtttttgggggaccggggaatcccccaaaaaggggttcccc

SEQ ID NO: 41609 - DNA, 525 bp, Glycine max
  Clone ID: jC-gmro02910019f01d1
acaagaacttttaaaacttgcattaaggcacttaaattacatgcgagactgcaaacaagtagttgaagctaccttgttttctatcaatttaaaaagaaaaaaaagagttgaagctagcttggtcatgcaggaataaaaaaataccagcagaccaagaaaaccataataaccaaaccgctgtgacccatccatctacagcagtacactaaagttagcaacctgactcagcatagcaactgcttcaacggtaaaaaatttcgttgcagctgctgcccaagacacatgaaaaaaaaacctaaaacacatcaaatcattaaaccgttcaacaaagacaaaaccactaacatcattcatgactcagataaagctgcccaatcaatctccacggaagggtactttttcaagtccaacccaagattgcatgttgttttacaagaatccgagaaatccaggaaagtaatatcggattcgggcgaagaaaaagaagaagatattcattcgacaacgccgaggatgaagatgttt

SEQ ID NO: 41610 - DNA, 60 bp, Glycine max
  unsure (1)..(60): unsure at all n locations
  Clone ID: jC-gmro02910019f12a1
ctggcctggcgtactgatccntgaggacagccgattcggttttaattgcccgggctcgac

SEQ ID NO: 41611 - DNA, 499 bp, Glycine max
  Clone ID: jC-gmro02910019g02d1
agtgtcatgctcacaaaaactcaactagcctggtggtcaaacaggctcagtcaatattttcatcatacaaattcatccttctcattcttgcattgtctactttgccatcagatttttactcttgcgaccaaagtcataaaattcccataaaggaagcagatatggcaagagaatgatcaagctagccaatttttcatcccatttagaggataaactgtataaatgttcaacttgctcaattcacattaaaacaatctaatgagatactacatattaacaacttgagcttggtacaccataatgtccaagttaagcagaactttcaattgtaccaagcagtgttgcagaaggggattggctactcatcatcctcagggtcaaaatccttaaccttcacatctgcatcttctccatattgaatgccgttgtcaatttgggcccagacatattgaatacttttttccttccttaagtctaatggcataaaactcaccatgct

SEQ ID NO: 41612 - DNA, 400 bp, Glycine max
  Clone ID: jC-gmro02910019g06d1
ggacttaccaaataaactttactccattgggactgaggataactcaagtgtgcgcagattttacacagcacgctatccttacattgctagagattggggagcataacacagtttataatttctatgatacctctatgtgacaaatgatttacagtacgattttgtaatgtgattcagctcaaggagaatgaacatcccaattccaaacttattttacagataaacatcaacatatactgtaaatttttatcgcagtacaatgtttcaccctttaagatggacgatacgaagcatgacgtgcaaggtgcagttacacgggcatatcgggcaccacatctctctgcatacatttaagccacaacaggataagatgcacaaggtgcaacaccgcacatattct

SEQ ID NO: 41613 - DNA, 383 bp, Glycine max
  Clone ID: jC-gmro02910019g07d1
atataatatttcttgttatttggcgggctataagaagttattggtttgattctctttaacaaagacatcaagagggaacaaagaaaatatatgttaaagaaagaggtataaacattcttcaatagtgtacaagatatatagctgaatcaagcactttagcctttagttctttactccttgagaatgtcttggttccttgttattctatttctcaggctcacatttggtttaactcattctgaggctggccatgacaagaagctctcctctgctgttgcatgtggcactgtttactgcgacacatgctatcaaaaggatttatccacaggcgaccacttcattttaagggcatttgcactgtttgattttttttttttaaaaag

SEQ ID NO: 41614 - DNA, 476 bp, Glycine max
  Clone ID: jC-gmro02910019g08d1
gcaacaactttctgatttttaattgctcatgctgtaatacggagtgtggtctccgagatatatacaacattatacgttacacatgaataaattcatacaatacttgcattatatatattttgagaacgagatataaaattggaacaaaaaccacaactggaagggcctgtggtgcggtaagtaaaacagccacgattttctattgtcacaaggacctaattggccaccactaaaccttctttaagtcttgcagtgaatacctttcggataattttgccggagggtggtttaggaatacagtacgggaaaaaaactctacctattttcttgtaaaataccacctgttgtgaaatgtatgtctttatttcatccacgggaatcttagaaccatttgaccttacaacaaatgcacctgggaattttttctgcaggttcatattttatacctacaacggcagaatcagacatgtttgggt

SEQ ID NO: 41615 - DNA, 462 bp, Glycine max
  Clone ID: jC-gmro02910019g11d1
cattgagatcgacaaagtggtacgggcattggaattttgccacacctctctaaatgaattttttatcctgaaagaatagacttacagaataagtcaaaacaaaataaaagatactttacacactagctatttatcagcatcaatgactagaacgatgccatattctacatacgtgaccctccacagaaatgtgcatcctttctaacgaaaatcacatatgctaagcaaaatcaaataaaaattacaaaagaagaaaagaattttatacgaggaactactcaaaacaatgggtttaaaatcatcatgatgctgttactgcaatagatgaattagagctttctttctctggtgggggcttaatatatttccctatcacttggtggcgaagacgctcccttattctgtgtttgttttctatacttttctggttcctcatttccttctccttgtgccttaagcttc

SEQ ID NO: 41616 - DNA, 333 bp, Glycine max
  Clone ID: jC-gmro02910020a01d1
cttactcattctctttttataggtttagttttcctttataacaacacacaattctttcaccaatactcataacaagacaaacacctgccaccccctaacggctaaccaaaaaaaaaaagtcctgaaaaaaaaaaggctagtgtggaaacatatacaaccacctaaagaacaccaaaaacctttttacccccactttacccttggccagatcaaaacccccaaaaaccaccgaaattaaaccaacctcccccatcaagtcaacaaaaaacaggacatacaccctatataaagccgcggaacacccccccctttggcaaaacaaatcttaaaaac

SEQ ID NO: 41617 - DNA, 480 bp, Glycine max
  Clone ID: jC-gmro02910020a02d1
atcagttggtttgagcttatgaattggacaataataatatgaagcaaataagccaatacaaataccttacgattgttccagtctaccaatcatgtctctgatggaaataattcaactccaagatcatctggtttcagatgatagatatatatacacaatgaaatcccttgatctatggacacaaacatcacacgatccaaatccaatgacaacaagactatcactactactgctgatactcagggttaaatgctagagcctctcggtatatcagttctttcatctgttcctccgtcaaagcatgttgttcaaagtcaaagttgaagggagtcatgcacactggttcatcactgatgtcatgcagagatgtcaagtacgggtgcgccagtgcatcttcaacagtaatcctttttctaggatcaaaaagtaacattttttcaacaagatctatagcttcaggatggacatgtggaaactttt

SEQ ID NO: 41618 - DNA, 424 bp, Glycine max
  Clone ID: jC-gmro02910020a05d1
gaacttatcttgcatttattcatcactggtgtgaatggcactatttagttaatacaaatggacttcgaaccatatatttgccgttactccaagtaatagatccaaacagatcttccttcaaagaggtcaaagttgaggaaaaaataacttggtagccaagttttttactactcttagcaaactgaagtttatctggagtcactgagacttttactccactgggagcttccacaacgggagagtacgctgattcatcttcttcaccaacgtttgtaacagttctactcacgctcacgggtgctttgccggagaaagttactgctatggaagggtagttgatgttggagatgagaacaaaacttgaatccttaaggcatctgaaattagcagggacagatctggagaagactttaaccgtggttat

SEQ ID NO: 41619 - DNA, 479 bp, Glycine max
  Clone ID: jC-gmro02910020a06d1
ataatataagtcgaatttccaagagcgaggactgtattaatctgcacctgagaagcatcatggcaataaggaaaagcataaattcccctgcagtggggtttcttaggcaggaacccctgatcagccttcacaggtgcaggttatttacttgataaatgacaagtcagctaatttacgagaaataggtcgaaacagacagggatcatagtagaaaaactaaagggtatcatcagtcaacatcattccctgaggcctcagatattctaactacatcacctagacacaagcctcttgtgtaggtgactgctcagtttgcacgttctctgaggacttcaagatccatctctgttgggtctgttgcctgaatcttataatggatgcccttgcagctccttttgaacctgtccttggatgttgcatataagaatcttcgggcgaaatgcgggccacttgaagggagcccatgcaataaaaaaaga

SEQ ID NO: 41620 - DNA, 466 bp, Glycine max
  Clone ID: jC-gmro02910020a07d1
aatgtgaatttacctgtatatttatctttggcataaatattactgatgatgaaaacaattgttagattcaatcaatggcaaacaagaatccaaaagcaatgaacaaattttgtctgtacagaggagcagaaacaaaatccgaacctaatcccgatcccacctatatatatactaaaaacaaacaaaaaaaaaaacataaaatgaaaattaaattaactggtgtgaattcatattcaccgtaccaacaaattcaatttcaatcaaattaaaataaacattctgtgaacaaatctacgcctcttcattatcttcccccgaaaacaaacgcggcctcttggcggttaccggcaacgggctttccacctcttgttcaacgccaaccttcttctttccgaaatcaaaccccgccggcgaccagaactccgtcagcggagccggaaggttcgggtcaaacccacggaacgcg

SEQ ID NO: 41621 - DNA, 508 bp, Glycine max
  Clone ID: jC-gmro02910020a08d1
ccactggaattttcactttagaacaggtggggtatatgtccgttatttagaatagtgcttcacatgtactaattttaaaatcagaatagagaaacggtactattttagtcactaacaactatttcactgtggaattccacagaataaatgtatgcattaatagcatattcatcataaaatcaattacacttaaaaaaaaatcagttgaggctttgaccagctgattgatatgttttggtgagatcaagttgttaagtaagtggaaattggaatgtcaaatggagtaaaagggtacctttcctcgagaaggtaaacagctaacaaaatgagtcaaaatattgctttattttgtaaggaagtccctccttctttttaccagtctttttagccattgccattattattattattattattatctttctcctgtcttccaccaccacccttgaactaataatcatcctaataaaaactagttcccccagaattgttctttggaagcacactc

SEQ ID NO: 41622 - DNA, 458 bp, Glycine max
  Clone ID: jC-gmro02910020a09d1
acagcctaaaataatggactttgcattcattatgaactgataaaggaaacacttttattaagactttaaatcacagcattccaagataatccaatacccaacattttttagaaagccttataacttttaactataaaagctttgcccaaatgaagttaccctgcaggcaaatttttcattcacatttagcttagttatcttcattggcccccaaattattctttggcacatctttggattaaccctggatggcaacaccaaggggagcagcatccataggtattatcttctcaatttttacacccttggtgtgctggttttcataggcttaaatgtgccctccaagggctggtttaccagagggatcaagggtgttaaaccaagcaggatcccactcaacagctttggctgtgctacatgcaacacttgctcctccaggaacagtgagcctagctgaa

SEQ ID NO: 41623 - DNA, 542 bp, Glycine max
  Clone ID: jC-gmro02910020a10d1
aaaaaaatattctctgaattgaacttatatatgttacaaatagtatggaaggattaagctacctgctaactaacgctgagatgtgggccaggcacaatgacaaaacccaagcatacaacactcaagaagatttattcaatgtaattccactaggaaggaacctaatacggctacaacgttttaatttggtcaaagcttcctgtggcttaccgagcaagagatccacataaactgcagtaagagtggcttctggactgttaggtaataaggacaatgcctgcgcaaccagtatattggatttctcaaattcaccctgcatcgccgacattacagcaaaatttgcataaattgttgctcgtgcctcctctggcttgaggaaaacaatactctgagtgccttcaagagaagaattcttagcagctgtggatccttcattcaccttcttaaaatcggcagtcctctccggttgccatttctcacagtcctttaggctgaaaggcaagtcaacattggtttccccagacaaaatgaatgacaagtgc

SEQ ID NO: 41624 - DNA, 338 bp, Glycine max
  Clone ID: jC-gmro02910020b01d1
ctcattagcttttttacttggggtcttttttggggcaagcccctttacagggcaccctctagtgcgaaatcccataaaatgaccacaaattttttcttaaaaaacattaatctactgccttttaaggggccctgggacttattttgtaaagctcaaaaggaaattgaacaaacaatgggaacccttgcaagttggcgctacctttaactgttaacgcaaaagggaaaaaaaaaggggaacgcgccgtaaaaatctttttatttttaaatctcctcctgggtaagggatattaaaaggggggttacaaaccttgcttccaaggtaaaccccgcaattga

SEQ ID NO: 41625 - DNA, 448 bp, Glycine max
  unsure (1)..(448): unsure at all n locations
  Clone ID: jC-gmro02910020b03d1
aaattgtcctttgaatttcactctaactcattctgcttctgactccaagcccatatctcaagagacaacaccgacaacatcaaaatcattaagaaacattacagatacaaagtaatttgttgaatacaataggaaagtaaacacatacaatcaacttacacatgcacaacaatgacaaggaagaaaaagagttgaagaagtgtatatacacaattacacaccacaacactcactgaatataccaaatttaagattttttaacattaggttcgagtcctaattcctttctggttttcccaacaaacaaatcccctgacttgatcatgccaggaagccttccaagcacagtcatgaatgggaactgtgcaacagctattntccttccaagtgaaactatagatattggtggctgtgccttgtatgttcccacttacgcttttgcctcctc

SEQ ID NO: 41626 - DNA, 214 bp, Glycine max
  Clone ID: jC-gmro02910020b05d1
ctaccaaaacattcacaattgcggggttggagataaatgcaatggctacaagcatatccaccctcacccgtcggtacattgaaccttaaaactgtacaccagatggagaaataaaaaggaacgaaccccattatcggaaatttatactttattcagccgaaaagaacaattcgtgaaaatatattttaatggggtggtattgatacatgctctg

SEQ ID NO: 41627 - DNA, 399 bp, Glycine max
  Clone ID: jC-gmro02910020b07d1
ccttaattacttgattaagtaccagtcaggcgcttattgaaatgatgattatgaatacataaaaagcaactgcgatggcaagacactactattgtatatgatgattatcttaattaagaaaggagtttagatgcaacgccgatccttgcaagtggaacacaaacgagactatgtgcccttggaactgtgaggccagctctctcttccatgctaactttggcatcatcacctttcaatatttgtccttgagggcccagcacttgcaggtcaaagcattggataagagatgcaagaagtgttgccattcctgaagtagccaaattgacaccagggcacattctccttccagacccaaatgggaagagttggaaatgctggcccctaagatcaagaggccct

SEQ ID NO: 41628 - DNA, 222 bp, Glycine max
  Clone ID: jC-gmro02910020b11d1
agatcactgtttttcctttactagaattgacaatagagttcgggtttcatatacaatatttattatatatttccaatctcaaagccttcccatatttcacccatcataagttttctatcagcctatatctcatcaatgggatatcttcactcttatagttttgctggataaatataacttgaaagtctaactctattctgtcacttcctaattagacaaatc

SEQ ID NO: 41629 - DNA, 382 bp, Glycine max
  Clone ID: jC-gmro02910020b12d1
attatgggttctgggtttttgttttttatagtttcaaccaaggccatacaaacacccccgagaacaacgctgcaaaaaagagcggcccacaaaacggcaaagacaccatcaaagaagggcaagcgctaaaacgctcccgcatcaccacgaggaaacctagaaacgagaccgcaagcacaaccaaagcagagagagcaccaagaacgccagcgcctctacaagcaatgccttaaagccgcaaccgctcaaggacatctcagccaataccgagctgcgaccgcaaggcggatcgcgagaaattgggacccagcataaaagaaccgcagcgagaaaactgcaagatgaagcgaaaagacgacaaaaataccgattcggagaatcc

SEQ ID NO: 41630 - DNA, 225 bp, Glycine max
  Clone ID: jC-gmro02910020c05d1
acaaataatatattattatttagggatggggaaaaactaagaagcatcaaccatttaacccaataactaccagttcatactaacattaacagaacaccaaaacaaaactggggagcctacactacttgaaatcttacaaaaaaaataataaatttattgagtttaagcaaaacttgccaccctacccatgattagcaaaatgggtctttttccctgggccctccg

SEQ ID NO: 41631 - DNA, 397 bp, Glycine max
  Clone ID: jC-gmro02910020c08d1
gatctctaacgaaaccattaatagaaacaaaaatggggtggtgttagtatcaccattttgttcgtctctgaagacaacatatatagaacatatatagatgcccttaatgaatcgaatgaatcttccaaaatcgcaaattagatgtttgtgaattaattacatatgaaaaataatgaagctataatctcccattatttctgaatcacagacccatatccaatctcagttcagcctgaaagttaatctctgatcatcatgaatgacagtatttcaccacaaaatcccggtgatgaaactcatgtgcccctagattttagacaaatctaagcgatagtcccagtaattttacccagatgacacagctttaatggcgctgcctaggggccatgcttgccta

SEQ ID NO: 41632 - DNA, 481 bp, Glycine max
  Clone ID: jC-gmro02910020c09d1
attcaaaacataaattaactgcccatttactaaaataataagttgataatgtttatggaactatccggtttataaaattgtctataattaattatagaatcaagagatgcatctaatatttgcatcaacctgcattactcttttttgactcctcgctttgccattccaaatcaaatcctcaaagccgtggaatcaaactaatgtactatgatgattttttatggctggttacttagtaagtgtaaccagtccaatatatagattataaacagcaataatcagggtagacctctataccacgtgccaatatactactattaaacacagcatatggctatctaatcaagcagattaacactcgtattatacagccaccctaatagctactatttgatgatcatataggtgtaaattgagcggaagagttatattttagtgatcaaatgctgacatctctggattttggaaacctggtcacaat

SEQ ID NO: 41633 - DNA, 454 bp, Glycine max
  Clone ID: jC-gmro02910020c10d1
acaatggaatttgttgctacatttagacaccagagaatcaacgtattaaggaaggtgaatacaccaccaagcataaacctacaaaacagttatcaatgaaacgatctaaaatgctattcccgttggaagttaaggatcttaagaaaaattaacatgtgaatgaaaaatattgcgttttgatagtacataagccctcatcagtcgtttccatgaatgggattaaaactctattcgatgtcatcaatccaatcaccatatatcctactgattttatctggacctttccacttctgatgtgctctctgtcctggcctctgaatcaccatggaagaaggcctttgtgaagggactccaatatgatacacatcagaatgagcgacaagagtaactgctgcaaccacattatcggcagaagcttttgaaggcacttccttatttgtgtcaccagcaactg

SEQ ID NO: 41634 - DNA, 502 bp, Glycine max
  Clone ID: jC-gmro02910020c12a1
caaaacaagaagaaggaaacgcgcaacgcaacacaaattaccacactttcaattgcatttctctctctttctcacaatttccactttccgggttttcgattcgatattcgttgttccaatgagcgatcacttggtggtgttcgttgaccgtctcgcgcgccctgtccccgttgatccggtggcgcagacggcgcaggtgccttccgaaccatctccacctccggccgccgtggatgccgacgccgccgggagctccggcacctcaccgtcggaggattgcgacggcgagggcggcgacgaggaggagccgctgatccagatggcagagtgccgcatctgccaggaggaggatggcgtttccaacttggagaccccctgcgcctgtagcggcagtcttaagtatgctcacagaaagtgtgtccagcattggtgtgatgagaaaggagacataacttgtgagatatgtcatcagccatatcaacctgggtatactgccccccca

SEQ ID NO: 41635 - DNA, 582 bp, Glycine max
  Clone ID: jC-gmro02910020c12d1
ccatataaatttcttactatatagtgtggatggattcagttacattcatagatagatgtgaattgaatggataccaatggattcacttactatatcgttttaccaccccctagtatgtacatgtacataacgttacagctgcgaaagtaaagagtaaaaatgcacggcatttcaacaaagccttcttaatattcattcatacataaaaaataaaaataaaaaagcatacaaattattagacttgttcctggggtacagtgggtgatcctggtgctattgcaaactgtaaacctctacgctgcccagattgtagaacgaaagcaacttgggttgctgctagtgctgcagcctcttgtctttgtcgccgacgctgcagaatactgattgcccaagccatgatgtagcaaggtaatagaaatccagcggcacgaagcaagaaaagggagaaaaaattggatggatcatcatcagaattatcaccatctgagacagaaagtgcatgccccaagagtaaaaaggccattaaaattaaagcagctgaaccgcaaaatgcagctccactggcgttggaagcagcatact

SEQ ID NO: 41636 - DNA, 420 bp, Glycine max
  Clone ID: jC-gmro02910020d01d1
atattaacacgaaccatcattaaacagtggcaccttgacaagcatcacacagtttcttgtcctgtcatcaagggaaatcataataaaatagtcttcctctccttgtccctcctaaattcccaaggcacaaacacagaaaaacacattttatatagatagaaaatggggaagatctctgtcaataggtttaaggaagaggccatgatgatataaagtttttctccatttgcactctccaatatgttcactttttgagatgaggaaaacaagcttaaacatcagatttagggtgtttggcttcagcatgctccctacacttcacttgcgatgtggtgcacataaatgtttgcatgcacaccttgcactggatcgacattgctttcttgtttgaatacagctggcttccctttgaggcgggct

SEQ ID NO: 41637 - DNA, 523 bp, Glycine max
  Clone ID: jC-gmro02910020d03d1
gcactaaaatttgttttttttaacaaatatccaaatcattgaaaaaaaacaaatatatgcaaatccccaaaattcgtattacagttgctacaaataaatgaaaagtataatcatcaccattgaagtttactccaacacacccaacgtaatactggaaagtattgttgccggtctaacaagcatgcaaaatgggtgaccaataaattgcatatattaagaagtgtacagttttgcaatactttttacacacggctatctatgaggctgctaaactccaatctcagtaacaaaaagaaaggccgagttgagtcaacatttcttgatcgagtgcactagccactagccacaatctcatggattgtatcgctgacaggttcatcctcggatctgacagaaagtttcaatcgaacatcctttggaccatcaagtccaaaagacaaccgcacaagaaccttcacatttcctatgaatacacccgacaacagcatgtgtgtgaccttgaattgggcgggactacctcagt

SEQ ID NO: 41638 - DNA, 536 bp, Glycine max
  Clone ID: jC-gmro02910020d05d1
gtctagatgttttgcaaacagtagcacagattatattattatttttcaggtataacattacattaatggggataggttcttcagaacaggacaaacaccagcaaccaccacgaaacaaacaatgccacaatggtagtgttgcaaaaaggccttttctgaaagaaaaggaaaaactgcattaattttattaagcattttgcagagtgataacatcataaaagtgctttggttcctaagatttcggaaatcagacaaactgatccaaatattcagaaacagtggtgtatttcacgtcaggataagcctcagaagcctcaaggtctttggcagggtcaatctcatacactgcatctccctttatctgctgtgagtggtacaaagccagcaggtaattatttgggaaagaagtctccttaatttgcttaagaacttgttcctctggaacataaattttctcaagagtcttccctattttttttctcccacaaagagatgatatcatttaaggacaaataattgttagggagtcttatgtg

SEQ ID NO: 41639 - DNA, 409 bp, Glycine max
  Clone ID: jC-gmro02910020d06d1
gaatgaaaattttattgaattaaaatcgttgttgagattcaaagcccctaaaatacaactgacatttgttcgcagaatacaaatgaattggcatttgttcgcataactagaacgttaaaagaaagacaagagggccagagataatagaggatagtttttcacatatacagcccttcaggcaccccttctttcttcttaaacatcactttatccttggccttcttaaagtcggcatgagtcaccttcattcgacgttctcgtagagcaagtaaaccagctttagtacatattgcctttatatcagctccggagaattcgtctttagtcataacaaattcttccaagttgacatcatcagctaatgtcatccttgacgtgtgtatctggaagatgcgtcttcttgttttga

SEQ ID NO: 41640 - DNA, 375 bp, Glycine max
  Clone ID: jC-gmro02910020d07d1
aaggggggaagcggatcttatcagtacacatagggggggtgaaattctagctctagcaatctagctagagaagggagtacttgcacaacacaccgcacatgataatttattttatacacaatctcattctcatggggctcaagatgcatggactaattaagcaacaatgttggtctgataggcagtgtccacaaataaattgggtccccataaaatggccttgctttcaaggaaatggcaaacagggttagttccaggaacaactcccataagttgatgaagcatttgatgattcattccaaaagtatttgagtggcaaatagcaagtgcctgagttttggttccctcacccgccaccaatggaaccatgaaagc

SEQ ID NO: 41641 - DNA, 581 bp, Glycine max
  Clone ID: jC-gmro02910020d09d1
agatatattgtgcatttgttttatttgaaatcagatagacattagaagtcataaaccatcattcaccaagttaacattacaattccaatcaaaatttctaaggagggattaggagcaaagttgaatctcctctttccaggggttaatgatcctcaatcttcttcagacccttcatgtctgttgtttcaactgttgtaccatgcagcacgatcttctgaacttttgtgatctctgaacctgactgattggcctcaataaaaattgtcaagctacgaacattttggaatttgacatacttcaaaagtaccggtttccccttaaggttttcttcagacaaatttgccacatcacttgggggaaaatcattgacattactaaatcccatgtgctccttgttagaaaagagctttactgtcttggggccttctttttaggacctttgataacaaaggagtaaagtttaacgacttgagtgataggaatttagagcaaaagctgctcgtctgcatcactcttcagatgcaaaccatcggcttctctataaccccgtttgatagcattggggatagagtgggtggagc

SEQ ID NO: 41642 - DNA, 588 bp, Glycine max
  unsure (1)..(588): unsure at all n locations
  Clone ID: jC-gmro02910020d10d1
cactgtcaaaagaaaagattgaacagaagttagtgtttttatacattcgatagccactgcttctccattctctgaacatttccaattgtactcccaaaataaataaatgaaagacgttagatggggtttgtaacactttaagtacttcactaatcctgctatttgcagcaaaaaaaagaaaaaagaataaacaaaactcatcctagttaggcgagcgagacttaaggaaggatgatcaacaatctccattccaaatgcctgtgtagcctccaatggactaaacagaatacttctggcatttttcatgctgctttcttcatttcttgtagtgtaggttaggtgaacagagaagagagagaagatgatgacttccgaattgaatttcatgagccatgcagcagagttgtctttatcaaaacttcaaagaacctgagaaaaatcctattatatcacatcttccactgtaaattccaacacttggggtccaattcaacctgaaactctntatctctccattcaaatacacagncacgtgcttccacatgtctgataagtagctcaggtaacagagatcttagtgaaagatgg

SEQ ID NO: 41643 - DNA, 552 bp, Glycine max
  Clone ID: jC-gmro02910020d11d1
gcccaaactttcaccaacatgagttttctacagctaaaagctttccagaatacagattgagacaagctacaaagtcaaggagggggggctgaactttttgccgatggacctctcttccaagacccaatctgcactactgcagaatttgaaaatctaacctaagagaaacaaaaacaattatgaaacaaacatttgattccattgtggcttcaacatgaactggttagtcaaaacttgaagagcgactccatcttccttgcaaatagtcctccagagagacactctgctcagtgctactgatagaaaccgtatcatcctccaagtctagtaaagcaaggttcaagtgggactgaatgttagttggaactggttcctcatcacatccatcaagttcctgtggagcattaacttcttgatctgcccatcttatcacctgctcatcaccatgccgaagtttcaatataaggttgatttgaggccgcaatctaggaatgcgtctaatgcatagagtagcggccaaaatcattctcttgatctggcaagtgttgtatt

SEQ ID NO: 41644 - DNA, 533 bp, Glycine max
  Clone ID: jC-gmro02910020d12d1
gcctaatgttaatatatcaacagaagtctgtacaacttggtacatacaatgttttgatgccaacaaataaatgagttggacaatgcgactgtctatatgtacgagtgttcatatacacaacaaaatatgaattcgttagaaaaatgtagtagcttagaagtgtgcatgtaggaacaaagagacatgtaaatctcattgttttttatacacacttctctccaggagtcaatgcttctgatttgcatatggggcagacatttttcacaagtaaccatttctttaaacaatctgcgtgatattcgtgcccacattgaagaattccaatcttttcttggcttttatattcatcctggcatattatgcaagaatcattttcctgttcctcagaagctgcctcctccaagttaatagcattagtaggtagtaataaataagtttttgtcttcatttgacttgtaatcatttcctctgacaaacctgtgtttactttgccaatccggtcccctaatgcaagaagcttcttattagacata

SEQ ID NO: 41645 - DNA, 444 bp, Glycine max
  Clone ID: jC-gmro02910020e01d1
gggaaaaaaaaaaattcccccgaaaaacccctttttaaaaatggggggggggggggggccctttaaaaaaacccaggggccaatttgttcccccccctttgggggaaaaaacagtttccccttgttttccccccccccaaaaaatttagggaaagggggctttgggggggcccccccccctttttccccctttttttttttccggaaaataaggggccggtaccccccccccccccccccctggggggtttggcttttttttcccccgggtttaaaaaagggttttgggaaagggtttaccctaagcgggggggccccgggaaaaaagaaacccccgggggtcaaaaaaggcccccttgaagggggggccccctgaaaaaaaagggccaaatcctgtgggtttttcccggcccttatttccccaagggagggggcctttttttt

SEQ ID NO: 41646 - DNA, 459 bp, Glycine max
  Clone ID: jC-gmro02910020e02d1
cccggatcaaacttaattcgtaatttcaaaaatactatgcaagggtctctacaactaagaaaaccaacatcatttaactaatcggaatctcagatgcaaataacaaacaaaattgaaattgtcaagccatttaacaacggatacaaagttggtatgatgcaaaacatgtagtgtacttcaaacatgcctcctaaacaaaatctaatatccaagccaaaacataatagcttaacgcttcttagagaccccaacagtctttcccctgcggccagtagtcttggtgtgctgaccacggacacgaaggccccagtagtgcctcaaaccacgggggtttctgatcttctttagtctctctaagtcatccctgagcttcatatcaagagcattagacacaacctgagagtactttccatccttgtaatccttcttcctgttcaaaaaccaatccgggatcttgaa

SEQ ID NO: 41647 - DNA, 275 bp, Glycine max
  Clone ID: jC-gmro02910020e03d1
gaaaaccaatatgaagttttttcctacaaaaaccttgatgaaggcataggcaggtcaacaaactataattttcatgttgaatgactgacaacattctaaagttaatttgacacgcataattctattttacattagcagacatatgccatgcagaatctctattaaattaaagatgagatgatgctttcattcatttcaccagataatttaaatgtgatgagtgtgcacaatcattcttattggtgccatcactgaaaccaaattcatgcctccaa

SEQ ID NO: 41648 - DNA, 493 bp, Glycine max
  Clone ID: jC-gmro02910020e06d1
actctagctttggacccagcttctttattactcagtgccttattttgaggaacattcatataccgaacgattgcaagtgcaaaattaattaccaatggcactatgtacctcctttaaataaaggatacgacagccttaaaacatatatcgtcccttattaagttaattactaaaaatcattgatcacccactgagaacacgtcatggctcctacatcctgaacctttatgtgcattaatgatgattcatggtaaaagcgagtaactgttttggacatcatcaaactccatccgtttctggtgacatagcatggatgccacatagatgatgccctaggaacgcgtgtagttggaacaaatgcctgagcacagaaggctggatcaatctgcagatggcgttttctggcagaacttgataaagggaacagcttaaacatatggtacactctaattacacgatcgccctttaaaagccggcccatctttactacaaa

SEQ ID NO: 41649 - DNA, 524 bp, Glycine max
  Clone ID: jC-gmro02910020e11d1
cttgaagcgtcataatgggaaactcaattgatcgaaacataaaaagatcaacccaagagagacatctttgcctgttctaatcagtgaaatagtcaaatgtgatcgaagcaaaagctccagcttttactagcagttttccacggtctgcttatctagggaaaacaaaaaacactacgactgaaatataactatccggaatataacttccgctcactctttatccgttttgcaaacttcctagagttcatcatgtacaccctcttccttggtgtcttccccagcttccgtctttgattcagcatcggagtcattgccagcttcatcagcatcttcctcttcctcatcagcatcagagtcaactgggtcatcctttgattcctcctcttccctcttcttctcagcctcttcaaatgctgtcttctcaacatccttgtgcttgccccatgtttcttcagccagttgcttggcatattcaggatcatcagtaattaagacattgtcaaacaaagtaccagatttcacct

SEQ ID NO: 41650 - DNA, 309 bp, Glycine max
  Clone ID: jC-gmro02910020f10d1
ggttcaaaattctgataaaatttccatgggatcgaaactgtaacattgcataaccaaaaaataaattgctaataaaaggagaaaacgaaataaactaaacagttcatttcttgatgatatgacattatacctatgaatgatacattaatagtcatgaaacacgcaaattattcatccacacctatcaagacatccattgaagggagtgattaacttcacaacaatcttaatcttgaggcttcttaaactcgagtggcttaacaacttctcaggtgaactcagggtcatcccttccaaagtgtccataat

SEQ ID NO: 41651 - DNA, 436 bp, Glycine max
  Clone ID: jC-gmro02910020f12d1
caaaagcaatgtatacatccgctcatataaacaaaaaagcgtggtttccctttctacattcacgtgagcctgatactgcccttacaaaggcaaattctatacctaaaaaataattttacataggctcccaactttaccaggcttgaggattcaatgtattccttgataaattaagaattgaatataggatctgcagcacaaccactcaatagataacaagagcaacattgatgaatttacaggcaaggggtatgtccaaataaagacggacacattcccccaactggatgttagtgattcatgttagtattcatcaacttatgatgcattctgcatgagggagtcaatctgagcacacgacttattaaaaggctgttgcatcatcttcacttcatccaactcttgagattggaatgtgatatcctgtgtctgtaaa

SEQ ID NO: 41652 - DNA, 463 bp, Glycine max
  unsure (1)..(463): unsure at all n locations
  Clone ID: jC-gmro02910020g01d1
attagaaatttaattttacaaaataaaaagattaacggtgtttcagctacccagtctttgaacataggcaacaaaacttcagtagagcctaataattatgcactactcttaaatttaaacaatacaagcaggagtgagagttagatttgcaaagttccccaataaaaaaacccatagtttcaactaaacaaaccacatcttaccaaagacagcaaaaacaagaaaaatggagcaccatgcatgtaatgcaattgccacaaagcttgcaagagcgctgacctatttaaagccagtgcccatttcctttcgcttcagttctaaagaaatccgttcattttcaagcttcattctttcattttctagactcagcttctccaactcccgatcctttntcttactaaacctctgccacttgaatctctgtttctctagttccagcatctcgacctgaatttgtagcttt

SEQ ID NO: 41653 - DNA, 328 bp, Glycine max
  Clone ID: jC-gmro02910020g03d1
aatgatacagtcatttttttcaattgtggaccaggtgagagcgagagcatgcacaaaatgataattaaattaacttaaaagaaaacttcaggatcatcaaccatccaaccaaagatcaacggccaccgattcaacaggaaagaaaacacaaaggaaggaaaaccatacacagaagaagattccggagaaattcaataatacacattttttttttttattatttcatttttcccctctagtagtcagtgctgggaagctgctcgtgggtgtggctgatgaagacaacctcgtagataaacccagcaattccaccttcgatgagagggcc

SEQ ID NO: 41654 - DNA, 496 bp, Glycine max
  Clone ID: jC-gmro02910020g04d1
ctaaagttaaaaagcactgtggttaaccactgtctggaaagaggattagtagaaaatacatgttttctttcgctgtagaaattacatgctggcaactttcgctattgcttttttcccattgtcattatgtatatttacatcagtgttctgactaagtcactattttctaagtctgggaccataacaatctccgtgttttcattttcttgtctcactttggcacccacgtgatcctttggaagcacattacagtcgatgatgtgccatactggtctctcctcttgaaacaatgggtgcttgcatagtgatggacattgcactgtaagtgcatacttgcaagtggaaatctctgtgattgaactaatcattggtctaggttcggagcatacaaacctcaccttggtctctcgtggcttatttgtaagatcacatacggtgccgttagtatattgatgagcatgatacccttgagatgcatcttttgaccggggatctt

SEQ ID NO: 41655 - DNA, 481 bp, Glycine max
  Clone ID: jC-gmro02910020g05a1
gggaaaaacaatggggtctctaatggcctctgttacatttactcttgtattggctatagtgtctgtaagcttgccaacacaaatcttagctgataactacttgtactcatcacctccaccacccaagaagttcccaccggagtcttctccataccactatccttcaccacctccaccaccaaaatattactaccactctccaccaccacctttttcttcaccaccaaagaagccatattattatcactctcctcctccaccttcttccactccacctaagaagccatattactaccactcgccaccaccaccttcaccaaagaagaagccatactactatcactctccaccaccacctttacctccttcaccaaagaaaccatattactaccattctccttcaccacctttacctttttcaccaaagaagccatactactatcattccccacccccaccatcaccttcttcaccttacaag

SEQ ID NO: 41656 - DNA, 483 bp, Glycine max
  unsure (1)..(483): unsure at all n locations
  Clone ID: jC-gmro02910020g05d1
acattgtatttttgaaatcaaattaagcaaatcaaagacaaactaaattaaaccacgaccatgatggatcatagaaagtactagtactataaaaaaaaaagacacagaaatgagaaatgacttagtaactactgttggagttattattagtatcaatcaccctgccagctccaaacaatgtctttgagggaaggcctcacttgctcctcacagaacttaacatactccaacgtatctccggcagacttagtaaactccgccaccgccaccttcggcgccacctcgaaaacctccaccgtcatcgccagcttccccttcctcccctcctccgtcccctgcatcctcaccacaaactccttcttccccgtcaccctaaagttcatgcttttcgccaccgccttcaccttcgccaacaccgncgaagccgaaaacttgcatatgaacatcgacggcgaccgcttcctcgtctcaaacaaactccta

SEQ ID NO: 41657 - DNA, 280 bp, Glycine max
  Clone ID: jC-gmro02910020g06d1
acatagaacatataagaaaacttaggattgggatcatagtagatcaaaaggtgcattcagttagaagcccattcgaagtaatggcagcgagcacctctagtcgcagtccaatttccacatccaaagaagaggctcccttgtttgggacccggtttcctgaccatgcccctggtgtttttcaccccacataagcagaaagggtgatactgaacaacgggggtagtgatatcctttgctttgtaggggcaatgagggaaaacgattggtgggtctggcgact

SEQ ID NO: 41658 - DNA, 467 bp, Glycine max
  Clone ID: jC-gmro02910020g07d1
ggaagaacagatacatactggaaattattaatttcttcgaaattttgaagaaaagacgaatacggatctgtccaacaatgaaacctagtaaagttcttcacatttaaaattcaatgagatgagattacatagaatagacaagactacgaagaaccctaacactgtttttttttttcatcaacaagcaaacaatgaaggcgagaggttactgtttgcaaagaatgctgttataaacaggataatatctatccaaatcaagtttgtctaagatatgtttagcctaaagataagaaaaatggccccctgcaacataatctgtcatgtcaacaattaggaggatcccaggaatattgaatggttgggttccagctaatcttagagaaagtagactcaacttctgaactctttggtggatgctccccagatattttttgaggatgatgatgtacatctgcttgctttaatgg

SEQ ID NO: 41659 - DNA, 418 bp, Glycine max
  Clone ID: jC-gmro02910020g09d1
atgtattcaatacataatcatttgtcaatcggattaaataaattacacactaggacctcatctttttggggccctagcgatttacataagccagcgtcaggaactttatttgtcggaacactaacatttcgaataaagaaaaccactaaaaaggaaggaatagcgagcggaagttaattccccccatgcacgggcaattcgaaccacactgtgatcaatgcaatgtgaagaagaaagaccggagagcctccactagagccaaccctaagccaaagatgatttaagaggatatggtagacttatagtttaagcttagtaggcacattggggagcacctggggctttacttgagcaaacattgtgaagcaagctgagtgagatcggaaggttgtggatgaggcccaaaatggtcgctttg

SEQ ID NO: 41660 - DNA, 333 bp, Glycine max
  Clone ID: jC-gmro02910020g11d1
acacgttgaatttatctttttctgaaaaaattccaatcgtacgttgatgcaaattgtcaaaacgtgccaaagtaattgactacaaaacacgactgtttcattagatgtgtctctttcgagtaacacggaaggttggcaaaaatctcgttacagaatattgaagaccaaaatatgtaacaagattttggcaatctttcttttcttcttcattatctgtttgtgaactcaagtgactcaaataagttttcccctggtatatataggagagctgctgccataaaagaatgctcaaacctatctgcaacgacacacttgcaatgaataggataagca

SEQ ID NO: 41661 - DNA, 469 bp, Glycine max
  Clone ID: jC-gmro02910021a11a1
agaatgtaactatgatacgatattgatatttaattcttttggcgaaacgagctcaatacatcatattaaaacataaaaagcagcacctaaaccagaacagcaaacaagttcaagggagaaattgaacataacagacatgacatacaagaacacttgaaaaaagacacgcttaaaacaagaacacttgaaaaaaaacacgcttaaaaaccaccgcgaaggcgaaggacgagatgcaaggtggatgccttctgaatattgtaatctgccaaggtacgaccatcttccagttgcttcccagcaaaaataagcctctgctgatcaggtggaatgccctccttgtcctgaatctttgccttcacattatcaatggtatcagaactttcaacctccaaagttatggtttttccagtcaaagtctgaacaaagatttgcatgccaccacgaaagccgtacaccaagcgcaggggag

SEQ ID NO: 41662 - DNA, 489 bp, Glycine max
  unsure (1)..(489): unsure at all n locations
  Clone ID: jC-gmro02910021b11a1
agtatcaaaaggcttaagctactcctttaccaaattttgttacatcctgttcttttaagaagaaattattttcctcattatccacagcaacaaaaaaagaaggaaaaagagtgtctaaactcaaaagcatgcattgatgccttttaaccattctaagaatcaaaacagaggaaggcaaacaattatcaaactacatatctccaatgtctcaacaaaataaaagatattcgcaaatccacatcaactataaaaaaaacagatatataaccaacacataatcaatcttcatcatcaataaccttggtttccaaacctttgagctcctccttggggatttcgacgacagtaacaagggaatagagctcttcctttgcatcctcatcgtcgntcctcttgcgagcaatgcgaaccctaatcctgcttgggacgctcccgatcccctggctccacacagccttgttgagcttcacatgcactcttacatcattc

SEQ ID NO: 41663 - DNA, 315 bp, Glycine max
  Clone ID: jC-gmro02910021b12a1
gtgggaggggggggggggaaaaaaccaaaaattttttgggggggaaaggggaaaaaccccaccgggggtttttttttacccgccaaaggaaagggggggccccccaatgtgggaaaccaaaaaaatgggggctataggggggggggggcccccagggaaaactcctgggaaaaagcgggaccccttttttttttagggaaaaaaacgggagcacccgaaagagttgggtttttttgtgtaggaaaaaataaagcccccccccccccggaaaaaattttagggcccaaaaaaacccccccccatggggaaaaaggg

SEQ ID NO: 41664 - DNA, 314 bp, Glycine max
  Clone ID: jC-gmro02910021c10a1
cccccggaaaaaaagggggggggcgcaacatttgggttttggcaaaaaaaaccaaaaagggaccttttttccccccaggcggggaaatttaaaaaagggaaaaaaaaaccccgggggggggcctttttaaattttaaaaaaggacccccgggaaaaaaaaaaaccttttttttcctcgcggggggaaaaaaaattccccccaaggcgtttcccccccggaaaaagaaaaattcggggggggaaaaacccccggggggcccaacaccccttttttttttggggggaccccgcccccccccggggctttgggaaaa

SEQ ID NO: 41665 - DNA, 431 bp, Glycine max
  Clone ID: jC-gmro02910021d10a1
cagaaaatagattctcgtaaactaatacagaagaaaataaagttttatatcgaattaaatcttttgccttcacaaataatatggaatcctctatagacacaaacacaaacacaaattatgccaagtgaccaagcgaagagaaatgcagcctatacaataatacaaaagcacgctccacacagagaacaccctaggcaaacttcaaagttgggaatcacaaaatttcagaattgcaagctcatgagattgattacaccacttctgtcacactgttctcttcagtggtcggagtttccatattttctttgtctccctttggagtgatagcagtaactttaacatcagatttctttccctgcctctttaccatgcccttttccttatttgggtcttgcttgcttggcttctcagaatttttaaccaacctatta

SEQ ID NO: 41666 - DNA, 564 bp, Glycine max
  Clone ID: jC-gmro02910021e11a1
agtaaagaaagcccatcattattaaaattagaaaatcctatggcgggtcatttcgggttaaaaaagacagactccatctttaattcaaaaacataattgcagaaatatctagcctcaactaggaaaatcctcatcatgggtttgaccttggaacacttattacagaagtcgaggtaagatcaaaaaaatgtggcaccaacaaatttcaaaagaacacaacgatattataatgatattataatatcgccactgctgaataattacatattgctctcctgcaattagccttccagtgctgaagctccagagataatctctatcaattcagtggtgattgatgcttgacgagttctgctataggtgagcgtgagacgatcaagcatatccccagcattcctgctagaactgtccattgcaaacatttttgctccttgctcacttcaggcattctccaacacgggtttggtcatcacacaagaaaactggaactcagccagattctgaagaatttcagcttttgtttcccccccttcaatctcatatgaatccaattccccgagcttt

SEQ ID NO: 41667 - DNA, 558 bp, Glycine max
  Clone ID: jC-gmro02910021f11a1
ggacgagaagatatttttaaattagaatgattattttggcacaagcaatacagataaacatcaaatgttttacaacctagtgtttaaatacaaagaagcaaggaagaagcaactttatgctctcaatggaagaatcatagaactctagtgttgtaggaaccacaactagggcatttgtggtagagccagtggaagggggtctctcctttcttttcacaatcattacataataaaacctgagtttgactagaaatctcatcagaaattctctcttcagccaacaacgcatctaacatcctaaaatatacctgcatgtctccaagtgacttgctacatattgggcaggtataattaaagcaggtatattcctgaaaacatgttgagtgcattacatgaccacatgggagggcttttaccggagagcaggatgtgaagatatattcatgacaaattggacagttgtcctctaaatgtttctccctgcatgtatgtgtcataagagaacgagacatacaagctttgcaattatacagtgaagtaggctacacccaaaccctt

SEQ ID NO: 41668 - DNA, 544 bp, Glycine max
  Clone ID: jC-gmro02910021g11a1
aacaaaatgagttcttcaagcccacattgacattgctacactataacattatagaataattttattttaatatttatataaacgtaataaaaagaatccctataaaaatgagacccttggacagtcgtccaccgtgcccgtgctcatgccactgcagaatatgcatctaaaaatctcgcatataggttaattgcatagtgaggttgacgtgtgtataattgcaacaaattttatctaaacttcagtcttgccattgatggggacaagctccaaagtctcttcttcatctaccttatcactcgtgttctttcctgaaacctcaaaaggaagcagttcctcatattggatcagtcttagggacaagaaaaaccaaagcaagtgtagcaaacctaagcatgtcccttataagaacagccaaccaaaggtttgtaaagtcagttcagttgatgtgaaggacacgaagaagcaccccttcaccccatctggataggagggcaccaatgctataatgcacattaacagagcaaaaaagggttccttaatg

SEQ ID NO: 41669 - DNA, 298 bp, Glycine max
  Clone ID: jC-gmro02910021h10a1
aaacaaaaaagggggcccaaatatttttaccaaacatttatgaatcatgactgccttaaaacaaaaaaaattttttccgaatttcccctgttaaaaataattttttgccccttctaacaatcttaaaaaaaaaaaaaaccaggtttttttttttcaaaaaaacggatccattttttacttttaaaaaagacacctaatttgttggcccgggcaaaatccttgcatcaaaaaacactttttttttcccacccctttggttggacacatgtaattcctaaggggggaacacggttttttt

SEQ ID NO: 41670 - DNA, 349 bp, Glycine max
  unsure (1)..(349): unsure at all n locations
  Clone ID: jC-gmro02910021h11a1
actagnaaccaaaagtgacatttagattgaagtcaaggaaggaagactcctctcaacaatcatccactcaatcccaaatgtcaaacaaaaaacaaccaacaactcaacaccttaacctaaaccataacccaacgattcctacctgactaaccacaacacagtaaaacaagacacacaactgagcttagtaactcaaccttgactcacacacacaatgcttgtggatcatgaactacattggttattcttaacattatcttcaattattcaataagtctccattttatttgcactcgaatatttatctatacaaaacttagatagagtacctcaagggttaccactatta

SEQ ID NO: 41671 - DNA, 539 bp, Glycine max
  Clone ID: jC-gmro02910022a02d1
gatcgcgagcgcccacgcgtccgcaaatgcaacgagatgccgaaggatgctccgacacttacagcagcaggtgcaaatcctgctgaagacgaagcttccctgaaagacctctctgtgcagacagagaacaaggcttcttctgcctccccagctcctgatgatccgaaggccagcgacgagaagacgctggcagaagagaaccagaagctgaaagagcttctgcaaaagcttctggcgtccggcaacgatcagatgggggtcatcacggacctaagtgagaaggtcaaggtgctggagcggaggctggcacgcaagaagagaccaaaggtgagggtgcacaagccatccaggcatgcttcctgtgtccactgaaaggataagtctgtaaggttttgaggttttatgttgtatggatccccatgttgcttcctgtgtccagctattgtgcactgtgtaggtatagccatgctgtggcactgtgcttcgtcttggacaaccaaggtgtggcatgttctgtattttatgtctgtataatgcat

SEQ ID NO: 41672 - DNA, 70 bp, Glycine max
  Clone ID: jC-gmro02910022a06a1
aaaaaaaaaaaaaaaaaaaaaaaaaaaaaaaaaaaaaaaaaaaaaaaaaaaaaaaaaaaaaaaaaaaaag

SEQ ID NO: 41673 - DNA, 282 bp, Glycine max
  Clone ID: jC-gmro02910022a06d1
ggcagcattcaatgagaaggacaccgcctactctgggtcggcgactttcacctacgaggccttcatgctgaccgtgctgcctttcctcattgcgtagtggcagtccactccgccgctcaaaacaagctttataagcttttccaatagtactgtaatattatgcctgctgtaaagagatttatgttcgcagagttgtttttagacgagttgttttgattctggatttaacttgtgttgtgaatcataaagttgctctgaaatggagaatgtacctgttggttg

SEQ ID NO: 41674 - DNA, 446 bp, Glycine max
  Clone ID: jC-gmro02910022b01a1
aatcaagaatggttcataacatgaactttgctgttgctaaaaatcaaagagtcaacactgtcatcttggttggaggattaaacactcctgtcacaaactatatgtctaatgttgaaactgttcatgtggcaaataaatcagcgtctacccttaagattaaaatttaaagcataccctttatagaaggtttagtgaaaaaagaatttactcaaaaaggaatttacttctcatgactgtcttcaaaagaatctatcttaattatgacaggttggtttagatctgctgatggttcagatccaatttgtaaatctggcgaggaagttatcccatcaatgtcttcattttcggccaaggctttatcttttgcagtcttgccaacttttgtgactcatatcatcataaccaccgatatctcatgacccaaatgtttaacccccaccgagttt

SEQ ID NO: 41675 - DNA, 548 bp, Glycine max
  Clone ID: jC-gmro02910022b02d1
accaaccagccgggagagggagcgcacgcactgcgagaatggccacggccggcggaggggccgggcatctgaagctgctgggcgcgtggccgagccccttcgtgaaccgcgtacgcatggcgctgcacctcaaggggctggagtacgagaacgtggaggaggacctcaccaacaagagcgacctgctcctcgcctccaaccccgtccacaagctcgttcccgtcctcctccacggcgacaagcccatctccgagtcactcgtcatcgtggagtacctcgacgacgccttccccggcgctggccaggccgtcctccccgccgacccctatgaacgcgccgtcgctcgcttctgggccaaatacgtcgacggcaagttgcacggcatgatggtgaaggcgctcatggaggcaacagaggaggagagggcgacggcgacagtggacgcgctggccgctatggacacgctggagggcgcgttcgccgagtgctccggcgggaaaaagttcttcgccggcgacgcgcccgggtacctggacgtcgcgctggga

SEQ ID NO: 41676 - DNA, 383 bp, Glycine max
  Clone ID: jC-gmro02910022c02d1
gacaatcgtgcgcggactcgtgagcgctcccgtgggctacattaattattctggcacgatactcagggaagggctggaacgccccataatacttcacaagaagcttgaagactggcttcgagaacttgaatgctccttagttatacctgctcttaagctaatacagactggtatgccttctgaactagaatgtaccacatccggctgcatgtgctgcgtatagtagcatgatcatgtgttagcactgtatctatagatcatgtgacactgatacttagcaaatagctatccgacctgtgaatactataatgcgtcaaagatagcacatggattctgttttggttcactgaataaatttgaaggcttgtatgtcgtgggcggcc

SEQ ID NO: 41677 - DNA, 495 bp, Glycine max
  Clone ID: jC-gmro02910022c04d1
gcgccactgtccagtgcgcgcgtcaagcttgcttagctagccgccatggcctccctcgccgccgtctccgtgaagcccgtggccatcaagggtctcgccggcagctccatctccggaaggaagctcgccgtccccaggccgacggcccgctccatccgcaggccccgcgcagccgccgtggtggccaagtacggcgacaagagcgtctactttgacctcgacgacatcggcaacaccaccggacagtgggacctctacgggtctgacgcgccctcgccctacaacccgctacagagcaagttcttcgagacgttcgcggctccgttcaccaagagaggtctgctgctcaagttcctgctgctgggcggcggctcacttctggcctacgtcagcgccgtggcgtcaccggaccttctgccgatcaagaagggaccttatgagccgtcgtagccgggcccccgcgggaagatctaagctcagcttctccatttgcat

SEQ ID NO: 41678 - DNA, 590 bp, Glycine max
  Clone ID: jC-gmro02910022d01d1
cccacgcgtccggtcccagaggagtccatgggatcagttgttgagcttttagggaaaaggcgtggacaaatggttgacatggaagctaacgggacggagggaacaacattgctgaaatacaagattcctaccagaggccttatcggacttcggaatgcaattcttacagcttctcgtggcagagctatattgaatacaatctttgacagctatggcccatgggctggagatcttagctcacgtgatcagggatccttggttgcttttgaagatggaagcactacttcttatgcacttcttaatgcacaagaaagaggtatgttgtttgtccaaccagggcaggatgtttacaaaggtcaaattgttggtatccatcagagacctggtgatttagcaattaatgtgtgcaagaaaaaggctgctacaaatgttcgttccaacaaagaaactacagtggttcttgatgaacctttaagctacagtttggatgactgcatagagtttatccaagaagatgagatagtggaggttactcctgcaagcatccgtatgtgcaagaacccaaagtctcgaaaaaaagtacataatcg

SEQ ID NO: 41679 - DNA, 550 bp, Glycine max
  Clone ID: jC-gmro02910022d02d1
ggcttggagcccagatggcctgacattcgccactggtaaccaagacaaaacttgtcggatttgggatgccaggaatctcaccgagtctgtccatgtcttgagaggcaacgttggagcaataagatctattcgttttacatccgacgggcacttcttgtcgatggcagaagcagcagactttgtccacatctttgacatcaaaagtgactacaataagagacaggaattggatttctttggcgaggtatccggtatgtccttcagccccgacacggacacactttatgttggaatctcggacaggacatatggcagcctgcttcagtttggccgcctctacaactattcatacctcgactcactactatgaaggtcaaagaaaatatgtgttttccctcggcttataatcaacccagattaggcatcccaaatgaaatttaatttagcctggtattcctcgtaaagaatcctgtaccctggtgtatgtgtacataaaaaaaactgtattttatagacaccagtagtctgctatcctgctttcagattaggt

SEQ ID NO: 41680 - DNA, 338 bp, Glycine max
  Clone ID: jC-gmro02910022d06d1
ggatctggatttggccaagttcctggaacatggcacgtaagatgcacgatcctgccgcaggaagacaaaatccccgcggtgatcacccgcttcaaggctttccatgaggcgttcatggctgagtaccgcgactgaactgttacagtggctgagtaccatcgtgtagaccgaaacaaaataaagctccactctctctctctctgtctctgtgcgtgtgtgtgaactgatctctgaatggaagaacaatgtactctgttggcgcctttaatggcaattgaggaaaattttgatcaaatttctgttgtgctaggagccaagctgaaaagccacgtttttct

SEQ ID NO: 41681 - DNA, 573 bp, Glycine max
  Clone ID: jC-gmro02910022e02d1
gattcaacaaagacgtacgtacatgcacaaaactagagcgagctgtgtgtgtgtgtgttcgtcatttcctcgatcatggcgaaggcgcaggcgcaggtggcggcgaggttcatgatggaggcgccgccgccgcaggtggtgtcggtcatgcggcggaggaaggcgccgaggagcctgagcaccatcgccgaggacgacagggagatgctggcgccgtgcgggtcaccgtcggaccacggccacgtacatacacataactagagcgagtagagataccgtctcttactgtgtgtgtgtgtgtgtgtttatcaactcctcgatgcatggcgaaggcgcaggcgcaggtggcggcgaggttcacgacggaggtggcgccgccgcaggtggtgtcggtcatgcgacgaaggaaggggccgaggagcctggacaccatcgccgaggacgacagggagcagcagctggcgtgcgggtcgccatcggaccacggcctcgcacggcgtggtcgtcgctccagaggataccgacgccaccgcagccgccgcgggagcgcgcaggtgggtccgtgacgaggga

SEQ ID NO: 41682 - DNA, 419 bp, Glycine max
  Clone ID: jC-gmro02910022e05d1
agaagcgaaggcggaggcggaggagcggaggtaggagatctcgagcaagccggaggcagaggagatgaagacgttcgacccgtggccggtcttcttccgccgggagtggaagcgcaactggcccttcctcacgggtttcgccatcaccggattcatcatcacgaagatgacggccaacttcaccgaggaggatctcaagaactctaagttcgtccaggaacacaagaagaagcactgacgaaccaggtgaaggagttgtcagaaacgcatgtttggccagccagttctgttatgcttttgaatgaaaaatttagacccttctttctcgtttccttaatcgaaatgcttgcactctatgttccatttgtaatgtaataagaggcaaatggattgaaccaacaacaatcaacttctgattg

SEQ ID NO: 41683 - DNA, 572 bp, Glycine max
  unsure (1)..(572): unsure at all n locations
  Clone ID: jC-gmro02910022e06d1
cctgtcccagccgccggacaccatcaacgggtccatccgtgtgacggtgcagggcgaggtcatcgagttctgcttcggggaggagcacctgtgcttccagactctgcagcgcttcacggccgccacgctggagcacggcatgcacccgccggtctctcccaagcccgagtggcgcaagctcatggacgagatggcggtcgtggccacggaggagtaccgctccgtcgtcgtcaaggaggcgcgcttcgtcgagtacttcagatcggctacaccggagaccgagtacgggaggatgaacatcggcagccggccagccaagaggaggcccggcggcggcatcacgaccctgcgcgccatcccctggatcttctcgtggacccagaccaggttccacctncccgtgtggctgggagtcggcgccgcattcaagttcgccatcgacaaggacgtcaggaacttccaggtcctcaagagatgtaccacgagtggccattcttcagggtcaccctggacctgctggagatggttttcgccaagggagacccccgcattgccggcttgtatgacgagct

SEQ ID NO: 41684 - DNA, 529 bp, Glycine max
  Clone ID: jC-gmro02910022f05d1
cggacgcgtggggaaagggacgaccttgcagctttcctatctgccagtccttttcaacagaaagacaaagtggtcacaattccttcagcaggtgacattgaagtgggcagcaatgcagcaaggatgaaaaatgatatatcaactgacagctccaaggattcagctggttccacggatttgatatcaggcagagcaaaggaagatttgcatcgtgggcacagaagagcagctagtgccagtgctgatataggctcatggagcatgtcaatccctaatgaatgtgaaggaactacagaacagttatctgatggctcagacaaattgcctttgcgtaagatagtgaaaacatgtgctttgacaagtaccttgcaatctaagactagaacgaagtggaaaaatggagctgttaggtgggcaggcagtaaccaacaggatgttgaagaggctatccctctgaatacttctcagttgagtcagggcttagaggaatgctttgaaaggacaagagttgcttaagacatgtgatgag

SEQ ID NO: 41685 - DNA, 355 bp, Glycine max
  Clone ID: jC-gmro02910023a02a1
gaatcatcaatcatgtaaccaagaaatagtataaaaggcagatgccaccttcatctagaataaaacacttcgaatcatgacctcctgagagctatttcttgaagaatcagcgcacaatctggccgagttgccatatgcatacatgggctaatagcaaaaatgcaaaatgtatgaagcataggaaagggaaaaagcgaatgatacacatcttatggatcaaaaaccaaagggcgaagtctcagtcttagataccataatcaattatatccggatcatttttgaaggcactggagatgggtgctgcggaaacactcattgtatggggaaactcggatattaatgggcatgtgctgaa

SEQ ID NO: 41686 - DNA, 548 bp, Glycine max
  unsure (1)..(548): unsure at all n locations
  Clone ID: jC-gmro02910023a06a1
ggaaacgcatgtttgaaacttaattgtcaccggtacaaatcagaccaagaatggcttctttcagtacttataccaatcttgatttaagtcttatttaatagtaagtttgttcagaagcatgagcatcacaagccaagtgaccaaccacacaaggtttctattattaacgttttctcctctaggagatatcacaaattaaaagttggtaaacttcttttctttcaagctatccacagtctccttgaggctcacttccaaaggagtatattcaatccccaagctctttgccttttctttggatacctgatatattggcacatatgggttatcatctgcacacttctctggaagttgtaatgtcgggtacaaatcacgtaaaatcttcacaatttctgagtagtgtgccactctctccaccaaacaataccttccattagctgaagcattctcatatgctagaatatgggcatttgcaacatctttcacattgacccaaccaaaagatgcatttggaaatgttngtgcaccattaattacgtttaaaattg

SEQ ID NO: 41687 - DNA, 464 bp, Glycine max
  Clone ID: jC-gmro02910023a07a1
aggcatatataacattaatttatttacactaaaggagtaaaaaaatcttgacgtacctgtctacattaaagcgtgagaagggatgaagagttacttcccaacaatctcggttcatatacaatttttcacttctttttttacccttataaagaatgaaacaaacattaatactccaataacacccggttcacaaacaaatacaatacacaacacaatctagcaatctagctacttctccatgccctaaaacacaagcaaatcgttcttgatatcatatcccattttctccaaattaggctgcactgcaaactgaatcatgggtgggggcccacatgtcaaagccaaggaatccctcgacgcttttggaaggggctccctcgggatactctttgtgatgaaccctacactgtatttccacccttcctttgcgatttccaccacgtaccatagcttgaaccgggcat

SEQ ID NO: 41688 - DNA, 500 bp, Glycine max
  Clone ID: jC-gmro02910023a08a1
cttcccatctacacagactaatcttgtcatgaccccccccccccccaaagaaaataaaaatgaaaaacatgaaccattggattgggccctgctagtctatccttgcataatcttttcttgcgcgggatgttggaggcatgcttgagacaggaggattcattcttcgcccccatgtcatactgttggtgaatgagttattcctgggagaacgagggcccacactgctgaaaccagaagaagtagcctgaatcttaatttgattccactcggcaccctgggggggtctaccatgtgtgaatctttgaacagattggtgtccaaaacggcttggagaattttgtaaaatatgaggcatgagatgaaaatgcttagacatagagggtacatatgttgtttgaagatcatgagttggaaggctacccatctcaacattagtaaatgcttgacttggtgcatttagtctttgcatgattattggagtgcttgtgcttgaaacatga

SEQ ID NO: 41689 - DNA, 462 bp, Glycine max
  Clone ID: jC-gmro02910023a09a1
cctcataaacaaaatcatgtgatccaaattaaatagtaaatacaagacaaggattaaattaaatacataaaaaagagggcattaaatagaaagaatgaggctcaataaaacccaacacagttccttttgcccgtagaagaaaagaaagattaggaaatgaagaagtgagagtaaaagaaaaaagataagacgacacattgacaatgaagtattttctggtgatcaagagagagctcccatgcaaatgaagccaagtccaagaacaagtccgaaacccacattcatcccattggcagcattagtatccttaggagaatccgaaggagcagaaccagccttaccaacgctgggaatctcaggagtgctcttagaacccttaggagaaggagccgcagaagaagcacgagtcttggtggttccgaagagttccaacggcaacagaaccttgtcaacctggtacac

SEQ ID NO: 41690 - DNA, 406 bp, Glycine max
  Clone ID: jC-gmro02910023a10a1
gagaaatagaaagatgctatatatttattcttagaaatagcaaatgtcaagaacaacctatgatttcaaagggagaaatcctagatttcaacttataagccttattttggaacaaaatcctaattaacagcgatgtagctgattgacaaacaaaacatgtagtccacaccacacacaattttccccagagattctgagtctcacatacatgaatctattttgaagcagcgaggctttcatagaagcctttaacaaacacataattcttagaaatacttagtgtcacaccccatcatcaaatctattttgaaccaaaaaggctttcgtggacacccttgaaaaaggagaaaacaggatttctaaggggcacacattatttgacaattggatggttcaaaaatacttg

SEQ ID NO: 41691 - DNA, 592 bp, Glycine max
  Clone ID: jC-gmro02910023a12a1
gaacaataatgtgtaacattttaaaatcattaaattggaattccaagtgacagccacttatccctgccactcaaataaatcattctcaaatgtaaaatttccatcatgatgaaatttaaaaacggtttttgggacaatatcccatctagaaaatttattaaacaaaatttgcgcgggccattactctaaaaaactcttgaaactcagaacggtttttatcatcgccatctaaaaaacaatgataataacactgactcagcactgaaattaagcaccaccagaaccatacttcttgccgaacacaagaacctgcaacttgtcgtaaccagcaagcacaccatcaccagcaacggcacggaggatgttagcaccggcacccttgaacaaggacttggcgccctcattcttgaggatctgtgtgaatgcgtccaaggaactcttgtacttgacagcttcaccagaggtcatcatcattcttcttctaacagtgtcaattgggtatgatgcaagacctgcaccattggtgatgagccatcctagggcaaagcttgcaaaaaagctatcctgcaatgatcccgtgaggacactggtt

SEQ ID NO: 41692 - DNA, 464 bp, Glycine max
  Clone ID: jC-gmro02910023b03a1
ggggggaaaagaaacaatttaaattccccaaaatatattttcaaactttgggggagctttttaaaaataaacccatgctgaaaaattgttcctaaggggccaataaatgaagtgtgacctacaaacacatttaacaccttcttgtttttttcccagctaaggaatgaaaaggtttaaactttacgagcccgggccccttggtttgttccatgctggactaccttttcctccacaggaaggcccttaccccgggggactggattaaaaaatttttttgccggttttggaaaaaccctaaaaccctttccaaacttttaaatttccttttccgttttagggacaaaaaaagggtccccaggaagggcttcccaggggctaaggacaaaaagtgcacttgcggcaccaaaaatccaccttttaagctcatccgcaaaaccaaagcttttaaaaacaggaaaattccc

SEQ ID NO: 41693 - DNA, 571 bp, Glycine max
  unsure (1)..(571): unsure at all n locations
  Clone ID: jC-gmro02910023b04a1
gacggaagcaataaagaagacgcgcttgtgcggttatataaatggatggaataaaatgtttagtgaacaaaaagaaaaagaaaacatgagaatttgatattaagcctgttacaagaattaatcatcccagagctgatcttgtcatctcatatgccaagaaacatgctgcatttgcaggaacacttcgagccattgcaggaccaaaacccttatacaagcctttgaacccttctgtagctcgaatctttctgaatgcatcaaatgaaccagaaaattttgggtttctgtgatcatctacttgaatcacactcttaataacatcagttgggtaaactaagaaccagaaggaagctccagccaagcctccggcaacaatcagagaacctctacttagcccagaagtatcagtgcctcctgcaaacttttgctttaatgcttcgtatacaccaaacatgatagcatttccaggtatctcacgccccatagtgggaaccaagcccttgaaagacctctcatgcccncttctgacttgagaacatgcctggccacatccatgggtccttcatactta

SEQ ID NO: 41694 - DNA, 480 bp, Glycine max
  Clone ID: jC-gmro02910023b05a1
acatggggaaaattttactcgccgacagggtaaataattatgagaaaaagttgtataatatattaaacttatgtgaaatttctaatgttacacattataacataaaaaagtaatgacctttttctgatctacccacatcagtaatcgtataccgaaaaactcgctcttcaaaattcaaatgatatcatcttgacatcaaaagatataagccgcagattaaaacagcaaaattatctggtaaaaggaatcgcgctgacaaggtcataaagcctttttctggtgatccaaacctctactcgttgaaggtgatattatgacaactttgctttgaatctgcagggtttcatcaatcacttccgacagtcgacgcaaatttctcccaccgtggttgaaatactcaggtcattgacataatctaagtgcgtaaccatgtccaaatatacacgaaactttatgtcttctttttcttccgcttcactt

SEQ ID NO: 41695 - DNA, 513 bp, Glycine max
  Clone ID: jC-gmro02910023b06a1
gtgaaaacagaatgaagagaaaaaattgagaaatgacaatagtaagagtacctaaagtacaattaagtattaataatcaaaatgggaaacgccacataaaagaaacttggaacatggttgaagacttgaatgaaagtccctcttaagcaaaacagaaggcttgatcagtaaactaataagatggtgacatggttttgcccgggacaagttgcacatcaagcagttttggtagttctacatcaaaatattgttactcttccctttgaaaaaattatacagttaaactaggggtctcacttgatgatgaagactccccaagaaactctgatctcaatttcatcaacagttttccaagataatttaagccttctccgtctcggcctctaccccaaaacagatcatgtggtgaagcctcaactagaacagaaccagcagtagatagcagcatagaattcaattgcgggtagattgagaacttgcatttcagtgccctgtacatgacatcgatcttat

SEQ ID NO: 41696 - DNA, 519 bp, Glycine max
  Clone ID: jC-gmro02910023b07a1
acttcataaaaagtagatgaacgagaccttattgaaatgatgattatcaacacacaaaaagtaaatattatatatgatgatgatcttaattaagaaaggagtttagatgcaacgccgatccttgcaagtggaacacagacaagactatgtgcccttggaacagtgaggccggctctctcttccatgctaactttggcgtcaccacccttcaatatctgtccttgtggacccagcacttgcaagtcgaagcactgaataagagatgcaagaagtgttgccattcccgaagtagccagattgactccagggcacattctcctcccagacccaaatgggagaagttgaaaatgttgtcccctaagatcaagaggccctgcttccccttcagcccctgtctctaggaacctctcaggacggaactccgatggtctgtcccagtatttggggtctcttcctacttgccatacattgaagagaatcaatgctccctctgggatcacatatccattaatctcacac

SEQ ID NO: 41697 - DNA, 465 bp, Glycine max
  Clone ID: jC-gmro02910023b09a1
cctgaaatacatatttataataagaatataatataaatagtaataatgatagcatcaatatcaataaatgggtctataatcttgcattataaaaaaaatatggtaacaaatttgataatcaattaaaactgacaaggaagaaactactccaattgaaaactaaaatccgcacccataaaaggttcacttggcagcagcagcaccattggttggctttgaaggaacttcttcaaatgggttgttgttaagctcatcccaagcttcaatccaagtaaccatggcatctgctagcttgatgaagtagggatcaacagccccaagcttctccttgacttgcttggagagttcaatgtaacatttttggacagacgtgcactcttttgaaagagtggcactttggaagaatggaatgattttttcttgccagaagatgcccttgtcctcctttttgagattgacaaaagg

SEQ ID NO: 41698 - DNA, 476 bp, Glycine max
  Clone ID: jC-gmro02910023b12a1
atatataaaaagaacaaaatggcccataacgtacatatttaccagatacaaatttttcacgacatatgatgttacaaatgactaaaacttgttgataacaacgaacaaaagctatgtaatgaattcccacactaccacgcaggtgaaaattattgcataccaataatttcaagaacccttattaacttttactttcaaaggggttgggacaacaatatcatatgctaataaaaataatcttaagatgaacaagccggtttggaagatgggttgaaaggaacctgctcagcgcatgtaaggatttcatggggcccagactggtcttgaccaacacctagaaggggaagataatactggtaatgggaaacgatattggtcattgagtccacattaccttgtccacaaacaccatccccatagagaatgttcattggtgtgcccaatccaggaagacgattctccataggatgattctt

SEQ ID NO: 41699 - DNA, 499 bp, Glycine max
  Clone ID: jC-gmro02910023c01a1
gggaagagttgcattatacatcaacgggtcagtagaaacccagtagtctcttgtgcatatgatatattcaattacataatcagaagaatgtgttgcacaaatcaaacgaaggaataatacatacaagggttacgaaagaataatcaagacctaagtggcaccacaagcacccacctaatgattacaccgcaggaaaatgattctattcggatgctgatcagccaactctatagctttcaatattaaaacaaaactaggccaatgcacatccgaataaaagccacttcaagtgagattttctgacaagaatactcaatggctccctttagaagacacccttccatgctattttctttatgaagacaattggaacctgccactaggcttctttcttctccatccaaaggcagcataatatacaaaagtcaatccagccaatgcaacgaatgcaatctgaaagacgttgtacttgtacaaatatttaattccacgaagagac

SEQ ID NO: 41700 - DNA, 493 bp, Glycine max
  unsure (1)..(493): unsure at all n locations
  Clone ID: jC-gmro02910023c02a1
catgaaaagaatttgttaattcaaccaaaccaaataggtaacaattcacatctcttctacaacagaacgggagaaaaaaaaaaaagaatcttacatatcttgctagccttcatgctcttatctcaacataccaaagaaaggaaaacacaaaaacaagatagataaaaggatggtaaagagtaggaaatgaaagttcctcaaccactagatggtatttttgtagtatttgtataaatagtaatttccctggtccagctttcacactccatgattataacttagaagcatttcctgtgtacgattgatggtccagattcatcatactctgccttcgcaatccacatctgttggaaggtgctgagggaagccaagatggagcctccaatccagacactgtacttcctctctggtggtgctacaaccttaattttcatgctacttggtgccaatgctgnaatctccttgctcatcctatcagcaatgccagggaaca

SEQ ID NO: 41701 - DNA, 550 bp, Glycine max
  Clone ID: jC-gmro02910023c03a1
ataaagcatcattctgtttcgtgatagctgaaattataaaacatagcaacattagcccagcaaaggcaggttgcatattttgcagaagagccaggcctcatctttgcacatatccttgaaatgggcctcataataaactacgcctaaccagaaagaaaagaaagcccaatataagccaaggcaggctggacacagtttatgtaatgggccaacaagacttcacacactaagtcactgaacctaatttgattcttcaactgttaattcgtatttacagctgaaagtcaaagtactaaataattttcctaatgccaccttgcggcagcatcaactgagggggttatgtcactgtccgattgtgaatctgagaagctgtaaggtatgccgccattcacgaatgatgttgtgccaaatgttccattcacttgccagtcgctgcatcccatttgtgcattatgggttggtacatagttaccaacttcggcagatttatcaccaaagtagtcattctgatcatatgctattagtgatgcctgatgattgtttggaa

SEQ ID NO: 41702 - DNA, 580 bp, Glycine max
  Clone ID: jC-gmro02910023c06a1
gaatatcaattttgcattcatcactctctagctagcattagagaatatagaaatctggttcccgtgttgctagaggcctagcataattgtcattgcatattttttatgtttataaacaagcactccaatgcttgacaggtaaattttccccaaataaaaaaaaaatgcactatttgttgtcatgccccactttgggcagagatgtgaggtgctcggcccagtggcactgcaagatccttcaaaacctcatattcttccatacctatttgagaaccactcaaaaccctgtgaaatgaagccctcctatccgtcatgtatgagataagagcaggtaatctacatacggacaatgcatcaataaacaaaagagcaaccacttgccattgttttgttctgaaagctggaagtgcgtccacaaatgacattgtctccagcaagcatgccatcccttgctccatggtagatactggtattggcagccggagcacagcaacaagtgtaggtaaagctcgagcaagacaactggctaaagtttgttttatttcagatgagcgaccatctgccaagacaactttgcagg

SEQ ID NO: 41703 - DNA, 523 bp, Glycine max
  Clone ID: jC-gmro02910023c07a1
aatgagttgaaaagtgtttatatgcacacatcccatagctggcaggtagcacaaaccggatctacccacactgaaaaaaaaaggccaataaaataattcggaaaacagacaaacaataaatacaaaacctataataataaaaagtacacatggcctcctacatgtcggtggcagcgttttatttccttgacatatattaaagaaagaaaagaatcttaattgaaacaagtgtatagtagcgacactccataatccatgtgggtgtttcatagagccaaaaaagccataattaaactgaagaagaccatgaagaatctcacgtgcaatccgcttactccattgctgtcttcatccgcagccttctgatcttccgaatcagcgtcgtcgtcggatggtccgtccgccggtgcatccgccgcatggctgttggtcttgttcttgatcttcttcttggcgggctttggcgactgggcaggtgcattcgccgcgtcgctggccttgaagagctctctgggcatcaata

SEQ ID NO: 41704 - DNA, 552 bp, Glycine max
  Clone ID: jC-gmro02910023c11a1
agagagaaaatactgaaaatatattatataaatagcagaactctaataataatgacccaaaagtttcagaagaaaatagtcaaacaatattacaagataaaatacaacaagatcttaacactgaaaaaacaaaattagaaaaaacaaaggcaagaagaaaatcaatttttaaaagattccaagccacgaaacatgatactgctctagatactagatagaaatcagaactctagtttctattgcatgttaaacaattttgggcctcgccttaagttgactctacttctgccttttgtaaattttagccaaaaaggacttcaatacagcttgaactgctttgataggatgagcttcaatggaggatacaagcttcgcatagctcccactatcgtactcctcaaatacaccctgaagattaagctcattgtacagggcctttactttagcaacattatctggatctggcttaccatagatctcttgtagaactttcttttgatgttcattactaagttccaaggctttcacaattaaccaagagcacttgaaatc

SEQ ID NO: 41705 - DNA, 540 bp, Glycine max
  Clone ID: jC-gmro02910023c12a1
ggaagacatgaaaagcagtacaccagatgctggcagctggaatttttcacaaagaccattaatttaggctaacaaaatactactacattacagtaattattttcacaaaaaaatattacaatcagattagcaactgtatttttcattggattctgtgcaccggggatgtcacggcataaatatgtgggcactctaattcacgttatctgataatgatctcagctacctatgcgggcaatagaattgtcgagaggaattgaagaggaagttcaaaaaggaagccagaaaccttgttcctgtaccatcattcactgagccattgcattgcctgacaaagatcaatcaccttgtagacagtaaagctgacgaatgtttaccgaagcatataaccagtccttgaagtagacatggagcgcagatgacaatactcgtttgcgactttcttctaaagatgcttatcgtaagagttgccttatctcctctaaatttctgtgatttttatgctgagatgccatatacgcatctggtaacgtgaatgga

SEQ ID NO: 41706 - DNA, 487 bp, Glycine max
  Clone ID: jC-gmro02910023d02a1
gatctagagatatggttattaccatttaggaacggaatacaaatgttcagtatgtataatgaaaataaaatacatgaagaaaattcagaatagttatagagggaaacagggaaaagcacaacatgcaattcttttatacagcaactagaatccaaggatacacaaaatcgagaaacaaacaaaatatgtgtatatattgtctggatgtctccagttgaatcttactgataaaacttgtcatactatatatattaatgcacaaaaactgagacactgaatagaatatgtttttgattttgaacagaatcataaactcaaacacccttggaaatctttattatgcttcaatgaaaaccccccgctttggactaatggggttttttctgcattagttttggcttctaagatttttcatggcccttggagctagcccaattgctttaaagcccttcatgaaccttattcttccgacatgaattagtgaaca

SEQ ID NO: 41707 - DNA, 536 bp, Glycine max
  Clone ID: jC-gmro02910023d06a1
atggacttcaaaagtaccgatctccaaggaccaattttcacattattcctgtaatcactagtcagatatcctaataacagccgttttataattacagcaggcagccggagagaactctctctcccatcctctcagtgccatcaatggcatgctcatccgtaaataactgaatatacaatagaccagttggttcatctttacttgaatcactatgttaaaactaggaaaccaactggataaaagataaacaaaccatataaaaaaaatttcttaaaattccctttagattaagatttagtcattgcttgtagctagaattgctgctgatcttgcttgaaagtgaaggtttctccttgaggctggtagctaacaagttttcagagttgcttgattggctctcagcaacccctggcctcatccaaattttaatgtgcccctcccggcaggcagtgagcacagattcctgggtaaatatcaagccagagagtggttcggtatgcacacggtgagcaaccaacggagagatttttggaaca

SEQ ID NO: 41708 - DNA, 540 bp, Glycine max
  Clone ID: jC-gmro02910023d07a1
atcaggaggagaaaagagatttatcttctactctcaccttttatatcccaaccggaaacaaaagaatgtttgtgacctacgtataatttcacttctcttacaatgaatacttcttttatcatgagaaagagatttatcttctcccaccttttatatcccagctgaaagcataaacctacaacacgacttcaagcaacctcaaaatctgagcaaatcaaaacttcccaaagttggttgccagggacataatacaattaaaacctagtaaagcaaaacctgaagcctcaaattttcaggtgcacgagtgcagtagtcgaaaagcaatttagaatgcattaggaagaacattgattccatcacgaagaactggcatcagaagcctttttctccttctgtttttccctctttttcttgtttcgtaatgcattcttgctcagtggttctgcaggagtctctccaaacaactctgcctgaatagcagatgcattcttagcatgtggaggacgatatgcagcaggtttttgtgtttgggggttggta

SEQ ID NO: 41709 - DNA, 582 bp, Glycine max
  Clone ID: jC-gmro02910023d09a1
aaaggtaaatcacttcatgtcgattttggcacaattgattagatactgaagaaaacatgaaaataaccctcttttcttcatgttggaatagaaaaagaaaaaatgaatactttacaagattacatttttaacataatgtccgcgttgcaatcttgtcacacactccacattcacaatggtctgaaataaaagaggtgtacgccaagtttgagtgcaaacttgtggcatccaaactaataatagtgactaaaaaaaaaaaaatagtttatatcactttatagcataatatcaatcatagcagaacatgatatagacatgagccacactaaaatgctttgcattcctaggaatgattttcagtccgaacaagaaggctttgagcatcagggttcttgccccaagctctctccttccataacagctccacttcatcaaatgtcaatcccttggtttcaggaacatagacaaccacaaacataaacgcaagcacggctataatagcaataattaagaaagtagggccagtgcctacagctgcagcaaccgacagaaatgactgtaccacaatgagatttgagaccc

SEQ ID NO: 41710 - DNA, 553 bp, Glycine max
  Clone ID: jC-gmro02910023d10a1
ggctcaacaaatacaaatattgatgcaacatttagataattgcagacattttgtcctctattgtatgttacaatctgctgtgatacaggaaacagggtattctacataaccatcgggggttgggtgataatgagtagcatgtatctctaaatctgcttttacagggcaaccgaatacaataaagattccaacaaaaatattatattaaatagaaaaggaaagcgcagcattctcatatggaaacaacacttcacgagcctagaaacgggcattgcttccttgcatgctctggaaccaatttcaccaaaatctcagatgggactcctttcagttcatgggatttgaaattaaatagtggtggaaggaatcggccatttggcaagcgagtatttggatcacgaagctcgtcgaagaaaggatgcgtcaaggcatcaaaagctgtgcaccgcaagttaggggagtattgtagtagtcttgataccaaatcaacagcctctggaggcatgcgcttatggaagatcttgtgccatggatgtgctttaatctgtgggaa

SEQ ID NO: 41711 - DNA, 399 bp, Glycine max
  Clone ID: jC-gmro02910023d12a1
attgagtgggtttggggtgtctttttcgcttaaaaaaatacctttactaattcagaatatgagcagcggcgctggaaaggttggagcgcggcacccccgcttccggttacaaagcaaccagggggggaaaaaacccccccatctctgttacaccgaaaaggacaccgttcgcgacacacgtgggccgaaaaaaagggaccatttgaaaggccccaaaaaagagggggagaggctgaacctctacaaggcgaaactacccccccaaggaaacaaaaactctgtcgtttaaggccgccatgcaggggagaacactgcttcggggaagcaccacaaccccaaggcccccggggggggggggaaacccccacctttctacggggcgggaaaagggcccaaagg

SEQ ID NO: 41712 - DNA, 453 bp, Glycine max
  Clone ID: jC-gmro02910023e01a1
gggccaaggaatatcacattatcattgcccagggtattatatattccaatacatgccacatatgtatatgtttggactaaggaatgttttataacatttgattccattattaggcagcggatacattcttcaaattccttcactgatacagggctaatgcaactggactttatttatttaccgacaattttcacaagaagaaatgaagggactcttcattttggatactcttcttattcttagcaccaaccaatggggcaatgacctttctccaagtcttggagtcaacagcagctccagtttcaggcaacaagaatccattgacatagaaaaatggggttccatacacccctctcgaagcagcatacttaaaagaaactctgggctgaatatcaaatggtgggtcattgaagccattctttatggttttataataagagctcccaactactt

SEQ ID NO: 41713 - DNA, 564 bp, Glycine max
  Clone ID: jC-gmro02910023e03a1
gaacaatcaccatgatgattatcgttcttggatttaaccaatcttaaacatggaaacaaattaaagaggaatccttacacagttgggattttgtgttgagacatacagtggaataaatgtacaacaatggcacaaatcctttgcaactatgtttgcaatgaatgatgatgatatttttgtattctaaatcaatgcaaacttgggtctcctttccttctcttctggcatcagattcatctactctcttacaagaaacaaattgttgagtctatcttgaatgtcaaacattccatactcaatgtgctcataagcttggttaccaagaaaatcctgcaacctcccaatgaagtttccatatgctggcaacaagatcttttctatggattctatcattattctccttagctccttagtgaagacaaaccacgcagactgaacgttgcatatatcatcgaagtgtccgttgaaggaacgaagcttgtttttcattaactgtgccgcaacattaggctctgactcattgatgtccagcttcaaaatatccaagatcttattccatgagct

SEQ ID NO: 41714 - DNA, 521 bp, Glycine max
  Clone ID: jC-gmro02910023e04a1
gtacggtgagagacctttctatgatcacatgacaacaacgtgtagtagtgtacctatctacattctacaatagctgtacacatgctactactactactaggaacaggtcaacacacatgcaccgttggatcgtcgtcgtcatcatcacatagcaaaataccaaagcaaacggtggagccaacacatgcgtttccagcttcaatgtttctttctttcttactttggcctagctaagctaacttgatcaataatcgtatgtgtgtggtcgcacaggcacactcatggaccttgagtctcgtgctaccgtgcaaatgcgaatgggcggcgcgcgtggattttatgtgacatggttttaaattacgattgtggtcgcatggtgagtcagaaaatcttaagagcaattgcggatcgtaatttaaaaccatcatgatgtgctcaaaaggacttgttgggccagtacatgaacatgtcctgcagcggcgacaacaattgattattgccctggaattgggccatgaaac

SEQ ID NO: 41715 - DNA, 328 bp, Glycine max
  Clone ID: jC-gmro02910023e05a1
agacccaacttaatttttttccattttaaattaaaaaactccatttaaacccttcttttggggcgggggcaacaaaaaatcattctggggcaaaatgcccaaaaatttctggggtcatactaaggaaccctatgcaatattcatccaaaaattagcctagcccatccacaactttaacactttattcttaccaccagggggtacctttttttcatttgggctccaatcgacagaaaaaactttatcagcatggccaggaagatcttggtttaacttacgagttggaatttcccaaaccttaaggggggaatttttggtgccgcttaaa

SEQ ID NO: 41716 - DNA, 552 bp, Glycine max
  Clone ID: jC-gmro02910023e06a1
aaactggaatgaggaaatacacaattaggttgatatattcaagtatcaccaaacaatttattataaatgtgaatttatttacaatatttcatcttgttcttgttgggcgtaaaaagaaccatcttcaacaggcaacgatggtggggttccgggaggtatgcgagcagcaccgttctcaccagcacatatgcatagagcctctgcatctctgagggttgcatcaaggttgatgtgaccacttagctcattaataaacttcaaaagggtgtcgaagtccatttcctctccaattattttaccacgatatcgtttcaagattgccacacatacatacaggtgcagatgctcagacggataatgtgtccataaaacttcccacaagcgcattgttttctcgtactcaaactcccttttaaattgaatcaaaatccagcggaaacaaaagaaataattcaagcagtcacgctgcttaaaatagttatgcaatggactatccagcaactccaccaactttgatagtgcaaaaagtgagagtgcatgccgttttgatca

SEQ ID NO: 41717 - DNA, 430 bp, Glycine max
  Clone ID: jC-gmro02910023e07a1
aaaaacccccaaacagggggggccctttttttaaaactttttaaaaaaattagccctcgggggttgcaattttttcaacaaaaaaaaattttgaaaaaaaaacggataaaattcccctcaagggcccatagaaaagggtgaaaaaaaccaaaactaaggttcggccctccctaaaaaactgaacaaaaaaaaaatgggggggaaaaactttgggatttaacccccttccccccttatggttacataaaaaaactgggggggcggatcccccaataaatttttcctttttcaaaaggttaaaagcaccttccaaaaaaggagcaggggttttttttaaaaggcccccaattttggggggacccctcttaaattgcccaagggaaaaacaaattggggccccttttgaaccagttccaaaaggggggaaaaa

SEQ ID NO: 41718 - DNA, 348 bp, Glycine max
  unsure (1)..(348): unsure at all n locations
  Clone ID: jC-gmro02910023e09a1
gaaaaagntgggtcctaaaactacccaaaaaaacaaagtaaaagtaatttcacaagtattttatcatgggcaccaaaaaagcaagcgcagagggcaggggaattcttaatttcccatatttgataaaaatttaaactaatttagagctcatggggggaataatccttgttttagcctttgccacctgcaccatctgggggttctcctgatttttgaaacacaaaattgatgattgggttgcaaacggtttcaacctcttttaggttttttataaaatcttttttctccacactctgggtgtgatccagccattccaaggcgttttttactgggggctaaaatttttcc

SEQ ID NO: 41719 - DNA, 535 bp, Glycine max
  Clone ID: jC-gmro02910023e12a1
ataagttaaagacattcgacctgaaaccttttattttttgggtcgaagaaattagacctgatatctagatcacttgccaaaatttggcaatgtttaacaacgagacgagtgaaagcttacctactaaaatgtacttaaacaaagctagctccaatattcctgcatcccattacagggaaatcttgtatagagccgtgcaggtgaggaaaactttacgaagaatagcatttttggaattgttgttctccattggaatgcatataaaacaatcattgtgtccaccaatactctccactttttccaccagatttatgcataagtcttacatctgtaatggctatatcttttgaagcagccttacacatatcatacacggttaagcctgcaatagagactgctgtcattgcttccatctcaaccccggttttaccggttgatgcagcttccccttctattgttacactgaagtcctcatgattcaatctcaagtccacttgcacgtgtgaaaggcttatattatggcacaacggaataa

SEQ ID NO: 41720 - DNA, 552 bp, Glycine max
  Clone ID: jC-gmro02910023f01a1
gattcaaaatgattttatattaaaaaaaatccaatgggtcgtttgtaaagtcaggtattattggcaacttgagcttgctttgccccgacagagaagaactcaatgataacttccagtggcatgcccttggtttctggaacttttaagaagacaaacacccaagctatgatgcacacaaccgcatacataccaaagacaccaccaaggcccacagaattaagcataactgggagcgagtaggtgactatgatgtcacatatccaaaatgtaagagcacatatagctatgcatagaccacgaactcgagtagggaagatctctgaacaaaggatattaggaattggcccaaagcccatgacgaaacaacagaagtagacaataacactcgaagttgagataaaagcatttatagtactgtccaattccacaagactccctattactaatatgagaagtgatactatcaagacggggattgtagtcagcagcaaggttcttctgccagatatatccatgagcctcatggccacagctatacagggtaacatcaac

SEQ ID NO: 41721 - DNA, 548 bp, Glycine max
  Clone ID: jC-gmro02910023f02a1
acttaattgatcttacattattaatttaatcaaacatcattacaatgatcgacaacgatcgatctaagataaaatagtactagctaggtcctatttcacattgcatatcttccaaaggcacacaaggcaagcttattcaccgtggccacacacccacaccatcacgtttttgaacccaacgaaagatccaaacctagttagctaatcaagaaagccactggtacacattaataaataaataaataaaaatgtagccaaccagctagttacaaacctcacgggctatgccaaccttattattgacggtatcaaacaaaatcctaaggttctgttgctgaaagttggcgatgacgttcaacaccgagttcacattgtcgggtgccgccgccattgcaagacacgccagcgaacccgcgctgctgtggatcaagctgttttccaacggcagtttcaggtccaacccctcgaagtgcagcgtaattggcggcgccagagtttcgtaggttttcacaaaacacgtatcgaaggctccaatgctcgtgaatgta

SEQ ID NO: 41722 - DNA, 406 bp, Glycine max
  Clone ID: jC-gmro02910023f03a1
aaataacaacactccagcatccatcggggggaatcatgttgcatgcatcgcacgatgccattgcccattatgactgacctgtttttagttcccacaaattttacattgatcagatctaaacacaacctttgtaagttgcaccaccattgaaagttaaaacccttgtcacaatctggttgtggatataagactatccggacactaaccgaaagaaaaagtttgtggatattccaaaattgctttaattcgtaagcaagccatgtcatttacgcgttataacttataaaacacgaagcctcaaagttatccaaacttttcctgtttcatcacgcttgaggagaccggctacacacttgcgcttcttacaggaggtctgtagttggattccttatagagggtctgcgac

SEQ ID NO: 41723 - DNA, 545 bp, Glycine max
  Clone ID: jC-gmro02910023f04a1
ggaacacagcagcaatatttatatcaattattctcgtactacttttgccttgtttatgttatactggttaaactttgaaccaatccaaagcaatgatctttgagaagacaacaagaaaagaaaacacatatcaacgtttattacacaatccattcagaaaaacaaaaaagaacaccctgagcaaaaggacccaatacaattatatttcctgagccaattccactactttttccaccacagacgccatagaagatcttttcttatttgcaacaaagcacttatcacgaatctcccctttcccaatacgatccgttatcacatttagctggctcaccttcacaaaagcatcggaaaatttcttaaaaaacagtttctggtctgaagcgaactggttcacgatttccttggttttggggctgcccgcgatgtcctggtcagaagtgaacactccttggcggttcaagaggttgatgtaatacatgttgtcgaacttcacgggggttctcacgtccaaattaacggtgttgggggactcggcattggga

SEQ ID NO: 41724 - DNA, 471 bp, Glycine max
  Clone ID: jC-gmro02910023f06a1
ccccccctctagtagtcagtggtgggaagctgctcgtgggtgtggctgataaagacaacctcgtaaacaaggccagcgattccaccaccgatgagaggcccggcccagtagatccagtggttggtccaggtccagctcacgacagcaggcccaaatgtcacagcggggttcatggccgctccagagaaggccccacccaacaaaatgttagcgccgacaatgaaaccaatggcgatgggagcaataattcccaaattacccttcttggggtcaatggcagttgcgtagaccgtgtacaccagaccgaaggtcatcacgatctccaacaccaaggcgttgccaactccaactccagcggagagtccgaatgctggaacagtggaggcggtgacgaaggccaggaggagggaagcgacgatggagccgaggagctgggcgatgacgtaaacgatgccgcggaggaaggtgatg

SEQ ID NO: 41725 - DNA, 569 bp, Glycine max
  Clone ID: jC-gmro02910023f09a1
gccagcaactaaaagatttatttgaatttatggctctcagccagggtttacagttacacgcaatttatgtgtgaagccaataataactcaagcaagataaaatttacactaacagacttcgaagggtcctacaacatatgctcttttacaagattgacaacactgacacctgaggatgggaaaattttccaagatgaaaagtgtcttacacagcgactgggacggcttcatcaagagcaaggactcctggaagctctttgccttccaataactccaaactggcaccaccaccagtagatatgtggctcatgacactagcaactcctactttctccacagctgcaacagaatctcctcctccaataattgtggtcaccccctttccactgaggtcagccagcttctttgcaatagcctctgtaccaacagcaaacttgtcaaactcaaacactcccattggtccattccatatgatggtttgggtagtatccaatgcttcactgaatgatttaacagaatctggaccaatatccaatcccatccagccatcagggatggcagatgctggc

SEQ ID NO: 41726 - DNA, 543 bp, Glycine max
  Clone ID: jC-gmro02910023g02a1
atcacatagatatgtttcaatgggaaaaaaaacctaaaaagaaacattttttttcttaagaaatccttggaaaaacccgttcaaaatgctataagaacttcacgaatcattttctcaaattgaaccaacgagtacccacttggactagaagctgccacttttgccaatcttttccactccaaagctttctttttcatctctttacccttttcaccatccatcaactccctcacaaggctctctattttgcccctctcaatatcctcaatctccaacccaatcccccactccttgcaacagaaccgacaattggtatgttgctctgcaaaaaaaggccaacatatcattggaacacctccacacacactttccaacgttgaattccagccgttgtgtgtcaaaaaccccccaattgctggatgagccaacacttgctcttggggacaccaactagacaataggcctctatttttcgtttgtgccacaaactctttaggtaaaatagcgttttcaccaatcacaagatctggtcttataacccac

SEQ ID NO: 41727 - DNA, 540 bp, Glycine max
  Clone ID: jC-gmro02910023g05a1
gttcaatacacttttaaataccatgtgtgtgtgtgtttgacatgaaagattttcctccagctttgaaaaattgaattgacacagcaatatatctgacatagattcacaatcaaacaaagattacaagcaaaaactagaaacaaagaaagagggaaagaaaaaagaagcaacaaagccatgagcttgaacattcaaaataaatattgacagaaaaatttgtagttgaggaagagcacttgcacaggtgtgactgaaagcaataatttctttcaagtgattcagttaccagaaaggaaatggatactctacagcagagaagagttactgagaagtgaactagtcttctaacttttgctttagtgtgccctttttagacttctttaactcccatggtggtaggcaacctttatagtgagagtgcataaataatgaagacattgacacttccttctgaggcattgagattgacgacaagcaactgaaggcagttcgtagtcttcttttctcactatcacacccttgaaagtttggatcatcatg

SEQ ID NO: 41728 - DNA, 376 bp, Glycine max
  Clone ID: jC-gmro02910023g06a1
ggaagcaaaaaaaaagggccttgggaaacccaaaaaaaattggcgacccccccaaacttttgggagggggcaaatccccccccccggggggggtttaaataattttaccaagaaaacaacgttttattatttttttttgggggtgccacaacaaacacctccaattcccaagggggggggtattgctaggtcggggcatatccaattttttgcctcttccagtgggattaaataacgccactacaaaatgggtttcttaacaagacaccctccgaggctggtaactttacctgggggttgaggaaaaaaactccgaaaacctcttctttatttttttgacacacccccgggttaaaccttttcacccaatgcattt

SEQ ID NO: 41729 - DNA, 577 bp, Glycine max
  unsure (1)..(577): unsure at all n locations
  Clone ID: jC-gmro02910023g07a1
aaaagttattgcaacttttttttattcaaagactaatttccattcactaaaatgcaaaaaatacacagaaaaagataaaatttagacttgagtaacttttttttttgtgtgtacaagacttagactagagtaactagctacatcttaaaagaatacaataaaatgtttgaatcgataacacttgccaccccagaaacaatttaccaacagaacttcgcaaataacaatacccttcctcattctaggcgaagttgactgctgattgtacatgctcaacatcagtggccattagcaacgccattagcaatcacaccgttctcagcgtgagtcaaactgctttctttagttttctttgaatagaatctccgatacatggagtcaacttcagtgagatagaatgtgcccggagataaaaggctactgtccttgcttgtcacaaattccttcgcaccatatctatgctccattaacttcaagttttcaacaaactcctccggnggaaactcatgtcttgacttcaattttccatcgacattcatcactctagccatgttngacaagctaaacggatgttgac

SEQ ID NO: 41730 - DNA, 291 bp, Glycine max
  Clone ID: jC-gmro02910023g09a1
gggcactaattctgctgaaaaaatcaattttttccccatttggtcaaaattttcagggaataaacggcttaaatatttcccactttaaacaaatgccagccttgtcaaaaaaaaaaaaaaaactggggtaacaattggggttgccaaccgctctttaaaaccattccccgggcattttatttttctttgccccattagccccaaaaaggacccggggagggtctcctggaaaattttatcgggaaaaggttttaaaaccccaggtttttgaaatttactgctcccattggt

SEQ ID NO: 41731 - DNA, 539 bp, Glycine max
  Clone ID: jC-gmro02910023g10a1
aatggcctaataattgttatataaaaaagaattgtgctgcttaatcaatggcaaatactttgaggcccacttgctatagaaaatacatccatccacccgtagagaaaaggggggaataaattattctattatacaataaaataaagtaggattcagctttcttcttcggtgaacgtttcttcaaggcttccctgacctataaggtggaactctccgttcaaatctttggattaacctgaactttgttctttgcaatatcatatctcatcctatccctaactataatatcgcgtaatgttggggatagtagaagcagttcaaaatgaataaaatctttaaataaataaataaacgaactatgtcagaataaccaagaagcattgtcatggcagcagcccttgctgctcatgctaccatttgcttctgctctatatacagctgctccacccatggtgaaagcagcatctctttactgaagaagatcatattggtgcttctacccatggtgaaagaagcatctcttttgtgagatgatcata

SEQ ID NO: 41732 - DNA, 531 bp, Glycine max
  unsure (1)..(531): unsure at all n locations
  Clone ID: jC-gmro02910023g11a1
attctaagtatcagaatccactgacatacatcttattgatttattattatcaattgttacaaattaaggatgatagattcaggaaatttagggtagctagccagttacccggattaagattccctaaaattatggcattcatgcattcacttgataaataactaataatcaaaaacatgaaactcgaatcaatgtaatattcattcagtgatcgatattcccattcccattcacatgattaggcacaagagtcttgaaatgatgaatcagagccgtgagactgtcgtaagaagaaccaccttcttgaacagctttccaagccttctcctgcatctctttggccttacttctcattctcttccctttctctccatcatccatcaacctcttcacggcactctctatactctccccactcaccacctgcttcttcccctcgtacggcaaaatgctccacttcgncgnccccaccttcaccccgaacccgtgcacctncgttatcagcttctcgttatagtactggtccccgaa

SEQ ID NO: 41733 - DNA, 554 bp, Glycine max
  Clone ID: jC-gmro02910023g12a1
ggcaaatgtacacatatacttgcaggtattctatagacaccaagttcaaaaaatatacagatgaagttaaaggtgggcgagcatatgcatgttaattgaaatttagagacaaaaaactgatgtgcaaagcaatcttacagggaaaaaacagattgaaacaactattgattttgatgatggctattgtcattcaactcaagatcggttttgcagttctctctcaaatttttaagtgtctcaaagcttgtttcaagttggctactttcttgagtatacatattctgcatttgaagaaagagagactttcactgatgcacaagggacaattctaacttcaatgattcctcacttcggtgctggtcatgcatgactgtattctctaatccagaaaacttctgaatgatcatttttgcttctttctgactcttctttatagcacttaatctacctttggcatcctggtaatggagatccgaccagatataaccagctttggagcaaaaggaacaagtgcaagaattgaggtccgcagctttagtaacagaacttgagca

SEQ ID NO: 41734 - DNA, 53 bp, Glycine max
  Clone ID: jC-gmro02910023g12d1
tgcatcgtcgaacccacatacggcgaactgggtaccgggtcccccgtcgaggt

SEQ ID NO: 41735 - DNA, 585 bp, Glycine max
  Clone ID: jC-gmro02910023h01a1
atccaataagactttcaaatgttaatggaaataaattaccgagtgcgacacatcgtcaatttaaaaacagttcagacttgattacatggttttaaaaagatcagaaaagtcaacaaattgtagttttgcttccaagagtcttaagctctctttgtcactatcaccattatcactattattgccaaacctgtgaaggttcctcccatgctaattttactatccatgaaacttgctttagtgttcccatcgacatcaccagacatcttctctttcatagcatcaggtggtgggaatatgttctgaaggaaaccagacaccctacttaccaattcaataacggttagctttacattctgtagaagatccatgaaatcgaaaatcccatttcccgggtgagactcagctgacactcccaatttttcaggggattcaactgtttcagaagtacaacttgagaacttatccaattcctcagtatttcctgctgctccaagatcagccactgactgttgtgattggaagaaactacttgacagcaggatttccatgactgcattccatacatttgggtcacaagcaagtgaa

SEQ ID NO: 41736 - DNA, 510 bp, Glycine max
  Clone ID: jC-gmro02910023h06a1
gaccaagagatatggttattaccatttaataacaaaatacaaatgttcagtatgtataatgaaaataaaatacatgaagaaaattcagaatagttatagagggaaacagggaaaagcacaacaagcaattcttttatacagcaactagaatccaaggatacacaaaatagagaaacaaacaaaatatgtgtatatattgtctggatgtctccagttgaattctactgataaaacttgtcatactatatatattaatgcacaaaaactgagacactgaatagcatatgtttttgattttgaacagaatcataaactcaaacacccttggaaatctttatatgcttcaatgaataccccccgctttggtctaatggggttttttctgcattagttttggctcctagatttttccatggcccttggagctagcccaattgcctcagagcccttcatgatccttagtctccgacatgaatcagtgaacatctcccaaggaacatcacccacaag

SEQ ID NO: 41737 - DNA, 556 bp, Glycine max
  Clone ID: jC-gmro02910023h07a1
gaaatagtgaaccatgcattcaaatttaactgataacatttggttggaactccagtacattatgatagtgttcaggtgacataaatagaaaataaagacaatatgtggatggcacaacacttaagacagctagattgagagccttatctatttatataccattgcctggataaactacaaagcaagcaaaattttcattttatgatgactagtataataatattatatgctggttctagggcaactactagtccttgctatggctcatacaagctttatatggcaactcctagtggagaaacttccatcttgggtatgatcttctttggttctacagctttgacctggtttccataagccgatgcatgcactccaagagctggtctacctgatggatcaaggttgttagaccaagcagtattccactcaacagcttttgctgtgctacatgcaacatttggttcttcaggaacagtgagccttgctgagttttacaaaccaaattaaggggcacagagatctggatcagcccttggtacatcgacatgaatatttt

SEQ ID NO: 41738 - DNA, 502 bp, Glycine max
  Clone ID: jC-gmro02910023h08a1
agttacaaaagaaaagtgtttcttgttggatgtatattattatacacttgataaaagccataattcacgtatcacaggagtaagtgttacatgggacggaactaacactgtaaaaccagctttgacaatgaaaggggggaacttagcttcaaccaagcacacaagaattttgttttggagggaggggattaataagatcgacaccacatttacatatagcctgtgtgaaataataaaggcatggggaacggcttgcacaactatgtttgctagctacaaataggactcaattatggtaagcgaggatggagcgaacagctctatgctggaagaccacagtgagttcaaatgggatacctatgcttgcgtgagacacagctacaaggaatgcctatgaccaaactataataagctgattgtgccacatgccatctttcttgttatccatcaccagatatgcactagccttctagtgaagaacacttagccagagttactatga

SEQ ID NO: 41739 - DNA, 377 bp, Glycine max
  Clone ID: jC-gmro02910023h10a1
gggggggggggaaaaaaattccccccgggggtttcccaaagaatacttcgggccggagggggaaaaaaaaaaaagggaaaaacactctttgtctaacaggcttgcccccaaaagttcgcccccacaaaaccacttgttgtgtggaagctcccccccccttagggaaaaaaatgaccgcggcccaaaaaaatgggggccaaaaaaaaatatttaaaaccccccccccccccctctgttcttgacacacgagccgcaggggcggggatgaatctcgcttaaaaaagggggggggagtaaaaaaacgacgccggggaaaacctggtaatcccccccccacaattgtcccccgggaaaaaagtaaaaaaaaagttttcccc

SEQ ID NO: 41740 - DNA, 450 bp, Glycine max
  Clone ID: jC-gmro02910023h12a1
ctatgctatatttttttctcctccatttattccgacgactcctattaccccgcgttaaaacaacaaggcgccccccccgagaagcggcgtaaagacaaagccaaacagagcacccctcgtcaaggagaggaagtcgtattcccgccgccagtgccccaaaaaaaaaagcggggtttgccacaaaaaaaaacaatgggggacaaaaaaaaaaaaagcgaagcccgcccggggggatgccccggccaccctacaaagagcaaaaggcccaggccaccctgtgggacaaatactgaacccccccccttattatggcggaccccctcccaggatattatgcccccccccacgcccagggctgcacacagaattcaatggggggggcgggggcccaacttccgacatgctcaaccaaaaaaaacccccagaggggggggagagaaggaatttctt

SEQ ID NO: 41741 - DNA, 539 bp, Glycine max
  Clone ID: jC-gmro02910024a01d1
cataacaaacgtaggtgggatattagagtactattattaatgggacacaattgagttcaacacaaaccgaacttattttcaagggacattattacagacccattaaacatcaaagttcttcaaatgttttgggaacacattcaacattacacaacgagcttaaaaccccccacggagacggaggacaaggtgaagggttgattccttctggatgttgtagtcagcgagggtccttccatcctcgagctgcttgccagcaaaaatcagcctctgctggtccggtgggatgccttccttgtcctgaatcttggccttcacattgtcaatggtgtcagagctctccacctcgagggtaatagtcttacccgtaagagtcttcacgaaaatctgcataccaccacgaagacgcaacaccaagtggagagttgactccttctggatgttgtagtcagcaagggtgcgtacgtactcgagctgctttccggcgaagatcagcctttgctggtctggggggattccctccttgtcctgaatcttag

SEQ ID NO: 41742 - DNA, 443 bp, Glycine max
  Clone ID: jC-gmro02910024a02d1
gagagggaattattgtgtttttgttgaataataactaaaacataaaattcaatctaaaactggagtagtagacaagacaggtgaaggcacgcacgatttattatgtttggaatctctcatgacaagccatccatcaaaccagaaaagaagccaagcgtttgatcatggctttagcaagatgagtctcaggcttgaagagctggaaagcatgctcctcatcgccagcatcaaagagttgaagttcaccttgccagccactttgctcaacggtgtggtggtagagaatatctctgtctctgaactcgtctttgccagtgatagtaacgagcaacttagagcaggcaagagtggccaaagagggtgccccaggaacacaggggttgatccaggggttatcgattccaccgggggcatcagggcaggcaaagttccagaccttcatg

SEQ ID NO: 41743 - DNA, 563 bp, Glycine max
  unsure (1)..(563): unsure at all n locations
  Clone ID: jC-gmro02910024a03d1
attcaggtcttgtattctgagacagcttcaattggttgccacctcacaatatcatcaccaaataccaccacttattatctccttgcactcttgaggtaatctgcccttattgcccacaattgctcgcccactgatttcatgtcaggtctatctgttcgaatgggggctgcacattgaaacgccaaatcaagcattttcatcagaacatctccgtttacagcttcttccattaaaggatccacaagttccaccacacttccttcattatacttcctgaaggcccatctgagtgtaacccgctctgcaacagttttcttcaactcaacaggacggcgggctgtcacaatttctaaaagcaaaattccaaatgaataaacgtcactcttgggagtgagttggtatgttttcatatactcggggtccaaataaccaactgttcccttcactttggttgaaatgtgtgtctgatcagtgttcactggtcctagccttgcanatccaaaatcagcaactttagctcgcatgctntctgtcagaagaatgttggatgatttcacatctcg

SEQ ID NO: 41744 - DNA, 289 bp, Glycine max
  Clone ID: jC-gmro02910024a05d1
ggagccgaaatcaagtctcgacattagcttaaaaaatccggttcaataattcaataattagctctcagcgaaagtctaatctaccacgtgtcttaaggaggcaccaaacaatataaagctacagatggcgtccttggtttttaattttaagttgggggactccagataagccgttttcgataatcattcttcagtatattcctggaatgattctgtaaggcaccttgtcgcaatatagtttccagtacttgccatacttggatctgcaacgatcatcatctcgttttgc

SEQ ID NO: 41745 - DNA, 522 bp, Glycine max
  Clone ID: jC-gmro02910024a08d1
aaaagttaaaacatgcatgattgcatttattattttggtttccattatactaacacaactctctttattaatgacaaatacaaatacattcagccactccaaatacatgacttaagcatacacaactgattaaggaatctggttccttcaatttcacatttatttaaaaccaggaacagtacttaagcaaccatagggtccttagatagagatactgttgggaattcctctgaaagtcaatccctcctcactagaaggatagagcagagtgtaaggcattttagctggcccatagcggtttctcaatgtctcatctttgttcttctctataagcttcttttcaatctcttcaagcttctttccaaaccttttaaatgcctctaatggaccggcatcagaagtccagtagtcaccaccatctatctgtccaaggtagaactcatcagatgcgtgccttgacaagatttctataactgtaaagtcaatgagggtctccttcttgccagtcatagtcttcaaaaa

SEQ ID NO: 41746 - DNA, 565 bp, Glycine max
  Clone ID: jC-gmro02910024a09d1
gaaatgaaattcattggagattcattaaaaagggaagtgcccaaatgtgcgtcttgggtacaaaagtatctatatagtatatactaattaagatttggatgttgccttgcatgagatatttgctactaatcatagccttctacaagaagtgaataagaaagtatttcaaggaattgcccctcttagccaacccaccacatgcaaaagaaaaaaaaataatatctttgtttaaaaaaatgaagctattggagcagaatacatgtattccagtattcccagtattccagttcgatctaacctgcagagttgcgaggtggtgctttaccaataagcactgcttcgccatttgcagcaagttcctccaagcgtttccaagtggcttcacgccctgccatgacttcacttttctttgactcttcttcctcaaacttttgtaaacattctttggatagatcggcatcaacatcattaaaaatcttccgcacatttaaggtcaaaccatggacagcttggttccaatgacttctagcatttctctccaatgcagggaagatgatggcattat

SEQ ID NO: 41747 - DNA, 574 bp, Glycine max
  unsure (1)..(574): unsure at all n locations
  Clone ID: jC-gmro02910024a10a1
gtttgttttctttggtttttaattctccgttttccaaatccatgattgcttcttgctgccgagaaaccgttccgccgccgtccattcccgatctccggtaaccggaaaatgatccctttcgcgcatccgaatcccggcatggcaagccgcaacaactacaaccgcgccaccgccgagacggttttcgccgccgccaacgccatcgtcgccgccgaatccagagtccaacccaccgacgcgccgaaaaaacgttggggaggctgctggagccaatattggtgttttggatcttgtaagagcagtaaaagcagcaagcgaattggccatgctgtccttgttccagaacctgctgctccaacaggtccagcagctgctgctgctgcaccaaatccttcaaccgccattgtaatgccgttcattgcccctccatcttctcctgcatcttttcttcaatctgatccaccatctggtattcaatcaccgnctggattactttcactctctgctctagcggccaatgcttactcttctggtggtcctgcatccatgttcaccattggtccatatgcctatg

SEQ ID NO: 41748 - DNA, 417 bp, Glycine max
  Clone ID: jC-gmro02910024a10d1
cactgtccattgttctgcaaattacaaaactcctgcttcctatgagttaatgtctgcttgtaatcgttccaagcttttccccttggtttctggcaccgcaacaattataaacaatatagccagtgcattaattgctgcataaaggatgaaggtaccataggagctccagctcatgaagaagtagaaagtataggaacataaccatgcaccaaaccagttcactaatgtggccacacttcctgccagccctttaatattgacaggaaatatcttagacatcacaacccatggaatagctcccattcctattgaaaatgatcctatgtagaccagtatgccaaatactgcaagtgctgggactgccttaacaccaacctcgtgaaccttgagatagaaagcatctgctccacatgtgca

SEQ ID NO: 41749 - DNA, 368 bp, Glycine max
  Clone ID: jC-gmro02910024a11d1
aaactacaaacacaacatttttattttcatgcatggcagttaataagtactgcaacaatacaagagtttaacattacaatgagtgactgagcatacgacaaaggcaaactagtgtgcatatatagaatcattattcccaaaacgaggtttcagatttttcacctcaaccacgcattggattattggttctaaacatacccaacacaacataaattaaggataataaaaaacagttttcacttcctgcaaacgattcccaacccatttgaaaacttggtgcaatcaagggtgccatattccatggtctctttctcagcagaactttcctgtgagaacacacaagatacacaatcaggagagagcaatga

SEQ ID NO: 41750 - DNA, 472 bp, Glycine max
  Clone ID: jC-gmro02910024a12d1
ccacaaagggtacatggtcatcactgttgagattgacctttattacacaaacccagggaactgactccattcacatggtggcctgtaaaggctggggaacccacataagatgttttatagtgaaaaagtgacacactgaatccttcccaggcttgattccaagttgcctaaatatgatgtgatttgggctccaatcagatgtgtccaaatgacaaatgccaagagcttcaattttgtcgtcatctccattattctcactacctagtgagaccttgaacaccttgctccctgttgctatgaagtggcaatagtaaatggcataagggtatggtaagggatggcaagctacccatttagaagcattgatatcttctgatacttccaaaatggtgaacttttgtagagggacacctgaggccgtgggaagtgtggttgtgataatattatgcttggtctctaaaccaatgatttt

SEQ ID NO: 41751 - DNA, 583 bp, Glycine max
  Clone ID: jC-gmro02910024b01d1
cggtgtcaagttcaagtaaacttctcattgatataataataagcaatacatatcaaatcattattcttgcacatgcaataagcagatcgcatttcacattatccaaggaacacatctagttgtagcactcgaagcacactaatataatggaaatggctggctagctagttttacttggggcaaccaggccattggacatccgggggagaaagtgttttaagaaccggattcctctcgaagaaattggttggcctgagctcgaatgcagtgctcaataatggcattatggggaagtcttcctgtgctggaacatgatgaattcccacaacgtgccacagcacaatgtccttgttgttaatgtctctattctttttggtccaaacggctaaagtatcatctccatggctgtgatcaacgtagagtccaccagcccacttctcagtcctattgtatggagtgacccacacattgaaattggtaaaagcgccacgtatttgtggataatcgtcatctgtgagaagaggatgagctgggattgctggaatcaaacggcttccacatcatttcaacagaggttttcttg

SEQ ID NO: 41752 - DNA, 562 bp, Glycine max
  unsure (1)..(562): unsure at all n locations
  Clone ID: jC-gmro02910024b03d1
gtaaggagttattttgcttttaaattattgaaaccatcccccgtgatggaagatttttgtgctaactagcttagaaaataatcaattggaaatttctcaagctcaatatctcataggtgttacctaagacacatttcaaaaggtacaaaaaatgtttgagcccaactaaaattcttaactttgtttaagcacttaactaatactgatttatcctcttcaaaaccttgagaactctcactacttcattcaacacaattgctggatcagtagtgtcaactccaaccattgcagccaatagttccattttctcctttgtttttccatcaaacagcaactcatccaaactcatcatcacttcttcatctgatgcatcaccaactccctcattagatgaatctgtgtctgacttggcactagaatgctccccaagaacatcacaatagccagatgagtcttcatttggtgtgaagcaattggaattgttcagatcattgaattccatggtagaaaaaatggngcagaatgtgcttaaagggtgtgattatttggagtgaagaggctg

SEQ ID NO: 41753 - DNA, 570 bp, Glycine max
  Clone ID: jC-gmro02910024b04d1
caaaaattaaaaggcaaatagtattcgaaaaacataatgtataacaaaatcctaaacataaagccagaacgaaacctcaaagaaaatccaaaattgataaggttttaatatgtcaccttccagaaaagaaatcagatctactaaataacaaggtaacatttttcttcaataaaaactggaaatcgaagctcacattccagtaaaagccttctttgcaccactagaagatccagctgggatcactttcaagacattgaacctcactgtcttagagagaggcctgcattgaccaataataacgtgatccccttccttcacacggaaggcaggtgatatatgagcaggaatatttgagtgcctcttctcgtacctctggtacttcttgataaaatggagataattccttctaacaataatagtcctgttcatcttagcactgtgacatgttccagccaagatacggccacggatggaaacattgccagtgaaggggcacttcttgtcaatataggttccttcgatggcttccctgggagtcttaaatccaagcccaatggacttccaaaagcg

SEQ ID NO: 41754 - DNA, 512 bp, Glycine max
  unsure (1)..(512): unsure at all n locations
  Clone ID: jC-gmro02910024b07d1
attggaattctattttattcaacatgaaaggtgatacaaattttatttaaacttgaatacctacataaattcgaactacttgaacaatcaattctaatttcaagcctgaccttgaaacatccaattacataaatttaattaaacacaccacaacgctatcaaaaggatattcaaggcacatcacgacactgctaatgacttgctcaactcaccacagaatagatcaatggacactcctttttttaatgcggtaaacaaagtaaagaaaagtaaactgtaggtgcaactatcacacgtgcaacatgacaatgatatcacttcatcacttgttaattcttctgcagttctttctgatctcaccccttgaccctgttaaaggagtaatgtttcccatcttaaccatggacttggcaaattgttcaaagaaaatatcgttgttttctgcatactgcttcactaaatccgcggatactttattctttgtcaagagaatntcgtcagaacttaagaga

SEQ ID NO: 41755 - DNA, 521 bp, Glycine max
  Clone ID: jC-gmro02910024b08d1
atgttagcactaagattctcacagtattaatatatgcatgatatattatgcaaatcctacaacttcatccaatgacattgatcagagcaattatttaaacaccaccttattcatctaatacttaactgccttgcttacctcaatgttcaagaacaatacagagtaaatattcgcagacattgaactaggtgaccaattccattattgcctcaaaactttttcagacgaactaactcaccttgcctagctccagattcaagcattgcctctaacacagcaacatctcttgcaccttcgacataagagaggcgaggctcagtcacaaactgattccgcttcttgagggtgatttcagatacatgattaataaaagcttttaattcttcagttactccactgaatgggaaaaaagagctttcgatttgtccatcggaaccataaaatgaaaccaggttaccatgttgagcttggaatccacgctcaacttgtagggttccaattaagccaacaacttgccacaa

SEQ ID NO: 41756 - DNA, 466 bp, Glycine max
  Clone ID: jC-gmro02910024b12d1
cagacaaactcgcagtttaaattaaattactaagcctattaaacaaagtttaagagcggaagtacaaccaaagaaacgaaaggggggggagacaggttagagtgagaaacattacataacagtttccaaacgcaaactaatttcatctactacgacggaggacaaaatctgatcaaaggagctcagcaacatttgaaggcagctcctcaacttgcacgttgtaaaacttttggatgtcaaacagcattttctcgtcatcctttgtgacaaaattgatcgcaacacctttccttccgaacctcccactacgaccaatacgggggagatagttctcaggctgtgtagggagatcaaagtttataactagagacacttgttgcacatcaataccacgagccaaaagatcagtggttattaagacacgggaagacccagaacggaattcacgcataataatgtccctggt

SEQ ID NO: 41757 - DNA, 546 bp, Glycine max
  unsure (1)..(546): unsure at all n locations
  Clone ID: jC-gmro02910024c02d1
gggatcatattatagattaaaaattcaagaagtaaatatcacatattagcatataatataaggagcaaggctcagttaaataattaaaaaaaatagtgcttctcatagtgatagatagataatatacaatggaaacccatcaagtttcaccccattagtagctatatattatcaaatattcaccactcaaaaggaaccaaattccctaaccttttttcattcttttttcttaggagtaggaacagaacaaaaacaaagaggctaaagtgggggtttgcttctggatgattccaagcgatgaaattacaagaacaccccttctacagtgtggcaaaatctcatccacatataaaaacaaaccggcccaaaagtgtgttttttttttttttacttccaagaactgtaccacttgttattagaccctcaacagcactagcaaaagggtgagaacaagggacactagcaacatgctcgtgtcttgcaaatgaaccactcctttgtttgagtcattgaagcctcctnctggtccagttgaagatgttgggc

SEQ ID NO: 41758 - DNA, 267 bp, Glycine max
  Clone ID: jC-gmro02910024c05d1
gcacaacagtaaattttatttcaagctcaatcgttcagaatccttgggaaagatggcaaaaatcttaaatatacttataacatttaataaccgacatgtattcatgagcatggcgaaaggtacaagggtgaggaataaggcgagccaggatcaatgatgattcatatttgacccatttgcaattcatgggggaggtgaccggcgcctcctgacacggataggtcaattgttatagcctttatctgaagattcggttagatcatcaga

SEQ ID NO: 41759 - DNA, 550 bp, Glycine max
  unsure (1)..(550): unsure at all n locations
  Clone ID: jC-gmro02910024c07d1
ctaattgcaatttacaaaatattcgatacacgatcttcaaatatgttttcttaaaaccgatttaacaaaacagaaatagaagacaaaaagaaaagaatacatcttttttttttcttttgttactaagtatgttgatctagaacatgaaatccaaaacttatgatagccaattcacaagacaaaatgccatctatttatgcatttgtcttttgcattacatttggtgtcgattgatacttcaattggtatccaatgcatggtgagggatgtcacgttcaaaattttattcccttggggctatattgcctatcccttttacaggacaaatctgtacaagtgtgagaaaatcacctcagctgtctgagtctatgtcacgaaatggtagtggaactgccttcactgcccgataacgacccacgttgtttagatgctcattctccaatctgtagaaattccaatgtcctcgtcgaataacctctagtgaagccaacanaaagtctagtagccttggttggacaggccccacttgaggtgcacgatagtctccacc

SEQ ID NO: 41760 - DNA, 544 bp, Glycine max
  Clone ID: jC-gmro02910024c08d1
atcagtgagtgaccaagtcgattttttctttagtattacatcaatagatattcaagtcttaacatcatcgtcagatcataatattgttacaaattccaatgcccttcagtatgtaaatttacatataccagagattacatttaccactgcccattacactatgaggtaatacatatatataattcaacgcagattgagatcctaccacatcacgttattcacgagcagtttgtgtcataactcacaagtcccaacaactctggaccttccaaacgaggattattctcaaagttattcaatggaatatgctcgaatggcccggaggtaggaattgtaccacataaatcattattggagacatccactactttaaggcttgaaacagcagcaagttccttggggatcgggccagatagtcggttgtcattgagtcgtaaaaagacaagattcttcaatttccccaatgaaggtgggatggtgcctgatatgttgttgttgtacaagtgcaagctaactagactcttcaggtttccaagttctggag

SEQ ID NO: 41761 - DNA, 567 bp, Glycine max
  Clone ID: jC-gmro02910024c09d1
ctcatattcgagtgtatggcatttcattgattttccaggaaaaaaaataactaattaacttcaaaagtaaaactatccacttcattccaactccttcaattccattttccgaagaggaattccataatggaaacttgggagggaggaggataccaaaacactcatgatcttgttcgaactaacaaaatacccattataggaaaacatgtataaccatcacagatttctcatattacaagctagttagtgtagcataaacttcaagtttcctgtgcaaaaaccatagcaccacgaagttcaactagtgccactgcttcattaatcgcatccatcacttctggctttcccccactcactgcttcatccattggagtcctctcgtgactgtttaagacactaacattagctccagccatgattaatttcttcacagccttcacatgcccattgagacatgcccaatgaagaggtgtattcttttcctcatttggtgaattaagatccacccctctactgattaaatactccacaatatcaatatgtccattagctgcagccatatgaaga

SEQ ID NO: 41762 - DNA, 550 bp, Glycine max
  Clone ID: jC-gmro02910024c10d1
ggctattaattccacactttccaaataaattctttgaagtgaacagaagagttcaaagagctaaacactacaaatatacgcatttactttaacaaatgagtgaacgataaacattatcaccctaacgagtaaacataggaaacttcaaacttaactacagtttagtggagaagaataatataatatcatgtatgtatgcgacaaactaggcaagaaatgtttattcatcatatcagcaccataatccatcggtcaaaccttggacgtaattctgaacgagtaatccaggaaaagataaaaaaagaacaaaatcagcagctccatcaaaagcttcacttttttatcactcatctactctattgggggggaatggaaccaccagcagccttgatttgttgctgcagactgaataagtactgtagagcgttcttcagtagagagtactcctgttgcaactgtgatagacatctcatacatccttcctggttcttagcctcacaaaaagctctgaaggtggcgcacacatttttaactctagcagcaccaatac

SEQ ID NO: 41763 - DNA, 536 bp, Glycine max
  Clone ID: jC-gmro02910024c11d1
cacaactcacatgtctacaagtttattgggccatcttgatggtgggtacactagaacattggtcataacaacgtcataaaccttagcactgctattttgttatgcttctatatatgtaagatttcaagccatgagaggaaaagggagggaaaaaaacaaagggtagatgtaactagaatggccgcagggtatctttttactgtagcaagtagggtattaacatggtgggatatgctactatgtgagcatgaccccacaaccccgacgataatacaggtccatgaaagttctgtacgcatgcacatggttcatctatccatgttaaatagagggccgcagtaaaatctatccaagctcagcgggtgcttcacactgatgatcaatgacgaagtgaacggggataatcaaaagggacaggggaaatggcgtcttccaagagatccgggcgcatgtaaccaaatttacgcatgacttgattgtcggcaaaattcacagccctttgcattccggtccagcaatcattagcggaatacatg

SEQ ID NO: 41764 - DNA, 572 bp, Glycine max
  Clone ID: jC-gmro02910024d01d1
atctgaccattgacctttctattaaagatgacaattacaatatgcgttttacaaagcaaaagcctaacaaaaataggagagagagagagagagatttcttgatcaatattaacaataacgcgatgtagcatacacatctatatcatatctacttagaccatgcaactgcatcgatctcagcttgtgcactccggtataactcaagtctctttgatagggcacttcgtctttccatgattgcaggatcctcattcagaaatgaggacagacgcttgggctcaattttgcctagctcggtgaaaaactgatcaagtaggcctcgtttggcttccctcacttgacaatagacaattgacttgggaattgaatgacgcagacttgcacagaccatattgacataagacagaacattggttcctgtttatacatacacatcactactgttagtagtttaattcattttcaacatattgacaatgtacaggctaaggttaaactattagggaaagcatgatatctcagtccaagttagaaaatgaattttggaaaacttaccagtacttctaagatat

SEQ ID NO: 41765 - DNA, 544 bp, Glycine max
  Clone ID: jC-gmro02910024d02d1
catatccatttgttattatcgttattatcccacaggtatccaagaaaagtcttggcggcatccaagcttggaaaatacgtcggttcaaggaaaatctgagtcaacgagtcagccgagtcgcaactcaacccaactcggttaccgttagcctctgaacttcccatcaccaccgccaacacctgcttatacgcgtagaagaatctcttcatcgccgcctcaatcgcctgcatcgcctgcaacaagtgaaccttctcgaactcgctcttcgaaacgtagagcttcatcgccgcctcttgaatcctcggtcctcccttcggatccacctccacctccaatatctccggcaccttgtgcctcagatctctgcacatcttcgtcagttccactaactcattcgatctgaagcagaacgatgccgtttcgccgctcgaggatttcaccgagagttgattctttagcctcaagaaatcgtccggatccatcatcaggtggaggtcctccaccttcgcgagaagcttccagatcctctccacggcgtagcagt

SEQ ID NO: 41766 - DNA, 610 bp, Glycine max
  unsure (1)..(610): unsure at all n locations
  Clone ID: jC-gmro02910024d03d1
gagcggattctagttcatttatttctctatattgatatcgaactctataatgtcatcttatctaaataaattagaagtcccctatgcgaagggaaactatcatacaacaaatctggttgtatcaactattaccatgctataagcaaagcccttgcacggacctaacttttgctgtagttgctacttggaattgctcacaagacagcaccacaaatttctgtcttcttcacatcaccacattatttctcaactttatcacatcaaccttcaactgtgttggggacgaagaatctgatcaacaagcttctctggaagctttttagtagcctggaagttcctcatgtgcaatataggttcacatccaacatctgccactgatctgccattcggtgtttgcaacttaaatcgctctgccttgtatgcagaaaggatattttcttcatcgggtaggtgattgctaactttcaggagtgagccaagagaattcatcttcatgtatggacaagatgcacagccaccatgaattgaacagccctncccgtagctattcctgtacacaggaagtatgatatcacccactttgcagtctgaaggccgaggataaacttga

SEQ ID NO: 41767 - DNA, 469 bp, Glycine max
  Clone ID: jC-gmro02910024d04d1
catgtaaatgtaaatgggggaagataccaatttcaatggaacaaaatggaaactgaaattttgaacattaaaattaaagaccgaagagccttctttttggaaaacttttcagccaaacttgacaaatatttgaattttctacccattctactcaggctttcaaaggaaatttttgacaaccaaatagggtgtaaggcccaattagcaagaatcctgtgtcaatggatgaatcaatgttgtgcacctcattggatttgaagtcttaaaatgtgtgatacctttcacaattcaattttttaacatcccatcacagcacacttattgacaaagttgccagaccgttttttggcgagtcgattccactgaggaggtcctttattgggaacccattaattgagtttaataaaacccttaccatgagtccttggtccaccgatgacaataagcataattttccacgccctgaatg

SEQ ID NO: 41768 - DNA, 519 bp, Glycine max
  Clone ID: jC-gmro02910024d08d1
gtggcaaacagggaatattgttacatgtcactttacaacaataagccgtcagggttaaaaaaaatatatggaaattaatatagttacatggcactttacaacaaaagggcgctcatgaagccgtaattgcacctacctagtcacacagattgaataaattacctaagggagtttgattggcaacaagattgaattttcattcaacttgatcgtttcctgcttgtaagcagggaacttaagtgataaaaaaattaaaaacgaattattatttttccttatatgcttgcttcaagtccttgagtcttctgctttaagcatactcaggattcagtgctaatgcttccctgtagatcatctcttttatttgctcttcatccaattgctgttgctcaaaatcaaatgagaatggctccatgcagattggttcatcagctacatcatgcagtttttaaggtatggatgggctagtgcttcttcaactgaattcttttggtgggatcaactgtcagcattttatca

SEQ ID NO: 41769 - DNA, 387 bp, Glycine max
  Clone ID: jC-gmro02910024d09d1
gggggggcccccgggggcaaaaaagtttcctttaaaaatttccccttaaaaaaaggggttcattggggagggtgccaatttttaaacaaaaaaaagggaagttcttctataggggctagggggcctttttaaaactggtggaaaaaagttttaaaacaatgggggtacaaggggaaggatcgcatcccccagaaaggggaaactttgggaacttaaaccaatcatgctaaaccccccataaaatgccccggttatagggaaccttttaggcatgaaggaaacttgttccgcattaaatcccggggaaggaaaccttccaatctggttggaaatggggccccaattgccaggggggcctttggaacaaaaaccaacgaaaagtttttg

SEQ ID NO: 41770 - DNA, 515 bp, Glycine max
  Clone ID: jC-gmro02910024d10d1
agcataaagaaacaaataagtattatttaagagaaaacatccttcacatggaaggccatgtattgatatttgcacgcaaagctacggcaaacaaatggaattctattacattatgaattacaagttccttgcatggcatacatcaaggaaaactgggaagttgttgtatgtggattgatttgccacagccttatatagacaaaccaaatgcttaatatcaacacaaacacgtgtacagaaaagaaaccactcttcaagaaaacagaaaataagaaaaactaacatattggaagaggtgccccattccactccccaaggcattccaaaagtggatcaatgatcttcccttggcacaaagcagtgaacactttgtcacactcttcacccggtgagataaccctttcaccagttagcaatgctgtccccaactcctctctcacaaacttgtacaaggggtaagacctgcattccttgatcttgtttggaatagcacattggtcattctcatatgcaac

SEQ ID NO: 41771 - DNA, 427 bp, Glycine max
  Clone ID: jC-gmro02910024d11d1
ggcacaacagtagattttatttcaagctcaatcgttcagaattcttgggaaagatggcagaaatatcaaatatactgataaacaattaataaccgacatgtattcatgagcatctggaaaggtagaagggtgagaaagaagagcgagccaggatcaatgataattcaaatttgacccatctgtaaatcatggaggaggtgtccgccgcctccggacacggggaggtctactatcagagcctccatctgaagattcatttgcatcatcagatccagattgtccgtcataattttccccccaaagtgtagtagtgggtctccttattcgcatttggagtgtcgtacccctggacatggaagcaggctgaagaatgaggaaaaacacagccagcagaccaccatcatctatgggatcatcaaccccaatg

SEQ ID NO: 41772 - DNA, 279 bp, Glycine max
  Clone ID: jC-gmro02910024e02d1
agaaaataaaaaaccatggatttatgattatccacgcttattttcatagcaaggtttcataaagttaaaaaaacccttaacagatctaggggtgaaatggagaaaaatccccagcccccaaagatggggaaaaacagagtagttacccgttttgataaaaatatcaaaatccagagaaagcccgtttaacttaaatatgccaaaagttcggccaaaaaactttgggaattgcaaataaattggttttatgaacaagttaaatgatgccccctttatacc

SEQ ID NO: 41773 - DNA, 565 bp, Glycine max
  Clone ID: jC-gmro02910024e03d1
gatccaagctgggtttcaattacaattatatatctaattacaacaaaaacaacggtgtttcaggaggctgatttacctcttggttgacacactaattgttttcactactcttaaaatttcccataatttgttgataatttttctgacaattacaaatttcacacacccccgttgattaaaatacctatctacaagtactattttaattacaatcacaagaaatcagtaaagcaccacgcaacaccctgcattttcttcccctttcttttgtcaaaaacaaaattccacaacatcgggtgtccacgcacagttcccattttaggttctcctcaaatcaaccaccaccacgctcacattgtcggaactctgcctaaccaacgccaatttggtcagcagaatggaggcgttggagcaagccttgtcggagcagtccaccgtcatctccctcctcggagacgagggcggcgatggcggcttctgcgcgttcagacacatccgtaccactttgcatgcgatgtcgttttgcactgtgtcccatagcccatcactccctaatatcaaacac

SEQ ID NO: 41774 - DNA, 531 bp, Glycine max
  Clone ID: jC-gmro02910024e04d1
gaatcacaataaataattaaccaattctattaaaattaggtctgctcaactttaaaacaaacaggtcccaagtctatttgaactggaatttcgcaaagacaatatttgaacaggtgacttttggcccaagagcaaaaactggcgcaattttctaatcctcattcaactatcatcaccaacaagcactccaagaacaaaacgcacggaaatattcaaccaaaaatcaaactaacaaaatgaacacaaacaaggcacgcacaagaggatccaagagttccaattatagctaaaagtattagctaatttaagcaatcatacaaacccaagttacacaaaagaagagaatacttttagcaagcattctgctattacaacattgacaagaaaggataagcatttttctccaagaaccgccatactcagcaggaaatcaccagacaagaccaaaaattttcaaatgtctcatgccttgctggcaatgttgctagaaagccagtccaaacccttatagagacccttttcagaagttgc

SEQ ID NO: 41775 - DNA, 480 bp, Glycine max
  Clone ID: jC-gmro02910024e05d1
ctgcataaacctttgggatttcaactttcattcatttttcctgtctgttcctaaaccaggaaggttcaaaaagatgttaaatactagtagcatggttaaaatagaatacagaaccatacaatccctcaactcaccccaaaaataagattacataaccatactgttaagactattctttatccaataccacttcccaaaacaaatgctaaatttcattgagactcaggacgaaaaacagaggtccctatggagatcaccccaacacgtgagatgcaaattaatatcaattctgtaactcttttgagaagcatctttcaattttccggaacccattaggccaaaaacagtggcagcaagcagctaatgtcttgaacaaagtggtgcccaaaaataaatatgtgggaacttaaaagctttgtctgtttgaagggtttggacaatttgatgcacgatgcccggattttccgcaattaaaacagg

SEQ ID NO: 41776 - DNA, 480 bp, Glycine max
  Clone ID: jC-gmro02910024e09d1
agtaaatcttcaagaatagataaataccagtcacagaacaaataccatgatagtcatcaacaagagttcatatttaatccccaaagatggcagaccgaataaatacactacttttctttttggtgctatattccagtataattttagcctacaaaagaatcttaaagctacaaaacctattccacatcaccagatctacgatatggcatgtatctatggtcctttgcagcattcctcctcctccttttctcaacaaatgcttccagtttgccagatgacttgagatggttatatttttcaataagcctttgcttccgtatttcagatttcttgagataaaaaggacgttttccctgctttgctgcttctctctctttctttctgtgcttagccaatatttctgcatcaatatgcttcgctgaatcagacttcacttgggtatcaatccatgatatacgttcttctatttcatttacgcgc

SEQ ID NO: 41777 - DNA, 269 bp, Glycine max
  Clone ID: jC-gmro02910024e10d1
gtcacaaatgcgtatgtaattgttgaggtgaggttggggttgggggttgggattgggattgaaaactctagagccaaggctgtgctaaaaatttctgaattcccctgaggaagagcccaagggacatcataactggtaaacgacaaatatcccggatttgtaagaaaaacataacaaaagcctcctgtttgggatgaagcacgtgtaaaaagcaaacctcggctccatcccctatgtgcaaaagttattccaacacacccgcgcataac

SEQ ID NO: 41778 - DNA, 479 bp, Glycine max
  Clone ID: jC-gmro02910024e11d1
aaaaaaccatcatttttatataattatgagttcatctaatcctggcacaacttcccaattatgctatatatggtacatatgagcatcaatttccccagtaaaactggagtccctgatatcatatagaggatagattacatttttcttaaattgtctaaccttgcctgtaaatcactatctatcccgccatcatcattcccagtcgtttcaacttgaggtacctttgtctttgaagccggggcagcaacagctgatgatggtgcatttacaagctcttggttgatgtcaattccaatctcatcaaggacttggttaactagatcttcagtttcctcttcatcttcttctccttccaaagcatcatctattgcatctcccatcatctcagatgtcaattccatcttctcattctgtctctcaaattcttgcatgattttctgcaaagatggcaagttcatttgcctattcatttgccccat

SEQ ID NO: 41779 - DNA, 556 bp, Glycine max
  unsure (1)..(556): unsure at all n locations
  Clone ID: jC-gmro02910024f02d1
aactaataatgccggcaaaatccttttcatggcaattgcattagttgtatacatgtatacatgaaacgcacactaagaaataaagtcatctatcaaaagaaatgaaaaactaaactaaaaggggttcctttttaatccttttcttttcgaggcagattttgagcttgctttaaattttgattttttaatctttcctcgaatcctgttctttggtggtttcaacttgtaaatccgaaccatccaatggtgagttgtgaacacctcttcaaaatgcgtaagtttgaaatgtttcttcccaatttctgtctgcctcactctgtcaaaagccttaccatctgtctccacaaatctgtaatatgaaagtttatacatgagggagtttagcattgttggtgtggccatggaatcaatccgatattgaccgtcccttaaataatctggttcctttatgtgagggaatacaccccctncaatacgaaccatncacaggaacttattgatatcatcactgggatagccaaccagtccttcaaagacaacangaacatatttgaca

SEQ ID NO: 41780 - DNA, 459 bp, Glycine max
  Clone ID: jC-gmro02910024f03d1
aacaaacgtaggtgggatattagagtactattattaatgggacacaattgagttcaacacaaaccgaacttattttcaagggacattattacagacccattaaacatcaaagttcttcaaatgttttgggaacacatccaacattacacaacgagcttaaaaccccccacggagacggaggacaaggtgaagggttgattccttctggatgttgtagtcagcgagggtccttccatcctcgagctgcttgccagcaaaaatcagcctttgctggtccggtgggatgccttccttgtcctgaatcttggccttcacattgtcaatggtgtcagagctctccacctcgagggtaatagtcttacccgtaagagtcttcacgaaaatctgcataccaccacgaagacgcaacaccaagtggagagttgactccttctggatgttgtagtcagcaagggtgcg

SEQ ID NO: 41781 - DNA, 576 bp, Glycine max
  Clone ID: jC-gmro02910024f04d1
attcataaactcatgcagataaatacatcaaggatgtgtccaaaagacaactatcctgattatgaatatcctaaagtaaacaatcaaattacaagataaataaaaaaaataaaattatgaaacaagcaacatacattgggaaggcagtgtccacaaattcaaacagcagggaatatgaacatcccacaatgcaatcgacgccatcccaaactaacacaactcattttcccccaccaaaagaaaaaatggctcaggaatcatatagcatctatggggtctactttccgactaccgaccgactcaaaatatgaggcccttaaacagactcaatccttttattatatttatgctgcattagaagaaatgtggatttgggtggtgggggggaagaaagcaaagaaacaaataaattgctgatgacagtaggcattggttgagcaggagaccaaggtatatgaactttgcttgcttaatcatcaattaccagcatttctgctgtaaaactggtcaagagtcttggctggtatacgatgaagaagttcacgagggaaaaatcctgagtaaagtccatgcaag

SEQ ID NO: 41782 - DNA, 579 bp, Glycine max
  unsure (1)..(579): unsure at all n locations
  Clone ID: jC-gmro02910024f05d1
aagaatacaatgattcattcaattgcagcaagtccaccatcttagaatgacgctgtttgtggaagtggacttggttggtttcaagaacgttgccaccttatacattgaataatgaaagccagacaaagcactacgaacaataagagcctaatggctaataataatcaacacccaactatacacaaagttattgaacaagcagcaacaaagccttatgcacaattccatgatggaaatggtccctaatccctaaaatgaatctacaacttgcgagacaccaggctccctcccccatttcagatgccgtcgagtgcatttttgagattccctccaaaatacaacatgaggtcgccgccgtggaccctgccctccggtagattaaaatcgaggcctttctgagcactgctgcagccagcagccgagctttggcagtttctgtcttggtctggcttcttggcagccaagaagtttgaataagacggtgatttcatcgagagcggaactaacacctncttgggtatcaggtgctgtctttttgcttgagtttccacngaatcgtangagtcggacagaacactg

SEQ ID NO: 41783 - DNA, 508 bp, Glycine max
  Clone ID: jC-gmro02910024f07d1
gctagttaaaccaacaaacttgaataaaagttcacaataaaaatgggtgaaaatatccatgttttagaccgaacatgttctgaatagagctaatcaatctcgtgcaaaaattgtcttgcaacaactattatatggatggactacaaacgagagacttctaaggtcatcactttttgtcttccttctcagcttcggcagccttcttcagtctggcaccataatggcgtttgtttgtgcgttcaagtcgaagcttgtaataagctttaaaagccttcatgtcatctgtaacctttacaagttcaacagttggcttctccctcacaataggcaagaaagaaccctggacttgcgttgcatttgcaagctcctcgggagtagaatcaccagccttaaccttctgtgcccgtcttgggaacacaaccaatttggccttgtatgttttcagcctctgcacattagcttgcagactttccaaagaacggttcttgcggcgatgatcaacagcaat

SEQ ID NO: 41784 - DNA, 473 bp, Glycine max
  Clone ID: jC-gmro02910024f08d1
actaaaattaaaggtttattatttttaaattaggcattgggaattttactaaagaaaaaagagccctagtcaaaaatcaaaaccaaattgattaaagaatccaatgcaaagtttccaagggtagcctttagcaacaagttaaaacccattctttttccttcccacatagcaattatttcttcggctaaaatttgaagcttacccccaaaattaaattgactaggataggacatttaaaaccctgaatttgggggggtattggacttatggcctggtcatttattacaaaaattgcatcagccctactttaagggttttggccagttccttaacgcccatgtggaattcatcctccattttggttacgaaggttgggtcgaaaacagaggaacccaaagacaaggggctgttattgaccaccgaaagatgaagtttttttatctctctgaatatgttcaccagccctggctttt

SEQ ID NO: 41785 - DNA, 507 bp, Glycine max
  Clone ID: jC-gmro02910024f09d1
aaagagaaatattccatttccatgggtaaatttttattcatttaagtactatcacaacatatactacataaccacaaacttctttcatatacataactagaagctgtagaaatttagattttattccacaaacatagcacaacataccaacacacacattcaacttctgatatattcatcatcatagaaaccacacaaagactttcttcatatcatacatattttgtacacctcaaataccgcagtatgccttgatcctagaagcagattttacagcttcttctgtgaggaagaaacgaagatatccataatggtcaaatggtttataacgaagaggatgttcctcatccactaattcttcctctggttccatcaccttaccagcatatgaaagtagccccaaacagtatctgtctacctttgaattcatgaatacttggtgtacacaaccccgtatcctgtcattactccataccatgaatgcatcaccagccaagacagcaaaca

SEQ ID NO: 41786 - DNA, 451 bp, Glycine max
  Clone ID: jC-gmro02910024f10d1
ggcttcaaaaacgtgaaactttcacttgatatattgaattccctgtataagaacaaacactcgtacaccagtagctgtatgtaaaataaaaatataatagattgaaagccctattatgatgaatgactagacactcacaagcaattagcatggaaaatgatactttgatagcatacaactagacgaattagggaagcaggatagaaggagaacaaccggaatggcatgctacaaggggacatggaaactttgaatgaaagcaacactggataaaataaagcaaaaaggccatttgcatgaatcggaagttacaacagattacgtacatgattcaagattgagtaacatataatacaggaaccagtccagccatcttgccatccctaccagggcgtttcttcttaacataaaaccagccatctacttcgtactcaatctcaacttcttctct

SEQ ID NO: 41787 - DNA, 513 bp, Glycine max
  Clone ID: jC-gmro02910024f11d1
gacaaatgttctgaagatctcttgtatcatgcataataagaataaccatattacatggtgcagcatccaagcatcatgcaaatgttttctagttcgggcaaacttaaggtcaatgcttcagcattgatacacctacacttaaacagagattggaatccagcaagtcataaagaaaagtgggtcatgtaaaggtgaaagtgcatgtttagtattttttgtggggggtgttacttttcagaatgtaacaaaaaacaatttctagtttcggtaaattaaaccgaaccgaacatacttgaagcatatgcatatgactatcatgatgtatttgctatgacaatatatcccccagaccaacaactctcaaaatcaggatatttttacatcttttaaaatccttgcagccattgctccataccttctggcttcccactcactaagctttgcattttgtgagattggcttactgtgatcctcaacattttcttcaacgagaccagatccttctactacaac

SEQ ID NO: 41788 - DNA, 507 bp, Glycine max
  Clone ID: jC-gmro02910024f12d1
gaaagcgtatgcgtttaacaagaaataaattacaatttctgggtgattcttcaacattttctgcggaatcacacgggaaatttcgaaaggaaaattcgagaaatccaaaaaaaaaaaaaagaagtagaaacaataattaatgtacaggatatagttcatgagacgcaaccaaggcctttgaaatctcaaaaatgagcctggcctcaaacgcatcaccggtataatacttagacacttgatgaggatcagcctttggaatccttttggtaccaaatatgttgtccgtgctcatggaattcaacatgaagtttgtgtaagcattttttagctttgccatcatcttcaagggtgacctaaccatccatgtcaattttggaattgccttgatcctccattgcctacgtgggcttcttcttcttgacctaatcatctttgttttctttcaccggtggtagcggtggcaccgccatcgccgtcgaggcgttggtagcgcctccttctcaagta

SEQ ID NO: 41789 - DNA, 588 bp, Glycine max
  Clone ID: jC-gmro02910024g03d1
agaagagataaggatcatatctaccacaatcatatactccattagaacaaaatttgattgatatggctacacaatgactagcattgaaacctacaatgtcaatggccttgtaacctatactaacctggcattgtggtatttgaggttgggggattccatccatccacacctcattccccaattccccacctagatctcaaaaaacaagggaaaaaactctgaccattcattcaaagattggcatcgacattcagataagtcacggctgaaaacagtaagacaagcactgataacatgaataaatgcttaaaattaagaactcctgcatctattctcctcacagtaccagcatctggcatagtatctgtaaactttacttcattatcatttgtagatgaatttttccaagttctgtccacctcatggtcagtagcaaaagtcacagtaacttcttgagaaggatgcttatttgtctgctttagcttcactaccaatattttgttctcacttgctaaggaggacagctgcttattaagacgctctctctaacagtcagctgcatcaccaaatttttgaatactttggtct

SEQ ID NO: 41790 - DNA, 588 bp, Glycine max
  Clone ID: jC-gmro02910024g04d1
ataaaacgaaaaacattcaaccttagcaaaaagatttatcaaagtcagaagaaatgtgctattctcaaaatttcagatacgaaaatagtctgatattgatctaaaaagccaacaagaaaagattgattcaactaatcaaatgattgaacagtgctacagctcaattcattctcctgattagctcattgatgtaattctcccggtttccagcatcacctccctcaacataatggtttctcttcttctttaagccacccaaaggagccttgagcttaaatggccaaaggaagttgttagcctccttaaagtgaggtccaacagtgatgatctcatggatcagatcttcagtggatatgattccatacttgcccagagcctgctcaatgatagagttgtcagttagagcagtcctctgcttcattagctttccataccctctcttgtaaataagttctctcacactcttgagatttgggtatccataagtcacatacggttcaactctgtgcagcatgttcactgtggctatgttaactttgagaaatacaccattgaaaatctgtctcaatcgcaacaactgcaggatct

SEQ ID NO: 41791 - DNA, 513 bp, Glycine max
  Clone ID: jC-gmro02910024g05d1
ctatatctcttcagctaacgtaggagcttgctcatcatgcacataaaaactagatatacatttacaataaaacataaagacacaagggagcatacaagattgacgagacaaaataaataaatatttttcttttaggaagacgctgacattcattagtaaagcagcccaacgaaatcccctgaattatggcgagcaaacttctttcaggctaatgggtattaattacatctgtcagaaacttgagaaataattctgagaatgttggactatgggcatttccgaagatggtcggcatgagttatcgtcgttgatcaaggtcacttgtggtcttgatgcccaaagagaactaagggcacgaagacgtccatagtactctgcaataacaataaagtatagcgctgctagacgaactgtgagtcatcgatataggtgatgaacagttggctgcctcaaattatcagactggcgaacaaaaccttaatagattggcaagcttgcacatggcaacgacca

SEQ ID NO: 41792 - DNA, 578 bp, Glycine max
  Clone ID: jC-gmro02910024g07d1
cattcaataatgtatctcactttaatcatcagcaaaaatggagtaacacgcactataccataccatgatcctcattctccggtgtggaaaatcctttggccaaatagaagctaaatcttatttacatcaataaaaaagaactgaattaatacacagtaaatattggaaataaaattggctgaatgaaaccaaaagtaatgtagcactggtattcagttaagaggttcacgcatcatctgcattccggctagggggaggagtaccggcaagccaaccccacacgccaccagaactctgcctctgctttgcgtttaaggcagcttgctctgatgcagccttctgccgctggagaagctccagctccttctgtaatgtcccaatcgtttggagcttctgacctaattcagcaacctccacctcgagtttgaaacacctcgattgctcagatgcaagctgaccacgaactgattggagctccttggaaaggtcagagttacgagactcagcttccaccagatcttgctttagttgaagagcatgctgattttccttgctcagtgatgaattcaattcttctt

SEQ ID NO: 41793 - DNA, 614 bp, Glycine max
  unsure (1)..(614): unsure at all n locations
  Clone ID: jC-gmro02910024g08d1
gagaaacttatcaaaatttaaatggaagcacatcgttcagttattttaatcccatatatctaattcaagaaaaccaccataacatggatacttgatatatctataatatctctttacttctcacaattcttgcaagaaaaccaccattgaaacagaccaaacatgaacgattaaaggaagagtaacagactgatcagccgcttgaaaatggccaaactcaaaagtcaacaagaaaacttagattttgttgaatgcaacaatgtcacagctctggatatactcgttgcatggctcaactgtcaagcgttcctcaacaagagtgtccactgatacaaggtcatcaacaatagtcatcatgatctgcaacttcttgataccatatcccacgggaactagtttggatgctccccacaataaaccaggcatctcaatactacggacagcctcttccagcttcttcatgtcggtctcatcgtcccaaggcttaacatcgagaaggacagaagacttgccactctctttnttcttggcaggctttttagcagcctccctttcctctgctgccttcttatcctcctctggctcatcaccaaagagtacaagatcatcatcat

SEQ ID NO: 41794 - DNA, 398 bp, Glycine max
  Clone ID: jC-gmro02910024g10d1
ggggggccaaccaaaaataaatttttgaaccgcccttaactgggttttgggtgggttttaaagaccttaccggacattggacataacaataaattatttggctttaatgggggccccagggacccttttatgagtgggggaacagccccattcccatgtgttttttctggaaaacaccctaaaatttttgggaaaccaagtttttcctttcatgggtgtggctttcaaaatattcccctggcttttttccaccgcttggtttggttcttttggtctttcccaaactttggttataaagggttgggttaacccacttcaaacaagggcttgtttgggtggccacacacttttcacattcttgataataagagttttgaaacccgaaaaggcttttttgg

SEQ ID NO: 41795 - DNA, 448 bp, Glycine max
  Clone ID: jC-gmro02910024g12a1
attggcattctgaagtcctaagtccatagaaatttttatacatgcacaaactcaaaggtaaacgaatcaacggtacagaagcaacttaaacattttggtatccttttgggtatggcactgccacatgcataagaaccaacattgacagcggcacgtatattaatttaattatgcaataactgacacataatccacggtaagtattaccctggtgcagttcgaaacaatccaacactgccaatctccatagagagttgcttatcttgcaccatttttaggaccacacattatcttggattaaccacttgtatatgtgtaagcatacatacagaaaatacatactacataaacagcatggttttagcagattcctgaacctatacggtgataattttaccagttccaaatgatttagttcacgacatctagatttatacaaactttggtt

SEQ ID NO: 41796 - DNA, 434 bp, Glycine max
  Clone ID: jC-gmro02910024h01a1
gagcatcgagagccttctctacaaacttttcgacatcccgtcacatcacatcgctcatggctctattatcgtagccaacctacacctcgccacactctctactactctatacaggattagatttggcacatggacagtgatttaaacagtacactactgtcttacacaatcatcgtcatggaggatggtctctaccacaactcggtttggcttgaattgtctgcatctgatgaatgtgcagctttcaaaagagaggaggatgaaaagggcttagacgtgaacaaggcacgcttaacgtatggtagaagaattgggtcaaagaagatgggatctgtaaccaggacccctctcatgagagcttctctgaatggaagcgctagggtgctcaattgaattcgtcttgagaagaaaggacgaggtgttgatatgaacag

SEQ ID NO: 41797 - DNA, 587 bp, Glycine max
  Clone ID: jC-gmro02910024h02d1
aactaaaaccattcttccatccacgagggaggaaaaaaaatttctaccacaacagcagcaaaacactgctgactgcacaagcaagcatttcatgccggttaaaagatagaattcacaaagcaaaaacatctgtgatcatgttaaatccaaacatcaaactaacaaaaggtttcttgattctaacttcaaaataagaattctcatagcatattgtatcctcagtgcctgtatgttatttcaaaggcccaaggtatgtaatttctcattctaatgaatatctgcactggcatttttttctccttcattaaccaagcttttctgatcagggttaatgatacctgtatccatcacgaggtcaggggaagagtctattttctcactgtctgaagcatcagtatctgattctaacctagtcgaatctaaagaaagagcaagatttgggactgatggtggagagttttcccttgtccagagagagtaagtcttcttatcatcctctttcattctctcagcatatctatttatgtcaaatcctggatcatcattcccgccaaatgcagattcaagatgatcaaaatcaaacaaat

SEQ ID NO: 41798 - DNA, 571 bp, Glycine max
  unsure (1)..(571): unsure at all n locations
  Clone ID: jC-gmro02910024h04d1
gaaaatcaatcaatattatatacaccagaaaatgaacaaatctacaaaggcaaaatgtaccttttttccatcgtgtctcctgaataaggcaaaaggtaaaaacaaaagagcactgcagtgtgcagtttttcgtgagaacctgaaatactaatatgaacaaatgaacatctcattccaacgatcatcacttttgtcaaaattcaactacaaagttgactacacaattgctggatctgggaactggttggattttccatgaagtatgtactgaatttaccagtgcttgagcatgttacgttcagctggttgccaagttggtttgactcgcaatatgctgcctctgtatggcagctccattttgaagttggaacgcaagacagataatggcaccaggagcagtgatcatttgcatcaacaccacggagaagggcaaccagcccaacagaaagcccaacaactagaatgatcagggagaggacccacaagatgcactgatatttcttgaatttaggcttggatcgtcctggagaataatttaggggagcatatcngtggttaacccatccaaact

SEQ ID NO: 41799 - DNA, 401 bp, Glycine max
  Clone ID: jC-gmro02910024h05d1
gagactgaaaataaccatattacattattattattattattgtaacaatcggaaaacgagggaaaggaatagaaaacaatgaacaacccttggcagttggttgcaccaaccaaagtagccacaaatcgaaatcctagaaaaatcaaaaggtaaaaaataaaaaggaccaaaccctacttagaaaagcataactgttccttggtccttgttccttgatccttgttccatccaaagggagacaacatgcaagttttgctcatggcttccacagaatggttgtgtctgcaatcatggaagtaaccacatatgggtccatgttagaagctggccttctgtcctcaaaatatcccttccctgctttctctgtgtcccttccaaccctaactgaagcttcacggttt

SEQ ID NO: 41800 - DNA, 592 bp, Glycine max
  Clone ID: jC-gmro02910024h07d1
gaaacataattgacatcaacacgaataaaaccgcacaaccattgaatagtgggaaagtaacaaaacgctttacttgaagcggacaatttcccatttatattgtatcactatcgtctaaataaatgactccataaagcacatttacagcagcacaaaatgcacagccactgccttttattaatccataaatcacttcatacatagcactgcattactaactatgacgttcacacttcaatggctgaccaacttaagagagtttgccttctcttgcagagaatccaggaggctgtcaaagctcttcttaaacgagtccactccttcaagttcaagctgggaaccaacaaagctccagtcaatacccaatttctggagagcattgtatattccttcagcttcagatgcatttgagtctattgtcctggatacggtaccatgatcgataaatgcttgaagggcttggtctggcattgttgatacagtgtcgggtccaataagaggagcaacatataaggtgtcagaataggcaggattctttacactggttgaggcccagaggagcctttgcttcttggcccccttttaactagag

SEQ ID NO: 41801 - DNA, 531 bp, Glycine max
  Clone ID: jC-gmro02910024h08d1
gagtggaaaaacatgttctgtattgtcaaacacaatatagacagcttacccaagctagtctgactcatgtttgacgcccaagagacatctcaatatatacagaaagcaaactttcaagaaaaaatcaaataaaataaataagcactgcagtaggtctttaaatcactattgctcggtatctgtagtaacttaattaatgaataccattatcatatatgaaaacctaataaattatattgcaatgcaaatgcttctaaaattttgtacatattaaggtacatgtaaactcacaaggtacaatgatctttgagaacttgcctagcaagatcaagagcaccactttttttgtagattaaatgcaaattgtaagctgcctctctgcgaaggtcacagtaaccaggtttgtgagtttcgatgctatcgggattttcattgggaagttttggaattggatagtctttctcacaaatagcaataactttctcataataaaaagccgccagagttacaagtccaacatgatggaatgcc

SEQ ID NO: 41802 - DNA, 439 bp, Glycine max
  Clone ID: jC-gmro02910024h10d1
aatcaagttgataatcaattgttaaaggtctttgcagtatacaaagtgaagatttcatcttaaaatgttatgtacattagagtatcataaagaaagctaggccaataaattcaagttgttaaagcagacgtggataaatcaaagactgaaaccaacacaactagtaatcaacatttggagttcattttgtcgttttggatggggttgtccgactccaaaaatttgccccagatggggtgtttctgccaaaccatactcatttcctcaagtgggatgccctttgtctcaggcaataacttgtagatgaataaggtcatgatcaccacaaagcacccaaagaagatgaacaaaccaaacttcatgtgacagagcattgatgtgaagaattgagctatgaagaaagtgctgatcatgttgacaccaactgtgatactctgag

SEQ ID NO: 41803 - DNA, 542 bp, Glycine max
  Clone ID: jC-gmro02910024h12a1
aataataataataataataataataataataataataataataataatacatagttatgaaatttgggtcaataaattatgaccattagccatgagctcattgatgaggttgttgtagtagtttactccttcatggtttacacctgcactaagttttcctttcggtagtaccctagaccatgaaatggaaaatctataagcatccaaattcatatacttcatgattccaatatcctccttataccgatgatatgagtcgtctgctacatctccattacttacattttttattttttctgcatgccataagtggaaattatacattaaaacgggcaatttacagtcaaaccctgttgatgatgaatctttcgatgctttcgttgaccagtagcatatgcattgattgttctgtgaaacaaatggacataactcccatctttcttagcacctggaagattttccggatgtgtgtagcaaattccttggtctccttccagtgttgggatgaactcattgataaacatgtagctgaagatgagtag

SEQ ID NO: 41804 - DNA, 454 bp, Glycine max
  Clone ID: jC-gmro02910025a02a1
gtgtcaaaaggaatgtattacctgagaaaaagtgttgctaccgctcctattgtacaaaattgcatgggcaaataagagcatgcaacccaactagcatataacatcgccttcttatctaccgctaatttttaaaataaacaatgcatattctgacgtacataagtttatagcaaaaccactccccatagtagaagtactatcaccattagaaggcttctaattcccaattcaccactatggagattggaggcagaagaaactgaatttgtggaattcagtgatgataacgtgacgttggggaagctgccattgattccaagacttcctggaaatacacaggatccatgacttggattggtggtgggagattgtagccatgtcattgaaatcacaagactgagtagactttcccatctgatgatagtaagtgtcaaaaagcataatttgcatgtgc

SEQ ID NO: 41805 - DNA, 378 bp, Glycine max
  Clone ID: jC-gmro02910025a03a1
atgcaaaatgtataaatcttaacaccctatttatttataggagccattgttttggggcacgatttttttcgactggattatacaaatacttgatgatcatttaatgactatacttggtagaacttgttttaggtgaagaatcagccttggtatttggccggagagccagggcatgatacttgttattatttgggctaggggaaaaatcatcgttttcggcaatggttgattcggagggtaaagcataatctttgggaacacttgggcttgagataaacaaaatattttccgggacgcttgacgctgggtcaaaaggcaggacacctactaatgatgggggtcggttcaaaatcttcattgtaggaaacgcttgacctg

SEQ ID NO: 41806 - DNA, 484 bp, Glycine max
  Clone ID: jC-gmro02910025a04a1
ctctaagcatgtatgtactgagaatgtaaagaagtgtatgtaatatatatcaaagggctacaacatgctataataaatacatcgtatgaattctatatgctgtctgaattctgaaaggtggtcattgtcagactcttcttggctctgcagtggccaaggccaactaactctaatgaattgaaattattttttttttaccttttctcatttcctttttccagatgtttgagaattgatgcattaaaataattcaaggaaactggtaatttaacttatgtgtcctatatatacttaaattacatccttcttaaagaacttcttgtatttgactgcaagttgaggcctagttgaagatctagggctttacttttatggctctgatttgaagcagggaagtggcaaggcttgaagatgaaaggactattattacttgcattggagacagtaaacatgcaagtatctttttgggaattagaagggtgag

SEQ ID NO: 41807 - DNA, 527 bp, Glycine max
  Clone ID: jC-gmro02910025a05a1
aataaaagagatgctgtttttaatataagaaccagaatttgcactaaaatccaacaaacaaaatttccacattgtctgcataattatgatgacaaccttaacccgcaaaacaaaaaaaccaaagataaggatatttagttctgatgagcataaaaaacaaaattctaatacgaaaaaataaatcatgaagtttactgtgaaacacccaaccacttagaaaagttgtcgaattctgtataatcagaatctgacaccatagtgtgataccatgctttcccagcagccttgatggcagacgcttcctccttagagacagtcttcctcttcttgtcgagcttctccttcttgaccttaacccgctgtgcctcagcgagaagggccatcctcttagcagtcttggcataaggattcagcttcagcatcgagttgagattcttaagagggttcttcttgagagtggccctcttcacatccttcttaatgggcctcacaacagattgcaccttatcagaattaataatcctgga

SEQ ID NO: 41808 - DNA, 551 bp, Glycine max
  unsure (1)..(551): unsure at all n locations
  Clone ID: jC-gmro02910025a06a1
aattaactcacatcaaagcattaacggtaacccaaaaaccaaactcaaaaccaaggcaacaacaccaccaccgtacctcccgccgttacgtctaacggcgtcgttactatcatcggcggtcacatcggcagcgtcatcgggagaatcagcaggagcatcagaatcatccgccggcgcatcagccgccttcttcttcttcttccccttcttcgccggcgcaggagcgtcggcggcagaaggctccggcgccggcgccggagcctccgcctcacccttaaataactccttaggctgaagcaccttattaatagcaaaaatcgcaagcggctgttcatcaatcaaagtgtcggtgatcttggcagttgtaagcttcgtcttcagagtaacatcttcaccgtcgttttgaacggtgaagtcaaacttgttggcgccatcagtggcgagagtgttctgaagtccgttattggatttgagagtagctntggactgggtaaaccggacagcgtggaattcaagaagcgcggncttaccagattttgtaggttttttga

SEQ ID NO: 41809 - DNA, 354 bp, Glycine max
  Clone ID: jC-gmro02910025a07a1
aggcttaaaatagattgttcagcttcctaattcttccaaatactgatacaaattaaaagcattcagaactttttgataacgcaacaaaattatgaagtaaagggtaaaacccaaatcccaaacataaaacggttatgttgattcggtttataacatagaaacggcactagttctaaatatcattcccaaaaaaacatacaaatagaacataaacccccaattaagtagtgagttccatgatggctccaacaatgtccccgttgtgagtcttgagagccttgacggccttgcttcttgacactcctgcctgcgtcatcaccaaatcaatgtcatggggctccacaccagtttcat

SEQ ID NO: 41810 - DNA, 408 bp, Glycine max
  Clone ID: jC-gmro02910025a12a1
gacgaagggcatttgtatcttaacttttgattagactaggatacagatcgtaattttgatgctatatattcattcacaatatgatacttgcctatcacaacatgttgccaacaccatttttttgctggccctaattaaatctatcaacagttctgcacagaaaatgtttcagaaccaaaacctttccattaaaaaaaatcgaaaaatcaaattaatcttcatttttgtaatgaacaaataatcagttcgctctgcccaattgaagaggcctgggtggagccatggttcttttcttccacaggttaatttcttttcgcggctctaaattaaccacacccccacgagtgtgaccaactccgccaccaaccaaatggggtgcagagaaagggataataatctcttcctttt

SEQ ID NO: 41811 - DNA, 552 bp, Glycine max
  unsure (1)..(552): unsure at all n locations
  Clone ID: jC-gmro02910025b01a1
aacaaaacnttccttataaattaaatgcaaatttaagacatccctcctcagcagcaaaggaaatggactaaaaccctatggctgcttgtgaatttgaaaatctcagacttttaccatcaaaacaaaaaacagtactcatcaaaaacaaacagcaacgaaaatgttaccgccgatcaagaacccagttttgaaggctacggctacatgaaatcggcggacacttcaaaatataactggtaaaacaaacacctaagactctgcaaagataaactactgtaaaggaacaagtttttttgaaaccacgttgatgatcacatgtgctagcaaaattgccaaaatgcaatcacttcttcttggcggcagcctttgtgaccttggctccggtggggtctttcttctcaacactcttgatgactccaacagctacggtctgacgcatgtccctcacagcaaaacgaccaaggggaggatactcagagaaagtttcaaccaccatgggcttggttggaaccatcttaaccataccagcatcaccattcttcaaaaatttgg

SEQ ID NO: 41812 - DNA, 377 bp, Glycine max
  Clone ID: jC-gmro02910025b02a1
aatcaaaaccgtcccacacttccattaagttgtcttcaccctgtcagaattacaatattgtcccagagagaaggggagatatatatattattcaacaaggataagaacaacacaaccattcctcttattatgcaaacaagtaaacaaggggctaatttgcatttaaaaatctgaatctaaatttaacagaggtggtatcatctccaagtcattgtaaaattcttggacaaaaatgataacaagaagaaagttgcaaccgtctctttagatgtgaatgggcttgtcataagtggccattgcggcttctttcacagcctcgctcattgttggatgtgcatggcacacacgtgcaatgtcctcacttgatgcataatact

SEQ ID NO: 41813 - DNA, 312 bp, Glycine max
  Clone ID: jC-gmro02910025b03a1
gggggaaaaaaacattttgaattttattgggtaaaaaacaaaaactcaaccaccgagtaactttccaagccgacacacattttgtttatttaaggattaggtaaaataggggaagggggggttttttccatggggggggggaagttcgtaaaaggggggggaaggggccaaatgatcctatgatgcgggggaacaaggtaatcccatcaccaacgggaagctggcaaatttcgacccttgaattaagcgcaagagctttggtgagctccataacaaaaccgcgattattcttaacataatccatgaaaggag

SEQ ID NO: 41814 - DNA, 530 bp, Glycine max
  unsure (1)..(530): unsure at all n locations
  Clone ID: jC-gmro02910025b04a1
aacaaagaatagcctttgaataatactattgatcatggatagtaaaatgtgttttgaggagttaaatcccctgctaatctacaagtggaacaatcttatcatgtatgcataactcacactaacaaaaaatatatgagcaagaaagaatgacaaacctaactatatagaaacagccagagtccaagcattgtggacactacctcaatagtcttcaaccaagcaaaaggtgcgcattattctatattgggtgtgcatacaacacttgctttgaatgctatcttgcacatagcgcattgagaagaacatgagctaacataaggtccacgaaatattgatgtccaatttggccatctctccacttcatctttgctggagctcttccatagtgaactccatcattacaccggttatcaaaatgccatggaaatgtcatatcaaagttatcaatcacaccagaaacaactcctgattgcttcaatttctccaacaacacaccattgaacacctncatcttgttaggattgaatgct

SEQ ID NO: 41815 - DNA, 579 bp, Glycine max
  unsure (1)..(579): unsure at all n locations
  Clone ID: jC-gmro02910025b05a1
aaacaaaacatctcttcattaaaatctgaggatgattagaatacagtgcatgttacaaattatacattttccacttcaagcttgcccatttgcttcgatttcttcttgcccactttcacaagttttttgcattacatctctgctgaatatcacacaaacaaacaaataacttatggagtaggaaggtgatcttccaccctttcctccaaacagatgcttctttcaacactttaaagagaacaaaaagacaaaatgaacaaagtataataagacatcttaggaatcatcggggttagtaatcaaaggtggttgggtatcctcgttctgagcttgagtttcagtttgtattggaacttcctgctgttgctcaactaacctgctcatacgttctagcaattgtccagcctttcttttgcctctgtctgtaccattttgagccaattctaacagtggacccatcacccccagctcttgtgcctgtgcaagatattgttgatctccagaacagaggtgaactaaaancgcagctgcattctcttttgttcttggtgagccattcccaataactctactaaaacc

SEQ ID NO: 41816 - DNA, 486 bp, Glycine max
  Clone ID: jC-gmro02910025b06a1
aaaaatgagagcaagaaacaagcttacttcacaatattatacaacttattagttaagcaaaaattactcatgctctcgtagaggtatttccagatcatgacagagacaacgcaatccggaagcaagacttaatagaagtactactaagtaaaaaataaaataaaagcccttcatagttaacatatcctttaactttgtgttttcttgaatctaaagcacaataaaaacattaaacacccatagtggatactcaaaagtatagtgaactctttactttgccaatgatccaagctcatggctcgaagttctcatgttcatcttcaaactcctgctggttctggttcccgttgtagttgccacctctgttgttgtaccagttgttagtgttcacttcccttgatgagtcaccatagtttgttggattgtacttctcggcggcaacgtcatgaaagtattttccaccctccaaaaaccttgtgtcactca

SEQ ID NO: 41817 - DNA, 515 bp, Glycine max
  Clone ID: jC-gmro02910025b10a1
agagagaaaccaatttatatttgatttcgatttcttggaacgctggtatgcgttgccatgctttacaatatctcaacatttctcacacccttagactaaagaagaagaagaaaaaaaaaaccaactttactcattgcctcgcttctttctattcagagtcggagtccatgttgcccattgctttcaaccctcttggtctttttttttctcctacctttttggatatcttcttctcccttacttcatatcgttccagagtaagatcgcacagccatgtacctggactaacgagattgagggttcgttgtatgaatttggctctcttcttgggtctctggggaagctttgaacccttcaagagcagaaaatcttcttccttctccttgtttgtcaaggcaatcacgaactttggcggccacaccggcggagccgcgtcaccactgccggacggcgacccaccaccgcccttcttgctatcgtgcgcggtgtctgatgagaccacagacttgttatta

SEQ ID NO: 41818 - DNA, 598 bp, Glycine max
  Clone ID: jC-gmro02910025c01a1
gctaaagaattgatcacatgtaccacagcagataacaatacacttcccatgatacaaatttgtccacttgtctatgattgctatggctgatacaagtacctattttttgaccacacattccaaatttgtaggagcaatacatgacaataagacaacaaattggtttttccacatcatcgcacatatttcttgttgctttctacaattgatctcattttggagaacttggccatcactcaggtcacgtcctcttcaacaggaaacccaagatgagtccaatgatgccaacaagaactacgtaaatgaatggtacaccgccgcggcttctgccggcatcacgcctcaaaagctccagttcttgctgaagtcttctgttttgctcaacaatagaattcctctcctcagttaccttggaaataagagctcttgcctcaaaggaagcatcctgatgttcaccccgctcattgaaagcttttgaagcccctgtgaattccgcagcacttgaatgcccattctcagatacagatgcacgaggggatgaatcttcatcagatccttctcgaactggggatggtggtgaggaggagcacataaacac

SEQ ID NO: 41819 - DNA, 153 bp, Glycine max
  Clone ID: jC-gmro02910025c03a1
aacaataacaaaactcaaattatatagaaaaagatatgattaaagcgttcaaaactcgaatttcgaagtcaaaacgccaaatacctatgatctaaaaatagtattccagaaaatgaagcatatataagatgattacagccgaattttggggcc

SEQ ID NO: 41820 - DNA, 360 bp, Glycine max
  Clone ID: jC-gmro02910025c04a1
gcaaaaaaaaacaggccccgggggggacccctaaggaaacccccccccccccctaaaaaaaaagccccccaaaaaaaaaaccatttccccctttaggaaccggggggatggggcccccccccaaaagaaaaaagggccccccccccccctttcaacctaaaacaaaaattttttccccccccaaaaaaaaaggctttaagccccaaattttaggcccccccccccccaaaaaaatttcccccccctgtgggggaaaaaaggccccccaaaaacttttaaaaattttttttccccccccttttattggggggggggccccccttttttttaaaaaaacttccccccgaaaaaccccccggg

SEQ ID NO: 41821 - DNA, 546 bp, Glycine max
  unsure (1)..(546): unsure at all n locations
  Clone ID: jC-gmro02910025c06a1
ctgcaaacccaactgggctaagagggagacattattgcaactatatattatagattacactgcaagacaaattaaaatacaaaataatccgaggacctttacttatgacagagtgctgggacatttggaacattattacaactatatattattttttggtttgtgaaggggagaatgagcctttattgatgatagtgctggtccttctcctatataccacatttcataagaagttgttatgggtaaatctcaatgagagaccttaaacccaacactggagttatcttgtagtcactgaaaccagtagagaaaatcagtttggcccattctttctcagttctctcttttccaggatacagcaccatcacaaccatatcaatgaagagctgtgtttcaattgattcatcatctcccttttcattctccaccaccatgtctatgataatcacctngctctttattgcctctntgcatttcttcagtattttcacacactgctcatcattccagtcatgcaatattcacttcaagagaatggcatcagca

SEQ ID NO: 41822 - DNA, 418 bp, Glycine max
  Clone ID: jC-gmro02910025c07a1
gggaacaaaacccccctttaatttttttaaaggaatttaaagcaccaaaacgtccaaaagctttttattttgttttggggccaaccccccttgctttttttttacaacaacaacctacttttacgatttccacccgggggggggggaaacacccttctttccccgtttttttggtccaatagaagggggtttgaggggaaatcctttttggtttttgccaaagcttgctttttgggaaacattgcggaagcaaaagtcaactaattgggggaacccccccaaaatttagccccgccttagggttttaaggggtattttttaaaaaaaaattaaaatgggttttcgataatcaatacaaaaagggccgggaataaattttaattttaattttgggggaaaaaaaattaatttttttaaa

SEQ ID NO: 41823 - DNA, 473 bp, Glycine max
  unsure (1)..(473): unsure at all n locations
  Clone ID: jC-gmro02910025c09a1
caaaatcatgcagtgtgacaataaatgcattacaagaacatagataacaaattctatggtgactcacatccaacaacgttaatcaatttagtttaacacacaacggttggaagaaaccaaaagataaataacaaagtcgtgccttcttcccctcagtttcccctttgcttgttggtgacagcatggcatcatgcattgcaattacagaaaagcatctttctcaagtagcttcaggacttcattttgattgtttagcttcgcaacatctattggagttttaccatccatattctggagagtaactgcagcaccattttcaaggagaagggccacacattcctttctgccataaccagctgcataatggagagcagtgttcttattcttatccaaagcatccacttttgctccagcctcaaggagaacttgagcacatttcacctcaccatatccacaggcaaaatgcanagcag

SEQ ID NO: 41824 - DNA, 439 bp, Glycine max
  Clone ID: jC-gmro02910025c10a1
aaaagctatggagaatcaaatagttgattccccaagtatctgcttttctttttatcaccgccagtcacatattctgaacacgttgaaaagcacccataaagacacgtgacctaactaatctaagggcattccagtcccttcccttgtgcactcaagtcatcgacctctaggacgacatacaattaattgccagaggaatggaattactccattaaatcctagaaggcaccaatgctggacaccgagagattgtcatcgcgtcccacaggtctgacgcactttgggtgcactttataaccacatcggacacactgggaggcccagctagaccctggatcctcatcacacgcagcagataaagggccctccaccatttccatcagacaccgaatacagatcatgtcgatacccttggcgatacaccagtgctggaagaccc

SEQ ID NO: 41825 - DNA, 463 bp, Glycine max
  Clone ID: jC-gmro02910025d01a1
ccaaacagttgcaggattgaatagatcttaaaaccaatgtaaaacaccgcctgttacaagctttcatatttatggcagaaatggggatcaaaatagaacccaaacagatgagcatagactatcagagaaacaaaatttgagaacttataaaaaaaaaaaaaaactttaacaatcttttcagggggttttatccgttttagcagcagtagcagcagcttgccccctaaaacaaccagtcctcctagcagcaatgagaccaaccttttggccaggaggagcataacccctgacggtactggcatgaccaatatgctggggattacctcctccatgaggatgctcaactgggttaatggccacaccacgcaccttaggccagcaattccttttaactctgaatttgtgataagcattaccagctttcagaagaggcttttaagtcctccttccacctgcaacctgc

SEQ ID NO: 41826 - DNA, 426 bp, Glycine max
  Clone ID: jC-gmro02910025d02a1
gccaaactccaaacacatccttttcattttgatcaagcaacaattttttattgtagttctatgtacacatttgtatgagacctaactatgtagcctaacctagcatatgtttagtaggttcagtttcgagattcagatttggcatcaacaccacgcttcgtgtacagaggcccaaccgccggcacttcagcatgcgaagataccattgctgaaagaggctggaagttagtatttccaacaaaccaatagagagcccatttcaaattgcaaagagtgtacttgagagatttagtccaattttcctgcttattgaagctttgggtgatggaatagttttccaccttgtcattctcaatcttgtaaggcagtttgaaacatttctcaggtggtatgttattctcttgatccttggatttggcaaagtct

SEQ ID NO: 41827 - DNA, 507 bp, Glycine max
  unsure (1)..(507): unsure at all n locations
  Clone ID: jC-gmro02910025d03a1
acatcaatatatataggcattgaatgcctagtttcacatagatggcaagttgatactaacaaaaaatgagatgaaagggattacaaaaggattttttttttcttcccattatcctcatttgatataatgtcagtatattaacaggaccaaaaagctaataaagggacgaaaaagaaaaaggaaaattcattcaaaacataacaaaggaagtttgagttagtacagtgtcagctgctaggtatagctacgattctcatgaaattatgactgtcagtccaactcattcaaatactgcatcagctaaagggactagtccgtcctttgcttctttgcatgctaaagcaccatcaccactattgtccttcttcccctttcatcattatatgcacagattctcatcccagctcgtgcatgagctcattccattccaaatattggcgtttgaaagagacttggttntgcatgggattggaatgtgtgcagggtaggtccaatccagtttccata

SEQ ID NO: 41828 - DNA, 561 bp, Glycine max
  Clone ID: jC-gmro02910025d07a1
gccaatatatactcaaatgaataaaatgaaatgtaaatcctatagaatttaatggacacttgagcatgaaatgaatcagtcaaaagtaaacctgtcaaggtataaattacaaatacaaaaaaaacttgtgtaccccatctcttgaaggtttcagacttcagttcttcaaaattggagtccatcatgcatttcaactcaaaagatgacaccgtaagagttctgtaataaggaaatgtcattttctgcatgaactacaataatagaatataaccagttgaggttcctcagactcaactctaaatcatttttagttgacatttgcccccatggcctcatattttatcatttctcactcccaccaaaccatcgccaaccagaactcttgctctcagctgttgcagcaagctccatctcctggtccagagcagatttcttttcacgaagagcctgtacctcctcttccacagactgcattgattccagcaacttctggagttctgcaattttggcctcaagttaaagcatcttgatctctcagccacaagttgtccctggactgac

SEQ ID NO: 41829 - DNA, 486 bp, Glycine max
  Clone ID: jC-gmro02910025d10a1
catgattcaaaggactgcatttcaatttggcaaaatatgaaggataaaaaaatacgctgaataaaatgatgacaaaacccccccatataggggaaatcatgaatattcatgacgcctaaacaacatgcagtttaatatcatatgatctacaattgatcattctataatcagatgcaagggaaagacaacaggtgtaatttataagtatcaagaatcttccttcttccgttttgaagcacttccatcactctcatttttccgcttggcttcttggcgctccctcttcactccttttgctttgtaaggtaaaggagtttctccaaccttctgatctgggatataaatacttccaatctttccctgtaattcgtcccttttaacattcttctcctttttctttggcttctccctcgatgttttcattgcttccttcctcaaactttcattaggaggacgatgccgacgaacaacaaaatccatggacgg

SEQ ID NO: 41830 - DNA, 411 bp, Glycine max
  Clone ID: jC-gmro02910025d11a1
gaacaaagaatagtgaattctgtttattaattacttaggattggtcaaacataattaactgccttggatgagttagtacgattcagagagaaaaacgaaagcagaatcctggtgccaatcatacaccaaaatggttatatcctacaactacaaaagagaaaaggaaaacattaatgacctttgccattcaaataataggggttccacccaaaataagtatatatgtcactgaactacatgtcctaacaagctatttgttgaaggtgagctagttccacttaaccaactatcatgcacagacacaggagagctgtccttcacctcctcaattgattgcaaaaaaacatcagtcttgtggggaacaatcaatgtctcactcccaagtcctgcagctctctcaaaactaacacc

SEQ ID NO: 41831 - DNA, 440 bp, Glycine max
  Clone ID: jC-gmro02910025d12a1
aaataataaagaaaatgtccttctttttttttttctcagattaattttgccgtgaatgatgaaattaatatactcaaggtgggttatgatcttatgcacaaatgggattattacctgaacttacattcatggcatctaaaacttaaataggtgtcggcacgtcggattatgatattatgtgcatatatgacatagaagtagccatattacaagcttaatttctacagacatatataaacactcctctcatcccaaacagctgagaatctgattggtgatcttagccttttcacttaggggtgaaagcaccaaaaatggtttcatggccaggatctgcaaggtgggcaaagaggttgtcaataggaccggtggcagtgtacatgtgctggaaccatgcacccatgaacagaagcatggcccgtctgccatttttgatctcc

SEQ ID NO: 41832 - DNA, 552 bp, Glycine max
  unsure (1)..(552): unsure at all n locations
  Clone ID: jC-gmro02910025e01a1
acgtatcagcatgcattcatagatacccattgaaccaaatagatagtgcctgcaactatatcaggtatcagctcagcagcctcatatacaacaatactagattttttctgtaattgaaccaagtaattaatcccccaagtaaatgttggtatcacaaattactattcatccatattccaccatttcagtttcatgtttttccctgtaagctctggtcatatatgaatctcatcattgttgcataaaatgaagaatagagatatataatttgtttttctcagttcaaaacaggtgttcattcacatgaagctctggttacttgattcccctgcaccactactcttgcgtttgcttttggagccactagaagacgaaggattagtatgccaattcctttttctttgatttatgaaccagntatttatctgctttaattgcaagcctgtttcctgcaccaaccttgccttgtcctcttctggtggatatggccatttagaatgtgactgccaccaagcttttaaaagggaagttgtgtcgccgggtagcttcccg

SEQ ID NO: 41833 - DNA, 56 bp, Glycine max
  Clone ID: jC-gmro02910025e02d1
aaaaaaaaaaaaaaaaaaaaaaaaaaaaaaaaaaaaaaaaaaaaaaaaaaaaaaaa

SEQ ID NO: 41834 - DNA, 446 bp, Glycine max
  Clone ID: jC-gmro02910025e04a1
ataaaaaaaccctttaaaattcataaatagtttggaattaattaacaacgaaactatcactactctattttttatgaaccggggaatggaacccataacaatttataggaataaacaataatattttattagagcacaagccaacctggcccaaccaacactattataatattattattattattattattattataatataaagtaaaagagttgaccctaagcaacaccgtgctcgggggcgcgttgagcgcgtgtaccaagccactccaacatgtccccaaacactagctccacgttcttttcgggttccccaaccatttgatgccacatcccgggatatattttcagcgtcttatccttactcgcggggcgtgcgtgcaactcctccacgcacgcggggtcgcacaccacgttgtcgccggcgtgcgccaccagcaggggga

SEQ ID NO: 41835 - DNA, 352 bp, Glycine max
  Clone ID: jC-gmro02910025e05a1
ggctcaaaatcaaacacgcttgtaatatatatttgagtcagcaacagagcaattaatttccgacgcataatggtagtagtagattcaaacgggggaggggcttaacgaaaaacgacaatttttacatgcaacccacgggttttttagcttatcctttcagcggggcctgcttttggtctccccactgtacagccagtcgtaaacagtgggagtgttgggaagtggtttgtcaaacatttgagcaccgatggtctttgggggggagttgctcccaggatggaagacgctcctccaaacgttggcagctttacgcgcggatcccggtgtcgttggagtcgtgggagtcatcggg

SEQ ID NO: 41836 - DNA, 369 bp, Glycine max
  Clone ID: jC-gmro02910025e06a1
atccacataaggacacatggtttaatttccaagcaagttttaggcacatttttttgaaagcagcactcacctgaaatattcaacacctaccttagcagcaagcaattgggagattatccacttgcctttaaaaaaacattcacatgattaaattaatccctggtttcaattcaaaacccaccagctagaaacaaaaaggggcggaagaggtattgctcaaagggagtgaacaacctacctttttgcttccagtttaagaaaccagccaactgaaataattaaaccctcagcccacaattcatagtacataaaacgttcaatgtccaagctctcagtatggacgagaacgatttccataatgatcacgcc

SEQ ID NO: 41837 - DNA, 410 bp, Glycine max
  Clone ID: jC-gmro02910025e10a1
agcacaaccacattatattacagagagttggcatgcacaattgcaccataagtgcaagaggctgtctaaatgccatacatacagagagaggcaatgtgtccgcgcttgtgcctccccaaagttttaatttattattattattaaatggggccataggatccttgagaagtatgtcttatcctgagaatacataagcttaagggttctcccaatcatgagatatatacattatgatatgatacaagattaagctggtacagattactgcacttttccgttgcttgagagcactaagctatgataggaataaagcaggaccttccatgcaccaggggacataaatccatgaggaggactttgtttgttccttggcagtgtgcgcatctttgtgcctgatatgaacaggaagt

SEQ ID NO: 41838 - DNA, 361 bp, Glycine max
  Clone ID: jC-gmro02910025e11a1
attacacaatccattcagaaaaacaaaaaagaacaccctgagcaaaaggacccaatacaattatatctcctgagccaattccactactttttccaccacagacgccatagaagatctttttttatttgcaacaaagcacttatcacgaatctcccctttcccaatacgatccgttatcacatctagctggctcaccttcacaaaagcatcggaaaatttcttaaaaaacagtttctggtctgaagcgaactggttcacgatttccttggttttggggctgcccgcgatgtcctggtcagaagtgaacactccttggcggttcaggaggttgatgtaatacatgttgtccaacttcacgggg

SEQ ID NO: 41839 - DNA, 490 bp, Glycine max
  Clone ID: jC-gmro02910025f02a1
atcagaaactattcgtagtaattttaataaaataaaaagtaattgtgagatgataatggttttttattcttttgcacgagaccgtgcatagcaagctatgtcacagacatagccttaaaactaaaaacattaaagcagcacctaaataacagctgcaaccaacgagttcaacatacactggacataacaacagagaattcaactaatattggacataacagacagactcagaaaccaccacgaaggcggaggacaagatgcagggtggattccttctgaatattgtaatccgccaaggtacgaccatcttccaattgcttcccagcaaaaataagcctctgctgatctggtggaataccctccttgtcctgaatctttgctttcacattatcaatggtatcagagctttccacctccaaggttacggtcttccctgtcagagtcttcacaaatatttgcataccaccacgaagcctcaacaccaaatgca

SEQ ID NO: 41840 - DNA, 539 bp, Glycine max
  Clone ID: jC-gmro02910025f03a1
atgttatgacattgcaaatacaaggagtctttcttttttcagatagcaaaaaaaaaatactgaaaccatagtctaactgatttcatgatgttatttatctatttgacttcataattttattcataaacaaacaaacttattttatataccagaaaaaaaaattaattttttctctgaagtggactttattgaccacttggcattttcactatgttaagccccagatccagcaagtcgcctctttgaggcgtttgatacagccaattgaccaagtttgtcagtgttacttgatgtagtcctttgattgattggtgcataatgcctcaaccactccccaacataaacctgttgagggctcataatctttgtatcaggatcatccaatgactctcgccaatgtgccaagtacccagccattcgagggatggcaaataaaacagtgaataactcaggttgaaagcccatggccctgtaaatcagtccagagtagaagtcaacatttggatatagcttcctcttgatgaaatactcatcagaca

SEQ ID NO: 41841 - DNA, 172 bp, Glycine max
  Clone ID: jC-gmro02910025f06a1
gaaaacatgtccatccagaaccttcatcattccaaaacccaaagactaaatcgaactgaacatgcattaacaaaattgcaaggcaaagctactaacatgcagaaaccgattggccaatacaatttatcaaatcataggttttatagaaagttaaataaatagaatatcttaa

SEQ ID NO: 41842 - DNA, 541 bp, Glycine max
  Clone ID: jC-gmro02910025f08a1
aaaaatacaattgaatcttaacatagaaactcagcatctcaacccaacggcttaaactttttcggaatccaactcacttaaactcattgagtcttgataagtttccgaatccaacccacttaaacttttttatagcaaaaataaaaactgacatgactaaccttataaaacaatacaggttcttattctttccactgtatatgccattattgtaatccagaccttgcaatccaactagttgacccttctgcaattgcatctgatttctccctgcctcccagtgagaggcttcatgttccccatcttgatcattgaagctttaaaatctctagcaaaagccaaagggattctactatatagttgcaccaatttgtcactttctgtgccttttcccttgaacagctcttgatcagaatggagaagaccctttttgtgcagcaaatccgtgtagtatgtggtgtcaactcttgtgggtgtagcatcaagtggatgcaagttgttgtctccttcgcttttcggacatgttttcctcacagatgct

SEQ ID NO: 41843 - DNA, 330 bp, Glycine max
  Clone ID: jC-gmro02910025f10a1
atctaaaccgggcttttactccacaaatttaaacaaatcatcacgagttacattacatgggggttcaatgttaccgggtaggaagctaaaattcaacccacctttcaaatagcaagggaaaagccctacaccacaaaaataattatgggcatggcctatctatgtgctgaacctgagaatgtcaacctaagttgggaacaacgaaaataaaagcatttgcttacaacatttttaagggtaccacaatatttttctcccaaatagatggtttcctaaaggggcgggggggttactatacttgtttggccaaaacaaggttagtggcaaaaa

SEQ ID NO: 41844 - DNA, 393 bp, Glycine max; identical to SEQ ID NO: 8055
  Clone ID: jC-gmro02910025f10d1

SEQ ID NO: 41845 - DNA, 491 bp, Glycine max
  Clone ID: jC-gmro02910025f11a1
caacccgtaaaacctcttttttctcaacccgtaaaacctcttttttttcatttttctttttgacttgaccattgccattacttcccatatacagatacaagaatgactacaatgtctatgtgttcatgatgaatttttttaccgtgtcagaaacttgtatatctccttggttcagtatatcacacacaaagcaggcccggctgcggttcagtgaaatcaaggccttcttcgagaagataacgctgtacagctattgggagtctcgcaggagtgcgggagccccgagtatggtgaccagtgccaacacagatgtaaacctgcaaacgctgctcgggggctctggctgtgcttcgtagcacactcagttcgtgtttcagcacgtgaatcgcttcacttacgtgcagaccatgtaggtctatcattctttggggccctcttccattctctggagcaacaggattcctctggcgataaatagattcttgagcttt

SEQ ID NO: 41846 - DNA, 354 bp, Glycine max
  Clone ID: jC-gmro02910025f12a1
agcagcaaaaataattctcttcacttgaattacccaccgggcaagcctgcaaaattctacattgaaaaggtggtggggccccccctaggaccctattgggattgcattggatggccccaacgttccaaaggaatatttatttttcttcaagggaaaattctacccgtaaggggaggaaagatatctgtgtacaaagaaactttggccttaatcaccctaaagagctgtggaaaaagatgtttcaatccccatggacttggaatacccctttttggcatttgccaacccgctttgggacatggtccacttctttttaaaccggtcccttaccccctgccaccgggatttccctgg

SEQ ID NO: 41847 - DNA, 485 bp, Glycine max
  Clone ID: jC-gmro02910025g01a1
aataaaacgcatgctttattttatactaacatacgttgtactaaaagatcatcctacaaatttcaagtataaaattcagctcatctttccgaaagagacactgtttataaaaaaaaaaaaatatacatattccacaactcgcgtcacaatcgaaccatcaaaaccaattcaatccaagacctaatcaccatgtgagaaaccaaaaaaaaattggtaattccctacgcatatattgttcaataaagtacctctcactttaattgaacttgtattaaaaaatgaagccgccaacattaagaagtaagaactcattatcgaggtcccaacgaaacagtcatatcaggcattttaatactatctgaccagatccttgacgtcaaataaaacttggagatcttgccagcgacgcgtcccatgttcgggctcttatctggatccacgtgtacacacttcagcgcgacacgtgtgcatttttcagctacatc

SEQ ID NO: 41848 - DNA, 526 bp, Glycine max
  Clone ID: jC-gmro02910025g05a1
ctgggatgtcaaattagtcctttaaagaatttgggtgacagcaaaacagtcttcgggtcaagtttgtatgtgacaatagcttgaaccattttgatgacacatatttgaaagaccaatttgatgtcaagtgtatctttagaggaccctaatggaagcttagtctaaattttaatatttacattctatgtacaatgtcaatgagactgcacttccgagttggcagaagactctgtggaccctccacagacattgccgcgacacagaggacatacaccatgtatttctttaagccatttatcgacacatgacatgtgatactcgtggaagcaaggaagcactcgtatttggtccccttcttcataatccgccagacatatgtagcattgttcagcatcattgcctacatcagccccatcaacctttttgtgagatttcagagggagggaatcaacaattgattcaggtgcagggagtgagaccatggatagagacagagagccaggttgccgatggatttcatctaaaa

SEQ ID NO: 41849 - DNA, 572 bp, Glycine max
  Clone ID: jC-gmro02910025g06a1
aaaaaggaattgtttttttataaataacatgagaatgtgaaagaaatttgagtatattgaacataaatttctaggttgagggtgttaaagcgctatacattcagccgagctacacttagacttttggcatggggcaacctcctcactggatttcttgtcacagggaagatcaaattagagcctgaaaatttgccatacaaagggataactgctggtgctggaaaaggttaaagaaactacttgaaccaaggattctcctagtgtagttttaactacaatgaactcagcaaagcaaggaactctgagggttcctcattctctttaacaaccttgatgactgagttctttggcaaactaaaccgagcaaggagatcacatccaatttgattccagtcgacagctcctacatctgattgtttatcaatatctaagtgaacctgtgaagcgtcacaactgaaagacctccctacccaaatatataaaatgttccctgcatgtacatgcatactgggagagaatatgacaaaagcagatttagaatccaaatgacttgcaccaaatgtctcaatctt

SEQ ID NO: 41850 - DNA, 516 bp, Glycine max
  Clone ID: jC-gmro02910025g08a1
gacaaaatctctcttctttgttgagtaacaaaccgtgatagaggagaaattctagcagtaaaataatggttgcgcatatccatgaaatatgaatacatgttgctcttctgaattgaaaatgcaatatttgcaaacaacttgaacttgttgggttcatttaaatcttcaaattgcttcaaaaccctggtagtatactagtattccgtctctagcaagcagaaagcaaggaggcagtgacatgcatttctgttgaactaaaggggtgatcatcttctgttctgatgattccaagcttggagtcctcttcaccccaatccaaaattggtttggactccccattcaagttccatagatggaactcctccttgctaggctccatgttttctttagaacttgtttcagatttctgaagcatttgattgttgttgccaagatcatcatcctgatatcccttggcttccacactacccaatgacttgaagggtccaccttgatggcttggaaatttacagctac

SEQ ID NO: 41851 - DNA, 487 bp, Glycine max
  Clone ID: jC-gmro02910025g09a1
gtcagttgactcgtcaggatcctcatcagcaatcctgcggatcatatcaagggctttcctaataagtttcttcttgattgtcttcagactactatgttgttgaagcatttctcgtgatacattaagtggcaaagtgtcagaatcaacaagacccagcaaaaagtttaggtacttgggcaacagttcattaaattcatctgaaatgaacacacgtctaacatacaacttcaggttcgatttgtttgcgttataatagctctcatataaatcttgaggtgccttaggtggtacaaacaggactgccttgaactcaacatcaccctcagcagtgaaatgactccatgctaaaggtttctcatcactgaaatccttggcaagagagtggtagaatttggtgtattcttcttctgtaacctcttttggattcctcagccatatagctttcacatcatttaaaagttcccactcataagttgtttccttcact

SEQ ID NO: 41852 - DNA, 433 bp, Glycine max
  Clone ID: jC-gmro02910025g10a1
aacaaacgaatatccactgaatcacattttaaagttacgtagataaactagttcagcttttattgcataacgccctacacatccttgggaaaaagataaagaaatcaccccgagttaagacatggatgcaaaaagagagctacccattgtggcgccaaagctttgcaaaagatattgggatcgttgctgcaattgctttcgccactaacacatcatgggaggttttcatacgccattaacacttttaggcagctaagcttttcgaagctatctcaaacacattctccgatagtccattagtggacatgatcctctccaactgcgcctttgcaagcttttgtctgtcttcatcataacgccttcatcttgagaaggctgacaccattctcgaggctacctgaggatttagcttgtcaagttgcagcacaatctc

SEQ ID NO: 41853 - DNA, 507 bp, Glycine max
  Clone ID: jC-gmro02910025g12a1
catcttgcaagacaaatatctcaaatcatgaaacctggaattcacaaatctactagcaatattaatcatacagctaacaccttggcctttactactctattctacagaaatggtgaacctatacatcacaggtagaatctactttgaaatcagatacatgtagaaaaggaacaaaaatctaactcgagatcaagaacctgccgcccagaaaaaggaccgaggtaaatggttagttctttcaactgaaatttgctccaatcgagaatgcttcacccaaaaatcagcggcaatgtgagcagctacgaatataaattcagcaagaggcctcaaagatgaaaatcttcgaagtcaattaagaaaaatctccacattaaatgatcactaagggcggacaagtttagttcatgtctttgatctcttctgcttttgaggaacaaaacggaccccctgtttcctgagttccacggtcttcactttcccatcgtctaatgcaacatataacttttg

SEQ ID NO: 41854 - DNA, 391 bp, Glycine max
  Clone ID: jC-gmro02910025h04a1
gggctgaaaggagagcattttacatatatgttatctcaacaaacaagaaaattaatacaaacttgattaaaataccatatatttaggcctagatataaattcacatatttcccaaaagatcgacaacctaataatagatacattatacatgcattaaactagttgaagaagcaggggcttcaatttcatacttaattcccacccaaattaaagcacttaatcttccatgattgccaaattaattaagtagcccatggggtccttaaaaaaccttgggatagaaatttttcttttcttattttttgaagaagaagaaaaaaaaaaaaaagggctaaaagcttttacagcctatcttattctccaagagcaactggttacagttagccggggg

SEQ ID NO: 41855 - DNA, 436 bp, Glycine max
  Clone ID: jC-gmro02910025h06a1
caaaagaaaggaacagtagatttccgaaccactttgacaactgttcatacaaaagtaaccccaaacaagttttttggtggcattttcatagttgatacaccaaattgtccatgttttgttgcccagcttttaatgaactacaaactactttaaattacaaaacacaggggaaactgggaagaaaaacaaccccaaaaataggggttaaaaaaacacattgtttgaaacacacaaaaaaaaaattgttcaatttgaacacaagttaaatttcccttttttaactttgctggacagccaataaaatgtttgcaagctttatgtttgaaactttgctaacatacatattggtaagggagggaagaaacaaagagaactattaactgcttatgccatgcaacataaattgaaatcgccaaaattttaatttaaggatcat

SEQ ID NO: 41856 - DNA, 390 bp, Glycine max
  Clone ID: jC-gmro02910025h07a1
gccaatgctacgaaaaggcatacacttctcaattaaaacaactttagaccgtagaattcaaaatccagaagtggctagttttttggttcaccaaaagcctcatacaaaatcttaacaaatgaaagcaggtggctgctcgccacaatgataaggcaaatgtaacaaaaaaaaaaaaaaacagtaatataagatatgtgaaaaacaggtaacccatcctgataaatgcttttgattgaagtttgcatccaatgtagatatgaagaggtataacgagacctcttttgcaccatctaaaaaatttgccaaaaacagcagaagaattccctgtaatggggtgatcatttcacagtcaagatcttgatgacagaagcagtgcccacacgatgaagt

SEQ ID NO: 41857 - DNA, 391 bp, Glycine max
  unsure (1)..(391): unsure at all n locations
  Clone ID: jC-gmro02910025h10a1
tggaacgatcgagtgggtaagcattacgatctattttnctttggcttcaggataggcctaataagaaaacaaataattccaattcatatatgaacatttttgcctccttatttcttgaaaatgtggaattggaattccccgaggaattccgatctcatttcctttggcttcaggataggcctaataagaaaacaaataattccaattcatatatgaacatttttgcctccttatttcttgaaaatgcggaattggaatgtccccgaggaattgcgatctcgttaactttggcttcaggataggcctaataagaaaacagatgattgcacttcatatatgaacatccttgccttcttatttttggaagatgtggaatcggaattccccgcag

SEQ ID NO: 41858 - DNA, 506 bp, Glycine max
  Clone ID: jC-gmro02910026a03a1
aaaattccaatacatgcgatgccattataccatggagatcaaacaaatacattatctttagtttcaccaccaccaattatgatagataaaaaactgaggcaaccagaattttacaacaaaatgtgatgaatagaaagcactctgtacacatttgacggtgaaccctttttggtgaacgcctggaaaagcaaaaagccataacgggcaggtagtttgggaaactgagattgtgtcttggagcataataaataaataaagttgttgttgttgctgctgctgctaacagtaacaagaataagcaaagtggtttttgttggagacataaggagagaggaaattggaggcagaagcagatgtagctggaaccagtatgcgtgtttttccagaacctattctctttccaactacattcgcatagaacagacctgaaattgctggtacgaacacatcactctctgcacttacgtaaaagtcaatcactttctcaaattcagaatctagaaact

SEQ ID NO: 41859 - DNA, 411 bp, Glycine max
  Clone ID: jC-gmro02910026a05a1
ggaaaaaaggggacaacaccctgcaattacattaagggaaaccataccgttaaaagggaccatttttaatggaatgccaaatcctaaacctggttttaaaaacgttaaatccctttggcaacaaacagcttttaaactttaattattaaaccatggggtttccctaccctaaataaaacaacaaaaccgccacaccattggcgaaaacaatacataaatggttttgaaaatgcaaaatttgatttggtttttaaaggaatatccagtaacctaccaaacatgtttgggaaaacatgttcaattactggggggcaaatttgattcccttctcaattgatgatttgagttcaggcttaagggtttcgaggccttgttgctcaaaatttgagaggggccccaagcccagaaatt

SEQ ID NO: 41860 - DNA, 588 bp, Glycine max
  unsure (1)..(588): unsure at all n locations
  Clone ID: jC-gmro02910026a06a1
gcggcacccaccatgaaagccggcaagttgccaccaccaaacaaagcatcccaaggaccacttaatgtagacaccaccatctgtggcaccacaattgcaagattgaggactcccaaagataaaccttggcctgctcctgaagcgctgcagtatattgatgctagagcaaatggaacactgaaagtaatcgcaagaggaactccgagaaccccaaagaaaaccatggacccaaccaccaccccttcggaggggtgacccacggcggcgggattcatcttgcgctggtgctccgccaccttggtgatcaccaccgtcattccgaacccaattgccagaataaagttcacaatcgcccacagcctcttcactcccccaaccatcttccccaacggctccaccgccagcgacatgaagcccaaaacgacggcgtttaccatcagccctagcgacccaacgcgcactccattggcgtacgcgtnctcccccacttgaccaccgtacacctcgcgccccatccaatcggtgtcgaacaaaagtaagggaaccaccccacccagttcacagctgtcaccagcatcagcatccaca

SEQ ID NO: 41861 - DNA, 349 bp, Glycine max
  Clone ID: jC-gmro02910026a09a1
ggaccgaattgagtgaatatttattactccccgaaaaaaaaaagcctaaaattacaccaagaacgaggaccaagcagttggtgaaatcaaattaagtaatctaaatagtaatttttatgtaaaacaaaaaaaaaactcattggtattatttttcaattagttactcgtcgttaccgcttaggtgattgaccttgttaccgcgcggcgcgttgggggcatcgacgacggtggcggcggacattttcatttggcaaaccctaaccgcttcgatgagcctttccggcagcttcttctcgctctgcgcctccacaacaaaccccatatcgatggtgacgctggtaacataccc

SEQ ID NO: 41862 - DNA, 460 bp, Glycine max
  unsure (1)..(460): unsure at all n locations
  Clone ID: jC-gmro02910026b02a1
attcaaagatttcaacaaaataaggtaaggcagagcatattacgttcacgacaggaaacagagtatttagtcgatggtttcagaacctcaccaaaactctcatttccctaagcccaaaaagcaaaccaataaatccaagagctaattgcttataatgtaaacccgaaaaaagaaaaaagaaaacgcaaagaagccacaccctagctaaccctatttctaaagggtaatattcagatttagaaaaaagaaaacaaaagaaccacagaacacaaaagcaaggccagacccccgtactattgtatcaacgagcactggaagggcagtccctggcaaaatgcccggactccccacagttgtagcagctttcggcggcacccccaccaccgncgtaccttccaccgccacccccaccttggctgcagtccctagctatgtgaccagtctcgccacacttatagca

SEQ ID NO: 41863 - DNA, 570 bp, Glycine max
  Clone ID: jC-gmro02910026b03a1
agaggggaaaaaaaaggaatatccaaattcaggtttttactataaaatccaacataaacaagaggattgattgacaggtcacctgatcacgaacagttcaaactaaactctaatatagttctagttgcatgtatgtctcaagtccaaataaagatggcaaaaggaaatgaaaaagatagtttgcctaagagataacaatatcacaacttcattttgatttatccagcaaaaagttgacattaattgactccaaggagaaagatctccacctcacagaaatacagcctcagacttccttcttgattgagcctttcaattcaccaccggaaggtatcttgaactgaagatttgttattgtagttctcaacagaccatctccaactattaacctcagcatcttcacaaaatcatcccgcgatatatgctttgacctgaattgttcataatatattttgattacatccatacccttgggaggaacctgatttctgatagcatcaagaagcaaaggaaaaggcatccaaggggattttggaacttttgggtgctagcaaccatactaggagcttt

SEQ ID NO: 41864 - DNA, 537 bp, Glycine max
  Clone ID: jC-gmro02910026b04a1
gataaaaaaaatatattatatatatcactcaaatggcaacacattaatccgaacacacaggtacatacaccaatatattacataaggtaatatgtagattctaaattaatttattctagtaactagtaacaactcagaaataaacaaccaacggcagaatatgatgttctctgggcagttaagctcatcataactagtcatctggctaccagatgttggcttattggggtcttccttctgaaatcttaacaattagaaatccttggtcacaaccaaatgcaagctgagatgatcctttcttgtatccaatactccatactctcttgagaccaaagttcaacgtggtttgaagcctgtaagtgacagcatcccatattttaacagtagaatcctctgaagctgttattattataggaagctcaggatgagcacatattgctgtaacattgttttcatgtccttcaagcgtctgtacacagtttctagaatgataatcccataccttggcagtgtaatcatcagaaccacttaaaagat

SEQ ID NO: 41865 - DNA, 542 bp, Glycine max
  Clone ID: jC-gmro02910026b05a1
gatcacaacaaaattttaattaaaaattcgaactaaaatgtaagacttttaaacataaacgcacaaccattgtatagtggggaaaaaacaaaacgcttgacttgaagcggacaatttttcccatttacattgtatcactatcgtctaaataaatgactccatgaagcacatttgcagcagcacaaaatgcacagccgctgccttttattaatccatagatgccatcatacacagcactgcattactaaccatgacgttcaaacttcagtggctgaccaacttaagagagtttgccttctcttgcagagaatccaggaggctgtcaaagctcttcttaaacgagtccactccttcaagttcaagctgggaaccaacaaagctccagtcaatacccaatttctggagagcattgtatattccttcagcttcagatgcatttgagtctattgtcctggatacggtaccatgatcaataaatgcttgaagggcttggtctggcatggttgatacagtgtccggttcaataagaggagcaacatata

SEQ ID NO: 41866 - DNA, 416 bp, Glycine max
  Clone ID: jC-gmro02910026b06a1
gatatataattacatggtatattatttaggcagtgaaaatagcataaccgtgtaaaaataaattacaagcaaaagtgaaaaactaaaatcaaatataccttaacagaaccaactgaaaatacacctacaattcataatatcgtcaatcaatttaaatgaaactgagtcaccatataacatatggcccaatgataattatcatcaagtcacaaaaaggggaaacagggctacattcacgcattaattttacataaaaacatggatacacaagattgctgcgtgtcacatttgaaatctatatacagcaaagcagccaagcctgggtagactgtaatttataccaaacaatcgtttgcagtcgcctgaggaaaaaagcaacacaaggaggtctgagaagatgagctttgaaatttatc

SEQ ID NO: 41867 - DNA, 359 bp, Glycine max
  Clone ID: jC-gmro02910026b07a1
agaaaaattgacagcctcaacttccagtttaacatggaatctgaaatacaaaaaagattttgaaaaaactcaagaatattcaaactggcatcaatggtgcacttcaaacccggggtgtcttcttattggacacagcttttttattttccaaatgcgataattttttgggggggcgaaaacattctgaagacattttaaaggaagtttttgatgtccaaagttttgacatcgaccgattcaggctcatccttgaattcctccctttttttttgaggttccattgcctcgagagcatcctttttcagctcctccaggtgtgctttggctactttaagttctagctcctttttatactttgg

SEQ ID NO: 41868 - DNA, 289 bp, Glycine max
  Clone ID: jC-gmro02910026b08a1
gaaaacgttgcctttttttggcaacaaaaatggaatgagaagtatctggctctaatggttcaggtttatataccaagatcctaattgtttggattaaatacaaaaccggagaaagaggcttcttgggacaaaaatcatccatttttggccgacatattttttaccaagtctagaatcctaaaataatcaaagaagaggggagatttttttccctccagtccatcccggatgaccctgttgctaccagccaggttattacatggactgccaccccccatttgatcacaac

SEQ ID NO: 41869 - DNA, 405 bp, Glycine max
  Clone ID: jC-gmro02910026b09a1
ggattctcttgaattgaatcaaaatcaattgcagataaacaaacagatggtgtttgaagccattattttcaacccatagaagggcagcacagaagaggcttcatgacaacatacagccgaaacgtaaaaatgagaatagtatgataaaagtacgtagtgcacacagacttggaatagaattgaaaaggtggatccgtcagcaaaatggatcggtgcaattaagaagcgtagagcttcttctcaatcatgacatcgccactctctggaacttcagccttgtgatgagctgcttgaccgtggcagcacttgtaacttacagaagcaatctccatggatctgccacaagcagcatcagggcaattaatggggtgaagaatatcaccagggtagttagccaactgcatg

SEQ ID NO: 41870 - DNA, 469 bp, Glycine max
  Clone ID: jC-gmro02910026b10a1
ccccccctctagtagtcagtggtgggaagctgctcgtgggtgtggctgataaagacaacctcgtaaacaaggccagcgattccaccaccgatgagaggcccggcccagtagatccagtggttggtccaggtccagctcacgacagcaggcccaaatgtcacagcggggttcatggccgctccagagaaggccccacccaacaaaatgttagcgccgacaatgaaaccaatggcgatgggagcaataattcccaaattacccttcttggggtcaatggcagttgcgtagaccgtgtacaccagaccgaaggtcattacgatctccaacaccaaggcgttgccaactccaacttcagcggagagtccgaatgctggaacagtggaggcggtgacgaatgccaagaggagggaggcgacgatggagccgaggagctgggcgatgacgtataccatgccgcggaggaaggtga

SEQ ID NO: 41871 - DNA, 405 bp, Glycine max
  Clone ID: jC-gmro02910026b11a1
gaacactgcacattatgaatgatgtaaatctatttaacgcagctcgtgctgtttcttttatgatccaactataatggttcatggtattgctccttgagctccaccctattaactccgtgacacttatattgataacaaaaaagagccgtgcattataaagatatcctctccttcctcatcatcttaccgtccttcacgtgcaacctactaatagatacttctaaggagcagcgagatccttagaagcctcacagaactccagattattgcatgcgggtcaccaacataccaatagacaagagccctcttggcgaacatcacagcaaacttggggctgctgcgacagaacccctccttatctgtggcgttgcagctgatcatgcttacaggacgctgaaccttacc

SEQ ID NO: 41872 - DNA, 530 bp, Glycine max
  Clone ID: jC-gmro02910026c01a1
acttggaatgttctcttacttcttagacatgaatgacaaagtctgaaagtaacacattaatgtagattagtgagacgtgatgaaaagtaatatgaatcgaccatgaaacatggagctacctaccaccttggcaaacatgatcaaatggtctccgaatcttgtttctgcacctcccctttacaaaggtgcatatacacattatcacgtagttcacgggatgaaaaatatggagccaagggttggctgttattgaactcaataaccctcgtgtcagaatcaacgcatccctcatcataactattacttacaattcaaagtgctcttaagttcatgaaggaagataattcttatgactagttgtagtgaacacagtcaacggaaatagtcttgaatataaaacaaacaagtatatagcataggcaaatctacaagagagatctttgataaacaaacaagcatagcataaatccacatggcagatctttgattcagattttttgagattaacaaaatcattcaaatgcccattg

SEQ ID NO: 41873 - DNA, 579 bp, Glycine max
  Clone ID: jC-gmro02910026c02a1
attcatcatgtaaatacaacacaataacaagtcatccataagcagcatataggatttcttgagaggtacatataaagccagaagaaaaatatataagatacttttcttccacagtctctagtaaaaggaccctaaaaaaataaaatatgacatcatagggttttaactgatgatgaatctaaatttaacatcgacgttcctgaaaccccactacaacatatttgtcagaatctagtgcccacttcaatctttctttttatctttcagaggtcctctgggtatcttgctcaataccttcgcatcaaacactgcatattgcttcttaatctcggcaattgctttctcaccaaaagagtcgacatgatcttcatatttctcataaagcacaggcacagtgtgaagcaaaacaaaagctatgtagaacaaggtcaagaagttggcccaacaacccagaatagagaaaacccataatccagcaatcactgataagaacttcttgagatccctcccagaagcaatatcccttaacaccgcaaaagcccgattgatctcaattctaagagcagaggcaaattttaa

SEQ ID NO: 41874 - DNA, 517 bp, Glycine max
  Clone ID: jC-gmro02910026c03a1
aacgcacaagagggtgcaagcgttccaattatagctaaaagtattagctaatttaagcaatcatacaaacccaagttacacaaaagaagagaatacttctagcaagcattctgctattacaacattcgctagaaaagataagcatctttctccaagaaccgccagactcgcatgaaatcaccagacaagaccaaaatttttcaaatgtctcatgctttgctggcaatgttgttagaaagccagtccaaaccctcatagagaccctctccagaagttgcacaagtgctctggatataccagtggcgttgacggagtgaatgaagtccaagcttgtcagttatttctgcagcattcattgcattaggaagatcttgcttgttggcaaaaacaagcaaaacagcatctctaagttcatcctcattcaacattctgtgcagctcatcccttgcctcaaccactcgatctctatcattgctatcaaccacaaaaatgagaccctgagtgttctggaaataat

SEQ ID NO: 41875 - DNA, 456 bp, Glycine max
  Clone ID: jC-gmro02910026c04a1
cccaaaaccgggggggtctttaaaaaaaaaaaaaccccccgggggggccaaatttttttgggggggggggggggcccccccccgagtgggggggaacccacacttttgggatccccaaaaaaaccgtttattcccccaacgggggggggggtccccccggggggggataatcccccccccgggaacaaaaagggggaggggcaaagggggcccccctgcccccaacaaaggggggggggggggcgaaaattttcccccaaagggggacccccggggcctaaaggtttaaaaaaaaaaaaactttggggccaacccccccccaattttaaaaccccccttaaagggggcgggggacccccggggggtccccccaaaagggggttttccggggcccccctccccccggggggaccaaggggacccgccccggggttttttttcccccccagggggggg

SEQ ID NO: 41876 - DNA, 533 bp, Glycine max
  Clone ID: jC-gmro02910026c05a1
atagaaaagctatgcatttgaatttccacgatacaagactatcaacgtccaatcataatagtaagccatttactatataattttacaataaattcaagaaaaacatcaatttataagaaatatgggacgcctgtcctggggcctctcatctggttgttctcctctgtttcagtgaaaaatttaacttctctttccatattttcattgaaactaagaatagaagctacatttccacaacggtaacagtaattaggtgcggaccatacagttacaaggcctttatcctggaacatatacttaagaccttcttgaacgagttggtgtgcccgacaaaccagatcaagagtgtttatgttattgaactcagaagtgacccgggatccaaaaagccaaccagctccacgaggactgactgcccatgtttcgatatcttcaggatcactccacatcagatcacaaaatggtccctcatgaggaatttcacagtgcctctcaatgacccttatctgatctattgatcgaatgtctggaga

SEQ ID NO: 41877 - DNA, 295 bp, Glycine max
  Clone ID: jC-gmro02910026c06a1
caacccaatcaccttggatgcatttggatttataatacgacacgccctcaatctaacccaaaccgccgggggcactccccctgctaaagcgacgctttatcgcgtaataaatgataagcgtggaccacaccccatcctattgtagggggatctctaagaaatagctttataccgtcccaacggcaacctcttgtgcaatcgttgcctcaatttctatttgagcagcctgggattaaacctaggcccagacacaatgtactccgtgagctacaatctttccaggatgatcggcaat

SEQ ID NO: 41878 - DNA, 465 bp, Glycine max
  Clone ID: jC-gmro02910026c08a1
gcgctcttttctttttttttttttttgaaacttttgtgaaagatttattatccatagaagtactcttgtgcttgccagtccaaacgcattactaggtagtatacacatacaaacacaacacaaaatcaaagtgacaaccatcgattaataataaatatgttggacaaaaaaaaaaaagaacaaaaatatctttctcttgttggttttgaaggcacttttacactcctagaggggcaagaggttgctgcgatctgatcctgctctttctcaaacgctcggcgatgatgaaagcaagctcaagagattgggaagcattgagccttgggtcacagtgtgtgtggtaacctgagctcaagttatcaaatgtgaccgttcttgacccaccaatgcacacggccacattctgacccgtcatctctagatgaacccctcctgggtggcttactttttgctcgtgcacattaa

SEQ ID NO: 41879 - DNA, 428 bp, Glycine max
  Clone ID: jC-gmro02910026c10a1
agaattaaaaattctttccaaagcttggccctgcaaaggccaaaattaacaattgtttcatatgtacattgtgacaaatatgttcactacttatagactatgttttgttgggcccagagatccaacgctttctcctcaacatacagctttgatttggattttcttgggaccaattacatacttttcgacttgagaactactttaaacccctttccaacttttacacttgttgttcatttaataaggacagaagccgacttccgtatatctttgtgaagatacctctcaatatgtttatatatgagcaaaagaaagacctgtgtccatgtggcgactatacaaattgtaactaactggtaacaaccgtctatctgatgaaaatgggtcattttgagtcagagacatctatgcacaggaaacgacatttt

SEQ ID NO: 41880 - DNA, 573 bp, Glycine max
  Clone ID: jC-gmro02910026c11a1
catataattcaattgacttcacaaatcaaatagtaaacaatgctatttggttatacatggaaaaaaattcaaattattcttcagtagcaaaccgttgttctttttcaagagaaatacatgctcaagtaatgaaaatctaagtggggcaagaaaattagaaactggagatcataatggccgaagtaagctcaacttccttgcatttaactaacaaatctctatgccttgtttgcaatgttgtttgagagccagtcaagtccttcatagagcccttcaccagatgtggcacatgtgctctggatataccaatgacgctgccggagggaatgaagaccaagcttatcagttatctcagcagcattcatagcatttggaagatcttgcttgttggcaaaaactagaagcacagcgtctctcaactcatcctcattcaacattctatgcaactgatctctagcttcaacaactcggtccctgtcattgctatcaaccacaaaaataagtccttgtgtattttggaagtaatgtctccacaaaggacggatcttgttctgacctccaacatcccagaca

SEQ ID NO: 41881 - DNA, 528 bp, Glycine max
  Clone ID: jC-gmro02910026d01a1
acttggaatgttctcttacttcttagacatgaatgacaaagtctgaaagtaacacattaatgtagattagtgagacgtgatgaaaagtaatatgaatcgaccatgaaacatggagctacctaccaccttggcaaacatgatcaaatggtctccgaatcttgtttctgcacctcccctttacaaaggtgcatatacacattatcacgtagttcacgggatgaaaaatatggagccaagggttggctgttattgaactcaataaccctcgtgtcagaatcaacgcatccctcatcataactattacttacaattcaaagtgctcttaagttcatgaaggaagataattcttatgactagttgtagtgaacacagtcaacggaaatagtcttgaatataaaacaaacaagtatatagcataggcaaatctacaagagagatctttgataaacaaacaagcatagcataaatccacatggcagatctttgattcagattttttgagattaacaaaatcattcaaatgcccat

SEQ ID NO: 41882 - DNA, 367 bp, Glycine max
  Clone ID: jC-gmro02910026d04a1
aaaaaaaaaccaccccaacggggtttctttttaaaaaaaaggggggaaaaaaaaaaaaaggggggccccaaagggggggttttttttaaaaaaccccccaaaaccaaggggggggggggggggggcccctaaaaaaaaaaggggaaaaaaaaacctttttggggggtgttatggggggggggggcccccgcccccaaatttttgcccaaagggggggaaaaaaaaattttttttttttttcccccaaaaaggggcattaattgacccccggggaaaaaaacccccccccccccaaaaaaaaaaccccccggtttttttttggggggggggttttaaacacccccccggggggggtttttacgaaaaa

SEQ ID NO: 41883 - DNA, 321 bp, Glycine max
  Clone ID: jC-gmro02910026d09a1
agagaaaaaattgatgaatacctgagactaaatggagtgaccaaaaaacatatggcccattgaagactagcaataaaacagggttaccttaacgcataacatagactgttcacatggatacacaagacagccatgtggaccaattggaaaggatatacagtaatgcatccaaccctgggatgtgagctataaagaccaaagaatccagcgccttatccttggggaaagcgcagcacaccatggattcagaagatcaaccaagaaccatagcttccttacggccaattgctggccgcctgtaaagagcgactgaaaatgctt

SEQ ID NO: 41884 - DNA, 474 bp, Glycine max
  Clone ID: jC-gmro02910026d12a1
agcaaggaagccaatggcaagtgaccattgtgattaaaatacgaagagcattctcctctcagcagatcggcattctaattcgaaagcagctatgaatcttaaaccaacatacaagacgcagatgactattgcggccacacaggaattaaatattgctagaacaaggcatatgatagcaatgaagcatgtcaatttttcttggcaatgaacaagccccacatttgctctttagatgcacccctggtctgatttgccttccatctttcgacgatatgattggaggcttcctcgctgaagtgaccaataaaaacggccttcttgttctcaagggcatttaactcctgctggagcgcgttcacaaactgaacagatcgatcctcaggactgacattatcaaatcccgcattctcaagcatctgcctatacgctttaatgagaaagagagtatatcctcctttttttatgtactcagca

SEQ ID NO: 41885 - DNA, 565 bp, Glycine max
  Clone ID: jC-gmro02910026e01a1
gaataaataattaaatactctttgctacaagaagtccatctatgaaatacaggattcaagataatccacttccaccaaaaattccacctatatgaatccggaatccgattgccgcaggcacttcatgttctaaaataactttattctcctaaatacatattgaaagagcaagtttcgtttcttattttcaataaacaaactgaggatgactgaaacacatgattatagctacacatgagactagatcaaaagccaaaccagcaccaagaaaggaaataaatgtgatatgaatgaatcaaacagtcaaatataagaacactcgggacggtgtaaccctgcgatgctagactgcctcttacaattggaaataacacattatttgagcaaactaccataccaaatcttcaatcatcgggtttcgtcctcaaggttgcggaaaccattagtcaggtcctcgtgtaacttctgaaatttagcaaccaaagcagcttccccttctgctggatcctcaaatttctgagacactaatcggtagaacagatctcccatacgatgcttgataagg

SEQ ID NO: 41886 - DNA, 378 bp, Glycine max
  Clone ID: jC-gmro02910026e02a1
gatgcataaatgttctttataaacattactagcttgaatcctgctggcgacaaacatacgttcctttttttttccgagccaaaatcttatttccatatacagagacgcttacacatggtttattacaagggaaaacaaaaggccctctttctttaagggatacacctaaccaatgaacaaactgaggcagtcaatatattcaagatttggacacgattacaagggctcggtcgtgacttaacttgctatgccatgcatttacacatcattctttaaccgcgtatcgatgcccgccggacagttagcaaacccaggtggtacttagactggacattgtatatgtcatgtggtgctgccgtacaggccgtcggagctgga

SEQ ID NO: 41887 - DNA, 471 bp, Glycine max
  Clone ID: jC-gmro02910026e04d1
gtcaaactgttgctgtgggagtcatcaagaacgtggagaagaaggatcctactggagccaaggtcaccaaggctgcccagaagaagaagtgaatcgtgcggtttggttcatcaggggatgtcgtttcttatggttacaataaatgttggtttcttgcccttgtgtcttcgtttctaggtagcttgtttttcggacatagtttgaagtctccaccatcatctcgcaacttttgttcccagaattgggttcttgatcgacggtggcaagactccttttatcattctgttttaatgtgttgtgtttgtgagaacccctgattacatttttgttaagcgcagcgagttttagggctttgccgttgcgttgttggtttgctttttaaatgtcaactttatatttgtgttcaatttttgcttggtttgcttttaaaaaatcaaatttatgtgtcaaattttggctttggatcaaaaa

SEQ ID NO: 41888 - DNA, 317 bp, Glycine max
  Clone ID: jC-gmro02910026e07a1
gacaaaactgtgaaagctttaattaactatgggatttaaaaactaggtgcaatgtcacctgaattgaaaagacggcgcactaaaattgttcctacagtgaatgacaaacaacttggtcaatgttaacaaaggaaactgaacaaaagttttacttaatttagtcaaacagactgaaacccatggcatggacagactcttcaggtggttgtttcttcttttcctcctacttggctgaagccgctggagcaccacatgcggcagcaggagcaagaacgggggcaacggcaaatttacttgggttcttgagagactccttg

SEQ ID NO: 41889 - DNA, 493 bp, Glycine max
  Clone ID: jC-gmro02910026e10a1
ccgccacggaaacaaatatcactttcaaattattgaacctgctcggaaacaaataccacttcaacaaaaaaaatactagtttttcttataactgctcgggataactataattattgaacctctaatcaaaaggatcaattcggggatcatgttcgcttgccatggccattccagtgcagagacatgttggacacataaccttgccagatccagagcaatttgaacatctctcagtttttgggggggaaagaggcttatctccacctttgactggggatactggttcaatcagaacaagtgctcctgtgcttgaacagcgagcacatgcaagatatccagtgccaagacagtatttgcatcttttctgctcctgctgttttacattgtttatctcaaccaccattaatgccgagattactccaactgctcctccagagaatgatgccactatgggatcaacctgactagaatacccaacagaatttagttaaga

SEQ ID NO: 41890 - DNA, 541 bp, Glycine max
  unsure (1)..(541): unsure at all n locations
  Clone ID: jC-gmro02910026f01a1
gcaaaacaagacaggttattgaccaagttattcgacgcgatatatttacatctattataatacactcatcaatccacagcacaagaacttgggtgtggataagctatttatcacagctcaatcgaaaaaattcaagagggaaaacttaagtgatgcaatgtaccatagagctagggactaaggggcataagaaaggtcatctaggactagcactgcctcctcaattgtagagttttggatgctttaactagtgagatttttgtgttttaacttcacttgttgcttggacaaaacctcagcaatgagctgacggccaaataagtgagaattcttgaggattaaattccttgttgatgaatcaaccgcgtaaccttgtcctgccatccattgtagtaagtgtagaagcaaatccttcttttcaggctgatctaaatagcgtgacacggccatcgcaaataaatcctgatcaagcttgtagccacaatcatggagggtctttagaacatcatttatatnagtgaggttacctgacttcataaat

SEQ ID NO: 41891 - DNA, 442 bp, Glycine max
  Clone ID: jC-gmro02910026f02a1
aacaaaaaaaggggaacaaaggccccacttaaaatttggaaaaagggcggaaattttacttttaaaaattgggaaaaaaaaaggtccattttaaaaagggttcccttaacaaaaagccccggggttttttttgaaaaaatggggcctatttaaaaaggggccaaacccttgtttttttgaaaaatttgccggggccggaaaaaaaaccttgggtgggaggggaaagaatattcggggggaaaaaaaacaaaccttttaagggcccccccccctttagattgggcacccccttttttagccccaaaacttgggctgtccccctttttgaaaaaaacccaggcgaaaaaaacttttttttaacccaaaaaaaattttttggcattttgggctttttggagacccctttaaaccccaaggttttttttttaccccaaaggggggg

SEQ ID NO: 41892 - DNA, 454 bp, Glycine max
  Clone ID: jC-gmro02910026f03a1
aacctgtatcagaacactatatacaaaagatattacagtattcgaaggaacatgaaaaaaataaatcttttttggatttggggaaggggcttggaggaagagtcgaatgtcacaaaatcccattctaacattaacacctgtaaaataaacacctatccaagtagaaatacacatgacacaggaaaccattttcaagtaattctcataaaatgagttcacctgctaaaagcatcttatgatatactatgtacttttcctccttatgtgatgcaatacagcaggggatccttcaaataaatctaatagataggtctctagatcctctggtgtatacttaatgtacttcccaacatgccttccctctaactgacacctaaatcttcccacaaacgagcggtatgcaggaatcaccttttctgatatagatatccgcagctcctcccgaagctggtca

SEQ ID NO: 41893 - DNA, 567 bp, Glycine max
  Clone ID: jC-gmro02910026f05a1
gaaatatccatgtaacaagtaaataaccaaaacgaacgttttaaaaataaataaaaggcctcagtgccacggtcttcaacataaaaatcaattctacagtaaagcagtaactaactttgtcccaaaactcaaaaacagattcgcatctgaaaacactaaaaagcttaacctaataacgtccaatagcccaaactctgaccacaccatcggtatagccactaaacaaagtgcttccatccgcactccagttcaaacttgtgcaataaataaccttcttcttgttggcgttaccaccaccggaggtggcatcagcctcagtcttgaggtcaaccttcaaatcctcaacgatactcttgctctccaaatcccagatcttgatgctctgctcggtggcggcgcagagccagtacctgttggggctgaagcagagtgcatggatgattgagccagcatcgagagagtaaagacgcttaccctcagccaaatcccacagaagaataaccccatctttgccaccactggcacagagagagccatcaggggaaaacagcacagtattcacatacc

SEQ ID NO: 41894 - DNA, 389 bp, Glycine max
  Clone ID: jC-gmro02910026f06a1
acaacggaaccaaccctaatgggaaaaatggaattaaacttttactataaaagtaaccgccacattttttgtcattaaaaaaaaggaacataacgtagattcttccatcccttaacgctggttcctctcatttgtttcccaaacaatacattgacacataagaaaagatataaccctgatctataaataattgggaattcactcctggtataaagaaaatgaaccagctcgcctaatgggcacctgatgttattcatgccggtcaccagaagttgcatcactttttgtctaatcagttgctattattgatctattccttcgaatctggtgcagaggacacacgtagtgaactataatcttgtgttttggggagggaaaagctaccacgc

SEQ ID NO: 41895 - DNA, 474 bp, Glycine max
  Clone ID: jC-gmro02910026f07a1
gattgcatattatttacatatatgatgctgcatattataccttaaggtgttatatatatatatatataaagagagagagagactaagactaaacttcagtaaatgcatgtttggtatcacatcctacatctccaaacaggctataagaaatctgaagcaaaatcacgtgaaggatgacagcaatccattcacagtttcatctagggaaacgatgcttggtgagtccaataaagtaggcttccttatccagtattgctgaaacctctgccttccatactccttatagtcaaagtcaattttgttcacataactcgaaataagtccccacaaaccccaaaatagatggtttgcaagagtgtatttttctgcagctttcactaactggttcactttaacattgcttggtttattgccttcagaactcagatagttgcgaataaatctttgacgttcctctagtcctggatatttctt

SEQ ID NO: 41896 - DNA, 568 bp, Glycine max
  Clone ID: jC-gmro02910026f09a1
attgagatcaaatatgggtaaacttacattgaaaactctacaaaatgtacataaatgattcaaacaagcatatcacaacacaaaaccaaagaattttcttcagatgtgagaccccaacatttatactactttacaacaataactaactaatcatacttctccctccacatgtacacaagaaagaagagccaggaagtggccaatgcaatgtccccaacagcatgcctaggccagtcatgcgcaagatcctcaagcttcccctcaaagtagaatctccacactgccatagagatatgaagaagcacacaccctttggcaaagaaactctggaactcccagtccttaacacaagcaaccatgaacacaaggaaccctattgtgaacaacagcaagccagagaaggaatctgaggtttggatcagtaactgatcatggggtgttgacccttgaagcttgcttgcagtctttggtccatgccccaacacacttaactctttggaataaaacaccatcagggatccacaagtcaaagctattgcagaatgcagaacacatattttgaaaaagc

SEQ ID NO: 41897 - DNA, 501 bp, Glycine max
  Clone ID: jC-gmro02910026f10a1
gtactgtaaagataagtatttaaaataatcttagctgtctgctaccaatatgttttgagggtttaaaaaaatacctgagtcataatatataatcgggttcaatccaaaatttcagacattttaatacaatcttaagaacctcgcataccttacaaccaagctacaaatttaaaataatactacagtttagaggagagcaataaaatccatcctacttcaacacacagttttactaggccccgttaggaagccccttgaattgcagttgcaggttgcatggctatatcctgattctgtctcacagcaaatccatggcctccataactctgaccaccaaaatagcctccattggaatcagatctccaatgcttatttcctggactgcgaccccaagaaagtcgcactgtctgctttccaattactgtcccattcaatgcgtgaattgcttcctcagcattctttctgtctgcaaattgaacaaatccacaccctttacccact

SEQ ID NO: 41898 - DNA, 414 bp, Glycine max
  Clone ID: jC-gmro02910026f12d1
ggaagtcacaaacaagtttattttacatatatgtaacgttacatagaccctacaggatacaaggccatcgccatagcaacttcctacaaacgaaaaagtccaaacctcattgggctgcctacatatcaaaaaccacccatatcagatataagcacacatcagttttccaaaggccatatttagaggccttcaatgaagttgaccccagtgttcttcaaccaaacattgccttggatgagttgtgctaccgggaacttgctggcctcaactgcagttttgatgatatggtaaccaggccaattcactctcttgctggtaccggcaccggggccattattcatgtactctccataatacaacgtttgcaaaaagtctttactttgggcatcccattcagcccatcctgttgggtca

SEQ ID NO: 41899 - DNA, 521 bp, Glycine max
  Clone ID: jC-gmro02910026g01a1
gatccacaaagctaaaaaatagcactcttccttccattgatgttgaatcaaaccatattaaagattcccagagagggaaaactaaaaaacttgcttctatagttgctagttacatgctatttacagtatgaaatgaatctcataacccaaagctgaaaaaaaagaaagtattactattctttgcaaaattgccatcaccattcaccaattaatcatccataacccaagtcctgctatgtctccgcgagcttctattgaagattgaactcacgtgactacggcttctacttacagacccatgtccagaagaagagtttctagaaccaattcttccaaagaatgaaaagaaattgctaataactctaccaaaccctcgactttccctaaccctattgcttctaacagaacgagaaattctcctaggagcaccaccgttcgtgttcagtccaccgtccatctccgtgtacaccaccgggaaatgactctcgcctgttctccggccgccggagaatctccccacg

SEQ ID NO: 41900 - DNA, 447 bp, Glycine max
  Clone ID: jC-gmro02910026g02a1
cccctgaaaaaaggtattttgcccgggtccctgtttttgcctccccctggggggaaaaaaaccttggaaacccatggtcaaatcccaattggtttttgttccggggggggtaaaacattttaacaaaacccttccttgaaaaccttcgagacgggggcccttttttttcccccgggacataagcggaactttttaacctttttttttggaaatttggcaaaactaaaaacgttttttttgtttggggaaaaaccacctattccccccctttctttttttttttaacaaaacagggaattcccttttccgaagggctcctcccattttttttgtgggggagatttttttaacctttccgggggttctttttgctggaaatttttgttttggttggaaaactgcccttcccatttttagggaattgcccaaactgggaaaaaatttttt

SEQ ID NO: 41901 - DNA, 452 bp, Glycine max
  Clone ID: jC-gmro02910026g03a1
ccgtaaacctttttactctttttccaacattttctttccacagaatcaacgcacaaaaaggaaagaactttcaatacaaaaagacagaatccaagatgaaatcttggggcagtaataattcattcatttcataacctaaaacaaataaatctaaaagccaccttccaacaacgaaaacggataaggcggcaccgcattcccctccgccgccatttccccaaaaaaaaccccacgccccaaataccctcctcccatcgtcggaaccgccggcgccaccaccgtcaacggcgccgtcacggcgccacgattgtacccatgacaaccctgttccccccaataccccgccgccagaggcgaacaaatattattattatcgatttccaaccctgtctccggcgacgaagacatgatattataattaccttcgtcttcttcgaactccgtcttgatgc

SEQ ID NO: 41902 - DNA, 408 bp, Glycine max
  Clone ID: jC-gmro02910026g04a1
atccaaagccaaaatttgacacataaatttggttttttaaaagcaaaccaagcaaaaattggacacaaatttaaaggtggcatttaaaaagcaaaccaacaacgcaacgggaaagccctaaaacttggtgggcttaaaaaaaatgtaatcaggggttctcccaaaccccccccattaaaacagaatggtaaaaggggttttgccaccggtgataaaaaacccaattttgggaacaaaagttgcgagatgatgggggagacttcaaactatgtccgaaaaacaagcttcctaaaaacgaaaacacaagggcaagaaaccaacatttattgtgaccataagaaacgacatcccctgatgaaccaaaccggacgatttacttttttttttgggcagccttggtgaccttgg

SEQ ID NO: 41903 - DNA, 573 bp, Glycine max
  Clone ID: jC-gmro02910026g05a1
gaaagaatacataaaaattgttattctatttctagtccagtcttactatcagagtattgtatacaatgaagggattttataatagcaaacaaggtatactacttatgtaccttgttccaaatcagtgagggtagtgtaaacaaataaaatgaattaaaggcaaaaatagtgacgggggaaagacatgatgtaggggtaaccactaaacaagcattgacccaatcgcttatacattagatcatagcaaggcacttcacttgaaattgccaagatagaaaggagatggagagggtattgtgcagagaaaatgagtgttctctgcttatgacttagttgtgaggatcattcacgtagcttacaattctgaagatagggatgattaaatttgacatatttggtccagtaagaccgatactttgtcatggctatctctaaccacggcttcatattaccattgtagtgtacgactgctgcattatcaatctccgagcgatctacacttggattgtaacccagaccgagtacgtgccatgatttattaagtggatgtgttaatccatagaatgtcatcag

SEQ ID NO: 41904 - DNA, 324 bp, Glycine max
  Clone ID: jC-gmro02910026g07a1
ccaaaaaaccccccccctttttttttttttttggaaaaaaatttattatgcccctgtttggccccccccgaaaaaacaaggggggattccccttttaaaaagtccccccccccctgggggggggaaaaacccccaaacggctttttttttttccaaaaggggggggttaattttccccaaaaaaaaaatttttggtcctggtggaaaaaacaaaaaaagggggtggggggagaaaaaaccccccttttaacaaccccgtgggggcgggggagttaaaaaaaaaggggggggaaggggggtccccaaaggaaaacaattttaaaa

SEQ ID NO: 41905 - DNA, 535 bp, Glycine max
  Clone ID: jC-gmro02910026g08a1
ggaaagaggtagcttttatttgcaaaatgatggcattccatcccataaaaatctacatccacacaatttataatgaacaagaatgtaatacttctttctttaaaccatgataacacagattgtcaggagaaattatagtcttctagatgttggcaatggacacgggctctcggaggatcctctccatctgttgtgccctggtcttaattgacatgtcaaagaccttctggctaaattcaagcacaagcccaccaagtatgcttggatcaatcttctgttcaagatgaaccttcgctccagaacctattatttcctgaagagtctccttcaatgccttttcctcttcagggggaagaggaacaacagtggtcacagtcgcttgcacttctcccttatatgccattgacaactgtgcaaacctctttgcaatggtgtctatgtttttaagccttccattctcagcaacaataacaaggaagttctttgtaacatccgaaaacttggcttccccacaaatatcctggataactttcac

SEQ ID NO: 41906 - DNA, 539 bp, Glycine max
  Clone ID: jC-gmro02910026g09a1
aaacaaatcatgagttacattacatagtggtccaatgttacagtgtaggaagctaacattcaaacaacctttcaaataacaaggtaaaagccctacaccacaaaaataattatggtaatggcctatctatgtgctgaacccgagaatgtcagcataagttgtgatcaacgaaaataaaagcatctgcttacaacatttttaaggttacaacaatatttttctccgaaatactttgtttcctaaaggtgcaggctactatccttgcttggccaaaacagtgttagtggcagaaaagttagcaccagcgtattctgcagtggcacactcttcagactttcttgtcgaggttgtatggtgctgcactcatcaccctttctttgcgtttttctaaaaatcgagccaaggatgctttccgggcctgaggtacagctgatgtcaacatagtggttgcactgactatctttggaggctccacattgcaaacaggagtggtgggaactccagttgttttatcaatactagttgagccactccctgac

SEQ ID NO: 41907 - DNA, 589 bp, Glycine max
  Clone ID: jC-gmro02910026g10a1
gaatctaactagtacagtaaaatttataaatgtaggagctctacagattgatcaaagttaatttccggaaggactacattttattttgtgccaaaatgaagagtaccgtgagagatcacatgaactacagtgttgcatcaaatattattactaaaatataatgttccatcaatcctatagtatggccattcttgtataacttgatatctgttgttccatcattttctcttctacagctttactcaatcatgaattttgatcagtaccagcaatctaccacttccccttgctctggcaaatcccacttctttgggggtcctgaggcccttggggatgcaccaaaatcatcccaacccagtcttgcaatttccacgccgattgttcgaccataaaaatccttctgatccatggtttctagtgcaagcatggcatcatcttgacatgtatattgaatgaaagcaatacccttagatctttttgggttcatatctttaaccattttaacttcagctatcttgccgaaatttgaaaattccttcttgcaagtagtctcaccggtagaatatggtaaatttttgacacaattttg

SEQ ID NO: 41908 - DNA, 546 bp, Glycine max
  Clone ID: jC-gmro02910026g11a1
aaaaaataaataatgcactaaaaatctgttgtataataacaacaataatttcagtttgttgtactctgaaaaatcacaaggacaattcatttattacggacatccttttcaggttataatactctccttgggcttgacttggcacaaaccgattcctcagaaatcaattgactttattattatatcagcatttttcttggacttcattataagttctgcattaagcctgtcgttgttctctatccgctgtttagcaatgtctggaggcttgccagttgaaatatgcctctttaaaactcgctgcattgctttgtcaatgtcaatatcaataaaccatttctcgtcaaacaaagacgatatctccttccataccccatcttccaagagcaaatagttaccttctacaataacaaccttgtgcctacacaaaggaagaaaacaaaggaatctgtccatgcagcagtatatatctacaaaaccaaaataagctggcaatgtaacaagaagcaacaatttggaaaatcaattaccctgatttgtaaaaag

SEQ ID NO: 41909 - DNA, 270 bp, Glycine max
  Clone ID: jC-gmro02910026h02a1
caccaactctaacagaactcaattttattatttaataaaacagtagaaaatccttgacaggcgacaggaaggaagggggaaaaccaggatttttggaaaagggtaaggttgatccttctaatttttcaaactataaggccggggctcaataccgcaggcaatcgagaagccaaactgcgttttaagtcaggggaaacagcgtgttcaccaatcatggtctccaacaccgccgctgacacagccttgttctctatcactgcagcctccttt

SEQ ID NO: 41910 - DNA, 555 bp, Glycine max
  unsure (1)..(555): unsure at all n locations
  Clone ID: jC-gmro02910026h03a1
gaaggataccaaacacaattacaatttacaaatacaatgtcccagtgtgaaggttattgaagtatacaaaataattcagacgtgtcaggtactagtaatactacaaccccacaatctaagtattttaagagaagctcacagcagtgaatcattttacctataaacaacgtgcaatgatttgttatatttaattatgagtttcattccataaataatgaaatgtttctatttccattgcttaggtactcttttaatcttgaagagtttatacattggtgcagtgtcaatgaaaagtcttcttccatcccttgatgtggattcatgtttccatgccggtccaataaaccatgatgcagcaacgccaccaaccaaccctcctaaatgtccccagttgtcaatcccagtggataatagcccaataaccatattgagggcaattacttgtgctatgtgctgtaaatcttttttaccacctcccacaaggtctttgtgcctcaatacaaatacggcaactgatccaacctgaatcattgtagctcatccngaataaaagac

SEQ ID NO: 41911 - DNA, 496 bp, Glycine max
  Clone ID: jC-gmro02910026h04a1
attgaggagttcttttcttcgcttatttattaatttaaataaaaaccacaaggaaaaaaaaaaggtttatggagaaaaattccacagggatgatgaacagggtttgggacttgacttatatccgcacccctcccacaaggcttttttacacgcaaaatggcaccaacaatggaaaaacatgcatcatcataatagtaatcaccatcaccagtgccttccctgagaaccaccaccaccaccaccacctttgttcttcccaaagaaggcattattcttgggttttgacttcggtaactcatggatgtccatcacctgaatcgttctttgccttttggcaatttcagcctctttgtagttctcttgaagcctccttctcgcggaagcaagcctctccgcgtcaaaattgctatccctctgtctgttttgagtagcggaagcaggggttgaaactgagggtgatggcgcgggttttggcctaggttcactgcggggaact

SEQ ID NO: 41912 - DNA, 327 bp, Glycine max
  Clone ID: jC-gmro02910026h05a1
aatgcaaacagtataatgaaaataaaatggcaaaatccctcaaactgagataataacctatcaactgcaaggtctaatagttaccaaacactgaaatagacaacatagcaagtccaaatataaaaaccattcaaacatcaggaagtctgaccctaccaaatagcacttagatcataaaattcttcaatgactctgataagaccattcacatagactaaaagatccaacaatggcaaaacagctacaggtgcaatagtccgacgtctccagaatttttcatgaaaaacatagcttattcatccccgtttgaatttcgaggggaaggac

SEQ ID NO: 41913 - DNA, 409 bp, Glycine max
  Clone ID: jC-gmro02910026h11a1
aaaaaaaaaaagaccctactccattcccggggttttactacaaaaggcccactttaaaaatttcttaaaaagaacaaacccttacaaaacatttttttttggaaacccggaaaaaaaaaaaaaaaaaggggggcttaaaaagaaaacccattggcattggggggagccccttttcaatttccattacccaaggggggcgcaaaccaactttagtttcctaaaaaaaacaacaatagtcccgggcaagtctttttcaaaaacccaatggcccactttgatcccacccggaccccaacccaaccccataaatgcccccgggggggggctcccccccggggtatcccagggacaaatagcacccccgggggtaaatttggccttaaaatccgggtttaaaaaacccccttgg

SEQ ID NO: 41914 - DNA, 494 bp, Glycine max
  Clone ID: jC-gmro02910026h12d1
attactaacatgatgacttaaacaatcatgttgtacaagatttcaagcattgcaaattgaaatccatttacctggtttggatgacaataatattttataaaatgtaaaaacttacaaacagcttaaatagccagaacatttggatttactccaagcaattgaggtcaacaacaacacaagggtgaattggatcacatcctattatgacacagtattaatcccacccctttacaacctccatacaagtgagctcaataagaaaagaccagttaatcccccataactggaaggttcattcatcattgccagcatcaccaccacaaagtgcaacattccaatccctcttctaacttttagataattcatggaagcacaacagaaacatggttagtattatatcaccccaatcaaattaaaacttcaagcaaagttgtttgtatttgacattgaagaccttcatcctacaaagtcatgcaacagttgtcctccaatga

SEQ ID NO: 41915 - DNA, 518 bp, Glycine max
  Clone ID: jC-gmro02910027a01d1
acgacaattgtatgtagaatattgtttagacatactatgcaatattccagtcaagagttattattaatcctatattatttacagttgctagcatttttcttagaaaggccaagtttggacaatgtgtaaccctcaactaactgaacaagtcgtcttggctggttgtatcaccatcgacatcatcttcgttagaactgtcactattggcattgaatgtcagtatcaatggtagaaggtctcgaactgtagatgagttttctccattgcttactgtcctgacccttcgtcttggaagtgaaatcagttgcattaggtcttcaggataagctatccggtacatccagcccttagccttcggtttctgtcggacataaaattttcatcaatttgcatcattacaaccaccaccaagattatcatcgttgccattgtcatcatttttatcatcaacaccattgttgacatcaacatcatcacaatcataatcatcatcataatcattgatataatcgctataa

SEQ ID NO: 41916 - DNA, 544 bp, Glycine max
  Clone ID: jC-gmro02910027a02d1
gacacaaaccttaattaattgatcaattatcttagtacacactttaaaatgttcattattaattataattatatgatgagttaataatatattgtggttagggtatgggataaacgaccacttttcctgtggctcttgaagtttctaagtaggaaatggcttcaataacctgagaaaatggcactggagtcttggcatcgagtataggcttcaacttaccactctcaaagtaaggtcttaaattctctaagatagatccctttgaggtgagcacaaaaaacatagctggtggatgtccaggtggtactattgtcacaactttcccatcttccttaacggccttaaatgctctatcaccttgccctactacatcatacactagatcgtatttttctggaaggtcttcaaagttctcctttgtgtaatcaataggcaagtcaacgcccaacttccttaaaagttcaagtttgccggtgctagcagttgctgctatcttagacgccttataacttgtttagctagctgaataacatagtttccaact

SEQ ID NO: 41917 - DNA, 527 bp, Glycine max
  Clone ID: jC-gmro02910027a03d1
gggacagtaaacaatgagctaaattagcaggggaacgacgatgatagtcaacataattcataacagggaacaacatcaaagatgtaaatctttgcatgttctttagggtacatttaagaaaatcaaatgagcaaaggcaaatggaacacggaattcctttttaatgactaatatggcagcaacgtgccatattcaaattcttccactagttgcccatttcattttgtactcccttgacagctagagcttgctgaaagcacgacaatgcatattgcacatcacttgctgatatttggtggtggagaacaactctcattcttgatgaactctcttgcatcacaaggataccacgttcttccatgtacttgcatatcttttctgccctagtctttgtaccctcttcaatgtcaataaataccatattggtctccacagaaccagcatccactctcagtcctttaacttcttttaatccatcagccaaaagtctagctttcttgtgatcactttccagcttcccaacattt

SEQ ID NO: 41918 - DNA, 526 bp, Glycine max
  Clone ID: jC-gmro02910027a04d1
aggagtaatggtgattgataattcgacaatagtgtgatcacacggtaacatgaggtaacacagggaacaatgaatatatcctgtgtgatataaagacatatatccacacgcacacacaaaacaagaaacagaagtttcaaacttgaattgatactatctaaatgacacagtaactcacagtcactaatgtgcaatgaccgattccatgtaaagtttgaatactaatactaataggtatggcttatcgtactaagaagctgaaaccaagctacgattactgcctacaaaacttggaaatcgtatcaagcatgtatctactctctgaagagtagttcaccttatcagccttgaccacagtaatcttcaccttctgttcatcgccatataattcctctttgattttcagcctaaacatgaactggttgaagagtcggctcttgattatttctccaaacttttcatcatcctgctcttcatgtttaaaaagtacagatcctttgctgagtaatccataatctcttcccct

SEQ ID NO: 41919 - DNA, 571 bp, Glycine max
  Clone ID: jC-gmro02910027b01d1
gcagtccctgcagaggtaatatcttctacgtctgtagtatccccaccacctaaagatatatcatcattggttgtttcactttccacagatctaatggtatctgctctagtttcatcagctgagagaacattcatatgaaaccatccaaaggtcggtttgctgattttaggattcttagctccacatttttgacatttcttatgttttttcgtcagcaatttccttagaacagacattgcctcactaaattgaagggaggtccaattttctcccagttgctcagcactataacactggctctcatctccatcacctggatgtatgaattcatctggattaaaagaatccacactttttccagggataatagattccaaacgttttgccctgataatatcccctttcattatgagctccaattgggatgtacgaatatcaacctctttgctgggggcccgaaaatgatggcaagtgaaacaagttctttgcagaatattgctaagaatattgaacatcagagggttgtagacaggggaaacgagctcaatatgaccaaatgacctgggcaatg

SEQ ID NO: 41920 - DNA, 558 bp, Glycine max
  unsure (1)..(558): unsure at all n locations
  Clone ID: jC-gmro02910027b03d1
ggtattgaatattttatttgagctacatacaaacagtttattcaaccaacaagcaatggtcgattttttttacaatttttctgcggcagctgcatgtattagtttttagaattggtcttgaatcattcatacaatggcttttgcatttgtttttgagggggaaacaaaatctttaggcaaagctttttgaacaacgttaaggggacatcaggaatgtgcccttcaatccaaaaacctactaaaaatgaatctgaaatccacaaataatgaaccaacaacaaatctacacaatttgcaagcaaggaaagctcacaagcctaggcatcatcactccaattaaatgtctcggcaattaaattcaaactagataacctcagcagcaacagaattcaaattcttcgaattggaaccagaaaccccatcctgtttcgaagtagtctcactctgacctaaaatctggcctttactcaagcctaatgcatgcttgtcgctccaacaaggccggtacagattcctccctcttatggagtatcttccacttccanacctgctggagct

SEQ ID NO: 41921 - DNA, 524 bp, Glycine max
  Clone ID: jC-gmro02910027b04d1
ctacctgcactttattcaccacaaaaaatgccttccattccccacaagctagtggttgtcacaacaacctctgaacaaactatccaactccacagaattgcaggtgaaaaggggggaatagacggtatgtattatatacttctcctgaaaatgtggggaaaaataaaatgtccaaaagaaagaaaaaaaattcaaacttcaagtagtttagtcgtgtaatggctctgcagaagccgggaaggaatttgatgtagtatcatcttgtttggatgaatcttctgtagcagcttttgcatcagaatgctgaagcttgttgtcacttgataatttagaaggagatgtctcaggtggttgtacatttgataaccccctggtgagaggagtatcaagtacattcatagcaggtgaggtcaagccatagttctgagggatagtcaaaactggatgatcaaatttgcatgttgggccaaacttgcacattccatagattcttgtatagagcatacagcttgcccaggtctcac

SEQ ID NO: 41922 - DNA, 357 bp, Glycine max
  Clone ID: jC-gmro02910027b08a1
tttagcttcgagcccgccttcaatgacactggtgctaatatggaatgtgcaaaggctagtactggtgcctttgacgatgaaaatggcatccctgagggctgagaatagaccctgctaaaaggatactgatatctatgcctacggtccaaataataagggctagaaaacaaacactccagttgcaaagatcgattaaggacagtggaacatgaccaagcctataggataccttaacacgtatccgtccaggcttgataagatctggtgccgtgagaaatatcacccatgaccaatgtcaccgatgctgaggtatgtgacagaacaaacaagcttaatgtcgaataccaacagattgtc

SEQ ID NO: 41923 - DNA, 529 bp, Glycine max
  Clone ID: jC-gmro02910027c01d1
aaaaacaaacccttaacttttagattgaaaagaccaagtgcatatagattgaaaaacgacaagttttcccttgttccatgatgtcatgacaccgacaccgaggaagtgtgtggccaagctggtagaaagtaaggaactactttgctagattcccatgaaatggtacctccacgaccctgataattaacaatttccaccgttttggtctccaaatcacacagcaaaatgttccaccccgacctaatgaagatagatgtagaattctgaggaaggaatgacaatatctgagtttctttagaatgtgtgcttaaagacggcatctgcttccataatactttaaagtttaatctccacctcagaatccacttgtacttcagatgagtgcagttgcagtaaatagacgagttggctcctgcttccttctcaagtatccatatctccagacccaagttattgctctggccatactgcaaaagcccatcagatgactccccaagaacagattccttatgctcgtgtgttaaacaca

SEQ ID NO: 41924 - DNA, 441 bp, Glycine max
  Clone ID: jC-gmro02910027c03d1
aacagtagaaggtgcattacatatataataacttcttgttttttatcacaccaagttgcaaacatagaagagatgatccaatttacaaactacaaatccttcaccacaacaggaacatgagagcacataaaaaatataagaacctcccacagacaggtttttggggttttataagttgtgacaatcatgaaaaaagcttactgaatataaacatcatgacaacagaacacaccgatagtaaataatatcatgatcaacaaggcagctttagtaccaaattctatccagtccaaacatgccttaagttgtgcttccaagccattatggccttgtgttgctccctcacacagccaagaaaacattttaaccccacaagcagttagatggatagaagggtgtgatgagatgcttaaatctgcctagttcctgctcttacttttt

SEQ ID NO: 41925 - DNA, 391 bp, Glycine max
  Clone ID: jC-gmro02910027d01d1
aacattgcagactaaaattaaaattgaaaagatcaaaatccaaattacaccaagttcatagtaataataactaataacaacaagttaaacccaggataataatgagaaaaaagagttccggaaagaaacaaggggggggggggggtttttgttttccaatttccaaatgaaacgaaaccctaaccagagttttgttcgtccttgtcatggggctttctgcagaggatcatgtgcatcggagagaaaatcccagagtcaccccctttggtcaaatagtcagcggtcttgaagagcattttatgaacattgacgggccccttaggcgcgattcccaaagcggggagaacagtgaccacaatatggtttcgccagtacgcgatcctacccattt

SEQ ID NO: 41926 - DNA, 503 bp, Glycine max
  Clone ID: jC-gmro02910027d02d1
aattgaatggagtgcgatttcattacaaaattaaaagacaacgaaagacatggtatggtggcatatatactattccctaacgggacaaacttagatactgcccccccaaaagaataccatcagtactaccaaaacggagatttctcctcaatagaaatctaatgcactacaatatttataccaaaaacactttaaaaaaattgttccactcgtcctttctgcttgttccttcaatcccttctctttgtgagcatcaggtttaccttcactcaaatcgcatcgtgcacatatgtagacggaaactgcattagtaagacttaagtagctaagttcggtgcctcctcaaaactcaggcaaaagccagttaaaggttcaatggttctgactctgcgtccctatccttcaattgccaatcttctgtttttggcttatcggaaatcaccatcagtcgcctttgcaagatacaagccaccaaaaggaaaaatgagcacatgccaaacata

SEQ ID NO: 41927 - DNA, 499 bp, Glycine max
  unsure (1)..(499): unsure at all n locations
  Clone ID: jC-gmro02910027d04d1
gccaccttcaccaccaccacctccctcctcacattcataactatgaccttctttgtcagaatcttcaccgggagcgtctttagaaccctcatttgaaccaccaccatcagaatctggttcactattcttttggtcttccttctccttattagcatcaccagcaccacccttattggatttcccagacttcttattatctttcttctcaggtggtttttctggccaaagctccactaccctccctgatcttgaaagcctcttgatgagagtctcagcgtccacgttaccggtgaccgtaaccttgtgcagcagagaattaacctctgttgtataaaccccatcaattccctgaagaattttcttaactctccttttgcagccatcgcagtggatcaatactttaaagcccacgtctggtactgagggtttctcttgaggagnctcttcagctggttgctgccatttggtaggttggttgtaccgtgttggagtggaaagc

SEQ ID NO: 41928 - DNA, 414 bp, Glycine max
  Clone ID: jC-gmro02910027e01d1
acaggctggatgttatactttatatcatagccactaaatacagagccaggtaatgagaggtttttgaaacaaattctaataagcaatctaataaaacatcatttcgcaaccgaaaaaggccaaaagtgaattccagaattttaaaagaaaaaaaaaaatccggggttaattgaaaaactgaaaattaaaaataaaatccaccagcatcatcaaagccaggattattgcccgcattatattcagcagcataagataccatgtttgcgatcaacattccacccaagggaccaccaagcaatcctgctcccaatcccattccaaatttgtttttttttggtttctgaccctgaagggggtacccatatccggattggtgtggatatccataacccgactggtgggggtatacataac

SEQ ID NO: 41929 - DNA, 476 bp, Glycine max
  Clone ID: jC-gmro02910027e02d1
ccctaaaaatttgagatatctccataacatgaaacaataaagaatacacaactattcaccagatgaagatttcaaatccattgttacacgaacaaccatattattaaaccatacattgaatggtcatttaaacatacatgtattcaccacctcgaattgcattttcagcacctttcctctcttcttcagcttccttttcacgctccttccagctctcataggcatgatcatcagtttgcagctcatgccgacagatgggacaagaattgtgctcatccagccatggctttagacatggtgggtggaatgtgtgcttgcatggcaactcttgcattttgtcatttaaaaccaagttctccctgcaaatagcacactctgcatctttccccaaattagccaggatttcctctgtgagagtaatgaccggaagatttgccacaacctctttactggcaggaggtgcttttggggctaca

SEQ ID NO: 41930 - DNA, 559 bp, Glycine max
  unsure (1)..(559): unsure at all n locations
  Clone ID: jC-gmro02910027e04d1
aaagacaagcgataaatgatagtgagaatgatctataaacatcgaacataatatccaattgttcaaacttcaaagcttaaacataaatagtcaatttagaggaaatgaaattgctgaatgccccataaatgaagaccttcaactggagcttgaatcatcagtttttgctgctgcagatgcataactaacactactatccctgttacttttgcactgactggattgctcatagcgaagaaatttgatttttatctttgttgagcagttccttagcatatgaagaaaaacactaattggatggcgtccacagattgtattgtcatactccaacagatattgcttgaatgaatctggatctcctgtttctatgatatccatgcccatcttgtctaaggcctcaatagatttgtatataggcccatgtttcttgtcatagtgcatgtaattgaatcgagatccccagtgacaaaagtctgatgaaatagagaagaagttattggaatcatcaacatatttggcaagaatctgcccatacatagcttcattntcagcactaaca

SEQ ID NO: 41931 - DNA, 351 bp, Glycine max
  Clone ID: jC-gmro02910027f01d1
gtgggaaaaaaaaaaaaaaaagtgtttttttggggggcaaaaaaaaaaaaaaacgggggggggttttaaaaaaaggggaaaaaaaaaaaagggggggaaaaccctttaaaaaaaagggggggtaaaaaaaaaaaaaaaaacgtgggaagggaaaaaaaaaggaattttcaaaaaaaactttcaaaaaaaaaaaaaggggttttttttgggggaaaaaaaaaaaaaaagggcccttttttttaaaaaaaaaacccaaaaaaaacccctttttttttaaaaaaaggggggaaaccccctttaaaaaaaaaaaaaaaaaaaaaaaaattttaaacaccctttttggggccgaaa

SEQ ID NO: 41932 - DNA, 518 bp, Glycine max
  Clone ID: jC-gmro02910027f03d1
gagagatgaaggaactaatcatttgtcttgccattgcaaaagaatagaactcccataattccattagagcagcaattaatatggggttaaatctaaaatccaaacaatggttgccccaaagttacacaattaaaataaaagttgcaactttaacttgcctactgtgtatatccattcctatagaagttcctagtaggacctctaacgcagatttttggggtaactactatggggacataaggaattgctgtaatttgaatttcaactttctgcttgcagaagaaaccgcataaaaaagggcaatacaagcagaacataaacaattcattgtgcgtctgagtctgttggggtagacttttccgttaatgcagcaagctgtgtctcctgctgtttcttcagatacctctgggaagttgcattcactatcttgacaaagagttcataagcatgagccacacaacagtgttccagactgaagcaaaagaaaaatcccattttttcccctgcttatttgggga

SEQ ID NO: 41933 - DNA, 448 bp, Glycine max
  Clone ID: jC-gmro02910027f04d1
cagaagaacaaccgtttttccaaccaacaaagacaaccacaccaaatacaacaacaaaggttagcaaaaacaaggcttgtgtttaatccggcaaagaagccaccattagctatacacaagtttgaaacaattctcaagtttactcattaaactgaatcagtattcagagtttaacatcatgtgcaaggtcagcactagaaacaccatgattcgaaaacaccctctcccagagtccctttctatcagcaaccaaaactcaccagcaaaacttcttccgtaacctagctttttcttgactatcaatgtaagcaagcagctcttcttgcctcattagtgcttcataaagagcctttttagttgcaattagctctgcttccaaagcatccacccgacatacagcagcatttagcaattcctctttctcataaggcatctccgatggcttaat

SEQ ID NO: 41934 - DNA, 399 bp, Glycine max
  Clone ID: jC-gmro02910027g01d1
gaagacaacctcattaaatttcaaataatttttaccaaaagaatctcagtatatccaatatgttaaatacttctgtagagagctaacaactcctcggtagtgttgtaatccagtcaaaaagtatttcactatgcacatatgatagtaaattccaaatctcaataaataggtggatcaggattgaataacacagattctctccagatgagttccttgatatcttcttcagtgaaagatggttgctcaaaatcaaaactgaaaggtctaacgcaagcaggttcctcattaatatcatgaagaggagccaagtatgggtgacacagagcttcttcaactgtgatgcgcctatttggatcaaagacaagcatcttctctaacaaatcaacagcaccaggagac

SEQ ID NO: 41935 - DNA, 466 bp, Glycine max
  Clone ID: jC-gmro02910027g02d1
caaattctgtgtgtacagaatttatttattcaatcatctaattcagaacatacaaaagatgccattatttaatttttgcccattcaaggacaaatgaagtggccgtaaggggcaacgcacttgtttaggcatacatacatatatatagtaaaaaagaaacacactttgaattcaagttcatgtttctccaaaacaagcctggttgaatgactcaagctttaggttgcggttgtggacctcgatttaatagcatggtcagcaacattaccaccatgacagcacttgtaattaacagatgtgacctccatcacacgtccacaagaggcatttgggcatgttatggttgctaggacatccaaagtgttaaattcacatggttgaggagcaggtagatcacgttgtgtgtcataatattcttggaatgcaatgtcaaagccttctttgacaagcactctttttttccact

SEQ ID NO: 41936 - DNA, 443 bp, Glycine max
  Clone ID: jC-gmro02910027g03d1
aagaaaaaacatccttcacatggaaggccatgttttgatatttgcacccaaagctacggcaaacaaatggaattctattacattatgaattacaagttccttgcatggcatacatcaaggaaaactgggaagttgttgtatgtggattgatttgccacagccttatatagacaaaccaaatgcttaatatcaacacaaacacgtgtacagaaaagaaaccactcttcaagaaaaccgaaaataagaaaaactaacattttggaagaggggccccattccactccccaaggcattccaaaaggggatcaatgatcttcccttggcacaaagcagtgaacactttgtcacactcttcacccggtgagataaccctttcaccagttagcaatgctgtccccaacttctttctacaaacttgtcaaggggtaagacctgcattcctt

SEQ ID NO: 41937 - DNA, 450 bp, Glycine max
  Clone ID: jC-gmro02910027g04d1
gtctgcaaatattatatattatataataatctaaagaaaactctaaaagcaagtgcttctcaccctgacaagctacatggcgaatcactagcataaccctaaacacatctctcccttgagtaggtattacatagctaaataagacatgtattaataaaaatctacattagtaccgtaacaaaattctgacacccttctacacgagaacctaaatattaaatcaccagacaattgtttccacccatgccatgcgtacaagcattaaagggaaataaataagatgcgtagaagcatctaaactattcatggctttgcattgaaggcataaccagatgttgtggttgcacctgcaaaccaatatagttcagcgaaccctgatgaacaagctgagaattttgacctgcaaggccaacttgatctggtgtagcagatccatcaccacttctagca

SEQ ID NO: 41938 - DNA, 594 bp, Glycine max
  Clone ID: jC-gmro02910027h01d1
accaagtctatgaaaaaataagataaatgtatgttaatcattcataacacatgctttccggacttcagtcgttgtaagattaatttttgtcctaaaatctaacaatgtgatgtttcaagtgtaattgtggttaaatgcatgcatgttcaaaattcaacaccccaacatttgtaaaactaagaatttgcccaaagcagcaccaaaactacagacactgccagggcctcttcgaacctagaggaatggcattggaacctgacgttaaacctcgatttccatagcctcctcgtcctcttgagcgaaaacttccccctgatccaaattgaccagaaccagccgaccgaaccaatgcagacaaagcaggactcacaacctgaccagcatcttgtaaaatcttaatcagatccctagcaaacttggcattggcatgtgtaaaaaaggtgtatgcagttcctttagcccctgcacgaccagttcgaccaattctgtggacataatcttccaggcttgatggaaaatcataattgatcacacattttatgtcttttacatcaagaccccgtgcagcaacatcagtggcagtcattattggac

SEQ ID NO: 41939 - DNA, 521 bp, Glycine max
  Clone ID: jC-gmro02910027h03d1
atcattcaaactgaacaagttaaatgtgccaatgctttttatccatcgaaaactgaacacagcaacagctaagacacaaaaagcctctatttatagggaaaagaaatgaaggaattgcatagttcaacattgcaggccagtctatataacgaattctttgctttgtttgtccgctacatactaacaacacaagcgcagttcattaaagagtacatatcttcacccaagacaggtataaccttcgatgaacttatgcagtgtgctcttcaacatctccattttcaccatcttcagcagcagcagcagcagccgccatcaactcatcaaatttttcagtcttcccaagtaatatttcaatcttggccttttggacaggtctgcctctagaatcatctttgatgtcaactgttgatgtcgtgattttcttttcaatagcaagctcattgtttttcaagatttcagcaacagtaaccactgtagcaatagccattcctagtgctgagagctcaacctcttatgct

SEQ ID NO: 41940 - DNA, 445 bp, Glycine max
  Clone ID: jC-gmro02910029a01d1
gggtattccgaattttgggccccaaaacttggtttgaaaaaacaatggggggccttacttggggcccaacttggcaaaaaaccaaaattggcccaaatggttggtttttgccttcccccttattaaaaaaagcttttggtttttaaaaaggtgggggggctttttgggggaaaaaggcacttcccttttcccggttatttactaaaaaagggggcccaatattggttattttaaaaaaaccccccaataaagcccttgttaaccattgggttttaaaaaaacgtttttttaaaaaaccttttttttccggggggggaaaagggcccagatttgggaaaactccaaattggcccgtttttggagaaaaaaagatatcctttacttccgaataccaaaaaatttggtggggggggcggcccacaaggaataaagggatttttttaaa

SEQ ID NO: 41941 - DNA, 512 bp, Glycine max
  Clone ID: jC-gmro02910029d01d1
gaaaattctactttcttatctttcaagcaaaattcccaaataggtcgaaccaacaccgatgcaaaatcctatggataaaaaatacaccgatgcaaggaccaaataacagaagtacaacattcacggacaaaaccacaaacaaaactcgacaaaacttaaatctaaagtaacattgttcatatgagaaataaattcggctaagttcaaaagtaagttaaatagttcaaacaatttaaagcttgtcttcaaactcggagagaggagtcatctgttccttcaagcccttcctcttgcggatgtcggtgacaagctgtgcagcttgtgatccagtctccaatgggtcagaagacatcatgtcccagtgatcaaagacacattgtgggaaagcctggcctgatgttgcagccctcaatgtgctcgagaaaccaaaggactcaatgacagggaggtatgctttgatgttgtaaagtggggtaccaggcctctgcatttcctcgaacacatgtccacgt

SEQ ID NO: 41942 - DNA, 541 bp, Glycine max
  Clone ID: jC-gmro02910030a01d1
actaaattaaatttattaatttaacatcaacatcaacattcaggcaaaaattattaactgtgtattggattatgaaaatagagagaataaaaatagaaaaaaaaaatttacattgaagtcccagcatgaaactcgcttgtgcataagtgaattgagggaaaagaagcttgttctcttcaaagctttttagaggatggaaacaaaacccaacttaaaatttacaatttcctgactgctacaacagcaaccaaaagttatggctcgctgattggatcctcttcagatgtgttactatcaagggccagaatttcttcgtttgcattagtgtttggatgttgatcagtagcttcccccttcaactccttctcactatataaatcattctgaacaggtacatttatttgttgctgcgatgaaagaacatttgcgatagccttcatagcagcagaagcctcgttgccatcaactgaatcatctaggtcaacaccattaacattaggtttcttagacaagtccttctgcctaggagggggaacaaaaa

SEQ ID NO: 41943 - DNA, 386 bp, Glycine max
  Clone ID: jC-gmro02910030a02d1
ctctcacagttttaagatcatattaccataatcttacatcggagcatcattttaaatatatatttcttctgcatagcaataacaaaaaaatcaagtaaaaaaatgagaaattaaaaatcatcatcgcacgataatcatcatcagagacaaagcgcggtgcggcgtagatcatcatccgcggcagcatcatcaaacggcagcgcgttgagatcaaacggcaagggaggtcgaaacgacgacgaaacgatgttgtcgtcgccgtcgtcaacgacggaggaggaagagtcgcagtcactgtggcagtcttcagggacaagagggggagtgcgcgggtatctccgcgtagcagtcaaaaacggcgtcgcagttgtggttgtggtggtagt

SEQ ID NO: 41944 - DNA, 360 bp, Glycine max
  Clone ID: jC-gmro02910030a03d1
gcgggattgaaaaacctgaccgggccatgtttaggttggaattcattaattttttaaaaattctacaggacccaaaacgatggctttgatttaggacccacccccttaattaagaaaaagaaaagcctttaaagagtaaaaaagaaaattttttattgctttttaaaaaatgcccccccccctcaacctcataatataatcgtaaagcccacccagaaaatagcggctttccacaaaagggcccttaagccctgttagcttttttgggggagagcccgtccccccctttatatagtccttccccaaagggggcccatgggctctggatataccacgggcgtgggcggaaaaaatgaaaac

SEQ ID NO: 41945 - DNA, 346 bp, Glycine max
  Clone ID: jC-gmro02910030a04d1
atcaaaaaaataccgattctcgaaaaaaccaggcgataaatattctttctacgagcggaaagaaaaaatgtgccggtgcgtgcccccatttttaaaaaaaatacaaaatgcaactggtcaaaaatcattgtttggccaaaaaaccttggggggttaaaaaaaaaacccccaggtttttttgtaaaaaaaaacttccactttaaaaaaacccccgggccagcgaatttcaaaaggcctgtctgttgaccattgggtcccttttccccatggattcaaaaaaaaactcctggatgtaaaaaaaaaattctccccctttttaaaaaaaccactaaccttttgatttcta

SEQ ID NO: 41946 - DNA, 537 bp, Glycine max
  Clone ID: jC-gmro02910030a05d1
attctaaatatatatattctaatgataccagaatccaaatggcagaatctacaaccttatcgatacaataaacataaaaactactgaaaagaattctttctaattaacaaatccatcaattgtgtgctaagcacgcataaatgattaaatgtaaaaggccagcagtaaatatatcttgacgtgttaccagaatttttctgttgatgctgaccgcaaattacaacaaaaaatgaaggagacaggctcatttccatatacatacagggtttgctattatgcttatttcatcccttttccttcattttcattcagaatccgatttccgaaattattaaccataagaggcaacccttctctcagtgggatttttggctcccagatcatcagatacttcgctttgctaatatctggcttcctcatgtgtggatcatcagcagtatttggtttgtattctattggagcacttgaatcaattgtttcttttacaacctgagcaagctctaacatggtaaactccccaggttacccatgttgaaa

SEQ ID NO: 41947 - DNA, 512 bp, Glycine max
  Clone ID: jC-gmro02910030a08d1
cgcacaagtatttagttctcagggctaccaacgaaacatcaaaatttcacaaaccaaacactgcctcaaaaagacatgtacaagcccgcaaccagccaatgcatgaccaaaaatgtttgcctaaaatttgttggaatataaaatgctaagatttaaataaacgctactttcagaaaaataattaaaacatttctccaaaaacaagggcattgaaaataaaatgcaaataccctttttaaatgcacaccagcacaacctgcaaaactctcccttttgtaagcactgggaagtagatgcctccttagattcagttatactttaatcctcattttgactttcatccttgacaagcttgatcatgtcatcaattcgaaggatggtaatagcagcttcagttgcaaactgaataatttttactttgctcattgcaggctcaatgactccggcctccaagttgtttctgattttcccttgcgaaaggtccaaacccatacttgataaatgtttcttat

SEQ ID NO: 41948 - DNA, 438 bp, Glycine max
  Clone ID: jC-gmro02910030b01d1
atattcgacactccaattactgattgggatttgactaaatcaactataaacaaccacatattttggtcaaaaacaagaaccacggtaacacgaaaccataaagaaactcgaactcaaaccacaacaactaaaaatacggggcataatcataaaccctaattgacgacatcaagccttattttctccagcctccattaccaccatcaccaccacgagagtaaccacggtctttgccaccgccataaccaccaccacgattgtatccttctcctccgccgccgccgccgtcaccgcgggactgagcttcattgacagtgatattacggccgtccaagatctgtccattcatcggtccgatcgcatccttcatggactgctccgaggcgaaggtcacaaatccaaaacccctggatctgccagtctcacgatcgttgataa

SEQ ID NO: 41949 - DNA, 411 bp, Glycine max
  Clone ID: jC-gmro02910030b02d1
aaaaaaaaaaaaaaaagagccttttttgccccgggggttttttttgattttgaaaataacaaaataacagccggacataaaacggggggggggccctttccaacttaaaagcgggggataaatttggcccttgacccaacacatgccccccctaaaaaataaaattttacctttttccccccaaaaaacaaggccttttatttaaatttaaaaaaaaaaaagatacccccctccttttggtgaaaggaaccccaacccccaaaacctgggttgggtttttttggggggccccaactttattaaacaggaacgggtggatggaaccccttggccttgaagggaatggccctctttcccacccggggggaaagggcttcaaacccccccccaatgaaagggcccccccaaaaa

SEQ ID NO: 41950 - DNA, 347 bp, Glycine max
  Clone ID: jC-gmro02910030b05a1
ggggaaaagaaagccctatctttttatatatacccctgcctgaaaaaaccacccagggggccaaatttttatttttgaagaataagggggcattggggactcgattaaaaaaatatttggggtctggggcaaccaccagttttgggtgggggtcaaaccacctctatatggcaacccctagggggaaaacctccctctttggggggaacttttttgggtctccagctttgacccggtttccataagcgggggcctgccctccaaggggtggtttacccaatgggtcaagggtggtagaccaaacagcatcccccttaaaaggtttgggtgggctacaagcaaaaatt

SEQ ID NO: 41951 - DNA, 208 bp, Glycine max
  Clone ID: jC-gmro02910030b05d1
acatacccttcacctgatcatacctaaattacctatattaccacttaaacgcacacaaacaaaaaattttcccactttacatttcccaaccccagtgaccaccacccttcaccaaacacgattaaccctatccccccttaaccatacacccccccatacacccaagtaatccctaccatgtcatactcccctttcaagatcacccccc

SEQ ID NO: 41952 - DNA, 487 bp, Glycine max
  Clone ID: jC-gmro02910030b06d1
gaaaaacaatatattccttattcaacccaaattggtttcatggcagataaaccaacacgatgccgccttcctccttactggacccacccactctaacaaaagttctaacaaaaaaaaataggggttcacattttcaaccacaaatgtgaaaagcctaacaccaaaaatcaaaaaaaggaaaattaaacaatcaaatccgattgataaaaccgatttttgtttttccctcactcacttttcatttgatcatctcaatcacttaatacctgtagtgagcaggcttgtatggaccctaaccacgcacactgttgtaataagcctgcgacttgctaatatggaccacattaacttcaagtttgcccagcagaaatgcaatcaccttcttatcaaggtgctctgtcaaaaacacaaccttgttctcgtacttgccgggactcttctccttccacaactcaagctgaacaatgacctttttggtgaaggaaca

SEQ ID NO: 41953 - DNA, 537 bp, Glycine max
  Clone ID: jC-gmro02910030b07d1
ggtgtgcatgaaatagagataatatcaaaggatgcaactactagattattgaaatttaatatatacaaaaaagttattgaaagtaataactcaaacaagaattgctcctattcccaccctatacatatatataagatgaaagcagtaccaccagagtgagaacatcctaccattctttgacaatgtaacaaaagtcttacaatctattcgaaaaatcatatcgccagctgttttcgcttgtagtatccagctatcactttaaaacattctaattgataaaactataaacagagaatatttcctttaatttcctgtatgctgcaacgcaggggactgagtaaaaaatggaataaacccagaaaactcggaaaacgaaacaatcaaaatacagccataagctcgggttgctatcatatcaaactcatgactttgtaaccttgcttctcaaacactacgcagtatatttgaactcccacgttgatgtcttattcaatgggagggtcgaaaaccaaatcctgatcgcacacagggcaagtc

SEQ ID NO: 41954 - DNA, 476 bp, Glycine max
  Clone ID: jC-gmro02910030b09d1
atatattattatacttcacaatcagcatgggttttgtttgagactgaaaataaccatattacattattattattattattgtaacaatcggaaaacgagggaaagggaatagaaaacaatgaacaacccttggcagttggttgcaccaaccaaagtagccacaaatcgaaatcctagaaaaatcaaaaggtaaaaaataaaaaggaccaaaccctacttagaaaagcataactgttccttgttccttgttccttgttccttgttccatccaaagggagacaacatgcaagttttgctcatggcttccacagaatggttgtgtctgcaatcatggaagtaaccacatatgggtccatgttagaagctggccttctgtcctcaaaatatcccttccctgctttctctgtgtccctcccaaccctaactgaagctccacggtttgcaactccccatagaaggtgttgatgtcagcggtt

SEQ ID NO: 41955 - DNA, 447 bp, Glycine max
  Clone ID: jC-gmro02910030c01d1
accactggaaaggggggctttcgaaatttttgacccacacaatatttcaatcaaacagtccccttcagcaccggtgacaaagacaacaaaacaactctgaagccctggggatggaaatatgaagcttttcggggcattcccctatgttcttgaattcagaagggaggatctacaaagcattacacacttttttttgcatgcagcatatgcaatacgatccgacatttataccattttgttggatgctaaaagtaggtaccttccggaggctggacaagcttccggttatgaggagcagccatttccttcttcagctgggtcagtatgtcctccatgggggactctctttgccaatttgcaagaagaccaaatttttttgggtcaaccactccagtttcatgattaacacaagtcatgttgactcgtgaatgaaaccgaacacttggg

SEQ ID NO: 41956 - DNA, 429 bp, Glycine max
  Clone ID: jC-gmro02910030c03d1
accaagggcttgggaaaacattaaaaattagcagagtcctcatcttttaaaaaaattaatctaattaacataatttgaaacaaaaaagaaaaaatatccgaagcctagttgtatggaactaaaactaatgcacaacggatgccttttcaaggggtctgaatgttgtaggaaaaaatgccaacgggagaatctgaaatgaacctgaaggaaactgtgggaaatattgttgaaactgtttgcgctctgttgttggggctttgttgttctgaatgaacttaaaaaaggagccgtcactaaaatccggggccaatgttttattaaaacaagaatttttaattagcccacaacatttttggacattattcacaacctttcttctcgccgcctttttcattaatttcctatgcaaactttttttcgcggtcctta

SEQ ID NO: 41957 - DNA, 541 bp, Glycine max
  Clone ID: jC-gmro02910030c06d1
aatataaggtttgttagtttatagtatatgatgtgattcaagaaaaaaaaagattgccttaggtagcaaaccaatacaaatgggagatgatacaatgtgcatggaagggcttttttacttcataaaaagtggatgaacgagaccttattgaaatgatgattatcaacacacaaaaagtaaatattatatatgatgatgatcttaattaaaaaaggagtttagatgcaacgccgatccttgcaagtggaacacagacaagactatgtgcccttggaacagtgaggccggctctctcttccatgctaactttggcgtcaccacccttcaatatctgtccttgtggacccagcacttgctagtcgaagcactgaataagagatgcaagaagtgttgccattcccgaagtagccagattgacttcagggcacattttttctccaaacccaaatgggagaagttgaaaatgttgtcccctaaaataagaggccctgctttcccttcagcccctgtttttaggaaccttttacgacggaacttcgat

SEQ ID NO: 41958 - DNA, 451 bp, Glycine max
  Clone ID: jC-gmro02910030c09d1
gcccttacaacttacaaggatgattttataaattatataatagtaatgttcgtacattagttgaaatgatattcatacctgtaaacaacatttttattcaaccaattccataatttaaatgtacaaaaggtgttacatacaaaaactagaaaacaatagacattgccaactattaatagtgactacaccttcatatccatttcatcttctaggcaacttcattctcttcattctgtacttggacgtggaataagtgagcgtggcaccaaacttttatactataatttgctctttttttaagcgcaaatgtacaggtttttggtcattacctccaaaatccttatctttaagcaaaggatgcttctttggcacgacattatgcggttttaatggcattgaattgctactaactgtgttgtggctgctgtttctaaccacaggtacatcatga

SEQ ID NO: 41959 - DNA, 574 bp, Glycine max
  Clone ID: jC-gmro02910030c11d1
aaaaattgcatttcacttggaagcaagtataggataagtactggaaagtatcttccagagtaaaagataacatgaagctaactatgcattttaacatgcaatcccttatattacaaaaagaacaagacctaccctacataacaaatattgtctgtaaaacctacttcctttcatgttacaccccattcttccatcttacagctcctgtccaaccatccaattgagttcctgatcttcaatataacgcctaatgtgtaaaactagtaaaagtaaaaaggattgcagccattatggtcatcagcaaaagaaaaattaagcaagggaacaggaaatgaagagaatgaacagcaaaaaatacaccttacaatcttacaacttgcttgtactttacatgataatgcacaaagctttagtgagaagaaagatcagtttagttagaagggaccatgatcaccacctaggacttgtcatggggaaaaaacctgaaagagacaaaggaaacagccctggcgaaagtggaggctgcggcccggtgcctaaaattcccgactgtgcaagggtgacaaagggaaat

SEQ ID NO: 41960 - DNA, 566 bp, Glycine max
  unsure (1)..(566): unsure at all n locations
  Clone ID: jC-gmro02910030c12d1
ctcaagcaagttgcgcacggacatagttggattatcatcgggggatttttatatgcgcttcagagatcaatttctgcatataaaagagagttcatgtttgacaacgatactatgttgccatcactgttccagccgctaatgatcacaagacattcacatgaaaccaaaaggcgattgtagttataaatcaaatggtcaaagattacaataaaattaaaacaacaaagcaatggtagtaagagcaccatcgcctttgatcatgtgtttgtttaattaatcattggccgtccacatgttgtcatcatctccatcattgtaaatgctctctgccatttgccagacatggaaagaattgtcctcagctacgcttgtgataacccatggctgatttctgttccatgaaaaatctgatattttccctttgtgacccccatgagagaagagtagttcaggggggccaccttcaccatctccttctatctgctcatcaccaactctgttaaggtcccaaaccatcagccgtctgtcagcaccagaagatgccaacacattctncatgataggat

SEQ ID NO: 41961 - DNA, 381 bp, Glycine max
  Clone ID: jC-gmro02910030d02d1
ggttagggcaactacactggcttttgatttccaaaatttatttgcttaataaaaaaaagccgaggtgaagccttacattaaattacatccctgaaacattaaaactcaaaatccttaggggatgtgttttagggggggaaaaaatcccagagggggttgatcattttcatggcattttgggtttggggattggggatgtggaaaacatgaacctcgccctccactttaaacaattccggtttaccttgccagccacttttttttacaaccttattttacccaacccccctatcctttattaaaaccttttcagcaacgcaaaccaaaattttaaaacaccccagttcagccaagcttggcgccccaataaccattggattg

SEQ ID NO: 41962 - DNA, 442 bp, Glycine max
  Clone ID: jC-gmro02910030d05a1
attccataacataaataatagtcgaaaatcttccactatatatagttagcaatgaaaccttattattcccattaccctaaaaccaaactcaccaatatagaagaaatatcaatacccaaaagactttgcaataatagtcaaattaatttgacaatatcattgtctccaaagtcaagacaacttaggtgttaattaaccatttttaattatttggtgcaaagttcacgagcaactccaagccttgaattgggcacgtcatagagcacacggtggttttgttgctgcatgttggcaatgacattgagcactgagttcacgttatcaggagccgaagccatggccaagcatgaggtgctgccagcagtgctgtgtatgagaatgttgtcctgtggcagcgtcacgttcatgcctgagaacatgaatgtgatggtgggtgcaacta

SEQ ID NO: 41963 - DNA, 506 bp, Glycine max
  Clone ID: jC-gmro02910030d05d1
aaggcttactcaactccaaaaaaagtatcggggattttgggcctagaaataaacaggcaggcaaataaattttcaagaaaatgattctgtagataccaaataagatagtttctactagtgtagccatgagaaggcatctgcaatgaactttcactcatcatcttcatcattatcagcagcagagttgagagctgccacacgtgaaatcaacttagccttcctctcctcatatgtcagcttctttaagttgtacctcttgtgctccttcggggtctgcttatcagatttcttgagagtaggatcagcccggatggcagcatgaacatttttatacagtgcctcaataccatcagcttttatcccacgcttgatgtattcactgaagtgtgactggtatttttctggttcatcttccgccaagatcttcatataggcagcaacatgtccaccaaaaacatattttcgatgaacctttgcatcaagcttcttcttttcttatcaaaccc

SEQ ID NO: 41964 - DNA, 477 bp, Glycine max
  Clone ID: jC-gmro02910030d07d1
atataagcttgatcttcggcaaataaagggaacgaaagacgagggcctttgttcaaatgatgcgtacaatggtgtagacatcgttcataaaaacaacaaaatatgacaattctcacttacagtcaaagaatattggatgatttgttagttgagaatctaaacatacaaaatttacacacgagcaacctattttctttggtacaaactatgatttttgttttcttgtagttacaaaaacaatgtatacatgagaatctctcatctgatcatcggttgtgactatttgttcttgaaaaaattgaaatcccatcgacgcattaagccatccatgacatggcctgcgggattcctaacaacagttactgtggctttcgtgttatgtgatacatcagtctctgatgaactttgtaaactagcagaactatcgctactagcagaaccacttgtattgctggactcagttactgatgatgtgtc

SEQ ID NO: 41965 - DNA, 522 bp, Glycine max
  Clone ID: jC-gmro02910030d08d1
cattgaatgccacagaatgaatggagggaatcaccatatacaagttgaaacgaaaaaaattataaaaataaaagtaaggtaaataattaacactgaatacaaattggttcttggggatgaggttaacttatagagaaacacagactccaacttcagtaatgacaatccaccaaagaagactgcttagagaagacaataacgtttttttctctttgctgaaacgaaaacttggattctctatgatcatcctctggtagtgctggaagattcaagtccaacttcaagggtttcttggcttcttgaaattcattgttaccaccaacaccaacaacatttccaccactcatagaagttgctaaagaagcattcacaagagttctgtggcgcctcatgtggccccccaaagcttgccctgatgagaattcagcaccacagatagaacactcgtgaaccttagcctttgttgttgttgttgttgtgctacacatattattattaaccccatttggtattttcaaggag

SEQ ID NO: 41966 - DNA, 383 bp, Glycine max
  Clone ID: jC-gmro02910030d11d1
atctctccccaaaaaactaaccttttatattggaaaaatttatcccatagtccattaataaacccgatacatcaatggttttatttcacacaaacaacttaacttacacctccaattactcaaccattctcaaatcatacaattcaacttccgccaaccattaaataaacaccctacaaattgtacatctcttaccttcacaaaagacaaaattattcttatttgaatacactttctaacttaatagcacactaatgctatataccatttttctctacaaaaacaagccaactaaacaaccttcaaaaccctgcgtgcaacgaaataaactttttcttgtcttgccataatatattcatattgcacaacatttactaaaacac

SEQ ID NO: 41967 - DNA, 486 bp, Glycine max
  Clone ID: jC-gmro02910030e02d1
cacaaataacatcctgttcatgcggtggcgtcatgataaaaacatcacaggggttgttgaacacagttattttttttatcaaattaagacacctcccttccctagcccctcataacagaaacataatcttacccagaaaacaggaagtgaaaagcaaacccacaaaagttttcatagatgcaatccatttcaatatacattatccaaacacaaatcagcccatggcatacttctgggtccagctgcgtgcagtggcctcatacttggcccggtcagttttgtacatgtgagcgatttccggaacaagtggatcatcaggatttggatcagtcagcaatgagcagatagaaagcagtaccttaaagatggtgagtgcagggctccactgctccttcaggatatcaagacaaatgctaccattgctattgatgttcgggtgaaacaccttagtcctaaaggcaaccttaggaggcttgaaaggataat

SEQ ID NO: 41968 - DNA, 316 bp, Glycine max
  Clone ID: jC-gmro02910030e04d1
catattaaggttctcaaattacattggcaaaaaagggggatcggtagcacacatcctgttataaattacaaagcgagattgtcttcatcacgaaggtgaggtatagcaaacagatcttagcactctcatattccattaagagtgacaacaactcttcgtgaggtaggatgatcccgatgctcgcagagccatataccctgccatgtccccatgttaagcttgccatttgtaatcggtatcgggagtgtacaaccaaacatcgatgatttaatatgagctggcatgtcatctggcccctttagagtatgcttccatg

SEQ ID NO: 41969 - DNA, 208 bp, Glycine max
  Clone ID: jC-gmro02910030e08d1
aacactaaatctcttaacacattaaaaaataaaagtccttatgttattatttaaactacatacccccaagttccaccaaattactcaatcttacaaataccatatccccttaatcacgtataaaaaaccctctccccaacatcaaaataataatatcctctatataataaagcatatcattgccccctcccaaccccaaaatattaaa

SEQ ID NO: 41970 - DNA, 358 bp, Glycine max
  Clone ID: jC-gmro02910030e09d1
ggggggaacctaaacctaccaacgcctggatcccttgagaacgacaaaaactttggtatcttacaccccacccggtaattgataaaccctcttatattttttttcttttccaacataaaaccttactacaaattctctccatgcttgaccccccaaaataacaatttttacaaaaaaaccctttactaacccaattttttcttaaaacaaaacaactcccaattttttaagcgcacactgtctaaaaaatgacggccacatttgggacgtcactttccctttttcaaaccatcactactaattttccaaccttttgggctcctttacaagtcttttttaaaccccttggcgggggggg

SEQ ID NO: 41971 - DNA, 420 bp, Glycine max
  Clone ID: jC-gmro02910030e11d1
ctgtcacacaaaggaaatgtatttactccaaagaaaaaaatatacagaggagacccatcatgcttatgaagaaaaaaaatgataaaccataactcctgcaggcaaagaaattttaaccatttctaccttcaaaatgagatactttataggcgagatgatacctgattatcaatgaccatcatgaaatctaaaatgaatgtttccttttaaataataaatcatctcaaaggaaacatattgttcaggactccaactacaaatataaaaagaccttcaaaataccgctttaaagaaagaggcaaaacctttcaacatttaatttgcccttggggttgcccattcaactttaaggatgagattgtcatacccatacccattgagtttgttaatagctctctgtgcatcttccctgttgacaaa

SEQ ID NO: 41972 - DNA, 478 bp, Glycine max
  Clone ID: jC-gmro02910030e12d1
aactgataaaaaaagcggggcgcatcagggcaatacaatacaatatgtcactatgaactatcaatatatgatcgttatttatgtctgtgatacacacatttcacgccatgatactcttacgtgatttacagaaacttttaacttatttaatacatcataccaacccaactaggagcagtttttattatacaatgacacttatctttaaactctgaagcatgacacggtggttgacaccagggaccatattcttatgcaatatatgccacatctggataagactcacaagttgccacaccacacatgttcttgcccaattccattttgaagtatgcattctaaccccatactttcttcccatgaattttttatgagccaatatgggacgccattttcaactccataccccacagcacggacggcatggttcacatactgtgaagtgctaccgcagatgacactatggtaaactccattc

SEQ ID NO: 41973 - DNA, 469 bp, Glycine max
  Clone ID: jC-gmro02910030f01d1
gattgacatttatgtgcatgagtaatgccaaaaatatcattcaagaaggagaatgatgagagtacaaacaatatacaaaagaatgatgaaaaaggaaattagaaaaatacatggcaactggtcatctgatcttattccactctgagcatcttctcctttctttactctatgaaagccttgatttctcctccctttggcatatatacttctctttatatgtttctccttcctcattgtgcatatacttagtaattttctcaacacttgggtaggtcagttggaggtggtaataaagattcatttggtcctttaccgttgtccacaacaaaagccatcttcagtccccatgttgtatgaatttccaagtggcaatgcataaaccagacacctggattgtcagccctgaatctaataacagtccaccccccagccgggactccaactgtatttttttcacacgatctacaag

SEQ ID NO: 41974 - DNA, 469 bp, Glycine max
  Clone ID: jC-gmro02910030f03a1
ctgattcactcttcatttaaatgtgcataattttccatatgttgcagggattttgtacaggatcctaactcatttgtctatcaatgccagtactcaagatattttatctaaagattcaagttaaggtgggaaaaatgatcctcagaaagcaggagtccttgaggatgatactatataggaatgcctgaagttcacaaacatcctcacatcatgattagtgaatttctaatccttcattgattaggattccatctatcaattcagaacaatccggctctcatttatgcgctacatttatggaattagtgcgactgtgcctccagtaggatgttggtggccacattgacatcatttttggcctgcactagggcttgtctggcagaattcctgtcaaagcccatagagacaagggtagtgatcgagtcctccgttggctctactgcagcttgcattggaacagggtagtttc

SEQ ID NO: 41975 - DNA, 423 bp, Glycine max
  Clone ID: jC-gmro02910030f03d1
acacaacggggttaccattaaagggaaacggagcgttggcttacaaacacgggattgtgccctgtcgtattaattagaagttccaagggtccttatggttccactgcctctccccaagtaaaagtaaaatgtctttgttacagcatctattttgcaggaaattacaatgtaaagaggtttccccagcgtcccatttgtttttacaggggtggtttaagaaatcatgagcagagagtacaggccataacactcgtaacgaataatgttacaacgactattttgggtttttaatggagcgctttttaggaattatgcactgaaacccgtgtgcataaaacttcaagaactagcagggattttgacacttgcttgtgctggggccctcaacttttgtttttccctttttcagggttgaaaaatttt

SEQ ID NO: 41976 - DNA, 504 bp, Glycine max
  Clone ID: jC-gmro02910030f11d1
cattgaatgccacagaatgaatgggagtaatcactatatacaagttgaaactaaaaaaattataaaaataaaagttaggtaaataattaacactgaatacaaattgtttcttggggatgacgctaacttatagagaaacacaaactccatcttcagtaatgacaatccaccaaagaagactgcttagagaagacaataacgtttttttctctttgctgaaacgaaaacttggattctttatgatcatcctctgccagtgctggaagattcaagtccaacttcaagggtttcttggcttcttgaaattcattgttaccaccaacaccaacaacattttcaccactcatagaagttgcttaagaagcattcacaggagttttgtggcgcctcatgttgccccccaaagcttgccctgttgagaattcaccaccacagatttaacactctcgaacctttaccttttttgatgttgttgtttgctacacatattatttttaaccccat

SEQ ID NO: 41977 - DNA, 407 bp, Glycine max
  Clone ID: jC-gmro02910030g01d1
atccaacgcaaaacagtattgaataaaggggtaatcaaagcccaaacagtcataacactaattgaacaaaaacataaaccaaaacttttaaatactaaaataaaattaaaaccgcaaattaagcatcggccttctggtagacgtaggtcaagccgcacttgccgcagtagtggcggtcgaagtggttggccatgaaggtgccggcgccgcactcggcgttggggcactccttgcggagcctctggacttttccagaatcgtcgaccttgtagaactgaaaaatgccgagcttgaccttcttgtgcttgtgcttgatcttcttgggcttggtgtaagtcttcttcttgcgcttcttggcgccgccacggaggcggaggacgaagtgaagcgtggactccttctggatg

SEQ ID NO: 41978 - DNA, 393 bp, Glycine max
  Clone ID: jC-gmro02910030g03a1
ggtagaagaaaagacttaaaagtttgggattatgatttatttctctcttgggggcaacaacttgaaagctagaagactgcgagaccagatagcaaagtgatgcataagattaaaagctaaggaaatctgaaactagttagagaaaagcccataacatgcaattaactctgccactcaactgggggcatttacaacttgattgcctacaaacataccatctttttttttaggaaaacctggagggtccatgggggaggccctaaatttcagctccgaggctgcacgaaaatctggatcaactgaagctggcctagcattgtgatctgcagacgcaccaccaagcctataggaagttgcagccccaccgggataccttgaaggagagccatacct

SEQ ID NO: 41979 - DNA, 482 bp, Glycine max
  Clone ID: jC-gmro02910030g03d1
cctccttattttttcttttaggtttaagtttttttttttttccttttcctcctttttccctttttttttttttttctctctcgaaaaaaaaaacaaccactaaaccattatctctccccccccccccccccaaaaaaacaaaaactttttttcccccccccccccccccaaaatttaaaatattcattccaaaataaaaccctcttccccccccactaatatcaacctccctaaaaaacctcaaaaaaaccccccaaatttcccccccccccccccccctcatacccttttaaaaacaaacccctttcttccaaataaagaccccttaaataaaacctctttttcccatcaaaaccttcgaacacaaaaccacccttttctccctctttttccccctacgcctaaaaaaaaccccccccttttttttctccgcgccccttctacccttctacaattctttcctcttttaccccccccccccc

SEQ ID NO: 41980 - DNA, 432 bp, Glycine max
  Clone ID: jC-gmro02910030g04a1
aaggaattcgttatttaatacaacagaataaagtgtatataatgcatccatctcaacactgcaaagctatgtaaatgcgtcactactacaataaaattaaaacagacaattcagaaagatccaaatttgacaacctatactatatcaactctgaggagacgttttagcagcctgttgaacaggctgtgcaggtgctccatcataggctccacgagtagtcccacctacattaccatcgctggaatatactggaggctgagcgtaaccagcagcaccataagaactgttgctgtacgatggaggagcctggccataaccaggttgaccacctgctggggcaccaccatatgacgggggaccataccctggctgcactgcaccaccataaccagatggtggagctttttgagaacctgattctggttgggcata

SEQ ID NO: 41981 - DNA, 430 bp, Glycine max
  Clone ID: jC-gmro02910030g04d1
gggagcacaggaaattttggtttttattacaagagcatgatctaccagcaaagttggaaatatgaataacaatagagcccccttttttccaacacacatacaacaaccattccataaaggatcacacgtttgtagacagagaccacatgggttagcataactaatcaaaaaacatggggtagcataaataatcaaacccccaaaaataaatgatacaagattcttccctgaacaagacaagattcttagctttttataaatgcacaaggcttcctgatctttccttttgtccctgtctttacattaattcttcccattttctcgatggggggtgcaaactcagcaaagaaatttttaactgacccttcaagcaattggatgatttgtgcctttgtaactgggttagtcaataatgcagcatttgactcaa

SEQ ID NO: 41982 - DNA, 527 bp, Glycine max
  Clone ID: jC-gmro02910030g06d1
gacaggaattctaatatcctgaactatacacatgtaccttgagagggttaccaacactgcttccactgtgttttaagtaacaatgggcttaccaagcttgtttcgtctaaaactccaatctgccgattattattttgtgctttacctctctgctcatctttgtacttacaaaccatttttctattgctgtagcaatttaatgcttttcatcctaaaccttgggtgaaaattccctccacctaataatgattgactcttacctcacttttctttggtttaacaaaaaattcaatatgagctattctaacttgagtgctgatatccaacactattcagcatatgggtgtgacaccaaccgttccttaattgaaacccaatgctggacttttaccattctactcttcctcatgcataagtcacttcctttactaactgtaaaaacactgctacgcctataacaagttgtggctcttatgaaccaaatatttttctcttaagaaaccgtatcacggattaaatttttactt

SEQ ID NO: 41983 - DNA, 589 bp, Glycine max
  Clone ID: jC-gmro02910030g07d1
ccaaacagcatttgtcacttttttatatagcctccgctaaagtaaaagttagaaagcaagtgaattaagaaagaagcaaggtcaaaacgggaaaaactgttataataagaaaaagaacactactttaagagttgctttcaataattaggacaaatcaaagagcatcccttcaacacagttgaaaatgtattgcaacaaaacaactcaatggaggtaaagatgaagctcttttgagcattccccattatgttcttgaatttagaaggatcaagagtaatacatactatatattgcatactgcaaatgcaatatgatccaatatcggtatgatcttggacactaatagtgagtaccttcaggaggttggacaagcttgcggttatgtgaagccgccatttccttcttcagctgggtcagtatatcttccatggtaaacctccgttgccaatttgcaagaagaccaaatttctttgattcaaccactccagtttcatgataaacacaagtcatattgattcgtgaatgaaaccgaacacttgggggcttttctgggtaggtcttatcacaaacaacttcaattgataaattc

SEQ ID NO: 41984 - DNA, 506 bp, Glycine max
  Clone ID: jC-gmro02910030g09d1
gcaattcatttcacagagttggagtctaggggctgtgaataagcagaaatcagaatgatcatacaaccaccaccaccacagaagtaagaaaacagataaaattttgtttgttgtatgttacagatccgatccataggggtgggtgggcgggtgggtgagtacatgacttgaaggaatcaaactagtaacggtacttggtggagtaatctttgggagcgatgacgagaccccgtcccttcctggctccacgatagacggtctcaacaatgtcgatgaactcctgcttgtccttgagagcccagttgatcttgttgttgttaccggttccgagatcaatcatgatgtgcttgttcctgaagaagaacatcaccgtggaagggtcgtagagctcgtacatggtgttgaaatccggcaccttccgtatgtccaccaggtttatcaccgcaaagttctttattgttttcgccactgacgccaacacctcgttcatttggatgcaagttcgt

SEQ ID NO: 41985 - DNA, 83 bp, Glycine max
  Clone ID: jC-gmro02910030g12d1
gagagtaggttttttgaaatgtgtatcccctcgatatatgcttgtggggagcatagttggaatacgatacagaatactaattg

SEQ ID NO: 41986 - DNA, 490 bp, Glycine max
  Clone ID: jC-gmro02910030h04a1
aactcatctccattagatcacttattagagcgaacattgcagaacactaaactatctaccatcctacactacacaactttcttcaagattgtgcagcaaggcacacacatacacccacacccacaccttttcatatctacatatatatgtcatagttttaactaaacaagacaaatatcaagccgcagcaacggctgctttccgggccctcttggtcggagacctaatggacttgggctgcttgggcttcgcaggcgtcgacactttcttcgtcttcttcggccctaccttcttcgctgcccttttaaccgcctcggttttcttcggagcagcggcagttgcggctttgcttcgttttggacgcgattcctttttctcagcgttggccttcgtcactttggcggtgttctccttcttcgcggcttcggttaacttgtacgaagccttgatcttcacgagtttccctctcgcagcttggttctttagttgc

SEQ ID NO: 41987 - DNA, 430 bp, Glycine max
  Clone ID: jC-gmro02910030h07d1
atcaagcgtgtggagcacggacatatttggattataatcgagccatttttatatgcgcttcaaagatcaatttttgcatatacttgggtgacattcaaagccacctatgctagcgcttcctaaatgatatcaccgcttgaattcaacccgcgttcactggaggaaatggccctataataatcaatattgcaagggaacggccagccaaaacgcaagttgcgtgcacaccatgcatattgaaattccaactgctcagatcctacagcagaaacactagtcgtgggcacaccaatcagtgggacatggtgaatccttgatataggtcggaaacattttccgatcttgaaaggagaagacctcagctactgttgtcttaaccaactactatattatgaactgaggatcacaaaatgtaacacgtcttttgccc

SEQ ID NO: 41988 - DNA, 439 bp, Glycine max
  Clone ID: jC-gmro02910030h12d1
gaaataaaaaatacctactgaaatccaatgcaaaaaaaccatttgggtcacagcacataactttatctgacgaagttcaatgtacccttttactggtgaaaagcaatattcccacacaatttataggattaaacactaaaaacacttttccatcaaaactcaataaaaagcagaaaatctttaatcaaacagtcccaatcccatatcatcatcggactcttcctccaccttttcttcctttttctcagcagccggggcagcatcagctgcagcagcaccacctgcaggtgcagctgcaacagcaccaccgccaccttcaacgaatacagcaccacccactattacctggaacacagcggaggtaggagacacgggaaaaaaggaggactggacttcaccggaggaatcaacggcgagagcggcttgcacgaactttctt

SEQ ID NO: 41989 - DNA, 524 bp, Glycine max
  Clone ID: jC-gmro02910031a02d1
gaaattaattctttatttttttacgcaataataatggaaataatgccacggtaagagcaagagagcctgttacaagatagtgctgcctgatgtttaatctcacaagctgtgtggtctattaaggctgtaagcatgtcataggttgcagtttctgaatttgttgacacattatgcattagttccaccttcaaccaactgttgaaaccttgaaatgtcacatcttcacaacttttttcactttttttttctttctcaaagacttcttctatgcaatggaatggatttcttttggttagattccaaaagcaatatcagcaagctatttcctattagcttgaaataagttgaaaatgtcccactttcaagccttttaactcaattcaactcagtgagcagtgctctcctttctgcagcttttttcctgataaatatgccccaccttaaagcagctttgagcttaagccacccaacaacagccttccctgaagactttccctgatcctcgttgaatgtctgatacatct

SEQ ID NO: 41990 - DNA, 500 bp, Glycine max
  Clone ID: jC-gmro02910031a05d1
gtcttgaaagactttgataatttgtgagttcccgcctcactcataaatgtatcaaacagcaccgaataaagaacatgaagtttacaatgtgtacgtttttttttgaaagggagaagaaaaaaggttcatgaatatgaccatgctaaataatctgacacaaataataaacacaacatttgaaaatcatatcttaacattgaatgataattttgagaggtttttgatcacagagaagctactagcttttctggcctaacttcttgactattgtggccatgtaccttccttgatactcagcaagggccagttctgtttcactagcctgccttgatccatcgccagcaaaaactccagcaccatatggagatccacctctgaccgagtccatttcgaacattccagcaccgaaggtataaccaataggaacatagagcataccatggtggactaactgtgtgattgctgtccaagctgtggtttcttggcctccaccctgagtg

SEQ ID NO: 41991 - DNA, 489 bp, Glycine max
  Clone ID: jC-gmro02910031a06d1
atgagtattctcatctaatgaaggaaaggggatgacataatgcgtcaagcaacgctcatatcacacgggcaaaacaattagtatcccatccaacaaaaatcataaaagttaaaattcaataaaaaagcatcaaataagttttaaacagataaatggatgaaagcaactacacatttagtccacttactcaatcttggggccagcaccacttccaccagaaggagcagcataatcatcctcggctgccccagcaccagcaccacccatgtcaggaccagcaccaccttggtacatcttggcaatgataggattgcagatgctttccaattccttcattttgtcctcaaattcatctgcttctgcgagctggatgctgtctagccactggatagcttgctcaattgcgtcctcaatcttcttcttgtcagtaggatcaagtttctcaccaattttgtcatgcttcacagagttcctcatgttgaatgcata

SEQ ID NO: 41992 - DNA, 430 bp, Glycine max
  Clone ID: jC-gmro02910031a07d1
aaagggaaccggtttttttttttgctagaaattatagctgcccattttggaccactttcaacattaacaattttagtgatgaagggtaatcaaccaaaaaagaaaaacccctttttgagttatgatacattttttttaaatactaaaaaattatgggctaactgggaggactttaggcaaaccctccaaagcaaaaacagagagagtctgttgcttgcaatcagatgaaatgaactgagaattttcctccattgaaattttggcgattaagtgcaacaaaacttggtccaactttttttcattactccagccatgaatttcagccttaacaagcaaaggggctttgcatattaaatcccacgctggaaagttcttccttggcatcataaagtctcttttttttagcctcaagcttgggcaattgtcacca

SEQ ID NO: 41993 - DNA, 546 bp, Glycine max
  Clone ID: jC-gmro02910031a08d1
aatactcttatttgaataacacagcaattattattactcgttggaaataaattttcctgtcaagcaatcgaattgaatacaattgcatttcagttatgttaaagtttcttgctaacagctaagattacgacgaaaaaattacaaagaatgttggatagtcgcattttagctaaaaaaaacctaaattagtcatttttgtcatttgcagcattttcagaaagcgtcggtcctcataaccttgacctcctagttctagcaaataatttacactcggtaaatgaaaataaatgaaagaaaactaagcgcataaaaggttgatgtagaaaagattttggtacccggctcattatgttttgttgcagccactgccataaagattgtaaagaaagtagaacccgctaaatggccaaaacgaccttttagacttggcctagaccagctttatgaaagatgagctccacctcgcattgcttatgggaattggacaatgaagactaagcgtttgaaccatcaaaactgtcctgcgcactttgacgtcttttttct

SEQ ID NO: 41994 - DNA, 216 bp, Glycine max
  Clone ID: jC-gmro02910031a12d1
agcccaaaatattaacttaaatgaaaaaaaaccaccaaattttaacaattttttccccacgaaaattaacacgaggatcaaaacttaagagaatcaatgaggaggattagctcacaggggtactacaattttgggggcctacaaaagggggcacattaacccccttaaatgggggagaccacttcccaatgtggaatacaagattctgccttcctg

SEQ ID NO: 41995 - DNA, 393 bp, Glycine max
  unsure (1)..(393): unsure at all n locations
  Clone ID: jC-gmro02910031b01d1
nagtgtccagggaatgnnnagatttcntagtccacnntnnnagtttacggccaaatacgcctaataagaaaacaaataattccaattcatatatgaacatttttgctttcttatttcttgaaaatgtggaattggaatggcccgaggaattccgatctcatttcctttggcttcaggataggcctaataagaaaacaaataattccaattcatatatgaacatttttgcctccttatttcttgaaaatgtggaattggaattccccgaggaattccgatctcatttcctttggcttcaggataggcctaataagaaaacaaataattccaattcatatatgaacatttttgcctccttatttcttgaaaatgtggaattggaattccccgagg

SEQ ID NO: 41996 - DNA, 477 bp, Glycine max
  Clone ID: jC-gmro02910031b12d1
gggttaaagttttaattctatcattaataaacgaatgtaaatagagttgaacaatagatgtgtagatatccaattttacaactctttcctccaagaataaatgacaaaaagtactcaattatcccaacacaggtaaagtagagagacatcatttatagcaattttgctctgtgggctatttctgcatcgatcattgctaatacaacgagaaactcgttcaatgaggtctggcgtgtgggtaaaaaaaattgttattatagtcagaaaactctggattctgatcactagcatgctaaacaaattttccttcagaaatcttgaggttgactgtgcagtaacgaaaactaaatgttgtaattgtagggtataactaaaggttgtcctttcacttgagccgagagcatgaatgatgatgcattataagatcacttgcttctctttttggcttcactgtagagtataacttccaaagactgt

SEQ ID NO: 41997 - DNA, 478 bp, Glycine max
  Clone ID: jC-gmro02910031c03d1
aacaaggactgggaatggattaaaatggccaaatgaaaggcaacacaacacagacggaccgagcattttacaagataactgggtcactaaaagttactattgtttagttttccacaatcataacccgactttttgaacaattgactagctaaaaatgcagccaaaatgttgtccctcaaaaaggtaaccaatttggactcagcctgctgaatagaacccaccatataagctgtagcaatgacatcaatgcttctccatcttctctcctttgcatatttcttcaagcttccctcaatccttttgaattgggcctcttcatccttctctttgatatgttgggagaaggccgcagctaggcacctggctaaaacaatcccatcttttaaggcacagcaccctccctggccaaggtctggagtcatggggtggaaagcatctccaccaacacaaatattgcctttactaatattcccaaaca

SEQ ID NO: 41998 - DNA, 514 bp, Glycine max
  Clone ID: jC-gmro02910031c04d1
ctcattctataaggattatttgaatatggggacctgagttctctcatgaatccagatatgcgaggtcacacctacactctgtacattgtacaagtcactactttaatacatataatcaaacaatcaatatcatgtcttaaaatgcatacatttcaaacaattaagattggaacaaagaacataggaagcaagttatctaaaatcattcagcctttctttggcattgctgcaagtctcgtgtacattcttgccatggattgataccctctaacatcgcctgaacgcagaagatttcctgaatcacaattcagtgggctgtcaggttctggatgggccatcaaggcaattatagccctacagacagattgaagcgtccaagccgggctccaagcatttttcaagatatctaggcaaatctctccagtcttaaaatgcacattagggtgaaatattttagtcaaaaaccggacttgaggtggctgtagaggatactgctccggaacagaaaaagcaa

SEQ ID NO: 41999 - DNA, 516 bp, Glycine max
  unsure (1)..(516): unsure at all n locations
  Clone ID: jC-gmro02910031d05d1
cgctggcaaagccaatatgatagggattggattaaagattttctgttgtatttagtgttttatcataatacacacaggaccagtcagaatatgataatctaataatgcagagatgatgaagtaatgaaaacctggagtatacaatactacaaaaacaaattcactcgtcatccttgtatggatactcttctgggacatgcttgagaagttttacctgcaactcaaacacatcatcaccgcgaagcacatcacgaagccaagttacctcagttttcattgacaccatatctaaggctcctctgatgactccacttaagatgttgcaatagtacaaaccttggcagttgtcaggaagctcaacaaaatctaccaaaggattatgctccaaaacaatactacaacatgttccatnagtatcccaattggtcacagatgcagtaacaccgaggaacatnttaaaaccaacccttgcaataacatcagtcgtcttttgaaatcgttgcatttggagacatt

SEQ ID NO: 42000 - DNA, 510 bp, Glycine max
  Clone ID: jC-gmro02910031d06d1
cgacaaacaaaatttccaaattgggtgcaggattatgataaccttaactcgcaaaacaaaaaaaccaaagatatttagttctgatgggcatacaaaacaaaaatctaatacgaaaatatgaatcataaagtttactgtgaaacacccagccacttagaaaagttgtcgaattctgtataatcagaatctgacaccatagtgtgataccatgctttcccagcagacttgatggcagaagcttcctccttagagacagtcttcctcttcttgtcgagcttctccttcttggccttaacgcgctgagcttcagcaagaagagccatcctcttagcagtcttggcataaggattcagcttcagcatagagttcaggttcttaagagggttcttcttcaacgtggccttcttcacatccttcttaatgggcctcacaacagactgaacctcgtcagaataataatcctggcaagatcagagttaaccatcttgggcctgggaagcaagtacccct

SEQ ID NO: 42001 - DNA, 551 bp, Glycine max
  Clone ID: jC-gmro02910031d11d1
gaataaaagatttgcaacttaatatatataaatattactcaaggcaaggtacattacatacatagatgatgattaataaagctataataaacaagaaaagatgaatacttaattatgaagagtaaaatcagaaatgactaaggatgcacaagaccgaaaaggaacacttgaggaatacatacatggaaattataaaaaggaaaaagaaaagacacaaaagggatacaaaatacacccttggacacaagcatgcttatccacaatttgatgcatgaccctatggttttggccttatcctccaaaccctccaacaattgtagctgatgaaaggaaaaaacgaaaaagcctaaattagggaactgcagagacagatcactggcactcctcaacatagaaattattattcttccggggaaacaccactcatagctagccttgttggcaaattaaggtagcttaattgattaattaattaagcgttgcttctgaaggatccaagagccttgatagctgctgctctaaggatgtattggtggtagaatgcagccact

SEQ ID NO: 42002 - DNA, 525 bp, Glycine max
  Clone ID: jC-gmro02910031e02d1
gaatacaagggttttttttttttttcattaacgaagcaaactcggtcctactagcaacaaattgggacaagaattacagtgttttcgaaacacataaaatatcctgttacaccaaaagcacctaaacaccgatatacaacactaaattaaatatggaaaataaaaaagtaatctaagctttcttaggagatttggtagccttggatggagatttaggttccttggaagccctctcagtcttcttaggcaacaaaacagggttgatgtttggaagcacgccaccatgtgcaattgtcactccagcaagcaatttccccaactcttcatcgttcctcactgccaaaagcacgtgtcttggaataatcctgttcttcttgttgtcacgtgcggcattcccagccaactcaagcacctcggcagctaggtattcgagaactgcagccaagtatacgggagcaccggtaccgacacgctgagcgtaccttcctttcttcaaataacggccaattcttccgacggggaatt

SEQ ID NO: 42003 - DNA, 291 bp, Glycine max
  Clone ID: jC-gmro02910031e07d1
aaatgccgggggtttttgcaaaagccaaagaccttaaacaaaaaccgcccgaaagcttacaaaccaatcccaaccaaggggatctaccaactctaaaaaaaaaaagggaaagaaaatttgtttggcaaactgggccccaaaaaaccttacatacaaattaacgcggggtaaatttaagggccccaaacaaccctttatcccatgggtaaaaaaaaagggaaggggagggggattttgaaacctggggggcccaaaaagaaaagcggaaaaatcttatgtcggattttgacc

SEQ ID NO: 42004 - DNA, 568 bp, Glycine max
  unsure (1)..(568): unsure at all n locations
  Clone ID: jC-gmro02910031e09d1
gtatataatatatgctatatacgataatacagtgcacattacatgaaggtttgttattacatgcatactaaaacacgcaatgatttgagggtttgaacggagacaacattgtttatacaggacatgcaggataacactgttcaaacagaatttggtgcacaccattgttcaaacggtatatgcagtacaagttctttaccctgaccatcccctctggggattatgcacattcaaccggtcatgtacagagttaaaatctataggttgctgagtttcctccatcctctggataatgcttgctacatgattgcctctaaatcccatgctcacaaatttctcgatcaaatcattgtagggatggctacgaataaattgtgactggctaggactcgggaccataagattatgtgatgcagggttgtgaagggatgcactagttggaggatatccagcttgagcataatgagaaggttcangtggataatgtgctctggcattctcaccatcatacacattgtaggaactatgccgaggacgcatggtgtgcgttccactatttncatacaca

SEQ ID NO: 42005 - DNA, 410 bp, Glycine max
  Clone ID: jC-gmro02910031e12d1
agttaaaaggggaaacctgtcataagaaagaaagagaaacaaacacggatgaagggtacaacaccctgcaattacattacgtgaaaccatacacagttaaaagggaccattattaatggaatggccaaaacctaaacccgggtattagatcgttgaatctctttagcaacaaaaagcttttagacttaaattattaaaacatggggtatacctactcttaataaaacaacaaagtcgccacaccactggcggcaacaatacaacaatggttctgagattgcaaaatttgatttggttcttgaaggaataacattaacattatcctaccagacacgtttgtgataacatgttcaattactggttggcaaatttgattcccttttcaattgatgatttgagttcaggcttaa

SEQ ID NO: 42006 - DNA, 357 bp, Glycine max
  Clone ID: jC-gmro02910031g10d1
gaacgtaaatttttattattttatgactattataataacctggagctatggaggatcaaattgatttcgaacactactaggacagagggaatacttgattcggctggtcatgccggtatagcggtacttgaaaatcacaacgcatgctcacaacttggcaaacatgtaaatcacagagccttacgctgcctgatcatacaaaatgccaagtaactattttaactatacaaagtcctgtaaacaataacaataatgcaccatttttacttttttgcagatttgcaaactgcgactgcaccttaatcctgcatggctctcattttcacactttctaaatacagccatgtgccggtgtga

SEQ ID NO: 42007 - DNA, 548 bp, Glycine max
  Clone ID: jC-gmro02910031g12d1
accctgcgcccgcagcctcatcgggaatgttctcagaactatagacccacgtggggggacccgcaccgatggagaacgtggccacgtaagccaacaccatggctatgctcgatccaacggcccacattaatttcctctccgaatgatcaataacagtgaggctgatcgcaagcgtgagaagcgagagcaccatgccgccgacactagacaataacaacggacgacgacccacgcggtccaacgtaaacgtagccgccaagatgaacacggtcttaacgaatccaacggccacggttgcaagaagcttatgcgtgtcgtttgtaatcccagccttttcgaagatcctggggctgtacaaaacgacggcgtctacgcccgacgcttgttggaagaagtgaataccaagggcagcgattacgatgtgacgaattgcgggcgttggatagaggaagagctctttccatacaccttcaccgttgcttgtttatttacctgaacgaccgtcgtgttgcaactttcggggatccctgcggtttgttgatttccgc

SEQ ID NO: 42008 - DNA, 507 bp, Glycine max
  unsure (1)..(507): unsure at all n locations
  Clone ID: jC-gmro02910032a03d1
caaattcaaagtcattcgattgttctttcattataataatctaaaaaaccaatctgtaatgatcatatgcagttcaatagtttcacgataagtcgataaccttgcaaccagaaaaaagatgaggagaagaaacatttctttagaagaaaacaaaagtaggccatttaatcatacccttttgaccattgcacccattatgtcatccaaggtcccaaaagtattctgcataaatccatcttgggacttcatttgctccaaaatgtaggcttcatttggcttcagtcgaatgtctgaagagaatttctcaacttcagtgcacctgctgattgatggggatgctccatttagttggccaaccaaagatgcatcaactctattgctacaaattgtattatttttggtttaaaccatgccccatagaacttttcactccactggaagaagcatgtgaatntacaggattaaaggaatgacccacgttttggttataatccagtttatgttctt

SEQ ID NO: 42009 - DNA, 508 bp, Glycine max
  Clone ID: jC-gmro02910032a05d1
aaagtgggtcaattcaatacacagtggcaatacagccagtcaaaacatttgtttttatcacggtggatttaagtatcagctccaagactgagaatttaaataatgttttcgggattcaacataaaaaaataaaatcttgtcatataatgaaaattgaaaagactcaatatttgagcaattaactgttgggatatgattttctcatggcgcaatcctaagtgggtcacgaggaaagagtgatgttttgcgaatgttattcaggccacagaagagcatcactacacgctccaaccctactccaaagccaccatgtggtggtgcaccatatctgaaagaatcaatgtacgaagatattgttttgacatcaatgccgcaagctgctgcacgttgttccaaaaattctggcacatgaacacgctgagctcctgaaatgatctcctcacctcgaataaagacatcaaacgagttgctgtatgctggattgtcatagcaaggcattgtataaaat

SEQ ID NO: 42010 - DNA, 544 bp, Glycine max
  Clone ID: jC-gmro02910032a07d1
atgtaaaatcagttttaaactttaataaagtacaagtataatcgtttagaggttctagaaaatttatttccttgatttttctttggctaacaatccaaggcagaagatttcagttcaaagattttaatcataggaagtgtacacattgacaagttgtatgctggcaaagctttgccatggtcattcaggtaaactttgtcacttcatcagagatcataacttactaggaataacttccttagaaatcactccactttttccagaattgaaaatgtcctttctttcagcaataaactttagcaaaccgagaacccttctctttatttttattggctgtaacagactgaggtggatcatgcataggatgaggattaggatatgatggccgcatcaatgcccatacagatgaaaggtattcgttcggttcatctagaatccgtagaagtgataaatcctgcatggcttttgagaatttgaagacgggtgccaaagcagcagatggaatgctaaaattaagatgaggtattactgctcctccactatg

SEQ ID NO: 42011 - DNA, 572 bp, Glycine max
  Clone ID: jC-gmro02910032a08d1
agtacaagaatttgcgtaccgctgttttcaaactaataaccttacaaacatatctcttacagttgaagggctattaattccacactttccaaataaattctttgaagtgaacagaagagttcaaagagctaaacactacaaatatacgcatttactttaacaaatgagtgaacgataaacattatcaccctaacgagtaaacataggaaacttcaaacttaactacagtttagtggagaagaataatataatatcatgtatgtatgcgacaaactaggcaagaaatgtttattcatcatatcagcaccataatccatcgttcaaaccttggacgtaattctgaacgagtaatccaggaaaagataaaaaaagaacaaaatcagcagctccatcaaaagcttcacttttttatcactcatctactctattgtgtgggaatggaaccaccagcagccttgatttgttgctgcagactgaataagtactgtagagcgttcttcagtagagagtactcctgttgcaactgtgatagacatctcatacatccttcctggttcttagcctcacaaaaa

SEQ ID NO: 42012 - DNA, 484 bp, Glycine max
  Clone ID: jC-gmro02910032a11d1
ataaaaatagtacctacaataaacaaaattttatttcgaatatgagaaggttggtgtctcgaaattagaaaacactagcataaatggaaagaaaaagaaagttcaatctgaagagagaaaccacgcggcgtacacgagcacccattccgccattattgagtattccaaaccaaaagagagataagttaataataataactaaagtgcattcagcaaataccaaggcatatcggtttgggacttgcattgattagaacatgctgtgttccgggctggaatatgcaaggaacgtggacttggctgaggagctaaacccattgaagttagtccccgacgacgtcgaatatgcacccatgttcgggaacactagccaatcgttcacttgcagtcccggcagcttggaatccctcagaaccgcattaatagaatcgcacgtgggtccaaacacggtgctagggtaagtcttcaaaatcaattccctgct

SEQ ID NO: 42013 - DNA, 358 bp, Glycine max
  Clone ID: jC-gmro02910032b02d1
aaggaggggacggcatccttttgttgaataatgaccacatacagggataggttttgataatggggacaaacaaaaacaaaaacaaaaacaccgggggagagggaattattgggtttttgttgaataataactaaaacataaaattcaatctaaaactggagtattaaacaaaacaggggaaggcacccaccatttattatgttgggaattttttatgacaagccatccattaaaccaaaaaagaagccaagcgtttgatcatggctttagcaagaagagtcttaggcttgaaaagctggaaagtatgctccttatccccagcataaaagagttgaagttcaccttgccagccaatttg

SEQ ID NO: 42014 - DNA, 368 bp, Glycine max
  Clone ID: jC-gmro02910032b05d1
aacccccaaaaagtcacaactttgaatttaaccaaaacacgggaaatttaagggggcaatggggccccctgggggactaggaggggatactatgggctatgggtgttaaaaattgctgcttgatacaacttgttttaaaaaggctaaggggataccaaaaaatttattggacaacaatatttacactttgggaaaaataacgctgtacaatggggctacaactcaatttttggggctttattaacagatatcggctttgaaacttaaatgcttttcaagcattcgaagtccttaagggaataccgccataatgagatataacattacatgggtatcaccattgcttttttcccttttttttttttttg

SEQ ID NO: 42015 - DNA, 401 bp, Glycine max
  Clone ID: jC-gmro02910032b06d1
aggacaccagcccatttatcccattttcaaaaaattacaaaaataatttacaacctcaaataaccatatactttcaaatcgctaagctatctaagaactcaaatgggtctatgcaggggataaacctatactagaggaaaattccttttttttttacactaagatttatcactactccccaagaaacaagcacatgggttagaagaaaatatgagagagacccatataaccaatggcaccaactatgatcttatccccttttcgatggcttatttaggccacaaagtctgggagcaattgggcagcaaacctctttggggtctggatggtgatgctctcaaatgctgctgaagagtgagaagtggaattattcaatgcaccaaactgggttggttcaccaa

SEQ ID NO: 42016 - DNA, 518 bp, Glycine max
  unsure (1)..(518): unsure at all n locations
  Clone ID: jC-gmro02910032b07d1
agcaaatcaaatcaagacattttatgtaaaatgtaaccatacaataaacttataaattaacacatactatcattctcgatgataaaaaaataataataataataatactatcatcatcctaaccggtcaaaaacaaaattaataacaaatattaattaattaattaattaactaactaactaaaagcttgctctctttagggaagtaatagtaacggaagaacccaagggagaagttcccacttgaatctcgaaggaatcatagcgaagaaagaactccacaacgaaaagcctcgaaaccaaggtgacgaagtcttttccggcgcattgcttgttcccaagtgttggagactcagtctcaggcccattggaccacagcacgtgcttgaggagcttctccccttcctccccgacgaacctgtccccgacaaactcctcggccctctcgaagatcctaggatccttcgtcgcgaatgtntggtacccgaacagcatctncccttccttcacctgaaacgc

SEQ ID NO: 42017 - DNA, 296 bp, Glycine max
  Clone ID: jC-gmro02910032c02d1
gtgaaaaactaaatcatgctcgagcttctcaaattggctctaaaacagctagtggctggaaaacaacagcattacaagaatccccagaagaagggggacaacagtatttgtgcacttttcatttccacgtgaaatatgttacaagaatcctatgaatagagtttacaatttttatctttcaagagaacagggaaaactgcaggtagtttcaatcaacagggacttcaacatccatttttaggtcagattgaccaagaaccttaatgaagtcatccaatgtcaagtaggagtccttt

SEQ ID NO: 42018 - DNA, 569 bp, Glycine max
  Clone ID: jC-gmro02910032c03d1
aaacaagaaagattgcagatcccagcagattttataatttccgttcatcttcccaaattttttcacactttaaatgcatgatgtacctaatatacaaaacaagacatgcaaataaaaggtagaaaacaccaccgaaatccacatttcgatttacaaaaaattttactggccagctgatggatttgtcagcaactcaagtgatttcttcaagaagtctactgcaactgagacatcatcaaatgccagtgccccaacggcaaatcttgcagccttgtgtgcctctgctattttttcaggtgctggctggtagttactgtcgtactggtatgcctgagtagttgttggcttaggttccacagtttcatttctgctactgtgttgagcacttgatgaatggtttgtagttagcggagccgactgggaagaatatgaaacatctgatccttgataatgagtatagtttgatgggactgatggaaggctgctttctgtaaaacttggataagactgaaaatggggataagaataagaggaagtttcatgagaagggtagttaggacctaaatgct

SEQ ID NO: 42019 - DNA, 569 bp, Glycine max
  Clone ID: jC-gmro02910032c09d1
attgatggagacccttatagtcttttactacactgtcttctcacttcaaaatacacattaaagaagccatgactaatattttaccgtgttccctctttccagcaaaatttacattaattctagctaactcgtggaaatggttggttccatttcatgatccataaccttcaatctggtgtcaaaaactatggagtatagaatacaatacattacttgtcattgactcctattttcttttcactgccgtctttgctaataacaatcccaaccaatttacaaggctcagcatcctcaagtttttgaaccacagctctcatggttggtctcaaagctggaagagtccccgtgcacaaaactgcagttctcaacaccttacaagtttcctctgtatacatctccggaattctcgaatccaccgcactcctaagcccctctttgcttcgtgccttgttatgaacccagctcactatgtccttattttccccaaactccggttcaattggccttttcccagttactaactccatcaacaccaccccaagctgtacacatcactcttctcgttcacc

SEQ ID NO: 42020 - DNA, 576 bp, Glycine max
  Clone ID: jC-gmro02910032c10d1
atatgactctggtgttatttttgattttgcaaattaaattacacaatcacagccgtacatcacacatgagttgggcctcttccaacttaaaagcagaggataacattggcccatgacgcgacacatgcaccacctaataatcataattttacatctttacatacaaaatacaaagactttaaattttaaaaagaagaaaagagataaacagatcatcttaatgaaatgaaaccaaaacccacaaacattggcttgatttttgttgttgttgttgttcccaacttgattaagcatgaaccgtttgattgaatcacttggacttgaagggaatggccctgattacgacctggtggtagagtgctgcaagagctgcaccgatgaatggtcccacccagaagatccagtgttcatcccaaccaaggtccttgttgaagatgatagcagcaccaagactacgagcagggttgataccagttccggtgatggggatggttgccaagtgaaccaagaacacagcgaacccaattggcaagggtgccaaaatggggacgtgggagtctctggcgctacgtttgg

SEQ ID NO: 42021 - DNA, 472 bp, Glycine max
  Clone ID: jC-gmro02910032c11d1
ataaaaaaacgggataccctctataaatggaaaatattacatatttcttgcataaaacttgggagaacatttttttttggttgacgatataaaagatatatgttctgaaagaacacatacatgttcacaaaaaaaaaggggggaatttatataataataccgaaaaaaaaaaaccgatttgcgtctgagggaagggaacatagagaaaattttagcagtctggttataagaagccggtggtggtgcaaaagtgccttgccaagaggggtgggaccccttttatttaaccaggggccttttgccccttgaggggcttgaccacttaccatgtgaaagcaggggcatttttgtcaaagcggccctttgcagccagtgttaagaacctgccatttccacccctcttgagatcaagggtgatggagatcatgccaggcctgaagccaaaactgtccttacaatggttgggattttc

SEQ ID NO: 42022 - DNA, 452 bp, Glycine max
  Clone ID: jC-gmro02910032d05d1
cgggtggaaaatatgaaacttattacaaatcaatacaacattttgtccatgcaaccagacagaggaaacgccaagccataacacattggaactcaatttgatcttttgcctttggatgacactatggacatgttaaaacaagaaacaagaaaatgttaattgtatcagggtttttataagggattcacttaaagagagccagcatgttgggcaatcttgctttcaagggtacttttggctgccccgaccacactgtcaacctttttgccattcttaacaaagaaaaatgtcggaacactgctaatattccaacctgcaggaacgtccctggcctcatttatgtcaactttcaaaaaaaccacttttgggtacttttcagccaagcttgtttaaataggggaaatgaagcgacaagggccacaccatgttgcagtaaaaacaggatcgccagc

SEQ ID NO: 42023 - DNA, 546 bp, Glycine max
  Clone ID: jC-gmro02910032d10d1
aagtcgatctatattgaatgattgataatcttattaagatgtcacaatgaaggtgaactaaatcattgtttacaatagattaagcaccagcacaaatatgaagaagctcttacaatgatcaatttccatgtcacaaaaagttattaaacggtagtaatgcagggggacaatcagtcctggtagttccatgatggcatattgattaaaccaagggtgttaacagtggatttccaaggaaatgagcgtctaggtttccaaggacaaggtcagccatggcagttcgagtttctattgtgccacttccgacatgaggcaacaagacaacattttcaagcccaaatagctcttctggaacagtaggctcattttcaaacacatctagcccagcaccacccaaacgaccttctagcagagctggcactaactctgcctcatcaacatgcttgcctcgtccaatgttaataagataacccttgggacccagtgcattgatcacctccctgttgatgatgtgatgagttttcttcgtcagtgggcaagcaacta

SEQ ID NO: 42024 - DNA, 538 bp, Glycine max
  Clone ID: jC-gmro02910032d11d1
gcaaagaacaaaatactgcattcacttgcatactcacatatgtagtatgttaaaagaaagaaaataaaagttaaaccttccagagcgtacaaatttcaagacttctgattgcagtacccccactggaatcactctctctctctcctaatgtctctaatgagtagacatcccaacccctatccctccaataggagatataaactgctggaacttgttgcactctccaataatcctcacctccatttggacgcagtgctgtaataaattcttcaggcatatcaaaaagctctattgattttagttttgttaggtgctcaatgcctaatggtacctgcttcaatgaatcacagcgctggatgatgagctttttaagaccaggcattgctccctcctccacagtcatagatttcagtccatctaaataatcaagtcctaacaccttcagactaggaaaccccttagccttgaagtgcaatgtctcgccaacataaactttgagaaactcgacatgtcttagatttggcaaatcttgaagatg

SEQ ID NO: 42025 - DNA, 514 bp, Glycine max
  Clone ID: jC-gmro02910032e03d1
ggataactcaaattgtacatgacaacagttctaaaaagtggtgcttccacaccgcatattacaaatggaacagataaatcctagttttaatttattggatacttccaacatccaataagtttttggcaagcaatcttgcatggccaggaagggaaaaacgtgaatcttctttattgaaaccaaaaaataaaaaatccatgtttcacttcttcaacagcatggcactgcattgtgccattatctttgatgcccttgtaatggcatcagtcatatagaaattctcaactacagtcccgaatgggggtggtgtccaccttctcagagaaggttggtctgagtgaagatggtaatgtggcaggctctctctcatccattttcacaaggtttggggctacagtactgattcgagcacgaacggccccaattgtatcatagggcaaacgcactcctgccaccttagatagagctcgaattatcttccaatcatctctggagtcaccaactgttggaactg

SEQ ID NO: 42026 - DNA, 500 bp, Glycine max
  Clone ID: jC-gmro02910032e06d1
ggcaggaaaattttcccgatttttttaaatcaaagaaagctatgttactatagttgagattaaatcccgtgataatgtagacccataaacgaccacatatcaaaatacaaacatccgttcacagaacaacaaaaagactgtaataaagaaagaaggccggggtaaatgatgaagatgcttcacatatacagtccttctggcaccccttctttcttcttaaacataaccttatcctttgccttcttgaagtcggcatgcgtcaccttcatccggcgttctcgtaaagcaagtaagccagcttcagtacatattgcttttatatcagctccagagaactcatccttagtcataacaaattcttctaagttgacatcatcagctaatgtcatccttgaagtatgtatctggaaaatgcgtcttcttgttttgatatcagggagaggaaatttaatcttcctgtcaattcgaccagggtcgcagcagggttggatcaaggcttt

SEQ ID NO: 42027 - DNA, 439 bp, Glycine max
  Clone ID: jC-gmro02910032f02d1
aatatgttgtgcgcttctttattcaaaatcacaactatcacatgtcttaatcataggttcgttcacataaggccaagtttttacacaagatatattttcttttttggtttctaagccttcaagagggggaacttatgtacacctgctaatagttccatctcacctttcaatagcataaaagccagtgagatttaaagtgaaacttgccatcagcagcctccacttgcaggttcaattgaactgagcaacccattgcctcttagctgcgtgcaatgatcttcagcatcagcttggtcacagatgatcacaactgacaatccattgtagtgtgcttcttgcatgatattaactgcattgtcaaaggtcattccagggatgaccttcatcagtacttggacaacgtattcccgtttattaaagttgtcgctgtgcaatatta

SEQ ID NO: 42028 - DNA, 537 bp, Glycine max
  Clone ID: jC-gmro02910032f06d1
gatactcaagaacctaatgggtaaatcaattcgggatgacaaaaggcttacaacaataagaagcaacgaaatcaaagattcatacttatatgggctaaaaatgttatactttacaagaataatagcttatgtttttgttaattaacagtcaatagaagtaatcactaatctaaacatggctttatctgtcagtacgaaatagtagtagtaaccaatagttttgttggctttaatacgccaagaatgatccagtgccagtgtaacttgttgccaatgcctttccagctgaggttggctgagagaatgctagttgagaacgttcaagctcaagatccttgcagaaactcttcctcacggcatcaagcaatttgcttgcaattccttttcttctgttagagggagcaacccaaatggccctaatgccacaagcagcggtggttggtttgctatcacagaagattgcaccttccatcctttcagaatcactcaaggaagcaaactttttttcaaccctcctttggaaataacattcccaaa

SEQ ID NO: 42029 - DNA, 462 bp, Glycine max
  Clone ID: jC-gmro02910032f07d1
gttccaaatattttaacaaagtacttaatttatgtggtcgagatttcagtcagtaaaacacatgactaagataaagattaacaaactccagagaccacagaacgagaaattttttctaaaagagtacaatttaacatcacagaatatagagtgaggaaaaagttctactctccaggtgcagagacgccctgcttcagtctctcctttttcatcttcttctttgagattggctttttttttctaggagggagggtcttctgtgcatatgtgtatagtacataatttccaacgaggaatatcaacagcaacccaccaacaagaaggagaacaattaatgctgggttgaacccttttgaacccacgcgatcgaaggaaggagggactttgtcggagaattcgaagtcgtcggccatggaggaacggcgaaaaggaacagatctacggcgggaagaatcacgagct

SEQ ID NO: 42030 - DNA, 499 bp, Glycine max
  Clone ID: jC-gmro02910032f08d1
gaaaaaaaaattgaacatagtttattcatatcatgtgccgcgcgtgcctagtttattgattgtgaaatctaaaataagaagtggcatggcatgaattatttaaacgtaaaatgaaacaagaggtaaaaagatggattataaaaatagagtgggagctgcatagtagtaaatagtttatatttgatcatcccagagatcagcgagttgtggtttggtgggtccgctgatcaaacggctctggctgatttgacttattttgtgatgatcttgttcagtcaatgcccagtcaaagatgtgcagattctggttcatcctctccttatcgtagctctttggcacaaatgtcacaccttgttcgtacaaccatctcagactcacctgggctatggatttcccatgagcctctgcaatctccttcagcacatcattctccatcacttcatttgggcccctgctcgcacctttcctcagtggagagaacgcagtcactattatccca

SEQ ID NO: 42031 - DNA, 509 bp, Glycine max
  Clone ID: jC-gmro02910032f10d1
cccaccaaagagccaaatgccataattaggatggctaaaaaaaatgaagtgtccacaatacaatgaaatacattgggccaatagagattacaactcaattaagaataataataaaaaaagaactttttcggtgtacaaattaaaacatttaaataaggaatataatataattaattaacaaaggagagagaccgtgttttcttcggaatgttgtaatgtccaagataactaactaagaccaaaaaatggcaagtggcatgcataaaccttaagcatagctttgtagctttcttcatcaataaattaacaacataggaaaccttaggtaagtgacaatcgtgcaaaactccatcaaacccctcttctgtgccacagttgcaaattgcaatgaccaattgagccacactatgaattctgtgaagatcgtatagagaaatgtactggcagccaaaggccatgccagctcttcaactttgatatagtggcttattgtgttgatgtggaattag

SEQ ID NO: 42032 - DNA, 447 bp, Glycine max
  Clone ID: jC-gmro02910032f11d1
cagcttagttttaacatagccaaaaacacaaaaaatgtttcttaatatttttatccttttaaaaaataaatcaaaccacaaaacagctcatactttcctttgctataaataacaaagggaaagtatatacttaacctaaaaaacaacaatcaaatacaccttgcagcatctgagcaggcctttaccaaccaaaattgtttttcagataaattcctccctttactcgtttcaagttgccacaaaactccacacatcaaaaaatttaatatcatttcctaaaaaatccctagtgaaatgaactacatactcagcaccaacaaatgtgtggagagcagtgatggtctgagtcattggcaagaggttcaagagtaaaccttatgcagtccaatgttgagatcagatgatatggaaataacaagaggaatagactgaagccacatggctctg

SEQ ID NO: 42033 - DNA, 434 bp, Glycine max
  Clone ID: jC-gmro02910032g02d1
acccaaactggatattgattgcttttctggaatatatatcgttaatacaacaaaaatagactcgctctatctaacaattgtttttggatctcctttacagaatattacaatgtaacgtacaagtaaaattggttaaaaaaattaacaaaaagcccccccctgtgcaagagcaaaagtgattgaaagccagaaaagaaacggggaaattgaaagggggctaaattcaaaaaaccccaattgcttgctcagctagctaaatggctaggagagttgttgaacatggggtgccacataaatgctcgggaaagcaccatcttaagctcccggggagtccagttttcttttggaaggggttgaaggaacattaccaattcttggaaatgaagtttctggagcttgtctgaccaccttagaaggaagctggccaatatttt

SEQ ID NO: 42034 - DNA, 495 bp, Glycine max
  Clone ID: jC-gmro02910032g03d1
ctgtgttcctactatattttcttttctttattaagtaaagatataaacattatatgttatttacatagcttatcgaaaaaaaaaataggttctttacataaaaacaaggttatgtctagttactgacttaagttgcaaacaacagacaagctcaaaatttgatactctagttacttttatggaaacaatagcaactttctattttccattgctgaaaacaagctgaatgaatattcatcttttgaatccagagagcaaaaataattaatcggtattaagaggaagattgattgtgtgtcaagctgtgctcatctagccaagatattgatgtcaccaaaaacttgagttattattttatcaggctcaccctcaagaagtgcatgataggcattcttgtaaagctgaagctttttgtctgaacagcttgcattctcatacaaggctttgctcactgatggatcagtcacagtgtcagcttccccggaaggatgaatt

SEQ ID NO: 42035 - DNA, 472 bp, Glycine max
  Clone ID: jC-gmro02910032g04d1
aaacattcaaattcactcgggaaaataacgttacattgttcacaaataaacatggctaccagcacgagctatagggcacctaagaaacaggactaacaaatggtaaaaagttaaataatttcgctaaaattaaaaatgcaataaacattaaatacccgatgccagagggctggaatgttgaagtctcatataacttataagcatctaaaagtattcacttgggaccacctccaagtttggtcatcattttcgcaattacaggacctacctttggatttgattggtgcttggcaaaattagcagggttcttcataacatcttgaagagcagccataacctccggatcacttaatgccgccttcagttcaaggtcactcaagattttgctaaaatcaatgtttccaggcacccctccaggaatgccaccagtttctgggaaagcctccccagggaatacccccggcccctggga

SEQ ID NO: 42036 - DNA, 530 bp, Glycine max
  Clone ID: jC-gmro02910032g08d1
accagaatataacattaaaataaccaaatcgaagaggttcgcaaacaaaatttaagtaaatggaatgtgctgacaaaataactcaaattcactcttgcaaaactaatgttatccaaaagtctagtatttccaaattaaaagacagactaagaacttgtagcagtatccaaaaaggctcttccaggttcacgattggccaatggtccatggcacccaagaagctttgcattcacaccatcgggcacaattctgttctctgacttgaacttgagataatcagaacggctaaacttggtgaagccccatttcctgctaactataatcttttgacgaccagggaacttgaacttggcacggcgaagagccttctgagcatgatggctgttgctggccttgcagcggacagaaagaaagacctgtccaatagcccacttagcacaagtaccctgtggctttccaaaagaccctttattccagtttggagcctattaccaccacacaccaaagcattttgttgatcctaagaacat

SEQ ID NO: 42037 - DNA, 451 bp, Glycine max
  Clone ID: jC-gmro02910032g11d1
ggggaacccaggaagaaccatttgctaattctcctcatttttcgggaaaattgcaacctccatacaatcattctgaaaacaaaaccatccaatcattttaacatccatctaaataaaaaataattcgcccaaaccagaacccagaccgccattaatttcaagctttaaccgaaaaacagaacaacccaaaccattttcccatttgggatccacaagttccacactttctatttaccaatggcctaataattaattattaatccactagtttacactactaaaagcttgggatagattacacttacactcgctatgttacaaaaaaagttttcccaaaccaggacgcttcactacacacggacaacggaaacaacgtgagggaccttgccatcattaaatgggaagcaaacgtactggcacgcaaacttcttggggatcttaaacgcgagct

SEQ ID NO: 42038 - DNA, 501 bp, Glycine max
  Clone ID: jC-gmro02910032g12d1
accatatatatatagagagagagaatacgaagcacactgatcacaggatgatgctctctttaagtagggaagcagatcttatcagtacacataggtaggttgaaattctagctctagcaatctagctagagaaggtagtacttgcacaacacacagcacatgataatttattttatacacaatctcattctcatggtgctcaagatgcatggactaattaagcaacaatgttggtctgataggcagtgtccacagataaattgggtacccataaaatggccttgcttccaaggaaatggcaaacagggttagttccaggatcaactcccataagttgatgaagcatttgatgattcattccagaagtatttgagtggcaaatagcaagtgcctgagttttggttccattaccagccaccaatggaaccatgaaagctgttgtttcacggacttatggcagtaaaaactgcagttctgaatttagcctttacacataactgt

SEQ ID NO: 42039 - DNA, 407 bp, Glycine max
  Clone ID: jC-gmro02910032h01d1
aaacccgggtttattaataattgggccctataaacatttgaaaaagaccgaggccactggaacccttgactactttggaaaatagactagggaattttgtcccattttcaaattagagggcagagggaaaactcctataatatggccaacgataattttatgggcgggcaaaaccactttttttcagatggggggggggttcattcaccaagtaccaaaactgcagccaaggggtttttgggggaggacttcaagacgatctttcatgacagccataaatgaataagctgggaaacacagccggaaaaagcctgtgtgaaaagaaggcaggccatcaccaggttcaagggatctgtttatgttgaggggggaagccaaaccacggaaaccttcaagggggaaatttt

SEQ ID NO: 42040 - DNA, 500 bp, Glycine max
  Clone ID: jC-gmro02910032h04d1
aaagcgaaaaatatcctgtattgaatttcttcagaagcccaaagtgtcacttgtgatggataacaacataataagaagtaatcctcactaatcactacaaattcattttcatcccaaaactctgaaatcagtacttcaagtttcaacttgcctattgaggcatggaagattgaaataagatacactgatagtgatagtttaaatacaaataaatcaaagtaaaacagattcttagttcgtttaaaaaatcttgcttgctctgctctcaacctgtgtatcttattcaacattccattagactttacaatcagcagagacagaaagtaatatttagactagcccacgatgccttgaactttctataaacataaaaattgaagaagattccaacaattccccatgtaatataactcagatctgaatggtgggatattggatgcacatgcagtgatgatgggaaagttgatgagttgaatccacttgtggttggggaatttgcg

SEQ ID NO: 42041 - DNA, 495 bp, Glycine max
  Clone ID: jC-gmro02910032h07d1
cggggaaaatctactaagataagaaggaaaaaaaatacaagtttcaaaatctggttctttaataatcaaattgactaaaagctcaaattaaaagatgcttttgaatagtgcctggttctttagaagaattagcggagtccaaaactaaatgattgatgcatcttatgagggtatttaatgacccatgtaaggagcaccagcaccaggatgaggtctcacaccactggtttgtcccatttgaggattctggcatccgggttgcattgttggctggttcccataccccatagcaggttgattcgcatatggagcaggcggccccccctggttaacgggggcaccaccaagccttccaagaagattcccaagccccaatacagctccctgattaatcaatgcagtcaacgcctgttcaagcaccggattcaacccctgggccggccaccagggttaaaccccccacaactaagcccggggcgcctaaaatgacacttc

SEQ ID NO: 42042 - DNA, 500 bp, Glycine max
  Clone ID: jC-gmro02910032h09d1
agacattattcatggggcacggtttgcgtaaagatggcagattacagataaagcgtgataatttaacatatttacagccacaaatgaaaacctgttcaatgtcctctccctccaaccaaccctctcctgtctcctaacacaaccttaacaaaccaaaaaaatacatacttcaaatcacaaacaacactgctggggccaatatcctatcctttttcacccaaaaatggggtattcgggaaaagaattacaatttagagaaaagttaaaattaaaaaattgacttctttatcaaattttcctttccaaagtaaaaattgacatttctaaagtagtcatctaccgtcattgtttttcattgtttaaatgcagtgacccgtccctcatcaacgtaaggctgagactggcaaacctctctcgtgagtactgtcttgatgcttatatacaatctgtgccagccttcatcatagtagaaaaatcggcgcaacttatccttccatcct

SEQ ID NO: 42043 - DNA, 499 bp, Glycine max
  Clone ID: jC-gmro02910033a01d1
agattacaaattcacaatacattcttgagaaaatactgtatgcaaaattgaaaaaaaatataataataaatgccctggactatggaatcagaagatggaaaaatgatttcacaattattgagcaattaaaagaatttcatactaactataatgaaaaataaatgagataaaagtaagttatatttcattctttatcattaatcactaatagccacatttatactgagaccatttttgaaagtcatcgtcactgtcatcagattgctctggactaggaactgccacagaatcttcctgtgctttaacatcggcatcctccttttttgttgcggccttcggaacctcttcatgagttccagcggttaggtccacaacctactacgacatcaccaaatctgaggcatctctaccggggtattcttctgacttggtggaagctaattttagtagttcaataaacaacttataatgaggatgaacttttgcacttgtatttaca

SEQ ID NO: 42044 - DNA, 351 bp, Glycine max
  Clone ID: jC-gmro02910033a11d1
atacataacactaatgaattttattttaagacgttctttttatttaatccaaacacacttgtctgttgtccccgcagaccttgacctaatcaattccatttcttataggagcttctcgaacaaatcattatagttcatggggatatataattaagtcaattatgttaatattccataataaatacgaaatgaatgtccatcaaattttcctagtgcacaaaccatacaaggaagatcaaaccccagaaaaacggggactaaacagattcgtgttccatattggatgacatctagatttagttgtcaaccccggattcaataccggtggtacttcgtagctgggttattggt

SEQ ID NO: 42045 - DNA, 547 bp, Glycine max
  Clone ID: jC-gmro02910033a12d1
gaataaaatttgttatttccgcttagattaaacaccaatcagatttattgaagcttgcaacgcaaagtcactcaaccagcggtcttcaaccataaatggggagaacgcataacctctaattcaaagatcagtaatttgtagagcataatcccaaagaaaaccaaaataataatcaattagtttaggcaaataattcaactgctcatcttcccaatggaactgcataagtcagacaatacaaggcatagctaaaagagaccgtctgagttagcctaattgcatgaagtatttctggctcaaaagatgaacaccctagatatccatggctcagaattttataatagcctttagtctttgccaaaatcagcactgtagtgagcactggattcaagtttctttgcatcattcagttttctaacagccttcataaaatcttcatggatcacatattcgcgttctgcacgaattgctgccattccagcttccgtgcacacatttcgaagatcagcttcattaaagccctcagcaaggttcacaacagcttcgt

SEQ ID NO: 42046 - DNA, 375 bp, Glycine max
  Clone ID: jC-gmro02910033b01d1
agatcattgacccaaaaacatagggatcaatcaattgatttaataaaatccatttcaaaatattcaaacatgagagattaaatgaataaaaaatcattcatttggctaaatgaacaggtagcatgactgagcaaagacaccacagtgcattaagggccttcatggtgaagggtggggtaacgagtttaaatgacagacacacaacattgactaaaggctattaccactttaatactgcattgaaatacgcaatgaattaacaaacctaatgaaactttggctctagctcaacttcatatttaatgaggggctaacatgcttctttttgccataattctgcagggcaaaggcaaggcccaatttcaagaatggcta

SEQ ID NO: 42047 - DNA, 533 bp, Glycine max
  unsure (1)..(533): unsure at all n locations
  Clone ID: jC-gmro02910033b11d1
atccaatatcactattattattattatatacaacaaaaagaaaaaagaaaaaaagtggagaatatagctaaatgcctaaatattctctgaccaaaaaacagaggaaaaccagaacaggagcaggggaagcaaacagaacctccctcttccacctgtgtacatcaacacactaatccaaaaacccttaaccatatactgaacctatgactcaccaactgaaatcggttggccggagatccccaacggcgatcgggaaatttgccggcttatttcgcgaagaacagatcttatctctggcttgccaggggaccaatcaacaattttctctgactcttgcttgatcttcataacctggctatgaactgggacacccttttgtgcaaacctttcatcgntgttcatcttcatgttctccatgctctctatcactcaatggaaaaaaaggtttcaattgccaaagtttcccagctacccttcttctaattctgtttctctatatgtgacaatctacaatggacaaaaaacctcgagcc

SEQ ID NO: 42048 - DNA, 566 bp, Glycine max
  unsure (1)..(566): unsure at all n locations
  Clone ID: jC-gmro02910033c01d1
aacatgaattctaatttattgcctatatcaggtagctaaatttaaatgttcaatatttttcaggaacatcataaacattgttcacaacatcagagcatcaacaaatacatttttattccttgagccactccacaaacttgttaaaattctcataggattgtcccccttctgcaatgttacttagaaccatttccttcagtttttgagaccttccccttatgttctcatctccaaggatttggtctactttcttctttatctcccaacgtgatatcagccctttgtcatccaaatcgaatcccaaacccaccttccacatatcacaaatgtaagccttgtcaactaattggtcagtataatatggccaacacaagaaaggtaccccattggacacaccttccaaggtagaattccaaccacagtgactaataaaacaagctattgcagggtggcttaacaccttttgttgaggtgcccatttaacaattttaccacaagtgccttggaattcatctgggtatgtgatnttggtgcttccactggcatcctnacgaacaacccacaga

SEQ ID NO: 42049 - DNA, 543 bp, Glycine max
  Clone ID: jC-gmro02910033c10d1
aacaatagaaagtaaagaaatttattcaaggaaactgggatttatacaatattgatattgtatatgcaaatccacacccagtactacatttggccttgtggacatacgacaaatattattaattttaacatgcatagacttacacaccgaaattatgagtattagatcctcacccaaatataccaaataaaatattgttaataactttcaactttgctggcgagtgggcgggctttacacatagcctccaatggaattaaccttgacaaggtgatccaattattctctgtcatatcaagcttcttctcacttactcgtttccagtcaaaacattgaatcattaatcccaaagtatagctaacactttgcatagccatgggttctcctgggcaagcccttcttcccataccaaatgctaccaatttcttgtgctctccttcttcatcaaacctcttaggtttaaagcttgacgcatctttccatatcttaggatctctttgcatggcccaaccattaataatcacaattgtgtctcgtggaaca

SEQ ID NO: 42050 - DNA, 368 bp, Glycine max
  Clone ID: jC-gmro02910033c11d1
aatagagaaatttttcactataggtcaccaaacaaattacaggaataaacttgatatcatatcttagagttccaacacttatttttgaataaaaaaactgtaggtgggattttagaataattttaatagcataagagataggcaaaaccaaaacatagttttagttcacatgtctatcctgagactgctcagcaccagatacccacttatgaaggcatatggcagcagagtaatttgaaccacatgcaatatatttcacatgtctatcctttaatgcttcaaccaaagccggtgttttacgatcttcaatatctccatgacccagactcccatttgcgacctttccccaagggttaaccttatttttg

SEQ ID NO: 42051 - DNA, 443 bp, Glycine max
  Clone ID: jC-gmro02910033d01d1
aagagagaaacatatactatattcaatcattttggggtaatacagtataattttcttccctaaactgataatttctttagtaaagacaccaaagtaaattgcatagctatacttattgctcatcttcagttttaacttattgtgcacacatcactcgggtcgtgctcttacatacagctctcgtttgtgttctgaattacactcaggcagcaagtaacttctggatatccttctcaatttgaaaaggagacgttgttggtgggtatctttcaataactttaccatttttgtcaaccaagaatttctcaaaattccactttataagatcacccaaaaagcctccagcactcgatttcagaaactggtacactggagttgtaaatggtccattgacatcaaccttatcaaaaattggaaattctgctttatatcgagtgcaagca

SEQ ID NO: 42052 - DNA, 316 bp, Glycine max
  Clone ID: jC-gmro02910033d10d1
aggaaaggccggaattagaaataaaaatgggcttcccttgctggaacaggtaatattttaagacaacaaaaaagggatggggccccaaaaaggaattccgggagaaccaaagggtctaccctcttcccttggtctcccctgcagtatagagatatctcggggtgccgcgctttacatttgcttcaaactcaagggaaggtcaccgcctatggggtgcgggggaaaagcttttgctatctattctctctttatctctggaattatgggaccgcttaattacatggggcaaccttgtcaagggcatctttccgtggat

SEQ ID NO: 42053 - DNA, 415 bp, Glycine max
  Clone ID: jC-gmro02910033e11d1
ggcatgattgggaatgggatttaccaatgcttttcaacaagaatgcattatgtacaagattttattggaaaaataaaaaagaggacgggggtttgacccttttgttattttagaatataaattctttcaaaaggcacacacatttgtttctgcaatttcattcgggggggcaacttctaatatcttcatggcaaggaagttgggggccttacagaagccaaactcaaagatggaacacgtgtccaaaacgaacttttgagagtacttatggggtaaaatccatgggaaggtacttgcttcacaacttagcaaaaatagtcaaagcttttaatctgcaaacttttatgggttgatacaaaaatgtgtggcaatgaacaaaatggggggttaagggtttccgaaaaaatgggaccaa

SEQ ID NO: 42054 - DNA, 476 bp, Glycine max
  Clone ID: jC-gmro02910033e12d1
ggaacaagaccaatgatatatatgaaacccgagtcatttcaataaagtcagcatcatgaaatgaacacaataataaagataagagaacgattatgagcacgtattttcattaatcgaaacccacacaatagcacagaacaacaaacctatgaatcagcttagtttggccatcaagccacaccaacattgtcaagaggttcaattgcacaagaaacaaagtccactggactaaaacaatgcagctatctattttacacatgatacatcacatggtaggtttgaatcacaatgatgaattagttccctggaggaccaccaaagaggtaattcaaggaagatccgccacctggggcagcatgaaccttggtagatggccgatcagtaagaaagttgccacagttttgcccatcagcacgatggtaattgtttttaagacttccaggaatttcagctggaagttgcttatcaattggtga

SEQ ID NO: 42055 - DNA, 387 bp, Glycine max
  Clone ID: jC-gmro02910033f10d1
gggaacaaaaaaggttaaaaaaccccttcccggggaaaaaaaaaaaatcccccccggggaaaaacttaacctttcccccacaaaattaacccttcaaaaaaaggcccttgcagaacccgccccactaactaaaaaccggggaaaaattggaagcccttttcacaaaaaaaaaaggcccgtttaatagaagccccccccaaattacctttgggattccccccctttggaacccccttagaaattcccttgggcgcccccaccgggggggggttttggtccccccctccccgggggggaaccccccccctgggggggaccaccggggaaggggtaaaaggcccccccggtggggttaaccggggggaaaatggggggtcctttttgggg

SEQ ID NO: 42056 - DNA, 425 bp, Glycine max
  Clone ID: jC-gmro02910033f11d1
aaaaagaaagaggctatatatttattctttgaaatagcaaatgtcaaaaacaacctaggatttcaaagggggaaaaccctgattaccacttataagcctcattttgaaacaaaatcctaattaacagcgatatagctcaatgacaaacaaaacaaggagtccacaccacacacaattttccccaaagattctgggtctcacatacatgaatctattttgaagcaggggggctttcatagaagcctttaacaaacacataatttttagaaatactaagtctcacaccccatcatcaaatctattttgaaccaaaaaggctttcatagagacccttgaaaaaggagaaaaccggatctttagggggcagactttctttgacaattggatgggtcaaaaattcttggctccaattggggagcttagga

SEQ ID NO: 42057 - DNA, 412 bp, Glycine max
  Clone ID: jC-gmro02910033g10d1
aaaaaaaaaaaaaccctccctttcccccaaggaaggggggggaccccgccatttttacgcgcaaaccctccccagaggggaacggaaaaccttataccaacccgaaaagccctcccggaaaaaccccccccctaaacaaaaagggggttttgaaaacccccaaaaaggaaccccccttctttaaaccacccccgggtgggaacaccgcccctttctccgggggggggcccgggaaattttttggggaaacaaaaaattttgttttggggaagacccccacccccccccccggggaaacaaagtcagaccccccccagaagcggtgtgatgtgctcccccttttgatggagctcccccccccaggcccgggccttgcgtggataaaccccctaaattcccccaaagccccccc

SEQ ID NO: 42058 - DNA, 521 bp, Glycine max
  Clone ID: jC-gmro02910033h10d1
acaccaattgtggcaattttgggtttccacatagcaagtaagaactactgggatattcagacaaactcgcagtttaaattaaattactaagcctattaaacaaagtttaagagcggaagtacaaccaaagaaacgaaaggggggggagacaggttagagtgagaaacattacataacagtttccaaacgcaaactaatttcatctactacgacggaggacaaaatctgatcaaaggagctcagcaacatttgaaggcagctcctcaacttgcacgttgtaaaacttctggatgtcaaacagcattttctcgtcatcctttgggacaaaattgatcgcaacaccttttcttccgaaccttccactacgaccaatacggtggagatagttctcaggctgtgtagggagatcaaagtttataactagagacacttgttgcacattaataccacgagccaaaagatcagtggtttttaagacacgggaagacccagaacggaattcacgcataataatgagcctg

SEQ ID NO: 42059 - DNA, 562 bp, Glycine max
  unsure (1)..(562): unsure at all n locations
  Clone ID: jC-gmro02910033h11d1
ccttcctaattcatcagcgtcaatttataatactataacatataccaaaacaagtgtataaaataagcagcaactatttaacatacacatactaatggtatctgacatgactgcatacacattacacaggactgcttataaagcacaagggcacgcctctcaagtcgcaggaaattttcacaatggtagaaataaaataaaaaaatcagaagatatcctcaaaatacaaggcaaaccattcgaacatccatcagcctttgtacacatcatttctttagtacgttgtataagtaggcagcaattcccaaaattataatcaacaaaacaatatcaatacagaagtttcgactggatcgaagctggttcactgtgtctttaagtctaacatttgtattcttaaggtcagaggatgccttgtcaccttagtgtcaatctcatccatcagtggaacttgtctatccagttcctcattcatatcatgtgccatgttttncaatgtatccaatccttcagcaatcacatccaaaccttgatcctgtttcattctacgcatttcatattc

SEQ ID NO: 42060 - DNA, 502 bp, Glycine max
  Clone ID: jC-gmro02910033h12d1
gagcaataacttattttattgttcaagtagaaacggggaaaagtacattaaaaaaaaaagagaaaaataaaatcgcaataaaaacataatgacacgctgtttttttaaacttcaaaagggtctttgacaaaatcaagaacaacccatgagaatcttctgcttaatcgacttcctcaattttgggtccagcaccgcttccactgccagctgcaggaccatcctcatccatggctccacccgcattaccaccagcaccctggtacatctttgctatgatgggattacaaatgctctccaactccttcatcttatcctcaaattcgtcagcctcagcaagttggtttccatctagccattggatagcctgctcaatcgcatcttcaattttcttcttatcatcagaagacagtttggaagcaatcttgtcatccttgattgtgttcctcatgttataggcataattttccaatgcatttttggcctccactttcttcttatgctc

SEQ ID NO: 42061 - DNA, 348 bp, Glycine max
  Clone ID: jC-gmro02910034a02d1
attccacaactcgggaaattggattcaattgacacctaccttcaaataatcaagaagtattactataaccctgatgccttcaacggggttttccgcattaactaactctttcttttagttgccaaggagacatatacattacttacctcatctatacctggttaaaattgctctcgataattagagaagctttatgggctatgactcttttttgccataggcaagcggccagagaaataaatcattcaccccaacactaaggtaaattaccgccaccacaagggactcatttaagctatgttatgaatgtataaaacaaatcactatctatgaatttttgacattttt

SEQ ID NO: 42062 - DNA, 471 bp, Glycine max
  Clone ID: jC-gmro02910034a05d1
gagcaaattcatttttcattgatatacatgggttatatacaagttacagtgtggtgaaacaaacatactctctcttcaacctccaataagcttttgctcaccagggggacatcttccaaggactcaaaattagtaaaaaaaaaaaaaaaattacaattacaattccaaacaaagctaacatctaattcttagacatcagggtcacaaaattttccatccatcctgttctgaacagctttcacagcagcaactctagcagcagtggcagccttgctcgcagcgattactgctttgttaacctggtcatctactcgtttaaggtttatagcattctctgctgttttcctagcagcctgcaatttatataacccatcaaatgagaacaaacacatatgaggaagaaaacaaaccaacagcatttaaagagattatagcaagaagacaaccatgtttgttaatactagtaattta

SEQ ID NO: 42063 - DNA, 479 bp, Glycine max
  Clone ID: jC-gmro02910034a06d1
aacgggctatttcatacattctaatataaatacaagtttgcggcataaattgtgttttgtgtggcgggttacaacttagaatgtataatttgcatgttccacccactgaaagcttagcaccaacaatcaactgtagaatcataagaaccaacatcaaatcacacacattctgggtctttcattttattcattcatctttctccccctcattttacagagaaggagaagaaacaaactgtcttggtaaactaaaaagatctttcccttcaaatggagaactccactcccgggaaccagcagttgatgtctcagcagaagctactccaccatcttgcaatccaggcatgggagcattcatgctcccatttgagggcactggtctcattgatgattgagctacaactcctgaagtatttgcatcatacatcggagcactattactccttaaaaacggtgaaaatcctagccataaaccgttt

SEQ ID NO: 42064 - DNA, 518 bp, Glycine max
  Clone ID: jC-gmro02910034a07d1
gtcaatcacgattcggttaaaatacaacatacaaataaaaataagggagagtgacatctacacaaaatccacacaaacttaaatcaaacgaggacaataataataataataataatgatgatgataaaaatgagaaaagcttgaacctttagacttgagctttaaccttctggtttggctcgaagacatacttaataagagaatccttaatagacaacagttctggaaattccttcttcaatttggcagcgtcaagctcattgttgctcctcggagcaacaatcaccttggcctgttcctcgagagtgaagttgttccaggtgaagttcgggtcaacataatctctgtacatctccaagatttcattgtgactaaccactcctgggttagtaaagttccagatcccagtcagattcctcttccccatctcaattgaaattggaagcagttcatccaatatagtcatcgaattcggaatatccacaaccttctcatatcgagtgatcttagtgataaaa

SEQ ID NO: 42065 - DNA, 595 bp, Glycine max
  Clone ID: jC-gmro02910034a08d1
aataataatattaattgttcatttattaattgaaggctttaggccaccataaaacaaaacttaaatgtacctgagcaataaaagaaacttgaatacacataagcatcggatactcataaaaacaaagatatggcttcaagttttccaccatacttgacagtgctttatgaaaagtacctaacagccacctattgtctacttctattcacatcaacgagaagaaacaatacaatatcacatccaaccaaaacaaaaatttagaagcttaaaaattagacatttgatcttcatgatacaaatacaggccaagaccaaaccgggcacaagatttgcagaaagcaatttccttagcagcagaaactggatcgccaatggagccatcactgggtgatatcggtccagttgactcacgatatgcctttccattagatccccgtacaggaagacggtatacgacagttacggagccattgtcggagaaaatgacatcacgtatctcgccacaccaacctggggcgtagaagctgagcattctgttggcatgataccagtggatgaagcgatcatgtttgacgatagtatccgggattctttt

SEQ ID NO: 42066 - DNA, 564 bp, Glycine max
  Clone ID: jC-gmro02910034a09d1
atcaattaataaagaaattaacaaaacaaatctgactaagaggttcattctgctacctgatataacaacctcattaaaagtaatgggatagaaagaggtaacatatgagattgtaaacagatccgaaaactcacaaaagggtaaaaagaataaaattacaataagacttccggaaattcctgtaaaattatatacttagtctcgtctggttatatatgtttcaattctattccaactaaagaatagaaaataaatgcaggtctttcaatggcagaatagaactattcacttcgtgggcttcatcttgaagatcatgatcatccaatatatagaagcaaaagtagttgccatcctgcagcacttgtttcttgtattcaaaagtaccttctaccaatcaaacatttgaccgaaatcgtgtcaatgatatctcctggagttcacgcttcatgcacagacgttcaccgagcaaagccatcactgcaatttcagtaccattcacaatccaccatgttatagatgagggccaacccccatacacaatgcatataaaaagatggacaatgt

SEQ ID NO: 42067 - DNA, 520 bp, Glycine max
  Clone ID: jC-gmro02910034a10d1
gctatgcaaaattaactgattggtcacttagtatgaaatttaataggacagtcagcggcgataaaaggaaaagaagaaaattataaataaaacactcatctagaaaagaagaatatcaattactcccctacagaatgactactacaatacaaccacgcaagatggtagtataaaaccattcaaaactgagtatcttatttgtataaacctccattcccactttcaacgagttcacagaagaatctgtaaacgaatggtatatacacgtaatagcataaagaaggaacccgctgtacgtatagtcacagtggaattgcaacccaaaaaccaagaaaatttcctgatatcctcatcttaaggcatttacaaatgccattaaggaatcaacatctttcttttctgagggatactttattgttggccgaaacgaatgctttgggaaaaataatatcctagggaagctttccaattgcagttaactctttgcaaattctttccggtctccatctgctctaaattt

SEQ ID NO: 42068 - DNA, 408 bp, Glycine max
  Clone ID: jC-gmro02910034a12d1
ggagaattgatgacacacttaataatttattccagtacaaaagcacaagtacattcacaagctacatacaataaggttaaaagattccctaattcccatgccattgtcctttcacagggggataaatatatttttaattcatcatatcatctaattgggaattaagcacacacttcctaatttggttcactacgcaagaacattcacaagctactaaattgaccatcaacgattcataagttctcatgtcattggccactcattgacatcataaacacatttagaatccatcatagattatgcgaccatatcatactatttcaccaacccttgagaaagagcaaggaagaagatgtcattaagcctatcattactaggagagttgccaccatacaccaacaacccctt

SEQ ID NO: 42069 - DNA, 384 bp, Glycine max
  Clone ID: jC-gmro02910034b02d1
aaaagaaaatcccccccccccaaaaaaaaaatgggggggggaaacccaggggccacaaaaggggcccccctaaaaaaaaaaaaccccggggggggttttaaggcccctgggcccgaactaaaaaaaaaaacccggggaaaagggggggaaaaaaccggggccaatagggcactaaaccctaaacccccttaaggggtaaggccaagaaaaaaaaggggggaccaacccccccccccttggggtttggaaagaccaaaccggccttaatattttggccccccccaaaaaaaaagggggaatccttatttttaggggggggggaattgggggccccccaaagggggttaaaaaaaaaaattttgttttctgggggcgcgcgggggg

SEQ ID NO: 42070 - DNA, 470 bp, Glycine max
  Clone ID: jC-gmro02910034b04d1
gactcgatcttcgttagactgatgttacggaacgcgaacgcggaaagcactttgaaaagcaccgaagttcccttgtcgtgtgcgaaaacaatgctcgtcttgaaaggacggtccgtgcgcggaatgataggctctctcgccagcatcacgaaccgcgtgacgttgctcggatcgtcttggattccgtccgccatcacgttcaggccgtagagctccgccgctcgtgcgctcgcgatggcggcggtgtcgcggaggttattcgtggcgacgaactcggcggcgccggcggtgtcgtccacggcctcgcgcgccacgttcaggccgagtttggtgagagtgtgctcgcactgcgcgagtgcctgcggatgcgaaatcactcgcgtgaggaactcctttcggacgccggggagcgcgaggaggcaatggtggaccgggagctggacctcgccgactatgtggaggcggtggcg

SEQ ID NO: 42071 - DNA, 511 bp, Glycine max
  Clone ID: jC-gmro02910034b05d1
gaaaataacatattaacttatatatattaaatttactctaaaataacccggccacatacattttatttattacattatatagtagttatttgtagttctattgcataggggtgattgaaacattgatcaaagtcataaggattcaataactgatgtgaaatgatcttccatgttctgaaactagttcgtgttgtaccatgatttcttctgaagctcatcaattattttctgatccacttgaaaagctttggtgagaacctcaggagaaataggtggattggctttaaacaaagcatttgcaatagtgatagttcctgcattttgactgccaagagcagcaatggcaacagcattgccatatcccacattgagttggaaatgaatgagaccaattgggaacacaaacacatcacccttgttcaacactttggtaaagagacgatttccatcttgattggaagtgacaaatccaacatagagagttcctttaaggactaaaaggatttcggtg

SEQ ID NO: 42072 - DNA, 358 bp, Glycine max
  Clone ID: jC-gmro02910034b06d1
aactagaacactttttgtttgatattgatattaaaagacacattggtggggcatacatacaaacagagagtacatgtttttagggggatcccgtaaaaaattccaaaagaacatgcaaataacaaaattgggggaagaggagagaaacacacagagtaagagacgtggaaagttatggattttagacatattataagggcaacgcttaaaaaacttccagcatagagcaggggaatgaattacttagggcttctcccacttgaggggtttgaccactttccatgtgaagtcagggttttcttttccaaagggttcataggcagcagtctttaaaaacctgttatttcccccccttttg

SEQ ID NO: 42073 - DNA, 385 bp, Glycine max
  Clone ID: jC-gmro02910034b07d1
ggggcttcacatgaaaccatatataaagaaacttaataagatgacataaaattctagagcaaaaaaattaaaacaacgttcaagattatcatatctagcgtccaaaatgaccagcaaaactgaaatgtagttcaattcgttatacacctcaaaccaaaacttgaaacactaactagatactacttaatacttaacaggagcaaggatttcaatttgggaaccaagcttctcctctgcaaccttctcagctttcaccctcaatttggcaagctgcttcttcctctcataacacaattgtgctctctccttccttttcttctcaagttccctgatggtatcatagtagttccatccaacctcagatgacaattggcccagatgacag

SEQ ID NO: 42074 - DNA, 602 bp, Glycine max
  unsure (1)..(602): unsure at all n locations
  Clone ID: jC-gmro02910034b08d1
aacttgtgcattaagccaatgaaatagccaaatttataattacaacaaacaaacaaatggatgaccaaaatattgttgtgtaggaacttgcaagcaattttatgtacaaatttgaagtattaagataacaaagtaacccttcttgttgtagttcaatcactttcgtagtcttcatcatctccaaaggtaaaaacagaagcatcagcagccatggccttaaactcactttctgcactgggcacctcgagactggacactgtttttccatcaacattacttcctggctcactagcatgacgaattggcgtagagctcttgtttcccaaggaaacttgctctgttgcatgtgataaatttgcaatttcatttgaaactctgtttgattcggagattctggtgtcatttgtaactgtttcaactgcttcagaaggtgcttttgtttgcttgctttttgaagaagcagattgctctgccttgccatctgaatacacgtcatctttatcatgactatctgattctntgtctgcattctgtgcaggggtggtgctcctttcactggggcggaactggcagattgtacttgaacttcatctgattctttg

SEQ ID NO: 42075 - DNA, 543 bp, Glycine max
  Clone ID: jC-gmro02910034c04d1
gacaaaaaatatactaagcgctgaattaattttcatcactgggaattattgacataacactgcttaaaattctgacttgataaaaaaacaattcgaactgaaaaaaatggccatttttatagtccttgaaattgaatctgtaatccgaattctaatatctaggctgagtaggtacaaaggttttcaaaccccatgtactctttatttgcaattttttggatcatgtttgatatgcccacaccacctagtgatattgcactaacaaaaatggtgccggagaggatgaaaatgatcagagatgctttccctagtatggcaaccagctttctcactaaaacttgtccaacaaaggccgcaaaagtggatacagccactaagtaaagagtttaaggaataggaaaccgttttagaaggtaatattccaccactgacatagatgctgaaaatgtcatggcaaaagtggctgtagcacttgacaccttgggggggatttctagctccaagaaaaggggtccccaaataaaacctttcccaagaccaagc

SEQ ID NO: 42076 - DNA, 568 bp, Glycine max
  Clone ID: jC-gmro02910034c06d1
gataggaaaatatcattaaattgagaataacagtgaaaaagggcatcaatacaaaaaaaaaagactaaacatccattaactctgctgttggtagcacaagaaattcttgctgtttattgcaagagcatgatctaccagcaaagttggaaataagaataacaatggaacctacttattccaacacacatacaacaaccatgccataaggggtcttttattagtagacagacaccacatggcatagcataactaatcaaaaaacattggcatagcataaataatcaaacccaaaaaataaaagatacaagattcatccatgaacaagacaagattcttagctatttacgaatgcacaatgcttcctgatctctccctctgtccctgtcttcacattaattcttcccattttctctatggaggttgcaaactcagcagagaaattttcaactgtcccttcaagcaattggatgatttgagactttgtaactgagttagtcaacaatgcagcatctgattcaaatagacccctttcttaataacgtgactatagttgctaagacaaatgttt

SEQ ID NO: 42077 - DNA, 577 bp, Glycine max
  unsure (1)..(577): unsure at all n locations
  Clone ID: jC-gmro02910034c07d1
ataatgttgacttgatggtgaaaaagaaagaaagcaaaccgctcataaaaaaaaaaggctatgttgtggataactcctccacatacaagatctagactatttgactnttaaaggcttattcagttatttgatacccagaagagtttcttgttagggtgtgtgaagtgggccaaaatagccatcaaagtagcttatcagctttaaggcaagaagaaacaaaaccaattcttttgggtaaaagaacttcagaaaccactttgcccattcaactaaacacaacaatgaaagatgaattaaaaagtcatgttacagattcctctgaatgaagtcccacatcctcccttccatgtaaactcggtcactatgacgccgaggcatgtgccgttcatctgggaaaactattagctcatatgattttccagctgccacaagtgcattgataagtcttgcagtgtgcctaaagtgaacattctcatcaatcatgccgtgcacaagcaacaaccgccctttcaactggtgcacttggttcttaccagaaccggtttcatatcctgacttgtttcagatgcaaccccat

SEQ ID NO: 42078 - DNA, 541 bp, Glycine max
  Clone ID: jC-gmro02910034c08d1
caaaggatattttattactttcaatctgttcttacttaataattataatgggaaaacacaattatttctggcagaatatagcaaatatactctccgacacattttgcgtgtctacaattctttccattgtatcatagtaaattaaataaatgtgtaagggctcaatcttcattgatacaagccctgtaatacatggggcaatattcagcacaatagcctgacttgactatgtacagtatacacagtctttgcgcatccaaattctcttatataaatctttgtttttggccaggcagtgcatgattaggccttggcaatcttttgaggtatacttgaacaaccagaagacaaggagcaccaattatgaacttcaaatattttttatatactgaacctaatatgatctaaaccacacgtatttggtaaattgctgcatcatagggtcctaaccgcataggactcacttgacagcttctttgcatttcctagacatttgttacaagatatatattgcctgtcaatgctgctccttttagagagc

SEQ ID NO: 42079 - DNA, 544 bp, Glycine max
  Clone ID: jC-gmro02910034c09d1
attcaaaaagttgatttttagttattgccaagcagaaaccaaaaacgcagaaaacttcctgctgcctttgtgtcattgttgtacaagttatttaacattaacttcctcccagatatgctgagaaggggaaaaaatgtatagcatctgtgagtcctgaaaattaggacagtattatgcatacaacagaatcttttaaaccaaagcctaacataataaatgagttaaaatcagcattctttggttgcaatttcttcctgctgttttgtggcggaaaatagggaaaattttgtttctgcaaagaactaaccaggacatgaaaattttccagaacattcaagcagatgcagccaaaggcacagatctgtagcatgctctctttgcagcacgaacaatatcttcaacctgtgggacagccattctttcagatttgctgcttaatgcatgggaacattagccccagcaattttttaacgggtgcattaagattaccaaactttttttaatgacagatgtgcagatttcagcgcccacgccatgctgagga

SEQ ID NO: 42080 - DNA, 456 bp, Glycine max
  Clone ID: jC-gmro02910034c11d1
aaaagaaaaaaaaaaaaactttaggtagagcatgggtataactgtataaggccaaacacggagaaatacagagcaactactaacagggtttgcaaaacacgcttaactgaaaattttatatcataacatacgtcacgatttgaaacttaaaattactattaagatatctagagactagagatactgggggatctaaaaacatccattaatttaactcggatcccagttacacctttccctgcactaaactttactacaccaagcaaaagctcccgtttttattaagtaaaccatacataaaagaaaaccgaaaagaaaagaagatcaaaggaagattggtagcacctaaggttcactaaattctgataacgagatacaaaagggtgtgcagcccacatgtaactttggggctatatcccatgtgaggaacagttccctttcaagcttattttttcc

SEQ ID NO: 42081 - DNA, 568 bp, Glycine max
  Clone ID: jC-gmro02910034c12d1
acggaggaattcaactgtgttgcaactaataaacaattgggtaaacaatattctacaaatatataacgaagcaaactatttacaaaggaatgggcacaacgcatgagacctcataaacatattacacactcccatcaatatacccctcctccactttcatgtgaaaattcaagtactgacaacaaataaaattgtaaacccaaagggttcctaggttgctacaccaagactcaaacatatagaattatgtatgagtctcctcagctgttttagaagatgttagagaacaactcttcatgaagatacaaattacgagcatgccaacaatttgcggaatctttcctctctgtccctgcggaaccgggaggttgtggtccctgaaggcgttcgtcttttctttcttggtcggaagaaaaaatcttgtgtgtcaagaacataagaaatcttagatgagctgcaagctatcttacattccaatccattaattactttaacaccttccatggcagagcatattgcagaaagctcatctaattttccatattggcgtttgtttctatgcagtatg

SEQ ID NO: 42082 - DNA, 443 bp, Glycine max
  Clone ID: jC-gmro02910034d01d1
ggctcatgcatatcccacgatcataggagattcgggtttagctataaaagtctgcatctatgtaaattttaccagttatgaacatgacataatacaaatttttcttatgatataataaacttttattaaagccaggatcttggctataagcttcacattctagacaagggcaagtccattgcgtctgctacaaagtctgcatcttttgtggggaaacacaagggaggggtaattctgaagacatttccatagtaaccacccttaccaataagtactcctagttctttcatttggtccattacatgcaatgtttcattttttgctggagttttaagttcacgatcagtgacaagttcaactcctagcattaggccttttcctctgacatcaccaattaattcatatttggccttgagggcagggagcctttctttaaatgggat

SEQ ID NO: 42083 - DNA, 477 bp, Glycine max
  Clone ID: jC-gmro02910034d02d1
ggttcaaaaattaaaactatatatagtttctctttaaaaaaaactacatataagtttatcgcgctaattttgggtatcaccctatacaactgtaattgcagctagtaaaatatagcatgtacaaaatgccaaatttcaaattgtatgtcatatacaaaaaaagaaaaagaaaatattcaatgaaattaattatcatttacctcttgaaaatttcttatttttctataggaacttttccatatacacatgcaatcagttaaaaaattcgatctcaattcatcagaaatcaatgcttgctggtctccttgtcaagtgtctacaatctttggtacacatttcttgaatttcttggcgttttcggtgagggacacgatgcaagacttccactcagatttatctttattatgtccttgacaaggaagatggcggaatatgtgaacaagtacaacagcatccagagcagcgtattctattgat

SEQ ID NO: 42084 - DNA, 426 bp, Glycine max
  Clone ID: jC-gmro02910034d03d1
aacaaataccactttatgctttgatggtttcaagaaaatcacaagcgcgacaacaactaaagacaccttttcgacataaggaaacttcatgtacaaattaggtacagtctgcacaagactacttatttcaaacaacaaaaatgtctgtctaaggtccaataagagatctaacaaaaaaggaaaggggattataccaaacagccactattcataccaaatgcgatgcagcaaaaagtaatttcattatctccacagccttcattcaaaaaccttccatgaaagcaaggagagcgagtggctacaggcaaatgctttattgttcagcagaggcataaaaatatcacatgaagattgcgacaaactctcaggattaagcttcagctcctggttcctttattaggaaggatgtcttggataagcttgctt

SEQ ID NO: 42085 - DNA, 552 bp, Glycine max
  Clone ID: jC-gmro02910034d04d1
gttaacagtgtataatgcccatgggccatgatttatttatttagaaagaacaacctagctttatgagtatgaatatcataagcattgtcactgccatcataacagcactcacacgcatacataacataattaacaccatgaacatgcccttctacccaactctaagctacttgcatagtactacatatataatatccttattgaaattaaaaaaaaaacaacagtaacatcggaagattaaaaaacatagcctcttaatcctcccatccccatgaacctgcagtggtctcggttcattgaaccagcccatttaaaggaaaagaccttaattattttttgcataatatattacagattttcttcctcgatcatagacaaggggaggaaaattcaagggtcctgatcatggtgcttgttggcaacattgcactgctttctgacctcaccctttgtgccagtgagagggttgttctctgagagcaaggtaatggctctagagaactcctttgagaaatagtcttggctcttggccattttcttcacataaggctt

SEQ ID NO: 42086 - DNA, 477 bp, Glycine max
  Clone ID: jC-gmro02910034d05d1
agttcaacggatgaaggattataattatgcataccaagggtacaagcgtagtttgatataatccagctaactcatactcagaatgaaccagttaaaaacttatcaaagtttaagaaaagaactggaccattttaaaaaacaactctcctcaccttctgcaaataaatgatcactccaacaagagaataaaatgaaaggataacaaaagctagaatcaaagggttacaatctgcaatgcattgcttccagacaaatcgtgatgatagtagtctttcccttcaataaccctatctatcgaaacagtttagaagcactttctgtgcacaattgatggaccagattcgtcatattctgcctttgcaatccacatctgctggaaggtgctaagagatgccaagatagaaccaccgatccagacactgtattttttctaggtggggctacaaccttgatcttcatgctgctgggtgccaatgc

SEQ ID NO: 42087 - DNA, 510 bp, Glycine max
  Clone ID: jC-gmro02910034d06d1
gcaaaataatttctttactgttgtcttggtccaacatttcccataaaatacaatagacgcaaataaatgctaaagcaatatctcaataaccttgatgcctccaacgagtatttcggactcaactttatctctcttagaattgccaaggatacataaaaattagctatctaatctatccctgcttaaatatgctctcaaaaattagtgaagctcagtgctctataactcttttttgtattagccaaaggccaacggaaacctctcactcactcaaactgtaaattaaattaccacaaccagtatttatcccttcaacatagagcctcaatgtaaaaaagtagtcctatgtttcatcttcaccatctgagagcaggtaatcttgaatttgttcccttagcagactcaaattaccattgttggcttgctttgctcggccaaccaccgactgaggcaaatccatataaaaatgttccattgccatggaatcacttggaagtatttgaaaccgac

SEQ ID NO: 42088 - DNA, 433 bp, Glycine max
  Clone ID: jC-gmro02910034d07d1
gaaactctagattttcggatgttattgcacgaagaatgtgatattacaatgaaagctcacttagatcttcatatgaattgtaaggccaaccatatactactactactacaccaaatcaggtgaatgggcaaaattacttgctcaagtgaggaacaaaaccgatagacctcatgtgactatggttggagaaaatgtttgaaggactgtacacttgttggctattacatccatgaacttctctgccagaaatgacacttcaagatttgatttgaaccacttaacaatgtttcaaatgatgaaattctgccagtgaaagtgtgatctctcttccatgcaatagaccaggaaggaggctgcatcctaccagccaaattgagtggatttgggatgcggaaagatgtttaccctattgaataaatcgttgacaatgata

SEQ ID NO: 42089 - DNA, 528 bp, Glycine max
  Clone ID: jC-gmro02910034d10d1
caaaggaaacccaaaaatgttaacaacgatgtactacttgatacttcctcagttgaaagggaaaaaaagaaaagtaaatcttgacaacaaactagttatgtcctcccttacgatgttaaacgacctacaagtttaacgatccctcaaacaaggggtgtgggaaagctcgttggagtcaccaaccaacattatttgcttggcaaaacttaaaaaccgaaaaagccaagctcactagctctctccttctcaaatgtctcaaagtactgatagatgattgttactgcaagcaatattccggttcctgaaccgatggcccccatgaagtctgccaacactgtcagagcaccgatccagatgcctccaaatgctgcggccgtgggaatgtatcggttcagctttttctgcaagtttgactcacggtgtccaggcattaccatttgttggtccttaagctgcttggcaacatctttagcagatgaaccagagacttcaatccatgttttaaagaacaaggcccaggctgaaagc

SEQ ID NO: 42090 - DNA, 307 bp, Glycine max
  Clone ID: jC-gmro02910034d11d1
cttaacccccataaaccattcccaataatcaaatggggctaaaattgaatttattatccaaattttacaggataaatgtaactgggtaaaaaaacatgcttttttaaaaacaaaacactattcatactttgggcattggttatgaattatcataaaatggttaaactagacactttttatactgggtcctgactagtaaaaatctacaaattccttattcctatggccattttacacacattattcgtttaaacaatttttggggttgcccaaaatgggtccaaaacatttaattgtaaatgcaaaa

SEQ ID NO: 42091 - DNA, 525 bp, Glycine max
  Clone ID: jC-gmro02910034e01d1
atacaaacagtaatttctttattaacacttaacagcaaacacgagaacattcaatcaccccaaatacataacttaaccatacataggtagatgaaggaatcatattcccttctattcacttttattgaaaaccagggaaagtactgcaacaaccatagagcccctagatggagatactgttgggaattcctctgaaagtcaatccctcctcactagaaggatagagcaaagtgtaaggcattttagccggcccactgcggtttctcaacgtctcgtccttgttcttctgtataagcttttgttcaatctcttgaagcttctttccaaacctcttgaaggcctctagtggaccagcatcagaagtccaatagtcaccaccatctctctccccaaggtagaactcatcagatgtgtgccttgacaagatttctataattgtaaggtcaatgagggtctccttcttgccagtaatagtcttcaaaaactcctttttagggtttttagccaaagctgcatactcagcag

SEQ ID NO: 42092 - DNA, 483 bp, Glycine max
  Clone ID: jC-gmro02910034e02d1
aatacaaatgtatctcttattcaatgatagcaatacatagattataaaccaaggcaaactggctgagtcaatgaaaagcattaaggttacattctgaaagaaagaaaccaagaacaaggagttcaatttgaactcccattcttattcttatttatatacatacgatatctaggaaaacaaactcaccatgtctcactatgaacttatatatatttatgtacatgaactaagaaaaccatctgaatgaaagggaagagggtaaaactgcctagatgtcacctaagataggggagatactcagtaaacacaagaatgttccttcaccttagaagaaaatgcatgaagaaccatcctgctctttcttcagttggctgacaacagaacaaagtcttctaacaaacaaggctagtgaaccaatgtggctttacaacatgtgtttccctcacgaccggttgaacactgccaaatcagtttgctgcgcct

SEQ ID NO: 42093 - DNA, 388 bp, Glycine max
  Clone ID: jC-gmro02910034e09d1
gagaatccattcaggggagcgaaagatgagcttttgggaagaaatagaatcggggggggacctagagagtattggtttggctaaacatgcagccaatgctctttccaagttatttacaacttgagacatagttggtctatctcgacctttaagcctaacacaatcagcagccaaataaccgacgtaggccactgcctttatcttaaagggcgtgggtggggccacttttttgtccaacactttgggaatctcatcttggaaaatgaatggcaccacaaaatcaacaacatttcgtggcaccccattctcgtttttatggatggccttgtaaccggagagcaacttaagcaaaaccaccccaaagctgtggacgtcactcttgggggtc

SEQ ID NO: 42094 - DNA, 400 bp, Glycine max
  Clone ID: jC-gmro02910034e11d1
aatcaacatcttttctattattcctttgcgtattggaaataagaataattcacatatggtaatgttgttggcttccgccatgcactttaatacccataattacacagatagcagggcatctattatcatgataaaatcaaacggagaatctctccagagagcttgaatgatttttctgtttcttccagacagtggtccttttcttcccgactccaaggttcagcaactttattcaacttgtctctcacattttgcaacaatcgtggaaggtcatcatcccatttgtagaacttcaacgccttggtggtaagtaacttttcagcaacctttttcccaatcattcgaccaccaactgaatgagcaaagttgatattgtgaaaatggcaaatgaatgcttggg

SEQ ID NO: 42095 - DNA, 473 bp, Glycine max
  Clone ID: jC-gmro02910034e12d1
agttggacaataaaattgaaatggattgagaatacaacagaaaaggcctacttagcctgaattacagaaaatatacaacaatcattataaaaaaccctaaggcaatccctcaaccccgaagaaggtagtaacttccctcctcctttttcaatcctttaagactacatttatcggcattaataaagttggccccacattattaggttgaaaccttaaatatatattaggggcaggggatgaaaagagatatgggttaaagagaaaaaaaaagtggttcacgggttatcagtgaatttgcaagcgaagagaccctttcaatggccatgaaagggacattatctggataaaaatatccttcccaaattcagaattccttgtgcctaataagccgagcaagttgcaaccataaaactggttcccttcagcccttatcaaagtctggctcatatattctgcaactgggaaaaggagat

SEQ ID NO: 42096 - DNA, 514 bp, Glycine max
  Clone ID: jC-gmro02910034f01d1
aacataaatgttatttttttaaagaatcaatatactaccagggcatgagatgagagcaatggcatgaacataaaccttaatactacatgtaaaccctcccaaatccctttggcttcccatcatcatggtatttctattaccactacacagtatttcctactatctatgtttttagcaatgccatgctgaagctgatatcaaatttctgtccttccaccccaacaacatggctccatccttctccaccagtgtatagtgttctgaatagcacatcaaaaggcttcttatgacagaattcacataagaactcaaaggacactgacggaagccggccatcgttaacctcgacttccacttgccgaacagttcatgtctctcaaccctttccttgccttcacaagcaatgatattcacaatatccctggccagacaatggtgctccacattaatcctatccttgctatctcttgggagggtgacatcaatggactcaaagaatgccaaggagtaatcc

SEQ ID NO: 42097 - DNA, 367 bp, Glycine max
  Clone ID: jC-gmro02910034f02d1
gaaacatacacaatctaatttataatttattataatattttacatcaggtatgaattgaacttccgttatatggatacacatagaaataaataaagaagtaacctaaatttatgatttagagattgctttatttgtagcaatatatttgtacattaaagaaacaaaaaaagtaaaatcaaatcaaataagggtgacataaggaagaaaggaaaaatcttctcatactcctttggagacctcttcagaaagcagaaaactacacaagtgaaaatagaaggttccatgctggtcaaaattttcaagccctaagatctggagctaccactgctatctggtaaagtgcgtcaagttgggggaaaggagaaa

SEQ ID NO: 42098 - DNA, 505 bp, Glycine max
  Clone ID: jC-gmro02910034f03d1
gatatgctctttagaaggtagcaatgtaattcagtatagacttatagtaatgatccattcatataaaaatgtagcagcaaacatcagaaacatgtcaccaagtattcattgggttgactttcatattttttatatattaacacttcttccagatctgggagtaatcataaatagctaacacaatcatgtctaaatgttatggcagccattaatcacaatgataaaacagttttaacacggagcaaatgaagaaacatctgccatactaaaaatagtttatagatttagctgatgtaaccctagagaagaggtgggtattgctttgcctgctgccggacccttctcttgtactctgctgcatcctggatgaatagatgatagccttctgtctgggcaggatcagcaggatttggctgatcaagtaagtcttggatgcccacaagaatttgcttaactgttatggctggtctccacccactatcctcattaagtatagacaagcaaa

SEQ ID NO: 42099 - DNA, 472 bp, Glycine max
  Clone ID: jC-gmro02910034f04d1
gaatcatcaatcatgtaaccaagaaatagtataaaatccagatgccaccttcatctagaataaaacacttcgaatcatgacctcctgagagctatttctttgaagaatcagcgcacaatctggcagagttgccatatgcatacatggactaatagcaaaaatgcaaaatgtatgaagcataggaaagggaaaaagtgaatgatacacatcttatggatcaaaaaccaaagggcaaagtctaagtcttagaaccataatcaataatatccaaatcatttttgaaggccccaatcttccaaaacaaagtaagggttctgcagtaacaggaacttaatcagaatcctcatacacttctccatcatcagataactcatcaaatgatctgatgtcaagctggtaacgaagaattccaccaatgccaccaaaccctctgcagaattgggagccctctgagatttgttggtcacaaatt

SEQ ID NO: 42100 - DNA, 477 bp, Glycine max
  Clone ID: jC-gmro02910034f05d1
gaaattcatacatgcactaagctcgtgtacattcatccttttttactctttttttttttaccgcaaatacatccctttcttgtcagagacaaatagagaaaaaatgaattaagctcaaatacattcttaccgtgtctattgaactaataataaaccgcactaaccagccacagcagatagtaatgttctactgtataatattcatgacattcccgcaaaaatgactgcttaacctattttagtattcaccctccaagttcctgcacaagcaattttctctccttttcaacaagagaattgaggactttaacagtacttgctgtgattagttctcagcatacgtagttcacaaactatgagagtccagtaagtgcagtatcctccatggtaacactgtccttaattccctgtatcatcttaaggacttgccacatcgccggcctctgtttggcgatgttgcgctgcaaatactggcaa

SEQ ID NO: 42101 - DNA, 510 bp, Glycine max
  Clone ID: jC-gmro02910034f06d1
aagaaaatctattagtactattattatttttcaccattccataaacaatccatctatttggaaagagtacattgtcactgtcttcttccccaagccactatttacacccacccccaaaacttacgtataattgctctagaaaccaaacctataatgttcctcatcttcctgtactttggttgaaaggaacatttgcttattttgctgcaccattctttttctctcaaactatttcacagatcacatgtcttattttttttctactttctcaacctttttttcacttctattggatttttcctatatagacaaacgctattaacaaggaacagagaagggaacacaattccagcaccggccttttacagcaaaaagctcgagtgtgttgtgacgggtgaaactgcacggagaaagttgcgttttgaggtaaaatttatcagggggcattatagcaaataacctaaagttactactaacttaatttctagtattctatgactagcccaccca

SEQ ID NO: 42102 - DNA, 411 bp, Glycine max
  Clone ID: jC-gmro02910034f07d1
gcacaaaactggtaaaattccagatcaataaggattgcggcgaagccgcaaagatacaacattcattagggaaaacaggagtggggaaaaataaggggggaggggttgaggaagaatcaattgctcacagagcatgctaagacacctaaatattccacacacagttattgaaacaacccaatatagagaaaatttttctttggtgtattataatataaagcagaaccaaatgacttggaagattctactttcttataccattcacttggcaagttcgttgcggatgagttttgctgcggcaaccatgtttgtgagggctggcttcaccttagtgtacttacgggggttgagcccacagattggggtcacccagacgatgttcttatagagcactgccggcaacttggtgat

SEQ ID NO: 42103 - DNA, 584 bp, Glycine max
  Clone ID: jC-gmro02910034f08d1
atagaatgcccctatttataataatacactgcatatcacgctcataaatcgtcattcagttgctaattaatatgttcacttcccttccttaactgaaaataataaatcctaaaaacagacaattagcatagaaccatagacaaggcaaattcaagcaagaaagatcaatagaagctgtaagttatgtagcactttagaatttaaaattaaattggtagttcaaaggtgcaaaatggctctgcttagcatctccaagttgaaactgagatgagatccttcctttgccagcaaagaacaagggaagactgcctcttctcaacatggaaccccttactaggagtcctctgcaccaaacactctgcctgggattctgtaaagttactaaaggtcaatggtgaaaacccagatgacaagagaaggtttttccaaggaagtgctctttcctgcaaaccatgtcgacccaagacaagcttctccattgatggctgaagataatacttctcaatcatctgaaggacatctgggtgaacattaaccgcatcaagtgactcaagcagccctgaatagactgaagtgcaaaaatc

SEQ ID NO: 42104 - DNA, 520 bp, Glycine max
  Clone ID: jC-gmro02910034f10d1
gattaaggcacggcttaaaattgaattgatgggtaaaactaccccaattcgaagcttttccaatcaagatccaaatcatgcaacaacaaaaaaaaaagcaactttttttttccttctctttctctcctcttatcgaaagcttaatcacaaaactaaaatcacggacattatttataaaactcaagtgcgacaaactccaaatgagaaagaaaaagccggttcctccatttctttatccaactctttatcctcagtttactcagcagcaaggggcacagactcagccaatttgcggtacttgagagcatagaacatctcgagatagcggcggctctcacggcggtcaaggttagacacatgcttccagaagccatagacaccggtgagagtgagaagcctctgagagtaaatttgccatgtgtacttctcttcaatacgctggagaccagcctttgagatcttgtcccagtgagttgggtcaagcttgcacttttcaaagaagtcaacaaggagatcagca

SEQ ID NO: 42105 - DNA, 537 bp, Glycine max
  Clone ID: jC-gmro02910034f12d1
aagttaacgatgatttgtaatttccaaaacgagaaaaataacaatagagcatcacggatgcatcaacccataaaggataaagggggtgcagaaacaaaaaatgcctctgcaaatccgtgcatcgcactaaatccttaaggaactgctactgatggatcatggatataactccagtatccagacatgttctttctacacattcttccggtcggcactcattggcattgggtaagtttcacaaaggtgattttagtcattcagtgtacatcagtatgcttgttgaacctttttttttccttcatattctgaacacccacacttatgtacaaaagccaatactagccccatgaattagtttgtcaccaatttacaatccccctattgagaattaacatcctgaaatttggatataaaatagtacccaagaaggcaagaaccttagctcaccaatgcttcaacatgcactaagaaattgatgactattagtcattcagtcaagttcgaaattctctcacttcgattctactggctccgaac

SEQ ID NO: 42106 - DNA, 464 bp, Glycine max
  Clone ID: jC-gmro02910034g02d1
ccaaaattgggaaggtattaggaaaaactgaaaaattctagatctcgtcgaaggaaaatgctttctcaagtgacataattacccgttgggtggaacatcagcatttctagatattgctttatgaaatatgacaatcaatggtttaatttgatctattgagacatgaaggggagccaagttaaactcatttcattggtaggaactggtttgccgagcaggttgatatcataagatcactaactccagaaaatcagcggtttcaaagaagataaaaagaatcccatcgcgtatgaccgggataaaccttgagtattgatattcttaagagataacagagatgaatgtccagcattaagtccatgaaaaccaatgccatatgatatacttccatcagccttgaacagtccatagtttttttcagatgaatgcccaggcttctcgttctcgttgaaaatgcaaaaatg

SEQ ID NO: 42107 - DNA, 490 bp, Glycine max
  Clone ID: jC-gmro02910034g03d1
aagaattgaaatttgctttgattgaaatcaggttacaagtgtaaagttgtgcgtgatttggtgacaatgatagatgattagttccaaatccctcaatggtcaggggataagagaaactagagaaagaaaaaaaaaagaaaaaagaaaaagaattacattccaccctcccagtatacacaaggaaatgacatcaatatctatgcagcaatagagggatggttttggtttttgtgctgtgagtgcatcatttaggagagacattatctccactctttgtcattgtcagtttcccttgcatccagcttcttagcatctcaagtgcagcttttggttgatccatagggaccatgtgaccagcctcgtataccttgaggaaagagagaggtccatggcttttcagcgttcctgcttctgcaccatcaactaaaaatgggactgtaccagacgccccaaattgtttttgaccagaccaattcattgcattaaccca

SEQ ID NO: 42108 - DNA, 401 bp, Glycine max
  Clone ID: jC-gmro02910034g06d1
gaaacaagaataccaaagtataaagttgtataacaaaagtctaacaaaaaataatatctgtccagtaactaattatttgatgggggatccaagatggatacccctctaatgtttcaaacctgataaatcaaactgaacttcacttacaatttgatcagaaacatgtcccatgaaaaagatggtgacaagaacaaacagctttgccaagcattacagtggcaaaaaaaaattcaaaaattaataaactatcattaagcatactaaatatggtgcatctctccagcaatgcactattaaactactggaaccaatctttctgagtatattccgcaatctgatgttacacctcaatcaaattccaagaaaggaacctagccttgaaaaataaagacaaacaaaaa

SEQ ID NO: 42109 - DNA, 537 bp, Glycine max
  Clone ID: jC-gmro02910034g07d1
gcagcaaaattcttattatattcaatacttgcctgatggcaaatggcaatgatttcgattttgcaaatactagcaaagatctaagccggacattttaactgctcaacccacggtaagataaaatttcgcatgatggataagataagccccatgacaaccattactactgtcaaaaaaaactaaataaacggcactgcccgaaatcaaatatcattctcaataatcaataatgtatgagataaaatcaaatggctccacttatcgaggaggtggaggagagagtggtggcaggttcgattttgcaaatcccacccatgcaacaatgccgactgccagaattatccatccaaatatgtcatacttcagatcactggtcttctttttcttctgagtatttgtcgaagcagaagtagaagatccagctgttgctgctgcctgctgctgctgctgctgaccaaatccatgcttatggatttctacatgcagttcaagagccttagcagccacttccaatgatttgcggaaagttcattcgaa

SEQ ID NO: 42110 - DNA, 496 bp, Glycine max
  Clone ID: jC-gmro02910034g08d1
gcagcaaaattcttattatattcaatacttgcctgatggcaaatggcaatgatttcgattttgcaaatactagcaaagatctaagccggacattttaactgctcaacccacggtaagataaaatttcgcatgatggataagataagccccatgacaaccattactactgtcaaaaaaaactaaataaacggcactgcccgaaatcaaatatcattctcaataatcaataatgtatgagataaaatcaaatggctccacttatcgaggaggtggagcgagaggggtggcaggttcgattttgcaaatcccacccatgcaacaatgccgactgccagaattatccatccaaatatgtcatacttcagatcactggtcttctttttcttctgagtatttgtcgaagccgaagttgaagaaccagctgttgctgctgcctgctgctgctgctgctgaccaaaaccatgcttatggaatttctacatgcagctcaggagcc

SEQ ID NO: 42111 - DNA, 471 bp, Glycine max
  Clone ID: jC-gmro02910034g10d1
gccacagcctttatagacaaaccaaatgcttatatcaacacaaacacgtatacagaaagaaaccacttgaagaaaacagaagaaaacaaaactaacaaattggaagtggagcaccattccactctccaaggcattccaaaagtggatcaatgatcttcccttggcacatagcagtaaaaactttgtcacactcttcacccggtgagacaaccctttcaccagtaagcaatgctgtccccaactcctctctcacaaacttgtacaaggggtaagacctgcattccttgatcttgttgggaatagcacattggtcattctcatatgcaactcttgcaccttccacttccttaggcaaaagggtcttcaactcctcctcaaatgttgcgatcttttggaagattgatgtgttcgtgttcgtctcgttctccccattggccaatgcatagtccacaagcacttgcctcaggtttt

SEQ ID NO: 42112 - DNA, 330 bp, Glycine max
  Clone ID: jC-gmro02910034g11d1
aaaggatcttccatctatttactggggaaatgggtccaaggtaaactcaaaaacactaactttaagttctattcctaatttttaacgattctatcctaaaattttcaccacatttaagtctactactttttggcctacaaattgtttggatgattacttcggttcccgaaaatcgttggccaaattttgccccccccaaatcccgaaggggacaagccccacattgaaacccgtttctccaaaagcgacccacaaaacaagggtacaatcccttggccatggttttgagccccccccttaaaggaagcccatggaacaaaagcctttttt

SEQ ID NO: 42113 - DNA, 366 bp, Glycine max
  Clone ID: jC-gmro02910034h01d1
gggtaacaagcgcctctccggaaaaaattttttttgttcccaagtgggaatttgggagggacaaaagggtaggtcagaacggtcaagacttatttcggggttgcttaaacaatagaaattaacttatccttttttatcaaacactttgggggtgggtttgggctaaaaagcaacaaggaaggggcatggtttcaagcaaaaaaaatagatttggggatttttacaaccttcattaagggattaataaaactttaagatttgcaaagcccgccttggatagcaaggccaagtgcctgatggggggggggaatcagggggggcaattttaaatttgccataggggaaggttcaggggctttttcccgc

SEQ ID NO: 42114 - DNA, 230 bp, Glycine max
  Clone ID: jC-gmro02910034h05d1
attgctatacttttttttttttttggcttcattttttaattatttaattaaagaccaataaaacacctggcacctataaaacccaaaaccaccctcccggagaaaaacacgaatctgaaaaacaacaacacacaacagacgagccagaaaaaaaaacacaaaagcccggactgcctaaagagagagcaaacacaaataaaacgaagagcccccactgcctgctttccacc

SEQ ID NO: 42115 - DNA, 391 bp, Glycine max
  Clone ID: jC-gmro02910034h06d1
ggttaaaaaaaaaacaattttcattgctcccctgatttatgaataagcgtattttatttcccggggaagggaaaaacaaaatacctgctccaggcccccaaaaacagtattgggttgtattatctgcactggggcgaatcgggggaatggataaaagaaaaaaaatctaaaaatttggatgggtaaaagaattttttggccggacgcccgggattcaactgaagaggcccagggggggccaagggtctttttttccatagaataaactttttccgggggtgcccattaagaataaacgcccttggggcccccccaacggtaagaggggccaagaaaggggttatggtttccttctttggatcgctctccgatttattatcataatacgaat

SEQ ID NO: 42116 - DNA, 563 bp, Glycine max
  Clone ID: jC-gmro02910034h07d1
agggttaatatattgaaattgatgattaaatacaagctttagatccaagaatacaaacaacaaattatttccttcctccaactcccaatacaaacttttatagcagacatgagattattccataaaataaaaatatgatacaaacttacaagtgtctatatggcttcatagtcatctgctgcaggggctgggggagcatcagctagagcagataacacaacaaaggcaccaaataagattgtgataatggcagtgaagttgacaagcaaagcctcagaaccatatttgtccaatcctgagttctcaaggaaagtgagcttctccagaaacccaagagcagcagtgcccacagccaagacaaatacaaacagcccaaatagcgcgtgccaaggaagtgaggcgcgtctaatgtctggagtcccaccagggaagaaaaagatcacaaacccatatatccactgaatgccataaaggacaataaccccaattccaagccatgaatgcaagctgtagagattggcaatcccactttcattgtgaacttgaaggagtataaatccaac

SEQ ID NO: 42117 - DNA, 542 bp, Glycine max
  Clone ID: jC-gmro02910034h08d1
aattcagtattcctactaaatatgaagtttaatactatttgtactccacctaaatatataaaggtgggttaaaaaaatccacttgcatcgcaaaaatgggtgcacatctgtaatagcaaacaagaaaaaacacatttcatctctgcgaaaatctcaaattcacgtacccaattaagcacccgagcctataataataataataataataagtaaataaataaataaaaagacaataatgtaactaaaatctacaaacaaacacggaggaaagcaccaacaccaactctgtcgttttcgttaaatctagcattacttccgacaacagcatgaagtggtctgttttccagagagcatttcagccctttagctcaaaacccaaattttcttcctttaatgtttcctctttcgcttcttcagtctattggttgttctgctaccattactagagcccactacttgctctccagttttatcttctaagggtaatgttttgatttcatcatagaaactttctgttagaccttgcaacccatttcttgatt

SEQ ID NO: 42118 - DNA, 536 bp, Glycine max
  Clone ID: jC-gmro02910034h10d1
gtaatatacatgatttttttttctcaaatgccaatgatgacaaggttctcagagaaaagaaataaaagcaaaatataacacacaagacttcgatattctactttcacagttaagaaacatcgaattcaaaggaaggagtaacttgtccttaagtcaacgtacaggttactcatgcgactcagaagaatgaaaaaataaagatgtttgggacaaagcccagaaaaataatttggtacttcaacttagaaccacgtgtaatatgaaccatcctactgagaagaaaacaaaagaaaggaaaggaacatgacaacgaacagaagtgacataactaaagaactaataaataataagctcatgtcagaaatctgcaaagacggtgaaaagatcaccattgatgtaatcattgtcgaccaaactcaccaagaagtagctgcccccaaccttttaaccaatttcctggatgcatcaccctcagggtacaagcttgcccatcctcttgaccaaatatcaaatgccttatccttccatacattgaa

SEQ ID NO: 42119 - DNA, 534 bp, Glycine max
  Clone ID: jC-gmro02910034h12d1
ccaataaattccatgtggtttatagctattatactttggatcatcatactttactgttttcttagaatacgagactgacacattacataaccttcttgagtggtcatgatactaatatcttcttacatataactactttgagtggtcattttgttctcacattacataccctccactgggatttttgtggtagctaaaattattgtttatttttctccaattgcttttgacacaatctatacaattgtacattagtggaaaaggtaaaacgaaatatatttatttttctttatttgtacagaactggattaacatcttggtttttccactctgtcaaatgttgaaatttgactaaaaaaggatttcagaaattttctaagtgctggctttggctcgctttactggggcctgaagggaatttagataaatggcgtcctttttgtccagtccatcaaacagataactaaaggtggcatttggatgtatctcccagtgccaggagtgacctttaagtcattattttccaaacaactt

SEQ ID NO: 42120 - DNA, 466 bp, Glycine max
  Clone ID: jC-gmro02910035a01d1
aaattatatattgcaaattgtgcacatgccaagatccagtataaaatgagtcgcacttctacaatccagaaaaaaaaggggtttgggttggttggggtgggggcaatgataatactatgcatttgaacatcgatttgatccgcttgataaagatacccttctttcaaatttagaattcggaaaacacaagccagaacatcccaatgggaacatcacgcttagccctacgaatcgagttactggcctgaggtatttccaactcaagatgcactgcctagatatccatggctctgaaagaattttcgagtagattctagtctttaccaaaatcagcactgtattgtgcactggattcaagttcctttgtctcgttaagcttctttacagcctttataaattcttcatggatcccataataacgctctgtccaaaatgctgccattccagcttctgtgcagacattttt

SEQ ID NO: 42121 - DNA, 546 bp, Glycine max
  Clone ID: jC-gmro02910035a02d1
catccaaatatagtaccaattttattcgacaacttgggaaattacatttgagtgacaccaaacttgtaatagtcaagatgcccaactccacgacagcgcttattcacggggcatacaaaatacaaaatagcaacagctaatcatgaaagaaaaacatacaaacataaccacagtaataatatgaaaccagtgaacaggatttgaatcaacgcatcagaggagaggtttctatctgaccagaggattgttgtgagaaaaataaaaaatgaaacccaacacaaaggcaaagtcccgcctgcacaagggactaatatgagctatcctatgatatctgatcacaatctgagacgatgtggtttgagagtcttgtaagtcactggctcagaaggtggactagtgggcttgctctgcctcccccagtacgatttgcacggaacgtagttaaatgaattcgggttcggacaatgtttctttggtttgtaaaactggtagcattctttgggagacttttggttacgaagccccggaatgcattttcctgacaca

SEQ ID NO: 42122 - DNA, 344 bp, Glycine max
  Clone ID: jC-gmro02910035a08d1
gactgggaaaagaattctcagcttattcatttaacatttatttaagatatcttatacattgaaactgtcatatcaaggggccatccttacagcaagcatgtcttgttaagacaacactttgaacccatgtcagccagactaacatctgggtatatatagaactctcttcagactgcaaaatcgcattattttgtgcagcctcatgtgctaggatagctttctagccaaagtttatcccctgagctaatggtagttcacttccataattgatggtacatgtagaacgccgcatgtattgcttccatgagtcacttcccgcttcacggccaccacctgtcgccttt

SEQ ID NO: 42123 - DNA, 534 bp, Glycine max
  Clone ID: jC-gmro02910035a10d1
aaataaactgtcataattaaccaaatagcacatgtttttgacatttaacagtctattacagaaatctagggtccttcaaatcctcaatattaaaactaagacgccaatagggtcagaagtctcaagttcaattaaaaagaagatcaaatataaaacccaaatgccttttttggctaatgtcaattttactagaaaaacttggtagcactcaccatcatccacaacttcttcaattgcaacaatcagagcttaccgagacaaactcttgctcctgctcctgctcctacttggactcctgctagcactgcgttttttggggcttttattacgcggaggcaatggagacctggacctggaccgtgatcctgataacgaacgggaccttgaccttgagcgagaacgagagggagatcttgatggagattttgcaggtgaacgctgtgaagactttccttttggagaattagcaggtgaacgctgtgaagactttccttttggagatttgctttggctccggtcccgactgtaactatg

SEQ ID NO: 42124 - DNA, 526 bp, Glycine max
  Clone ID: jC-gmro02910035a11d1
aagacaaccataatttgcactataaaatccgacaaacaaaatttccaaattgtctgcataattatgataaccttaactcgcaaaacaaaaaaaccaaagatatttagttcttgatgggcatacaaaacaaaaatctaatacgaaaatatgaatcataaagtttactgtgaaacacccagccacttagaaaagttgtcgaattctgtataatcagaatctgacaccatagtgtgataccatgctttcccagcagacttgatggcagaagcttcctccttagagacagtcttcctcttcttgtcgagctttctccttcttggccttaacgcgctgagctttagcaagaagagccatcctcttagcagtcttggcataaggattcagcttcacatagagttcaggttcttaggagggttcttcttcaacgtggccttcttcacatccttcttaatgggcctaacaacagactgaacctcgtcagaattaataatcctggcaagatcagagttaacatctttgggcctgg

SEQ ID NO: 42125 - DNA, 509 bp, Glycine max
  Clone ID: jC-gmro02910035b01d1
atattaatattggatttgattcaaataatgaaagcgtaattgtgaagagccacaaatactatatttaaataataatccatgcgataagtatcaaatcatataacaactgaattctacgaattcatactaactacggaataccaaaacaaaactggggagccaacactacaggaaagtttagaaaataaatattaaactttaagtatctgctagagttgccaccctactcatcatcagcaaatttggtctttttccctgtgccttccgcagcaaggttgggtctatttccccgaccccttccaccaccacccctttcaccaaatcgaccaccaccacttccaccaaatggaccgtcaccaccaattccaccaaatcgaacggcaccacccctagcaccaaatcgaccaccgtcaccacccctagcaccaaatcgaccaccaccaccactcctaccaccaggacctctacccccagaaccctgattatctctaggtttggcttcatccact

SEQ ID NO: 42126 - DNA, 233 bp, Glycine max
  Clone ID: jC-gmro02910035b02d1
atatcttattcgatccaaataatgacagcgtcttggggaaaatcctctactcctctcttaaaattataatctatgcaataagaattaaatcatatatcatctgaactctacgaactatgactaaccaccgcatttccacacaacattcgggaaccaacactacaggcaagtttttaatctacatattaaacttcatgattttgataaagttgtcactcctatcacatgcacca

SEQ ID NO: 42127 - DNA, 533 bp, Glycine max
  Clone ID: jC-gmro02910035b04d1
aaccaacaaagtttactcatttggaaatgaacattgttcaagaacaattagatcaaagctcaatgcaacaccaaggatgccacaaaaccctcttattttgaaacctatcctatattaagcctctacaggagcaagagctcgcagctctcattgtaccttaatccactgttggctgaaacccaaccataataataatataaagcacaaacttcaaaggaacgaatgatttttgctcaagcatcatcaagagcaaggacaccagggagttgctttccctcaagaagctctaagctggcaccaccaccagtggagatgtggctcatcttgtctgcaagtccaaccttctccacagcggcaacggagtcacctcctccaatgatggttgtcactcccttcccactcagctctgccagtttcttggctatagcctctgttcctgtggcaaacttatcaaactcaaaaacacccattggtccattccaaataatggtctgagtcgtatcaatgcttcaccaaatgtcttgatggaatca

SEQ ID NO: 42128 - DNA, 448 bp, Glycine max
  Clone ID: jC-gmro02910035b05d1
ccaacaatccttgcatcatgttcgaattataatttacataattattacaggcggtgaataatagataaaggtacagttaaaaatgcaaaaagccatgaagctcgagacatcaaaacggggaacaaagatgaaacttgaagggacaggacacacaagtgaatagaacaagaagtcatatttttcaagttgaagctcaagggtaggtttcagaggctgggacagccgcatatgaaccaatgaagacgtctccataaatcaagccagccaaacctcctccaatcaatgggccaacccaatagatccagttagcagcgaagtctccactgaccacagctgggccgaatgagcgagctgggttcattgaaccgccactgaatgggcctgctgctaagatgttggcacccacaacgaacccaatagcaatgggtgcaatgatacccaatgaccc

SEQ ID NO: 42129 - DNA, 538 bp, Glycine max
  Clone ID: jC-gmro02910035b06d1
aaataaacgatatactacaatgcacaagttctacatacatgacacatccttatacaacgtttagccatgaaattggaaaatactgtacagtaagagatgtttctttgccccttaagttattagccctacaactaagtgtgtagaaagtcacaagaagtccccttcctgcaacgtccactctcataatacttgcagactactctttgtcccccaaaaggaggcctggaagaacctcctctgccaaatgatgactgcctattccaagatttaccaccgtaaccagaatctctaccctgtgcaccacgatccccatggttggggaacctgtctccattatgactttgctcacttccccacatgcctggattcccaaccggtgcagtccaaccaggattggcatttccaggtgctagcccctgaccaggcccaacccaacctgcatttgcatttacatgggaacgtccttgaccaggtccaacccagccacctgcattcactggaggtagcccctgactaggagcagcccatcctggatttg

SEQ ID NO: 42130 - DNA, 505 bp, Glycine max
  unsure (1)..(505): unsure at all n locations
  Clone ID: jC-gmro02910035b07d1
atgtaactagctaatcatattaaatggtcatttgcagagaagacaattaattagtacaagctacttcaaataaatttcagtgactacagtaatcaaagttaaatccccatggttccaaaaacttnctcaagtgcaagcctgtgcagttatagagatagcatgacaccaattcatgaatagagtctaagcttctctagtttccaggtacacactatataacctaccttatgacagcaaaagaaaaaaataataacagacccttttctcttctcctaacagaaataatatgaactttaccaacaccttcaaaccccagctactcacacttgatggaccggtatatgtgacgaacaaagagcagggaggcacggaatcctacgctaccgagcatgaggaagaagccatagcagatacaggccatgtaaccaaagaagaacgaagtttgcataaaaccagacatatctgatcgtgcatagtagtaatacaagcaatagccgtagatgaa

SEQ ID NO: 42131 - DNA, 318 bp, Glycine max
  Clone ID: jC-gmro02910035c03d1
caatctcaaatttcatcaccatagataaggaaaaaaacttttggtataccctttttttaccagattaaggcctaaaaggaaaaattacatatcttataacttctcatggattctcattaatatttatatgaaatttttaaataactacatcaattagcttttatcaccattcaccacaaatatgataactagaaactcaacattctgggtgatctaaaaacttcctttaagtaaactgaattactatatcccaccttggatagatcaaaattaatctgtacctacaaaacctcccgtttataaccatacaatctctac

SEQ ID NO: 42132 - DNA, 86 bp, Glycine max
  Clone ID: jC-gmro02910035c08d1
caatactctcttggggaatggtgataactacaaaacacacttccccctttcccaatatttcaatttttctcttcctaatctttttg

SEQ ID NO: 42133 - DNA, 301 bp, Glycine max
  Clone ID: jC-gmro02910035c09d1
gtcaaaatatatattgccattgggtttgggtctgtaacagaagcagcgaagcataaaaacaatgcatccaaattaaaacccacaacggtactggtgcattttgaacatcaaacacatcaacagaaaaagaccacaagaacaagaatctgaagtagattctagtagtcttcgtcctcatcctggccctcaccagactcagcacccactttttcataatccttctcgagggctgaaagatcctcacgggtttttgaaaatttacctttttcttaccttacaccccttcccattgaccaaaggc

SEQ ID NO: 42134 - DNA, 494 bp, Glycine max
  unsure (1)..(494): unsure at all n locations
  Clone ID: jC-gmro02910035c11d1
ctcgatatgattttgttacacagattcctcgtaaggtgaggattaccacaactagaacagttctatgtttcccagcctaataatcttaaaatgggtatgtacttcaccaccaacactcacttccaaagattgagatacataatttaccagtccaacaaacccatgttgactcaagcgaacacgcatagggacccaagtaaaaactagtacatcactaaagcatcggacacataatactgctaaatacaatccctcatttgtggcgtccaatctttgctaattcgaagcagggacaggaaaccgacctcgtcctattgcgaagccacgtgttccatctggcattcttggtccagggggtggcttcgatgcttcggcagcatgagttgatggtgtacttccatggcccattccatttccagcacgatatttatgttntcttgatcttccttgatttctatacctctgcccacctttgtccttcgacagatgatccc

SEQ ID NO: 42135 - DNA, 322 bp, Glycine max
  Clone ID: jC-gmro02910035d09d1
cggggggaaatctgaatcaaacccccaactttaagatgaaaactacaaaattcttggtggaaaacaaactgccaagacaattttagatgggaataatttaaaaaaacttgcccacattgggggtttaaaaacctaacttaacagaaagtgtgttgagaaaatttttcctttatttggaaaactgcgaatggcctaaaaacagggattaaaattcttgactggttggaaagcttggaccacggagtttggacaaacccctcggttttaacccttatatatgcatgcacaccctaatagacctgttgagcttggaccaaattaa

SEQ ID NO: 42136 - DNA, 479 bp, Glycine max
  Clone ID: jC-gmro02910035d10d1
gggggagggtgccatttgcatttttatcaaccatgtcaaaaaatgttttgagcctagtatcaaagctttggtcaaaaaatatgaccccagaaattcctttatttggatctttggtaatggaacccccctgaatacctttctgcctagcaagagtttcaaaaagcttttttgcataagcctcaaactttttgttcaaccctaagcattgggcaaagagagcccgaggaaaatagccctcaggggtagcagtaagcttgtgaaagcgctttttcaccttaacccattctgggccaccattggttttgctgataaacttgagccccgggagagcatgacccactgcagactttgtcctttcaaagggtttgggcgctggttttgaaaatgatgccaaacgctttaactgcttcatgcgaatggcagcactctgaaccacagaggcaccaaaggatgtttttttttcaaaccttttttttccc

SEQ ID NO: 42137 - DNA, 545 bp, Glycine max
  Clone ID: jC-gmro02910035d11d1
aaatatcaattttgtactgtgtttttttttatagttgaccatcaagctgtagatacacaatgccgtgttgaatggtttatagacaattttagaacaccaaagtacttgatgccttaagttaaatttaacaggcaattcaaaatgatagaaacgatggaagaagatggatctaacatcgagaaggcctatcataagttggaggaagagaagggcaatactcattcatgttggcatatggctccaaggtgttatagccaggcagttccatcttgtattcaccaagaatctgacagaatggaatccggtcattctcattgttgcaccaacttggtaggcgtgtttggttgtcctcgaaaattctgagcatgtatgcatcgcgaatggtgaactcggttacttgaatggaattagcaatgggaccaaaaacttcagcctctttatacatagaaaggataaaggcaacacaagttgtcgactttccatcactgtatacccattcatcttgttctggaatggtgagtaattcatcaaaggtattccacgct

SEQ ID NO: 42138 - DNA, 480 bp, Glycine max
  Clone ID: jC-gmro02910035d12d1
atgtaataatagttgtacctatattatttacatgtaaaaatacttgcaaacacattttatcttttgtataggtagtggcacctatatttttttctttgttaacctaaagaataaaatcttagatgcttagttggactacattaaccagcccaacgtaagagtttcattcattatgtcccaaaaagggatccatcattggagaatggaaaaggcaaaaaaacttattttgggggggagaaaataactatggtggcccttaaacctcaattacaatttaaccagggaccctgaaagaaatattttagaagaataataaaaaaaatggtgaaaatgaatgtgaaaaacacaaactcagctcagctttttcttctccaggatccaattatggactttgttgacatattgctcatttattttcaaatgtaataggcataattttctgtaacccttcaagatatacttatctatgtaatcttcata

SEQ ID NO: 42139 - DNA, 515 bp, Glycine max
  Clone ID: jC-gmro02910035e02d1
aatacaaatgtatctctcattcaatgatagcaatacatagagtataaaccaaggcaaactggctgagtcaatgaaaagcattaaggttacattctgaaagaaagaaaccagaacaaggagttcaatttgaactcccattcttattcttatttatatacatacgatatctaggaaaacaaactcaccatgtctcactatgaacttatatatatttatgtacatgaactaagaaaaccatctgaatgaaagggaatagggtaaaactgcctagatgtcacctaagataggggagatactcagtaaacacaagaatgttccttcaccttagaagaaaatgcatgaagaaccatcctgctctttcttcaggtggctgacaacagaacaaagtcttctaacaaacaaggctagtgaaccaatgtggctttacaacatgtgtttccctcatgaccggttgaacactgccaaattagtttgctgcgcctaaacacaactacaaatttataagctacatgatt

SEQ ID NO: 42140 - DNA, 69 bp, Glycine max
  Clone ID: jC-gmro02910035e03d1
aacatagtacttatcaccgggggacaaggagcggatacaaatcaaaccacacattaataaaagaaagac

SEQ ID NO: 42141 - DNA, 148 bp, Glycine max
  Clone ID: jC-gmro02910035e09d1
acaccacatttttataatgggttgaaggggaacaacaaaaaataaactcccctttaacgttgtggactaaagggaggtaaatttgtatggtttggggaactaattgagacgtttttatctaaattgataaagcgcacaagtgttacta

SEQ ID NO: 42142 - DNA, 443 bp, Glycine max
  Clone ID: jC-gmro02910035e10d1
aagaaacgtccaaagtggccttattcaggggtaatatgaacattaaagtggattcgtcgtggcataaatacgatgatgtaaaagtaatactatccttgtaatattacattacacacaatctgcacttagtggacactggatggatgctatatcattacataacacacgaaggctgcgaataagtagctaatacccttttcacgaagaaaagtgctggccctcgcacgcggggctatcgtcgaaattcttcgatggatacttcgccgtgaccataccgacctcgaagacgatatcatcgccggaggagcggattccggtgatggaccaccacttgaagaacgcgcgaaccctaatcccctcgagttcagcgattttccccttcacgatcttccctgtgatggtgtcggaataggtggcgaccgtaattgtccggcgggagcgtg

SEQ ID NO: 42143 - DNA, 364 bp, Glycine max
  Clone ID: jC-gmro02910035e12d1
acactcaaaaaaggctggctttcattgaataaaaaggaatctacctcttgatacaattattagatcactctattatttcactcggtagtaagggagaaaaagccctttcacatcattcactggggacaacccttcaaaagttaaaaagaaatcacttttaggcttaaaatacatactgaacaggggacaattttgaaaaaccaggccatggtacttgaatgttgaccatagacccttcatattcaaaatcaacttttttgccatcaattctacaagttcttggtttctctgaggcataaactctcatctccccagggcctcttaaaccaacttcaaccaaattctgaccctcataaaaagctaa

SEQ ID NO: 42144 - DNA, 239 bp, Glycine max
  Clone ID: jC-gmro02910035f01d1
cgggtatatacctttattttaaagaaataataacaaaatataacacacataatgaatctcatataatgctatatttctttcccctaataaattatgtaaacacgaagatgttttaactataaaatcatattatatcactcaactatttcatatgaaaggttaacccatatctaaattttatcatgaacattaaattgaatatgaatatcatctccacttgcatattcattcatactatt

SEQ ID NO: 42145 - DNA, 243 bp, Glycine max
  Clone ID: jC-gmro02910035f04d1
ctaaatagttccaatcatagggggaacgggccaagttaaacatcataccaccctctaattaatgaaacccttaaaagtgtactaaatcacaggctcccccctcattcaagcccttgtccacatgatgcttaactacccaaaacaaaaaacactaccactgttctatttctttacggaatataacttcttactcaccatttattctatcagcataccccctttggtttatgaggtccactctca

SEQ ID NO: 42146 - DNA, 245 bp, Glycine max
  Clone ID: jC-gmro02910035f08d1
cagaaattaccacacctcatttcaatcaaaggatcaaggagaaaaactgaatattaacaccccacaaacgttgaatgctaaagaatcaggacatgctatggatacccaacaaattatacaggtctctaccttcaatcaccgggtgcccaagaatcaataaaaaccacttcctaatccgcaattgactggcggacatcaattgccgagataaaactttgcaaccaactatagagcatggtttacaa

SEQ ID NO: 42147 - DNA, 541 bp, Glycine max
  Clone ID: jC-gmro02910035f11d1
aagaagggtcaatcaagatgattcttaattcttattatgtgcaatcaacatcccaaactccagatatttattacatgctgcaataatctaaattgaattgaatagttactggggggcaattagcgtccccttgccaactccacacaatatccctgagcgaaggtctgacttggtcctcacagaaattaaggtattcaagcgtgtctccggcggacttggagaactcgaccaccgcgacctccggcgccacctcgaatacctccaccgtcatggccagcttccccttcctcccttccgtcgccccctgcatcctcaccatgaactccttcttccccgtcaccctaaagttcagcttcttggccaccccctccagcttcgccatcaccgccgaagccgaaaacttggaaatgaacattgacggcgaccgcttcctcgtctcaaacaaattcctcagatcgaacccatgcgacaaggacgagattatctaaaagcgttgtaagacggacgagcaggcttagcccccgtcaactccccatcctcg

SEQ ID NO: 42148 - DNA, 251 bp, Glycine max
  Clone ID: jC-gmro02910035g01d1
attcaaataaatttattactgagattcggggaagtaccttttagagaaaaataaaacaaaaatatatgataataagaaaataagaaatatgaagctaacatgtggtccacctaaataaaatatctttacatgatatttagataccgataaaataatatattaacaagtgtgtattacatatataaggatgacccttatcaagtcattaaaaacaacagcttacatattatgaacataatcagagatcgcta

SEQ ID NO: 42149 - DNA, 350 bp, Glycine max
  Clone ID: jC-gmro02910035g03d1
gtaaaaaaatttccttcaatttttaaaaaattgtcttctgcagacttactgatcaacttgatccgcaagtgtgcgaggaactaggggcatttttggcatattttaggaatgctgggtgcacctagcaactccccaaaattttgtggcactaaagctgccagttagaatttcaaaacggtccttggcaaattcttcggtatgagctacaggagaagaagataagtatctcattgtgtcaattgagtgagagcctaactcgttgtacgagttattcaacactttaagtgacttgagcaatctgagaggccccaaagcagtaaaactaccaaaatttattatgactcaaattt

SEQ ID NO: 42150 - DNA, 316 bp, Glycine max
  Clone ID: jC-gmro02910035g05d1
cttaataaaacattccccagggggaaagaccaatataaacaaaaaacccccatctatcttttcaaaccttaaaatgtctccctctttttcgaacacccccatataaaccccatgatatcatgctgcttatcaaccctctacttaaaacgttccaacttaaaaccaactttatggtcattaagtttccctcaatccttattccacacacaaaatccctttccttgatgcttaaccctctcaccctatccttcaaaaccctaacccctccaacaaaaaagatattctttacctctggcctaaagaggacttatctttt

SEQ ID NO: 42151 - DNA, 397 bp, Glycine max
  Clone ID: jC-gmro02910035g07d1
atcaataatgtttaaggctttggcatataatgctatttcattttttttagggaactacagaagaataaaactactagaaagaaaaaactcttgaacaatgttcattaccctggaggaaaaaacagtacaactattgggaacaagctcgacaaaacagaatgaggaaaataattttagcactctagaaaactagctcatggggcttcactcctgccttcaaggaaaacctagcacccaagtaagacttgagctctggaacactctcaatggcctttaacaaagcagtgtccacggttttttggtcatctttcttttcttggggaagcacatttttctccttcctctctggcttaaagaattcgccttcgccctttgggttccttttgctaagcttctt

SEQ ID NO: 42152 - DNA, 477 bp, Glycine max
  Clone ID: jC-gmro02910035g08d1
agcacaaaattttctggttcttattacaagagcatgatctaccagcaaagttggaaatatgaataacaatagagcccacttattccaacacacatacaacaaccatacccataagggatcacacgtatgtagacagagaccacatggcatagcataactaatcaaaaaacatggcatagcataaataatcaaaccccaaaaaataaatgatacaagattcatccatgaacaagacaagattcttagctatttataaatgcacaatgcttcctgatctctccttctgtccctgtcttcacattaattcttcccattttctcgatggaggttgcaaactcagcaaagaaattttcaactgacccttcaagcaattggatgatttgtgcctttgtaactgagttagtcaataatgcagcatctgactcaaatagaccccttctcttattaacgtgactatagtagctaagatcaaatgtc

SEQ ID NO: 42153 - DNA, 536 bp, Glycine max
  Clone ID: jC-gmro02910035g09d1
ggattagaattttcctgatacttaattattatctggttataccacacgttggtttccttcatgagtacaaaccgaaataaaaccaacaattaatcttgttttattacaacacacaagcttgacatttcagtacaatagtttattttcaagcaatgagattctaaaaccagaaccacaaacgaaacaccgttgagattctcaacgagttcactcctgatcaagcagagatatcagagactaaaagttggcaaagttcttttctttcaaagtttccactgtctctctaagactcacttccaaaggaataaatttaatccccaaggtctttgccttttctttggaaacctgaaatgttggtacataaggcttatcgtctgcagacttttctggaatttgatatgtcgggtactgatcacgtaaaatcctggcgagttcaaagtattgtgcctctctttcaactaaacaatatcttgcactagctgaagcaatcttatatgcctgaatatgggcgtttgcaacatctttacattgatcca

SEQ ID NO: 42154 - DNA, 531 bp, Glycine max
  Clone ID: jC-gmro02910035g10d1
aaacaagcaatggtttatttattattgataaagaaaataacaatggttgtgtttattggagcagcaatttagcttccccaatcacaccattaacccaaaaaagtggtgtcaagaaagacaataccaaaccaaaccgcagcagcaccaattatcaaaatcacaagtcagaggaattttcttcctcctgaggaaagcgaaggtgctttcctttgggtgttggcaaacccttcaaacgcatcacatcagactcagcacaacattctaccactttctccacaatctcatcctcactatcgtacacaaacctcgtgtgcttcccacaacccttgttctcattcacactaatgttattcatcccagcacatagctcttcaagtgacaaccctccaacataatcataacactcttcagcatcctcgcaataatcttcttcttcttctttcttcttcctcttcacccatttcctcatcgtcctcatcttcgtcatgcgtgctcgcattcacctgaatggaccaaatggaagcaccatca

SEQ ID NO: 42155 - DNA, 538 bp, Glycine max
  Clone ID: jC-gmro02910035g11d1
acaataataaatccatatttttataattaaaagtagtagattacagcgatgcacttgagaaacatattaagtggactaattctccctggtcaagcaagaaaaaaacccagctatgacccaaggtagagagagattatacacagaatactagtaattaactaagactggctctgcaattgccaaaaactccattgcagtagcagccacctgagaagacactaagacctagactagaccatacataatgaagattaatacccttacataacaacataggacactaagaaaacacggcttcacagagaatcccagtcgatctcataagaggggtacttctggagattaaaattatccgaatcaccttcccactgcggctcgctgacgtcagcgaaagtcagaaccgaaagcggcgaagaaccttcagaagaggaggaagcagcttcgaccttacagagttgttgtcgttgttgttgtcgttctctggcggagaagcgagtttgggtcgcgttttcctcggaggcttctcggtcttcccctg

SEQ ID NO: 42156 - DNA, 566 bp, Glycine max
  Clone ID: jC-gmro02910035g12d1
acaaagtcaatttttgaaattgttattgttgtaatagattacaaggtactacacaaaggcatattttgttaagacactagtagataccaaccatatatcaatttgataattgatgggcattaaaaaaaaccacttgcattgtttctgtctcaatgatcaatcttcgtagaagcctaatttttgtagcttcaaatgatagcatactaagactccctttaacatccttggaattcatgaaactgaacttttcctgtaaaggcgaagggatcaagtgagtgtgacgtttggtttcatccaaagcaaactcaacaaactttagataagatactgaacaacttggtataaaattactcctcctcctcctcaaggcacaagtaaaactgactatcgcttttaaagaccaagagttgtgaattttcattattatctcattaacaaactcatgtatagtgaaaagaaagtacttgtacatccttctccaagtactttacacatatgatctagtgttgcctgttctcgttgattcttttctgctttagaacctccattcaatggagttatgtccc

SEQ ID NO: 42157 - DNA, 202 bp, Glycine max
  Clone ID: jC-gmro02910035h01d1
ggcctaaatccaagactatgtaaaatccaaaaactaattttgtcaccagacttaaatgaaatgggaaataaattcatcgtgctctaaagaaccttgaatgacaaaaacaatccataaacctgtaaatgattacccacagtaaaacttatgaagtgaaaattttaagacgccaaattgggttgctatctttaatcttaatacc

SEQ ID NO: 42158 - DNA, 486 bp, Glycine max
  Clone ID: jC-gmro02910035h03d1
caaatcaagttcacatatttccaaatatacactggtacaaggatacacaaaataaccacacatacactgacaagcattatttgtgttactagaaagtagattgatccaaaagggtaaccacacactccttagatagagatactgttgggaattcctctgaaagtcaacccttcctcacttgtaggaaggagcaatgtgtatggcagctgaactggtccatagcgatttttcttatttgaatccttgtttctcgctgtgatttttccctcaatttctgccagcttgcttccaaactttttgaatgcttctaatgcctttgaatcagatgtccaattaggattgtctctctccccaaggtagatctcatcagaagcatgccttgacaatatctctatcaccgtaagatcaataatggtttggcgcttcggtgtaatggttctcaaataagccgtttggggactctccaacatctcatcatattttttg

SEQ ID NO: 42159 - DNA, 428 bp, Glycine max
  Clone ID: jC-gmro02910035h04d1
actattcaaacacacaataagtcatgtaatgcatcatagtttatacataagaagccacgcatagcatctaaataaacagcaaaaaattattaatttctagagaactacacagtgcaaatacatgcatatatatagagttctgtagtgctactgaagctaagttattcaagaacaggaaagaaggacttgaaattaaagcaaatctacttgggaacccaaacaacatgatcctcaggtaggaagtggcagacaggaacggttcctggcttaactttgagcacttgaaaggccaaatgtttagggttccattccgacgtgtgagtgtggcacactgctaccgctttaaccctaaccccattagcaccctccaaaggcacagagtaagctcttgtggtctcagttttgtgacagtaaaaaacagcataagg

SEQ ID NO: 42160 - DNA, 383 bp, Glycine max
  Clone ID: jC-gmro02910035h05d1
cccaaaggggaaattggacacataaatttgattttttaaaagcaaaccaagcaaaatttgaacccaaatttaaagttgccttttaaaagggaaaccaacaccgcaacgggaaagccctaaaacttggtgggcttaacaaaaatgtattgaggggttctcccaaacccaccacattaaaacagaatgataaagggggtcttgccaccggagatcaaaaacccaattttgggaacaaaagttgcaaaatgatgggggagacttcaaactatgtccgaaaaacaagctccctaaaaacgaaaacacaagggcaagaaaccaacattttttgtaaccataaaaaacgacattccttgatgaaccaaaccggacgattcacttttttt

SEQ ID NO: 42161 - DNA, 402 bp, Glycine max
  Clone ID: jC-gmro02910035h06d1
agagagggctttacacgctcttaaatgggactgcgacgagtcgactcgccctgggcgcggtgagtccgaacacgtcactcgtgtccaactcgctgggtttcattccatctggtaactcccatgtgaagcagtgaagcaagtgtgccatggccagttccagcgtgtaaagacccagttgcattccggggcaggatctccgacccgacccgaatggaatgaactcaaagttactccctttgaaatccggcacgtgcgggttcagaaaccgcgaaggcttgaacgcttccgcgtcctcccacgcgctcttgtcccgccctatggcccacgcgtttatcatcacgcgcgagcccttcggcacggggtaacaacacacggccgaatcctccgaagtttaatggagga

SEQ ID NO: 42162 - DNA, 508 bp, Glycine max
  Clone ID: jC-gmro02910035h09d1
atacaaaatcatgataatcaatataaatcatcaatataataaaagaacaagcaagcacaacaacaagctcatatctaacccaatggtatgaatctgaaactgaatccaaaaagcaaggcccgagtgtaccatgtattctgaaaaagcatcataatcagtagtgccaacctgatcagcatgtattaactccatccttgcaatctttagtcaaattgtagaacgtttccacgcgtgtctttccacggtaaaagacctcagtatccactgcaactctcatgtacccatcaaactcaacaggctttccattgttgagaagtgtggtctcgttataccactcacttgtatttccccacagctccttatagtcatcaagcagatgcaccttgtaatttgacctcaacttatcaaagtaattataataaggctcatgggggcaatgtacaaatgtctccaggctgaacctccatttagctttcgacagaacatccgcgacgtatatattcaatga

SEQ ID NO: 42163 - DNA, 424 bp, Glycine max
  Clone ID: jC-gmro02910035h10d1
aaaaaaaaacttagtgaatatttcattagccaagactacagggcacagtttgcacaccaaaaacatattacataccacactatgttaaagccacatcttgcaggtcacccttgtaaaatcaattattttcactacacacccttgaataataagcgggttgctttcggctatggagaacatgtactaatgtgtctcactcttttaactcaaaccttaaattacagacagaagcatgttgattgtagtggagcttatgcatgttcatggaatgggacagacaactatttttccagttgcttatgtttgtttccagatgggcaaacgctttaacagtctgagaaaatggaaacgggctctttgtgttcaagatttggctatagcttaccattctcaaaataagggcttagtttttctaaatacgccc

SEQ ID NO: 42164 - DNA, 529 bp, Glycine max
  unsure (1)..(529): unsure at all n locations
  Clone ID: jC-gmro02910035h11d1
acaaagtcattttttgaaattgttattgttgtaatagattacaaggtactacacaaaggcatattttgttaagacactagtagataccaaccatatatcaatttgataattgatgggcattaaaaaaaaccacttgcattgtttctgtctcaatgatcaatcttcgtagaagcctaatttttgtagcttcaaatgatagcatactaagactccctttaacatccttggaattcatgaaactgaacttttcctgtaaaggcgaagggatcaagtgagtgtgacgtttggtttcatccaaagcaaactcaacaaactttagataagatactgaacaacttggtataaaattactcctcctcctcctcaaggcacaagtaaaactgactatcgcttttaaagaccaagagttgtgaattttcattattatctcattaacaaactcatgtatagtgaaaagaaagtacttgtacatcctcctncaagtactttacacatatgatctagtggtgcctgttctcgttgattcttt

SEQ ID NO: 42165 - DNA, 420 bp, Glycine max
  Clone ID: jC-gmro02910035h12d1
actatatgtaatctttaaaagcattcacaaattaatgaatattcatgggatcagacccatggcaaacatatcatttgcgaaataggccaaaggagcaaggatttggcatataattgactcgacattccctgtattgacttgctaacacattcatttatacatattctttttttgccccataaagaaaaatgatagaagaaaaaatccacaaaaaatctctaaatctatttttttttcccgcatattcaaactatatgtcaaagggcccaagactaccggtgttgtcttgggtttgaactacggagagtcacaccatgcaaaaattttgtatatccaagtaaactaagctttccatcagtatttcttatccaatctttgagaactgaataagctgaaggcccaagattcaactctctggct

SEQ ID NO: 42166 - DNA, 474 bp, Glycine max
  Clone ID: jC-gmro02910036a05d1
ggaaagaaaaaaaaaacccaaaggttaagggatcccccggggcaagagagccaaattttaaccccccggggggtttttttccccccccccatttttggccccctgcgggggggaacaaaaacaatggggggaatttggaaaaagaattttgaaatggaaattcccttttccccaacccctttttaggccatggcatttaaaaccccgaaaaaaaaaaactccgcccttccgggggggttctgccccacaaaagttttttccctgggggctttccccccagaaacccttggttgtcttggggggcccttttgaaaaccagggctcccaaaaaaaccaattgggggcgggggataacccccaaccgttttccccgtttttggggggaacccattccccggggggggggccattttttttcgacccccccctttccggggggggaaacccccttatggggcgaaaccccccggaccc

SEQ ID NO: 42167 - DNA, 449 bp, Glycine max
  Clone ID: jC-gmro02910036a06d1
aataatactaacaaataaaattttgttccgaaaatttcctagagtactcaaaaacataaattgattaagtggccagcaacattagacacccttgatactgccaaaagagcccttgagatttagaagtttgcagccacattagaaacaccgatccaattaatcgtttctcctactattcttcccattgcaggaaacaagacagcaattcactaggtttattccaaaagacagatgtgaactttttattcagagaaacaaacattggtacatcctcgggtagataacaatattctgtctttatccatctaattgatgacatactacaagtttaaaccaaattacatgctgcaacaaaaggacttccccgccccatgacttctacaacatgccttgtctagctattaggatcaacaaccctttttctccactacatgatcctaatactaggt

SEQ ID NO: 42168 - DNA, 562 bp, Glycine max
  Clone ID: jC-gmro02910036b03d1
aaaaaaaaaacatctccatcacttcaaaattaattttaaccaaatcaattttattaacactcatccaaacatactataaattattttaatttatttaaaatgatcgaccgttctgcaaatgtaatcaacagaaacccaaactggaattaatccgaaagcactcaattaatgggtccaataatacccagttctcgacagtgcatccttccataccagggtccactaatacagaatttgtcacttgctttgcaaatcctttcttgcacctactttagccacggtcacactaaccactgttattagccacaatggtaaacacaaccatgggatttacaggcaatcaccggcaataaattgcctgatcaatttgtgggggaatctgctttatttcagatccaagttcttgttcaatcctatataaattaaagcgatcctcataggtaatcaagttcactggtaaacccaggtgcccaaacctccctgaacgaccaaccctgtgcaaataagtctctgcgttcttgggaaaatcaaaattaataacaacgttgacctgctgaatatc

SEQ ID NO: 42169 - DNA, 487 bp, Glycine max
  Clone ID: jC-gmro02910036b05d1
gtctccaaagccttcactgcatcattccccaattcaggagacgagtcctcccttctatgatgaacactccatcctccctcaccatctaaagacaaaaccacatcatggaatgcaactaatgctggacgatgtgatatggtaatacatgatgttcccatagccagaacattagcacaaaaacgttcttccatatcaggagtgacagcacttgtgcactcatcaagaatggccaatttaggctgatggtaaaaaagtctggccatgcccaatcgttgttgctcgcccaacgaaggttattaccccaggttacctctgtttcagacgggtaccgatccaatagatactgatgatcaaccttcaatacatgtacaagcaattcagatgaataataatgagtaaaataacatataatcatcagacactaaacattaatgtggcactgagatagaagtaggattagatgtgagtttcacatttttcaatagct

SEQ ID NO: 42170 - DNA, 453 bp, Glycine max
  Clone ID: jC-gmro02910036b06d1
caagaataactttcccataatagtaataaaaactgagcaagtgaacacgtatacatgtgttctccacaccatattctgtaattaaccactaactaatccatgattgcgatgtacaaatcctgattaaagaactttattggagcaagcgcaaaatcagaaaaaggtcttggctcgcaagattattgtgaagaaaaaccgggctgtcgaacacccaaaattggatacagaaatgacagaaaggcgttatttaatgtacagaaactggatctaaatgatgaaccaaaagattctacggaaaggcggctctgataaaaaaacatgaacccaaacattattctagtcaaactcgtgttaccacacagtaacatcagagttgtgtgcatgggccgatccagcattgctgttatccatagagtgacatcacatacattttccttgattaagtaaaaatga

SEQ ID NO: 42171 - DNA, 542 bp, Glycine max
  Clone ID: jC-gmro02910036c02d1
attataagagattgttgtatgaatattatattccaaaaagcaataatattatattgccttgctacactagggaacatcagcaatcacaataatgtgtcgatatggagataaaactataaaagatattagtatattacagcaaactccacagggtagatgctgatgccaccctacatacatataaaggaacatatttttcagttatgcaaggtgtggttggaggagggggggcctttgggtgggcattggtagcacttgacaaatagcccgaatgtgtcaacctgcttgatgaaatttgtcatgctggcccaccctccaaacccaaagcccactaccagaacccacaccaccacaaatgcattcaccacgtacatcaccgtccagttagggataaagaagggcaatttctccgcggcattctgtcttgctgaagcagatctgtatgtgagcatatgagcaaaagcagggatgatgtaaacggtgaagctgaccaaaagggctcccacagctgaattaatgggcccaaagatagggaaaataat

SEQ ID NO: 42172 - DNA, 482 bp, Glycine max
  Clone ID: jC-gmro02910036c03d1
ggaaaaaaccaaattagtattgcacagcacaaaaacataatactatatagcacaaactgtttctttgtagagaatacaaaatgctgcaaagcttacaacatcaaacacagaaaagacatccaaagctgttgaaaaatacaagagatgactcttctttgaaatattgagaagttcactttgttttttaaacttctcaacaacactgtttcactgtctgtcttgtatcactcactgtatataagttgtaaagcggagaagaaagaggatgagctctgccttttgtctcttcactcctttctgctccgggccttccatcttatataatctacctattttgatctaacctactgaaatgcaaaatacacaagggaagaagaagatttgacattaaaatatagaaggaaaaacgtaaagaccctctcctcactgcacatttgtatggctacacaatcttacacaacaaagcaggaaaccattcccat

SEQ ID NO: 42173 - DNA, 516 bp, Glycine max
  Clone ID: jC-gmro02910036c04d1
cttgaactatatatcattctttaagtaattcattccttctccaatacaataaatacatacaaatgccaacaaaggtttctattattacatttggggaagaataaatcagggaaagagagtaatattcaataaaaactttaactataacaacagaatggcaaaaaattacaaaggaggctgaacgcatgttgctggcctcaacacttttgaagcacatttgtacacagggtagcttctctgtgtattcaaatcaacccatcagatcctctcagaaaaccccgattttctaattgaccaataaccctgtcaattcagatcctctcatctaaaatcatggccatcattcgcgtgaagttttgttctgcttgatcaaggcatatgcatcactgtatatagccacaacgtttgagaagactgcaaggactatcataatgacagacaaaaacttgcctgatttagtagcactgtggaatcggtccttaagagtgatggcagctggaaaaatgaatcctatac

SEQ ID NO: 42174 - DNA, 578 bp, Glycine max
  Clone ID: jC-gmro02910036c08a1
caacaactcctttttttacctcttcacattctccatttcacagggttctgatcatgttggggaagaggccccggccaatgatcggaaagttgtcggagttgttggtctcgagaggccgcacggtggcatatttggacaccaccggaagccctagaggcccattagacatgaagatgatgcaatcatcaccaagaggcttaaaaaactatgatcttggtggtgttggtcttggaattgtagtggctcttgataaatccaacgaggttgctgcacgtgaagttttgcccaaacacgccgtttgcacctacaatttgaaccggtccggcccaatcccggttcactacaccaaaaacccagatgaatttgatgtggaggaatacacctatgtgacatgccacgtacctaacaaaacgttcactaaagtatactatgatggtggtgaaggtgaaattcggagacattacaacaacagcaacgttggagttctcagaagaaccgcaccacaacctttgattggtgaggccgaatcattgtaccccacatcgaaatttctcagttcatgtcacttatgcggaaag

SEQ ID NO: 42175 - DNA, 285 bp, Glycine max
  Clone ID: jC-gmro02910036d02d1
ggaaagccagaacaaaacctggtaccgagcccactactagaacttaaaaagaaagatatcttttcttaaactacttccacatatcatatctaggcccgaaaatataggtaggcaaaagggggaagggaagagagaccgcacgaaactccctgttcctgactcacaataacatattgaccatacaattattcaaggaacagagttaccattctatgcaagttaaatggcggttgtaacttgcaatccttctgtctacaacttaaaggatctgccttttttcagggg

SEQ ID NO: 42176 - DNA, 536 bp, Glycine max
  Clone ID: jC-gmro02910036d04d1
aacatgaaacaccaggaaccagctgccataaagttcaaacaaacttccaaaggaaacattagcaaccagacattactgtgtaaatcaataaaatgccacagaaaataattcagacagtattaagtcctacacgacaagaaatgattaataataatcataactataatatgcttttgacttctgctgtatgaagactgctaccaacttctagcccgaatctctgcaaatttcataacagtacagcaaggttaaagaagtgagtcccaaacttcgaagaaagacatggcaagaggttagaaatcaggttcacaagagctccaagaaacatcaggccttttggaacactgaaccaaaattgaacaaaatcatttcatctctgccatgaacttttcatactctgaatcagctgatgaagcaggaggaggcactgatggatttgcggccctaggcacatttccaatgctctgggattgattgtctgccgatgaagcaggaggtgggactagagaattactggcccaaggcacatttgcaat

SEQ ID NO: 42177 - DNA, 419 bp, Glycine max
  Clone ID: jC-gmro02910036d05d1
aaggcaggaactggataaataacattccaccttcatacaacaaacttgctttacaactgggtagtcaatgatacaccaaccaaaacccaaacatcagggcacgaatgcaactaaaatcactggtgagaaccatcaaattttacactatcaagccatgaaacaactatttcaataaaggggctctgcctaggatcttggtttagggatttacacccaatggcaagcacctccaataactgtttctcatgatccttgtgccaaattactggatcaaaaatttcctgctccttattctcaaatttcatttgatacacccaaaacaccagatttttgcagtttttccccttgaagacttccacaggccttctaccattaagaagcttgagaagaacaaccccgaaacttttgacttcccccct

SEQ ID NO: 42178 - DNA, 530 bp, Glycine max
  Clone ID: jC-gmro02910036e04d1
ggagtaaaaagacactcttaagtttggtattatgaaaatcatactttgcaccatgcttgcaaaaagtaaaaccaaattatgaatttacgaatttaataaaatgatgcaacatggcaaagaaaagccctttgataaaagaatcacgaatgtaaaagcaaaactgtcataaaagctcagtgtcgagaggaaaaacgatcacacaatttggtagttttctgtgatcaactgtgttctctgagaatacttaggaggattacccccatttagcggtatgatgctggtgaccttcaggtcactaaatgtttcagttgctataaaacgaactgaaatggggaagaatgctgatgattcggcttgtggaacaacaaattccattgacccactgcggtttgaattatcaatcagaaggacagaccactccaaaaaggaattccttgagtcatacctccattccccatcaatctgtctaacagatggtgcatctcgaagagctggaagaggtactgagatcacaacattccgcaaatcaa

SEQ ID NO: 42179 - DNA, 293 bp, Glycine max
  Clone ID: jC-gmro02910036e05d1
gaatcatcattcatcaaataaagttcccctgctagttaagagcttaaaaaatagttttatgcttctctcaagtctaaaatgctactaccgttacaaagacctttcctgttattgccatgttactgctataggacttctaacagcatatttacctgatacccaagtaagtgacccaaatgatgaacttccagcaactgctgttcttccatatgaaacaaaagaaactttataactcaatttgacaccaatttttgtgaaaccaatattccttggttcaacagagacagacactc

SEQ ID NO: 42180 - DNA, 318 bp, Glycine max
  Clone ID: jC-gmro02910036f03d1
caaacccgcctttttttttttttccgggggaataataaagccgattttctcctcaaactgggcggggcaatgtttatgtgcttagcggggacacccaaataatgggaccaagcgcggcttccgcctaaccctaaagggcttgacccaaattttcttttttgaacaaatgggaacctgcactgggacatgtgacactcatccaaagacttgcctttaccatgattctaaagaaaagaaaaagaccttgcgggcccaggaaaaaaaacctcaatatgttggaagtttaaaggtgggacaaggactatcaagcaatgttgg

SEQ ID NO: 42181 - DNA, 412 bp, Glycine max
  Clone ID: jC-gmro02910036g02d1
accattcattgggaaccaacacgttgattccttttgatccaccaagttaagtttctaaccccaaagataccccatggagaaagggacaagacaatatgactttggccgtgtgcctataaattattttgacagaagccaacgttatacttgaggttggcactcaagaaatgctatagggtaaaaggaacgagttcctattttgaaatgaggcaactggtggactgtctttaggttcaaggctaatcagatctttcatgaactctgatatcaagaacatatagtgcttgattgatcatcaattagaccacgggcgccctttcaatatgaccatgcaaatagcgtgaattagaattcatcctgtacatgcttgaccactaggacttgatttcctggagctcttcccttcgttact

SEQ ID NO: 42182 - DNA, 548 bp, Glycine max
  Clone ID: jC-gmro02910036g03d1
acttccttgttatttctcccctcatatcatgagactagtacaaaccctctgttagtatacatagagatagtactaaacactcccctgatttaatgatggcaaacaaaacaaaacaagaccttctggaacgaagatacaaagaagtacagaagagggtagtagtagcagtactaagcataatttccgtcttgaaacatagcacatcaatggcatgcctcatttgtgtggtagctgactctttcagtgcagaaagggggtgtagcataataacaaaacaaaacaaaacaaagtgtatctgagaacaaaactagagcactaactttcagggctgcaaccatattcatgctatcttgatagtaataaaaaaaaggaaaatacaggtaataaatgactcaaacaaacttaaccagtgttctgcatgccagcagcaatacccttcatagtgagaatgagggtgtcttctaaaccaggagcatattcacttgttgggttcagttttataagttcatcaactgatttgcttgcctctgcagattcctttgatatgc

SEQ ID NO: 42183 - DNA, 524 bp, Glycine max
  Clone ID: jC-gmro02910036g04d1
aagaaagcaagacagaggttatatgttgaagttaggcacatgggaacaactcaaagtagtgccacgctgccaccatacatttcggcactttagtccgcaggatgtttgcaatcggtagtagcttaatatttaaaataatataatcacaatattaggagaaatatatatgaacaaaaccatgccaaaaagcttaacaagcttggtaatgccgacacacaaagaatgggtgaaaatgtgatgggaagagtataaaatctgagaattttacttttggaacccaccaaattgatattgttggtttccaaggtttgagaaaaagtcgtctccagctattggctgtgaaggagtgaatccagacctacccattccaagaccagatcctgaacccatagctctccccatgtaaaatgaaggtggagggcctttctctcttttatcggatccatcactcaatccacccacaatttcaacattcacaacggatacttttttaggagcagttattttgagatcaatcagtccac

SEQ ID NO: 42184 - DNA, 465 bp, Glycine max
  Clone ID: jC-gmro02910036g05d1
gcatcaaatcaacccattaaattttgtgaggaaatcagagatgcattttggaagtcacaaacaagcttattttacatatatgtaacgttacatagaccctacaggatacaaggccatcggcatagcaacttcctacacacgaaaaagttcaaaccttattgcgctgcctacatatgaaaaaccacccatatcagatgtaagcacacatgagttttccaaaggccatatttagaggccttcaatgaagttgaccccagtgttcttcaaccaaacattggcttggatgagttgcgctaccgtgaacttgctggcctcaggtgcagttttgatgatatggtaaccaggccaattcactctcttgctgggaccgggaccggcgccattattcatgaactctccatagtacaacgtgagcaaaaagtctttactttgggcatcccattcagcccatcctgcagggtcaat

SEQ ID NO: 42185 - DNA, 601 bp, Glycine max
  Clone ID: jC-gmro02910036h02d1
aacaaaacttttttataaattaaatgcaaatttaagacatccctcctcagcagcaaaggaaatggactaaaaccctatggctgcttgtgaatttgaaaatctcagacttttaccatcaaaacaaaaaacagtactcatcaaaaacaaacagcaacgaaaatgttaccgccgatcaagaacccagttttgaaggctacggctacatgaaatcggcggacacttcaaaatataactggtaaaacaaacacctaagactctgcaaagataaactactgtaaaggaacaagtttttttgaaaccacgttgatgatcacatgtgctagcaaaattgccaaaatgcaatcacttcttcttggcggcagcctttgtgaccttggctccggtggggtctttcttctcaacactcttgatgactccaacagctacggtctgacgcatgtccctcacagcaaaacgaccaaggggaggatactcagagaaagtttcaaccaccatgggcttggttggaaccatcttaaccataccagcatcaccattcttgaaaaatttgggctccttctcaagctccttaccagatcgcctgtcaatcttggtcaagatt

SEQ ID NO: 42186 - DNA, 439 bp, Glycine max
  Clone ID: jC-gmro02910036h03d1
atagaatggtgtagtagcgggcctcagcatacgaaacataacagatcaatgtcattgatccatttgtgtgggagctagctcttgtggaattctagagcagcataccacattgtacagaaaggtggggccacataataacaaaacaaaaaaagtgtatctgagaacaaaactagagcactaactttcagttttcaaacaaacttaaccagtgttctgcatgccagcagcaatacccttcatagtgagaatgagtgtgtcttccaaaccaggggcatattgactggctgggttcaatttgacgggttcatcacctgatttgctcgcctctgcccattcctttgatatgcggcggcgcaccttcacattgcagtttggatcacggatacgtttcaatgtgtaagcttggacaatattcatggtggtaatgtgagcatgacga

SEQ ID NO: 42187 - DNA, 552 bp, Glycine max
  Clone ID: jC-gmro02910036h04d1
accttagacgtgtataaagtatattgaattgcatggcaagcatcttgctacttgattcacctgtggctttatattaactgccacaaggcaaaaaaaaatcaagcactctgcagagtgtgaagagatagtataccagaagaaatacacaagaacgaaggaactagattttcagatgacacccattttcatattttcattcaaccaaaatctagtatacaaatgaacaatctccgaaagcacagcttgcaaaagttgccaaaaacaatactaaatcattagatattcagatacttacgtctgtactactcatatcgggcatccaattgaatattaatagcttcatatctatatggtcaattaatgacccattctgttggtccaaaggaagttagcaacaatagaattgttccactcaaacacacaatggaagttagctgggtgcaacgcttttaatgccttgtctttttgaagaaacaatgcttcagcctgaccctcagccttattcacaaatttcctacatgctaggacacaaccgcctataaaattcgttga

SEQ ID NO: 42188 - DNA, 563 bp, Glycine max
  Clone ID: jC-gmro02910036h05d1
gatatgctccatagaaggtagcaatgtaattcattatagacttatagtaatgatccattcatataaaaatgtagcagcaaacatcagaaacatgtcaccaagtattcattggctgactttcatattttttatatattaacacttcttccagatctgggagtaatcataaatagctaacacaatcatgtctaaatgttatggcagccattaatcacaatgataaaacagttttaacacggagcaaatgaagaaacatctgccatactaaaaatagtttatagatttagctgatgtaaccctagagaagaggtgggtattgctttgcctgctgccggacccttctcttgtactctgctgcatcctggatgaatagatgatagcgttctgtctgggcaggatcagcaggatttggctgatcaagtaagtcttggatgcccacaagaatttgcttaactgttatggctggtctccacccactatcctcattaagtatagacaagcaaacagtcccagaaggataaacattagggcggaagaaaccttgtgggaatctacactttgga

SEQ ID NO: 42189 - DNA, 543 bp, Glycine max
  Clone ID: jC-gmro02910037a01d1
gaaaatgaacagcccaaattttactattagtctattagcattggtgctgaaatatactaaaaagcaaacatatattgacagtaaaaatcagtatgtatatataccttgtatacaatatgcccaagggaattatcctgcttcctctacctgggtagaggggatggcccaactaaaaagaaacggagaggaagggatacagaaccaacattattgtcttcagacatcctaaaccactgataagcccataattccacaaactataccttgaagcaattgctcctctcactagtatgatgatatatgtacacatgtgcacctactttatggaaaggcatggagcaaaagaaagcttgcagctatgtcagcatcagtagaatctgtacagccatgaccagtaggtagattctccgacaggacccaagtttaaaatctttactgtatcaatctaatgataaattagcatatgtagaactgatttccatcctccagagatctgtccagtaaaacattcttcacacaaaataaacatgtagaatttgaact

SEQ ID NO: 42190 - DNA, 523 bp, Glycine max
  Clone ID: jC-gmro02910037a02d1
aatctaatcttttaattttcttatgatattataactgttgacatgaaatgagcaagattcgcaaattttaatctaaacagaatttacgttcacttgttccctgtaagttaaattcagatcttatcactcgttaccacagttccacatattgtacaagaccctaccaacatttttgctgccgattatggctcttgggttatatcctaaactaaaccatcttccattgctgaatcaaccttgttttcaacataagtgtcctcttctagtttctacccatccttggctaacaaactggactctttctattcggtattgttcttctcagccaaccaatctgctatcccttcagctaatgtttatggaaataaagaacatgcgcattcaaggaaccacatggaagattgacaacagattgcagctaatgaagcatgattaaactcattcaggtcgcaatgcaaaaactctgtttgaaccccataacaccctcatgactcctaacttagtttcagcctctgcaaatgtg

SEQ ID NO: 42191 - DNA, 475 bp, Glycine max
  Clone ID: jC-gmro02910037a05d1
acatggcaaatgacagtaacttcaatttttttggtgaacagtcaaacaagaagccttaggccataactgaaattcccgaaagggtacattttggaaagcatcatcattcaggacaattagtacacaacatttgctactggatgctacgaatgtcttcacttcgaactaacagtaacaagaataggcaaagtggtttttcttggagacataatgggacaagaaactggaggcagaagcagatgaatctggaatattagccggaaccagtatctgggatttaccagagccaattctcttaccagctacatttgcataaaatagacctgatattgctggtacgaaaacattactctcagaactaatttaaaaggcaatcactttctccaactcagaatcttcagaggtctaggaaacttttctttttatctgcgggaatgatggattcctttgtatatgttttagggaacaaatcttt

SEQ ID NO: 42192 - DNA, 335 bp, Glycine max
  Clone ID: jC-gmro02910037a10d1
gacattcggaagaggggcactaatatcattcatgatggtgtaacaggctgaatctagatcaaatatataataaaattgtaactttgcctgtacaaaatgtttggatgggatacactgtacatgcacgttgtttcccaggcttgaagtaaatgataagaatgagcgtaacattcttcagagcattgccatccacatatggtcttgtacctacctagagtgagagatccttcacctcacaagaaaaatgtatccttgatgtcatacctctaggggaactggtaaaaaacttatggcgaatgtggaactggagatgaacattgaaacaaacttggtga

SEQ ID NO: 42193 - DNA, 512 bp, Glycine max
  Clone ID: jC-gmro02910037b01d1
gaaaataactgatgaatatttggctggaagcactatattcaaaacaaatggtagtccaactcacgtccagttactcccagcaaagctcaaatgagaaaataaggcttcataatatcgattaatttttctttacaatccttcgaggaaacaacaggccaagtgaactttgattttcaagaaatcgtaacatcagagcactcgtgctaagaaaaattatattttgatgaagcagtaccggttacaccgaaaggagccatcaaattagagcatgctaatactaagatttggttaacacataaaaatatcatcgaggagcaccataaacttgggttgagtcgtattggggataagcagcaggctggggcgacaatgttttgccatacgcagccggagcacttgccgggacagctgcataaccagctggttgcgtgttagactgttcataaccagtttgagtgggagtgggttgaacataacctggctgcccacttggttgtgctgtactatatgct

SEQ ID NO: 42194 - DNA, 533 bp, Glycine max
  Clone ID: jC-gmro02910037b02d1
gcaaacaagaacacttgttgaatttctagaaaaaggaatttacatcaatactcttctaaaaatatattcacctatactactacgaatgaacccggaatgcataaaactataacgccaaaccaaaaccaaaccccaatccaaatcatcacttcttagccttagccttagtcttcttcgctggtgatttcacgctcttaggtttcttcacgacactcttgggcttcttcacggcctttacgggtgtcttcttcttagctggcttagcagcgaccttcttggccgcgaccttagcgggcttagacttgggcttggcagtcgtggccgcagctttggccttgggcttggcaacagcctttttcttaggagtagcagctttgggcttggaagcgggcttagtggcagctttggttggctttttgggagcagcggccttaaccggagcaagcttagtcggtgcgagcttaaaggagtttttcaccttaacaagcttgccagcagcaacagatttcttgagatgaacgaggacaagcttc

SEQ ID NO: 42195 - DNA, 585 bp, Glycine max
  Clone ID: jC-gmro02910037b04d1
gttgaaacaaaaatctcaaaaacttgagatggggatttcatagtccactaaaatattggcattacaaataaaccaaaacccaaacttggaaaactacacgccaccaccttcagggatttctaacatttcagatcaaatcaaaggactaaaaagacagaaaacgctatagggtccctgccaaggccataatcaattcccttctaaattcttgaagaatctcgcattacaatctagagaacgaaaatacatagcttgaaaatatttcctctgctccatcaagtattttgggggaactgtgactgcagaatcggagctttatgttggacaagacaactactctatggaaaaagaggcaggtaatgaagtcccaaattttgtggaaatcccattaacaaattaaggttttgtaaagcttgacctgaagctcccttcactagattatcaataacagatgtaatgattgctcttccaggaattcgggctggaaaaacattgattaaacagcaattaggccctttaacgctgtggagttgaggaatgacttcattttccaacacaaaaacaaattcttcattttatatgaga

SEQ ID NO: 42196 - DNA, 479 bp, Glycine max
  Clone ID: jC-gmro02910037b05d1
gaagtaaaggaatttagttatttaacaaataccacatattccctacaagctcgaccatgccccacaaatgggatggatggtcttacaaaatgtaaggtaccgattaacacgttttcatcatcactttcactagcactagaatcctccacattaatagctgctactttggagacactaatcttaaaagaagcagatcgaatcttatagggcaactttgcattgatagcagccaccccacactcttacacccttttgtattcctctctcttcaaatcactaggtggtaggaagcaatccatggacaaccctttgatgttaaaaaccactttttcaatttgccaaacctcttttattattgtcggcgaatggctctcagggtcttcacccagccttgacaatgtgacccaagtcttccccgtgtgtgctatgtaaatgccatccacaattctataattttgatttagggacttcatgttggt

SEQ ID NO: 42197 - DNA, 500 bp, Glycine max
  unsure (1)..(500): unsure at all n locations
  Clone ID: jC-gmro02910037b06d1
agaattaagaatgggtttcccttcctgtaatagttaatattttaagacaacaaaaaaggaatggagcaaagaaaggattacagagagaaccaaaagttctacctccttcccttgttctcctctgcagtatatatatagtgatatctcctgttgccgcgctttacatttgcttcaaactcaagttaagttcacagcctatcgtgttcgtgtgataagctttacctctctctctctctctctctctataagnatggnacagctcaatgacttggtgcagctttgtcattgctatctagccgtgtctctagagctggttcaacttgagttccatcagcatgcccattgcattcttgcttttgcacttttccttttggtgaagcacttgtactattatgattaattttcccattttccttctccggcatggttggagtatccgtgcttgggttcacttcagccaaagtacttgctggtaactgttgagatgaattaccctgacc

SEQ ID NO: 42198 - DNA, 443 bp, Glycine max
  Clone ID: jC-gmro02910037b08d1
aaaacaactcacactaatcagcttcattcttgcaagcacaaaatactcaagggggcacaaacctcacggaacttaacgctttatgaagcacaattactcaactgtgttgtctgcaaagaaacacgccgttaactatattttaaaacgcaaattgtgaccctttacacacggaaaaatctcacaggtatagcgctccactgtggggacccgttgacaatgcccagaaactggttgcttgcacagcgacccattgaaggtgccctcaaccacagacaatatgctttctgtcaatgaccatgagacctttcaaacaggggtgaagaacctggttagaaccctgccttgccgctgatcccccgctttcgccgcgggccataagatcactttaccggtctgcgatgcgctggcaatggtggacttaaggagccctaaattgagggccc

SEQ ID NO: 42199 - DNA, 273 bp, Glycine max
  Clone ID: jC-gmro02910037b10d1
gaggaacaatttgcaatgatctaattgaattcaaataaattttggtaataaaagccaaagttgtgaaagtacaaaatcaaatatcacagccattgcactaatcaagtttcatactcatacaccaattttttttggaatgattggtactcttccatagcatctccttcaatcactttcaccttgtccttcaacggtgtaatctttgttaagaggacctctgtctttttggggaaatcaaagccttttggattgacataggtacgaggatttggt

SEQ ID NO: 42200 - DNA, 485 bp, Glycine max
  Clone ID: jC-gmro02910037b11d1
ctaaaatgttgccaattttggtttgaaatttaatccacaatttttcttacaaaagaattaatccaacaagtaaagaatcgacataaagttacaaaatgaaaaggggaaaaaatggtcaacttacacattgaggagccataaccggcttcaattgtacccgattcaaattcaagtcctcttttccatctgtccatagtaacataatggggtctagtggatgtagcatggtgaaaaaaatatgcgctttaaatcctgtgcagagtcctcgtgactgtttccaatgattcatagggtacaagcttgtccacctttgttttttgtgtaaataattggtgaatgtatctctctacaagctatagagtcttatctttttcttgtgtttttttttttacctttgagattcaatcaacctgttcaccaatcaagtctataccaactaaaaggaatgatatgccctggaataacaagaagtagaagtggattcc

SEQ ID NO: 42201 - DNA, 492 bp, Glycine max
  unsure (1)..(492): unsure at all n locations
  Clone ID: jC-gmro02910037b12d1
ggaacaacttccagcataattagattttaatcaaacataacacaatcaaagaacatcactagattttaatcaacattcttgtcagttgatatgatgcgaagtaactggtgccatgatggtttttaaatgaagaacaggaagagaatcctttgtttattctaatcaaggataggtacttggggctatagttcaatcaatttgctgtgatacttccctcaattttttagccttacttatcttggctaccacttccatgtttattcagccagagctgcggtgtctctaggtcaagcgacttcaagatgttatggtcacatgacccgaatatatcaacagtataaagcatttcgctcgtagtatattcatttttctggccacaggaaaaagtgtcttcacccaatccaaccaagctgttaaggtcttctaactcctcaaaaatagcatttggatctgaacacatngcaccattggcattgttagactgatcaggat

SEQ ID NO: 42202 - DNA, 532 bp, Glycine max
  Clone ID: jC-gmro02910037c01d1
gtaacttatatttgtatcagacaaattacaatttacattcttcatcagtgctttatgtaatagaaaattttcagttttatgcacgtctcttgcctcctttactggcagttttgtagtccacagggtagacgagcatctaaatggaagatagatgcaaatgatatgcaaaagcagaaaataaaacttatgatctttttttacatgattatgctattgctgttgaccctttgctaggacaaagcagtacgcgacttcgatattctccaagagcccatattggaaagatatttctgtatgcagagtaactgatagtacaatgcttgttgaagactcccgtgatttcctgttggggaaactccccgttttccatttgtgaattgatcaaaaccttggctgcacgatgtaatggggttggatctctttggccctgtcctgcttcaataagtgccaacatagcccatgcagggtttactacatgtgacttgtttccttccaaatttgtataaaccttttgttggcatgcaatatagct

SEQ ID NO: 42203 - DNA, 493 bp, Glycine max
  Clone ID: jC-gmro02910037c05d1
aatcgcaaaaataatcacaaagcctcattcacagcacggtggtgtctttcaagaaaacaaagttacattcccttccctgttgcacaggtttgaccaaatacactgaattactaaaattgacataaaaggaacactcggaaaacaaaaagcaaaattccaaacgattattctgggaagagtcaaaccacaataatacttatcaacaagaaattcggttgttgtacccataataccgattcctactcgcactagtctgtttaaacaacaccaacttctattgatcagtagctgtagttcgaaacatggaggctctctgaggcaccatcagcaagctgagagttacccttgtaggttcccagagttgcctctgagttagccttggctcttaccaaaagggcttgctgagccttcttcacattctcttcttttccgccccatgccttaaaggtgctctgttgaagtgcccttccaaaggagaaagagagtgaccatg

SEQ ID NO: 42204 - DNA, 518 bp, Glycine max
  Clone ID: jC-gmro02910037c08d1
ggaaaagaaaagtcgcataacatggttacattaatacatatgtaatacatcacaacaacataatcactacattatgatgccattaagggagatcacaatttcaaacatagagaaatacattggaggctgatatagtacatcagatgcaatatggaaatgcctacttatttaaggacaccctaacaaataaagacttaagtaacctatttggcaaaccaaaaaagggggccctcagggaagatgtgacacactggagcagctccaggcttggttttaagcatttgtaaaaacacatgggtgggatcccattctgatgggtctttggggcatacagctgcagctttaactttggttccatcttctccctccaaaggcataaaatgcgcagtagtatttgatatctcatgacacataaacacaacatatgggtaatccataggatgacaaacaatgaccttatcttgtgtaacaacttcactccatttttcaccgagaattttggggacttactttccttt

SEQ ID NO: 42205 - DNA, 515 bp, Glycine max
  Clone ID: jC-gmro02910037c11d1
ccaacaatccatgcatcaagttcgaattataatttacataattattacaagcggtgaataatagataaaggtacagttaaaaatgcaaaaagccatgaagctcgagacatcaaacggggaacaaagatgaaacttgaagggacaggacacacaagtgaatagaacacgaagtcatatttttcaagttgaagctcaagggtaggtttcagaggctgggacagccgcatatgaaccaatgaagacgtctccataaataaagccagccaaacctcctccaatcaatgggccaacccaatagatccagttagcagcgaagtctccactgaccacagctgggccgaatgagcgagctgggttcattgaaccgccactgaatgggcctgctgctaagatgttggcacccacaacgaacccaatagcaatgggtgcaatgatacccaatgaccccttctttgggtctgctgcagttgcatacacagtgtaaaccaacccaatgtgattacaatctcaaacac

SEQ ID NO: 42206 - DNA, 198 bp, Glycine max
  Clone ID: jC-gmro02910037c12d1
aagaacaaaaaaacatgtctaagtatagtatttcataattccgtgtcaaatttacataaaagtccttatccatccagtagacgactcttttggtccacaacaaagcaaaagctgacttggcttctttttctttactttccctcgcttgcaagaagcttcctcctttttctttccccccgttaattgcaaaatcactca

SEQ ID NO: 42207 - DNA, 552 bp, Glycine max
  Clone ID: jC-gmro02910037d01d1
ccagtaaaagttatttaattctagccaaacaaatcttaacgaaaaaaaattcctacgggatagtattaacagcgaattattccagggaatgttatccataagaccataacccttaaacgttgaagcaaacaaccatatgaaataaagggtgaatgcgctacaatattatcacacgtcatttatactcactcaaccagtaatccgcatatcaatgacaaacctttggctgaaatcacttccgcatttgagatagcaagcattcacatcacacatacgaagagtatcatgctcataacgatagcaaggaaggagagcaagtttcactttaaacgtctgatcttttttgtcgcattgataatgttttgacctatctccgggtgtttgaactccaacaatttatcaagtttaagagaagcttcggagaaacagctatcctcaatacaggactcagatttgagggcaaaatgaacctcattgacgtcctcgtcaagctggaggcagaagaggtggctgaaaacctttttcatttttgagagagccatatctttaatg

SEQ ID NO: 42208 - DNA, 554 bp, Glycine max
  Clone ID: jC-gmro02910037d02d1
agcaacaaaaaatacactcttgaaaggggaaacaaagtcaacaaccatacatgattaaatgaaaaagaagaaaaaaactgccctcgcctaaacaagagcatcatcattttgtacagtcgcgtcaacttataaactaactcaccattttacaatctttacaccgtaaatgggcttgtatagtcataatatttcatttaattttatctctctctcctctgcagcagggggcatcaggcgcattaaaacatctgaggcctcatctctcgcttaaattctttgtataaacttaaaagctacaaaatgtacagtttctgcagtaaaaccgacaactttatttccaattggctacacaacccatcttgagagataggcaaacatgacctcttggatttgggaggggcggaggaagcagcagcagcttacactagcctcagttagctgtacaagattatttttctaagccacctaagcaggttgaggaggagcctgagcagctattctcctttctccagcagcaacaagtttttctacacgcgtgacgatgtgctttccat

SEQ ID NO: 42209 - DNA, 453 bp, Glycine max
  Clone ID: jC-gmro02910037d03d1
gggaacttccaactgccggtgggttttaacccggggagaaaaaatttttggggaatttcttctcaacggccttaaatggtgcccctttcaggaaacttttttacaggggaacaatttgtccccctttattggccccagaaaaattcgagggggaataggggccaaaaataacttggggcctaaaattcggggggaaaaatttcttttccgggaaagctgaaagggttcaccccatccctggcttttggacaaaaaaaactaccctggccaagaaaggggccgcatgggttaccatatttaggatttccccggccgggaaactggcccttttggttaaaaaaggaaacctttttgaaaaaaccattccttggaagggtttgctgaacaatttcacctttatgcccaacaatacaaaactttttggcgggaaaggggggtatttaaataaatttt

SEQ ID NO: 42210 - DNA, 482 bp, Glycine max
  Clone ID: jC-gmro02910037d04d1
gatcagccaaaatggcaaggatatcagtcttcaattcattcataacctttttgttttgctatcatactttatatacacttgatcatcacatgacctattacatcaattcacacataaacccttcaaaccctcacctttgttgagagttcaaaagacactctagttagcaagaatcagagaaattattaggatggtccatgaccatcataatcttcacttatctctgtataacatatatttgagttttattaattctttctggtaaattgaaaaaacttagacatatgttacatagagattgatggagtatcgagactatagatacttagtaatggtgtcagaccacctaataattttttatagaaccgacctaaggctgggttccaactcgaaatcaatcagaagcttctcaaaggagcatttggctttctctgactaccgctataccatgatagcaagtgtttggcattgaatgaccgtga

SEQ ID NO: 42211 - DNA, 472 bp, Glycine max
  Clone ID: jC-gmro02910037d06d1
gaatgaacaaagctagtattatgcaacaaagaaaggcacagcaaagggaatatacaaaggggtaagactgcttccacctatgtatcactaactgacaagacatgaaaagaccaagtgcctataaaaaaaggacagcatgagcagcccaaaggctgatctataatgccgggataaaccagtcaagagacccaacatccctacatgccgtacctagaactttcttggggaagaggaccttgggctacattgatggcttgagatctgaactgagcttacctccatatacaaggtgctgacatggagaccatgccaagcatgcgacattatccctcgccaggagatccacatagagcccatcctgcagaactatcatgcgaggttaaacaactgttctgttgaacaaatcaaccctttgtggtgggagactcaccgctattggtggatctgggacattcactccacccacctcaat

SEQ ID NO: 42212 - DNA, 429 bp, Glycine max
  Clone ID: jC-gmro02910037d07d1
ccccccaaccccaaaaaaataaacccaatggggggggaaaaggggaaaaaaaaaatccagggggggtttattaacccagaaacccggaaaaaaaagggaaaaaaaaatgggggccgaaattcggggttacccccgggggggggggagagaaaagttttttaaaagggggaccaaaaataaaataagggggcggcgtttaaaaacggggggaaggggaaaacccggggggaacccaaaaaaaagggttgggagaaaaaacccctttggccagggggggaaaaaaaaaaaagggccccaccgaacgccctttcaaaaaagtgcccaacctgaagggggaaggggaccccccctgaaggggggaaataagggggggggggggggggggttccccaaaggggaaccaataaattgggagggcctaaaggcccg

SEQ ID NO: 42213 - DNA, 447 bp, Glycine max
  unsure (1)..(447): unsure at all n locations
  Clone ID: jC-gmro02910037d09d1
gattgcaacagataataattaattggatatcccattatacagtatcctttccaataccatatgacacacaaaaaaaagaagcctggtctttgttcatacaacattatatcacagattgccaatcattttataaactagggcgattcttaattagcacaaataaatgacattcaaagcccacctgcatgagaggaagaataccacccatcaacctataagggatatcagggctcatctagctggtcctgaacatcagaagtccaaagggtgagggtgtctcttaaaagctgcattatgagcgtgctgtctttgtaagattcttctaccaaggtgtgcagctcagcaattgcttcctcaaaaacctgtttagacatggcacacgctttatcagactggttgaggatttcatagtanaagacggagaagttgagagcaagacccaatctg

SEQ ID NO: 42214 - DNA, 319 bp, Glycine max
  Clone ID: jC-gmro02910037d12d1
gcgaccttgttcgagactttttattttattttttttcggtgtaggacaacactttctagatcattagaatatggcttccattgttctggaacttattaagatgaccctgccgcacatctgggtaccaattgtctcgtgggacagaaaaggcggagatgccaccctcactttgataagccctgctttcgtgatttttaagagccagaacatccacgttctggaacaactttagcattttgttgtgaggcgcaccgacaactttgccttgcgcttcactgtgagcccattgctggttttttgagaaaagaaccattacgac

SEQ ID NO: 42215 - DNA, 570 bp, Glycine max
  Clone ID: jC-gmro02910037e01d1
gagaatcaaacactgtgttttccattcattctaaactctctggtagttcttgaaataccatttgagagagataagataaacacaccatcatccagaaatacagaaagaagcaaatgatagaaagacgcgagagtggaaattaaaaagatctaatgctacctacacatccatattacttatccaccaccccaaagcaaccaaacaaacacgagaaaaaactctagcatacagattaacatctataaactatagattaaggagttctatatatctaataactcgaaaagaaaaatttgaacagtgaacaaaaaggaggaaagtagttattgcatgcggttaattaatcaaggatatgctccattggtagtgggaaggtcagaccaggaaagggttggattccagcacccgaattcactcccagaaactgaagatgactccaaaatgttggacaaagaagaggatgaagaagccatgttgcttagaaacactggtgagttatcacttccccaataattaactgatgacgatgacctgagcttgtgtaaagttcttgaactccactaacttgat

SEQ ID NO: 42216 - DNA, 541 bp, Glycine max
  Clone ID: jC-gmro02910037e02d1
atctcctaccctgtggacctcattatagattttaatttccaaagatacagaattcaatacacaatgaaaaaacaattttctataagattattgtaaagaactttagttgcctgtgggtgttcttccaaggctaacagcaattaatcatggttgtaatcatactctacaaagtcagtatataatagagtgccatcatctgcttggtgaagtagggaaaaacattcatcacagaaataacaagggttttctggtgtccatttgtcatccaccgtgacctttgtagctctgaatattttgcaaacattgcatttctgaaaacgcaacttcaactgaaacgtgattattggataaacagctcgattatgaacgtcttcagggtgaattaacctcatatctcgtatcactaaggtatgggtgcagtcaccctgatgacaatagaggtatccagcaccaagttgaaagcttaagtcacaaaaacgtatcttatgcatctcaatggatctaaaatgaggcaattgtgatgcagatatctcacccatga

SEQ ID NO: 42217 - DNA, 482 bp, Glycine max
  Clone ID: jC-gmro02910037e05d1
gtacaagaagaaaaaccaacaattcacattaatgttgtggcaatatatattacaatcagaaacatgaaggacatgttccacaactttgttcaccacccaccatttttttcttatgccccaatcctattttcataactccccataaggtataacaaaataaagtttagactaatcactaagtctgctcaggtgtgacggtgatggacacactcagcaggcgtgactgggaacctagcagtgtcagtgcaatagtcatagaaaatgtgccttgccctaacccacataagctggtggctctggtgcaagttgagttaagccaaattaggctcatccaccaatacttattcccctcactgctggtgcacttcttagcattatccattgcagccactgtcacgggacactcacacgcatttatctggaagtacttgtatgtggcaatgaaaggtgcgtggctccaatctgttttacacgaccaccct

SEQ ID NO: 42218 - DNA, 571 bp, Glycine max
  Clone ID: jC-gmro02910037e08d1
gataaaaagtaatattgattgatatcatacaggataacattcattttgaccaaagattacatacttgagtcaaactccaaatttgcaatctagacgcgcactaaaacggtatgattttattcgggttgattgaaacagaaaacggcacaaagttgtggacataatggaatgattaagcactgatgagaatcagaacttcttaatgaagtcgtagatgtgattgctcacgtcctctgctgcttcttggttgttgaagtgtgcaaccccttcctgcaccaccactttctctaaagttggcacatctttcttgaaaccaccggtgtggatatactccttcatccccggagaagtgtacaccaagtcaacgccacctgtgatgaacttaaccggtacatttacgatgcctgctccagtccatggtgctggcagttcccaatttaaattgaggtttctgtagtagttcaagcctccagagaagccagtctttgtgaatttagtaacataataatcaagatcttcttgagagatccaagagggcaaggtgtctggagtccctggattaaatccagtt

SEQ ID NO: 42219 - DNA, 498 bp, Glycine max
  Clone ID: jC-gmro02910037e11d1
aaaggttaacaaacagcagaattgaatagatgtcaaactaatataaaacaccgtctgttacaaagcttttcatatttatggcggaaatgctgttcaaaatagaacccaaagagttcaacataaactatgaaagaaacaaaatttgagaacaaataacaccctaaaaatcttctcaagtagtcttatccgctttagcagcagtggcagcagcttgccccctaagacgaccagtcctcctagcagcaatgagaccaaccttctggccaggaggagcatcacgcctaacggttctcgcatgcccaatatgctgatgattacctcctccgtgaggatgctcaactgggttcatcggcacaccttgcaccttaggccatgaatgactcttcactctgaacttatggtaagcattaccagccttcagaagaggcttgtcaattctcccttcacctgcaacctggccaatgatcgccctgcacccacttggcacaatctttttcg

SEQ ID NO: 42220 - DNA, 499 bp, Glycine max
  Clone ID: jC-gmro02910037f04d1
acttgcattataatattatatgataatagtgccttctaaggagtaccaaactaacacctcaaaaagacaaaagagaaaatgttctcttaagcaagaacagcagtgactactggaatcccgcatgccatgccattgcttattgctacatagccattacacactcacatatatgcacatggataacatacgaccaacttaactcacaacaaggttgccataaggcaaaaatatatggtaagcctaacatgctccaagtctcttgccatccacaagtcgcttccagtacaaagcaatctctttctgagtctctattgcactcttaaccttctcactagtctcactagagatggctgtgatatgagcaactttggtagtgagggggctaggaagtgtgtccaagagcttcacaaccttctctatgtcagcagaaagtctctcggccaagccacggctgaaatcctccctgatcaccacccggaggaccgctatgtgttgcgcg

SEQ ID NO: 42221 - DNA, 274 bp, Glycine max
  Clone ID: jC-gmro02910037f05d1
aggcccccaaaaatgagaaatttgtttccaaaaaaaaaggagcaccgattttttgtcaaagggggggacgaaatggtctaggtgaaaaaaggacaataaaaacgccaacattgggaagggatagacagaccctttattaaaggggggggacttaacccaaggggttggggaaaggggggggggaaaacacctgggggataaagaagggcaaaaaaacaatgttaaagtctaaaggggaaacagtttcaagttggggggggggccgacaacccca

SEQ ID NO: 42222 - DNA, 512 bp, Glycine max
  Clone ID: jC-gmro02910037f06d1
ggcatcaaacaatcaatttcattaacaatggaaaaattaccggtattacttcccaatttagagtgcataagcacagttgttttcaagttgtaacagattcctataagatggtgaaataaagagcatgtgccatctactccaccactggtgtatttctctgacacatttaaactcagattcaaacgttagttttgcttcccagctcaacctttatacagaacttggcaccctcaaattattccactgcataaaactatgatcatcttgctcctctttgcctcttctcttccaatgcagctgcctcatttaacatatcagccgcatccttgtgcatgtgcagttttgcaagagcaactgattgtatgtagaaagccgtgggccagactggataaacacactgtgcttgcattgcatctgcgagagcaggatctggttgatcacataacagatagcacagactgcgccttgcaaaacagttggagagaacattgttccaacatcaataaaactgg

SEQ ID NO: 42223 - DNA, 505 bp, Glycine max
  unsure (1)..(505): unsure at all n locations
  Clone ID: jC-gmro02910037f07d1
gctcgttgggggcacaaacccaacaaacatactgtgcattaatctgattctctaaagtcagcaatacaaagaaaataagtgaagaaaattcatttgcatacagaaaatacaaaggctataaatccaaatacgtaaaagttagaataccaaggaataaactacaaaaacataaataactcaaaactattgaaaattgtgtccttgcgggtgatcacttccctcccgcattatcagcatcagctgcaggatctgaactggcactacctgcttccgtcttggttgtttcatcaatcctcctactagaatcatcgtctaattcatcatccatcatgtcatcctctcccacatttatatcttccacatcatcatcgtcgncattattgttttcgtcagggatctttcttttcttgggaccatgctccagcctatgagtatccaactctttgtccattgtctcctggtaattctggncattgataactttccttgcgttccttgcattctg

SEQ ID NO: 42224 - DNA, 501 bp, Glycine max
  Clone ID: jC-gmro02910037f08d1
gatctgaaaataaatcacatattctttcatatatcttcatatatatggacataatagaaaaacagaaaaaaaaaagaaaaagaaaaagagagcagcaaacaagaggtcatccctaaacaatacatcaatcttaattcgaatcccctattttctttttcttaagactatttcaaacaacaaagtgaaagtcttatgacaattcttttcttttgtcagcaatcttcactaattgatcataattatattctcaatagaaaaatactaagttcaggtcccccattaccatcaggattcaacatgtaaaacgcctccgagtcacggctccccacgactcgctcaaacctcgccctcatgtacatcaactcaccctccgacccaccgccggcggcggcggaggccgcctttccgtcctccaggagagggatgaccccggcaccgacggacacgctctgaatggtgctcagcacgtgccagtcgaggtccccgcacgtacgggacacg

SEQ ID NO: 42225 - DNA, 288 bp, Glycine max
  Clone ID: jC-gmro02910037g02d1
aaaacaacccacatttatggggttgattcttgcaagcacaaaatacgggatggggtgcaatcctcactggaactgagcgcattatgaaacacaaccactcaaccgaaaaacctgccaagaaaccacacgttcacaatattttaaaacgaaatttgtgacctttgtcaaaaggagaggtgaaacagtataaagggtccaccgtggaggcgccgccgacaaagaccacaaactcgtatcctttacagggacacatagatggtgcccctaaccgcatacaagaaaggttct

SEQ ID NO: 42226 - DNA, 499 bp, Glycine max
  Clone ID: jC-gmro02910037g03d1
aaaagcccaaaaaactggaaaaattttgggggaaaaccccttttttttaggggggttaaattttggggccccaaaaaaactcgagggggctctaaaaggggactctaggggaaacccaaaaaagggcccaaaaaaaaaaaaaaggggggttccctaaccgcacgggggggccatttcccaaaaaaagttttctaaaaaaactttacattgccttgggggaaaacaaacgggggggaagccctttgaaagggaaaaaaccttttttttaagggggggtgggaaaccagcccctaaaacgggttaggggggggaaaaaaaaaaaacggcccggggggggggccccccttttctaacacggcgaaaaatttccaaagggggatttacccaagcggatcggttcccccctcaaaaaaaaagtgaacaacccaaaaaaggatcccctggggggggggacaaccccccaacatttttttgcggggggggtaccaaaccaattttt

SEQ ID NO: 42227 - DNA, 502 bp, Glycine max
  Clone ID: jC-gmro02910037g04d1
accatatatatatagagagagagaatacgaagcacactgatcacaggatgatgctctctttaagtagggaagcagatcttatcagtacacataggtaggttgaaattctagctctagcaatctagctagagaaggtagtacttgcacaacacacagcacatgataatttattttatacacaatctcattctcatggtgctcaagatgcatggactaattaagcaacaatgttggtctgataggcagtgtccacagataaattgggtacccataaaatggccttgctttcaaggaaatggcaaacagggttagttccaggatcaactcccataagttgatgaagcatttgatgattcattccagaagtatttgagtggcaaatagcaagtgcctgagttttgggtccatcaccagccaccaatggaaccatgaaagctgttgtttacggacttcatggcagtaaaatactgcagttctgaaatttagcctatgacacatcact

SEQ ID NO: 42228 - DNA, 437 bp, Glycine max
  Clone ID: jC-gmro02910037g05d1
aaccaggcacaaaaaggaccatttaaaaaaaataaaggatttttcacgagttaatacaacatcagcaccagagcaaaaggctttggtaacccatttgagaattgagcgctttcaagccttaaatacaactacatttcccagcacttgtatgcctcagctagtaataagtaactacaccaatatagccgaaattccttccaacacaacccaggtatggaaaactatgtatttaactaagccatattcatagtgagagttgatacaaaggcactcatttcttctttgaagacttgatgacagtaactcctttggatgatcaacaagatccttgaaagaatattttctaggccgggcaaccttgttgttaggatcaaacaaaaggacttcttaaaatgcgttcagagcagacgtgaagttttttttactgtcaaaggcat

SEQ ID NO: 42229 - DNA, 496 bp, Glycine max
  Clone ID: jC-gmro02910037g06d1
gaaaagagttaatcaagtttttattattgtatggaaaacgttacattgtttttaaggaaaagctgaaataggccgacaatagagaattgatcagaagaaggaaagaaattcagaaacaacaatgtagtaagtgatagagggaatgaatcttatttctttttagtgggataagaagccatcttgtagataccgcagattccctcgggttttccaatgatcctcctcattcttatgtatcctttctctccccacttagatccccatgaatttttcactatgatataatccacacctttcgcagttccgtatccaacagctgccacaccatgatctaaggcacttccgcaatgcccgtcgaaaacacccccactgtaaaattggaaatctctgcctgaagcctctatggccacactgaggggttggtttgcaagtgccttcaataggctctgatcattgatttgtggcacattatggcaccccgctaaggtgacaactt

SEQ ID NO: 42230 - DNA, 415 bp, Glycine max
  Clone ID: jC-gmro02910037g07d1
atatacgggaataaggaatacatgatcgcatttaaacaaactttacaggcataaaagtatattaccatgcaaacagacattaattggttcatgtacaaatgaagcccgttcaaaaaaagaaccctcctttgcccagtcaaagcagcaaaggttttatccaatttccaaaaccaaattaagaagacaggaaattactggtagcttttaatgaaatagcccaaacccagacttgaaacaaaattattaagcaaatgaagaaaagaagaaccccgtatgaaagaattaagtccctcgccccacccacaaatgttgctgtggttggaatgatgaatttaacagtaacaggaacatccttatttaagttactctgcaatgggtttgggcttggccctgtataggagtttcttcttcttgg

SEQ ID NO: 42231 - DNA, 522 bp, Glycine max
  Clone ID: jC-gmro02910037g08d1
aaacccaatactacatgacgatttaaatgacatacactagaaaattgatgatacaactattcacaatgctgacgatttttacagaaatttaggcttcctacaagaagatttaccgactcacccccgcaaaatttaaaagacaccatagattgtatctcgtttaggaacaaggcctgagccaaatacaactatatcccagtattgggattgttcccagctagaataagagaaatttctaaccctcggctaaaagcctgggtaaacattaggcgagtttggaatgttgatacaaatgggaaccacaaaaagaaggcaatgggtacaaagatgagcattcccataccagcatcatagaggcgagcaattgatcgaacggattttcatagaccgagcctcttcatgaccgggtttcaggccgcagcaattgacagaattccccaaccagtaggaatgaaagccaacatagaagcaaatatgtccggcaaagacagaatggtcaatataactgctacaactaaacca

SEQ ID NO: 42232 - DNA, 527 bp, Glycine max
  Clone ID: jC-gmro02910037h03d1
agataaaatcaactcagcccgtcattaacaaggccatggaacaatttcagtgttatacatatgcacattattttctcgaattaagatcatcatcacaaattaatgtcccccacaacttattcatgccagattttagaacagcaattcatatcacagctttgaaggcgactgataccagccccacggttcatcagatatgtacttggtcacttgcttcacacttaaatagttctcgagtccccattctcctagttcacgaccaaaaccactacgtttaacgcctccccatggagcttgaatgaagcttggttgagcacaatttatccatacaattccagcctgaatagcctttgatatgcgctcgcatctttctagatcttttgacattacagcagaccctaagccgtagtgtgtgtcatttgctagttcaatagcttcttcttcggtactgaatgttttcacacatagcacaggtccaaaaacttctttctccaaatttgcatcgaggtagtcacatcagttatgat

SEQ ID NO: 42233 - DNA, 412 bp, Glycine max
  Clone ID: jC-gmro02910037h05d1
ggtcaatcaagatgattcttaattcttattatgttcaatcaacatcccaaactccagatatttattacatgctgcaataatctaaattgaattgaatagttactggtggcaattagcgtccccttgccaactccacacaatatccctgagcgaaggtctgacttggccctcacagaaattaaggtattcaagcgtgtctccggcggacttggagaactcgaccaccgcgacctccggcgccaccttgaatacctccaccgtcatggccagcttccccttcctcccttccgtcgccccctgcatcctcaccatgaactccttcttccccgtcaccctaaagttcagcttcttggccaccccctccagcttcgccatcaccgtcgaagccgaaaacttggaaatgaacattgac

SEQ ID NO: 42234 - DNA, 330 bp, Glycine max
  Clone ID: jC-gmro02910037h06d1
aacatggacacggtttatgagacaccgacgtttggagacgcattgggagggcatacatacaaacagcccgcccatgtttttaccagaacacttggaatagggcgatcgaacatacagatggcagaattggtggaagcggagagagacacacacaggaagagacccgccatgccctggatatgacccctataattagggcatcgctcgacagacttccaacgtatagccatggaatgacccacttacgccgtttcacaatcgaggggcatgaccacttcccatgcgaagggagggcctactgttacagagtgttgcctaccatgcaatctt

SEQ ID NO: 42235 - DNA, 474 bp, Glycine max
  Clone ID: jC-gmro02910037h09d1
gaatctgaaacgttaattaaatcagatataacttgaaatatattacactttttaatcatataataatatgggctaccctatgatcaggaacctcaaatcaaactttacagtggcgaaaactaatgcatcagaacaccttggacttgtaactttgacttaaaataacagaacaattaaccgggaaaataaagcatggaacttttattggtttatcgggttgggaaggaggcgacgaacccaggtattgaccttcaccagcagtaaccaacatttactcaccacaattctctttattcccaaggcttactgctttcataattggtggtgctttgtggccacaattccacatttcattccaacttaaatttggaaggtcaagtttaatcaggccaaaaaagctgaagattctccctactcagaactttcaacaccaatcgataaacattcaggtcatagcttgttatatccttaaac

SEQ ID NO: 42236 - DNA, 530 bp, Glycine max
  Clone ID: jC-gmro02910037h12d1
gggaacaagatatattctttcgcccaaaagcttaagacattaatatgcctatattttcgatttagcaaaataccctgacggtttttgatacactcgggttgaagaactgagaacgattatcacacaaatggggacaccgccgatgaccattttcacatcttgaaaagggcacaatgttcataagtgtaaaagacatctgagggactctccaggggtcataagatcgaaggcctggtttatctccttgacaggaagctcgtgagtgatagaaatcatataacttcaccactccattcatgcattctttggcaaaatgtggcaattgagtcttacctcagatgcctccgaaagttgaacctactattctgcgaccatggagcaacgccattgggtggatcggaagcatttttcgagagggatgaatccgtactagcacagtcaatccccaaccctcatgaacagacaagaaagcatgccttactacgttcaaatttgcagcacattgcataatatagtgcacgcccccacca

SEQ ID NO: 42237 - DNA, 445 bp, Glycine max
  Clone ID: jC-gmro02910038a02d1
gaatagagggggaaaactaccccaattcgaagcttttccaatcaatagccaaatcatgcaacaaccaaaaaaaaaagcacactttttttttccttccatttctctactcttatcgaaagcttactcacaaacctaaaatcacggacattatttataaaactcaggcgcgacaaactccaaggagacaaagaaaaagccggttcctccatttctttatccagctctttatcctcagatttgctcaacaggatggggcacagactcagccaattggcggtacttgaaagcatagaacatctccagataacggcggatctcacggcgggcaaggttacacacatgcttccagaagccattgacaccggtgagagtgagaagcctcatggaggaaattcgccatgcgtacttcattttaatacgctggagaccatcctttgagatcttg

SEQ ID NO: 42238 - DNA, 481 bp, Glycine max
  Clone ID: jC-gmro02910038c01d1
ccttgaaagcaagataatcatccaaagcaaaattcctcataattaaggggaggcagggatatacaaacaagctttaaaacatcccctcccggatcacatcgcactagtgttctagtatactacatgagtatacaatggttcttctaattaataggattaatacttaatacaatctgttaaaactttgaagatgaggaaaccaattatatcaacttgaagcttcttctcaaacggctttcttcaggcagcaagaaatataagaaattggaaggaggatttttctttctttgggtgagggggacacattaacagaactaggtggaaggaaccaactattaacaacctgaaacagactacatacacttctacaggctgagtacataatatttacacgaggctacactatgacgcagacatggcacactgctgtcttgcatgagagggaatcagtttcaccagcatgcctggaggcactccttta

SEQ ID NO: 42239 - DNA, 403 bp, Glycine max
  Clone ID: jC-gmro02910038d02d1
cttagcagagtcactgctcattgccatgcggagatgtttcttctcagtgagcttgatcaacacaacataaatataccagtataccatgcaataatcatggacagagtagagttccaattcaaatcccaaattgagaaatcgaaacgctatccaataagtatgatcttctacccatgcgagaatatgttggtatattttgaaacatattttcttattgtttgaagtttttgaggcttgtgtaaactctcctttaaaaggcatatctagctgtacataggtgacatgccagacttgtaacattttccctagcttacgcctttgccaagcagcatatgtacaaagaattgtgagttaatttatcaacaactgtgctaactgcaccataaattcattttgatgaaag

SEQ ID NO: 42240 - DNA, 398 bp, Glycine max
  Clone ID: jC-gmro02910038d12d1
aaatggacaacactagattatgtgcattattggggaagaaacgtggtggcatattaagcaagagacataagtcatccacccacccacccaccaagccaaccccacttttaactgctaccggatttcaattatacatagcatgggatgacggccacaagcgtggataaaaagaaacccaacctggttatatacttgggggaagagggcgacccatctgacatataagacatggggggggccaggcaaaatatggaggtgcatgtatatgaccctggtgttagtgttgagtcagcaaactaaattgcacaatcactggcgcacatcacacatgagtggggcctcttgcaactcaaaagcagaagataacaatgtaccatgacgcgacccatgcaccacct

SEQ ID NO: 42241 - DNA, 392 bp, Glycine max
  Clone ID: jC-gmro02910038e11d1
aaatagtgcaatgtatctaagacatgctatcttaattcttataactgataattaaagcggggtgcatcaatacactacaatacactttggaactgtgaactatcaatatacgacacgtatttatgcctgtgatgcacacaacttatgccatgatgattcttacgcgagtgacagcagcttctgacttatttgattgatcattccgacccaactaggggcaatactcattatactatgacacttatctttaaactttgcagcgtgacagggtggcctggaccagcgaccatattcttatggactatgtgcccccactgggtaggacccacaggcatgcacagcacagatgtgcttctccatttccatgttgaagttagcattgtggcccccac

SEQ ID NO: 42242 - DNA, 523 bp, Glycine max
  unsure (1)..(523): unsure at all n locations
  Clone ID: jC-gmro02910038f11a1
gcaaaaagaaagaatcccaggcgaggagaaagatggaggggaaggagcaggatgtgtcgttgggagcgaacaagttccccgagagacagccaattgggacggcggcgcagagccaagacgacggcaaggactaccaggagccggcgccggcgccgctggttgacccgacggagtttacgtcatggtcgttttacagagcagggatagcagagtttgtggccacttttctgtttctctacatcactgtcttaaccgttatgggagtcgccggggctaagtctaagtgtagtaccgttgggattcaaggaatcgcttgggccttcggtggcatgatcttcgccctcgtttactgcaccgctggcatctcagggggacacataaacccggcggtgacatttgngctgtttttggcgaggaagttgtcgttgcccagggcgatnttcacatcgtgatgcaatgcttngtgctatntgtggcctggcgtggtgaaggtttcgaggtgaaacaaatacgtgcgttgaat

SEQ ID NO: 42243 - DNA, 539 bp, Glycine max
  Clone ID: jC-gmro02910039a02d1
cagaccaattcaattaaaaccaaagcaggtacactctgtaagtggatgtgtaagacgaacaactggacagacacacatagtagtacaatgtaaatcatcaaacaataggtccaaccaccaggaatattaaaggtacaattcaagtaataacctcatactcctcaagttctttggctttcagcttttccttcacccttaagagaagtgtggtcttccaagaatccagaggggtcatactatcaaattccttgacaacatcagtaaactttgcaacatcttcttcatcaattgcagcagcaatgtccgccaacaatctatattcacgtgttcctgaaaatgttggatccagttcctgatatcgttctaatgcattggttatagcaacaacctgctctttacagagttggcagatgccagcattaagaaggtgtcctttaactccatacttcagcaaattattgttgagggattggcgagctatctcttcataaatgtcaatcgacttctgatattgaactagctgagcagcaaactgggca

SEQ ID NO: 42244 - DNA, 413 bp, Glycine max
  Clone ID: jC-gmro02910039a04d1
gctaaagaattgatcacatgttccaaaccgcataacactacactttccatgatacaaatttgtccaattgtctatgattgctatggctgatacaagtacctattttcagaccacacattctaaatttgacggagctgtccatgaccataagacaacagattggttgttctacactatatgacatattcactgttgcatgctacattcgaactcatataggacaacttgtatatcactcaggtcacatcctcttcaacaggaaactcaaaatgatgccaatgatgccaacaacaactaccttgatgaatggtacaccgtcgcggattctgccggcatcacaccttaaaagctccagttattgaatgaagtatgaatgcattgcgtcaacagtaaaactcctctcctcagttact

SEQ ID NO: 42245 - DNA, 456 bp, Glycine max
  Clone ID: jC-gmro02910039a05d1
aggtggttcgacgtgcttcttcttcgcgtttgctctttctaaccctaatcaaaacatgtctgcggtcctaaagcattttaggaagagcttatactaacgttggggcacggtcacgaaaaccaaactccgaacattctcaatggaatcaacttatacagatacccttcatgccgcgctctctgtaagaagctagaaaccacgaatgagaaagtggttataattttcaatggccatgatactacggctggtattgataaagaagcagcctatgctgagaagaacccccaacaattctgtctataactaccaagggtcatttccttggtgaagaaatattttaaaccacagagataatgttttggagtatcttgtcacccattgtagatggcacatacaccagtccgaaccaaagactggaccctgctttccatgcaaaaatgtccactgatgaccatg

SEQ ID NO: 42246 - DNA, 561 bp, Glycine max
  Clone ID: jC-gmro02910039a06d1
agcttcaaaaacgcactatcatggtgccatgattaagcaattagacaaccaaaggggtcgtggtgagaaataggagctgctaaagaattgatcacatgtaccacagcagataacaatacacttcccatgatacaaatttgtccacttgtctatgattgctatggctgatacaagtacctattttttgaccacacattccaaatttgtaggagcaatacatgacaataagacaacaaattggtttttccacatcatcgcacatatttcttgttgctttctacaattgatctcattttggagaacttggccatcactcaggtcacgttctctttaacaggaaacccaagatgagtccaatgatgccaacaagaactacgtaaatgaatggtacaccgccgcggcttctgccggcatcacgccttaaaagcttcagttcttgctgaagtcttctgttttgctcaacaatagaattcctctcctcagttaccttggaaataagagctcttgccttacaggaagcattctgatgttcaccccgctaattgaaagctttttgaagcc

SEQ ID NO: 42247 - DNA, 478 bp, Glycine max
  Clone ID: jC-gmro02910039a09d1
gacccgaataatgatacatacattcaattcaattggggaccaggtgagagcgagagcatgcccaaaatgataattaaatttacttaaaagaaaactttaggatcattaaccatccaaccaaagatcaacggccaccgattcaacaggaaagaaaacacaaaggagggaaaaccttacacagaaaaagattccggagaaattcaataatacacatttttttttttttattatttcatttttcccctttagaaaacagggctgggaagctgttcgggggtggggttgatgaaaacaaccttgtaaataagcccagcaattccacctccgatgagagggccggcccaaaaaatccaggggttggtccaggtccagttaacgacagcaggcccaaatgttacaagagggtttatggttgctccggaaaaggccccacccaacaaaatgttagcgccaacaatgaaaccaatggcgatgggag

SEQ ID NO: 42248 - DNA, 580 bp, Glycine max
  Clone ID: jC-gmro02910039a10d1
aaaacaaggattagagtaccaccaatagaattagtcaagcactgaactcaaagtttcaacagggataagagtaccacccattattgaaataatcactcaaaatacagtaatgcacccgtataacatatcaaagtggcgtgcggaaaacacacaggctccatgaatatgtcccgagagcacgatggaggaggaggagtcaaacacaacacaaatacaaattaaaagataatcagtactactaggcagaaccgaatttaagagaattcgagccaaatatcttagctaaatggtacaagagctgaaagacaaggtaatttcttcagccctgaacctccaccacacttactcctcctcttcagcctcctccagccaattaacaaagggttccagcgccttcacaaaggtttgcctgcccttggagtttgttccttttcggaaccaatgaagaatggtatcttcagccagcacatcctggtcataaagagatctaataatctcagggaacagcttcatcagtttagcatcctcgtagcattgcatctgtactttgtacatcagctccagctcaagtttcccgctg

SEQ ID NO: 42249 - DNA, 475 bp, Glycine max
  Clone ID: jC-gmro02910039a12d1
gattagaattttgaatatataaactttgagcacaatcaaaattcatgtgaactcgatactcgatcttactgtttagtattactataataaattgatacacttgtcaaggagttaacaactaatggtgaccactagctccccacgatcatgcacaatgcctaaagaatcaattagtcaatgtaatcttactaaggttgaacgtgtacatatagacccaaagaaaacacaacaagatacgtttttttatcatcccatacacaaatacacaaacaccttgggctcaactgacttgatcgtcagagtcctttttgaaagtaccttcccaacactggagtaggagatcaaagattttaccaagactaggaacttgatcacaattcattggaacttaaccacaacttgccagaatagaatctaagaaactctttatgctttttatcaaaccaaaaactatctttttaaatttgaacaagtc

SEQ ID NO: 42250 - DNA, 525 bp, Glycine max
  Clone ID: jC-gmro02910039b02d1
aattccaattgattaattcaatgcctagactacaaaaagtgccacagaacaaatttcttttgcagatagtcaaagttggatgcttcatactctcactgagaacatgccacatacatcacatgactattaggactcaggttggctattgatcacatttgcatttgagcagataacatgagacagcgttgagaggaagcaccgtgtgagaactgaataaacgagctgtatgtagggcttcgtttcatgtttttgtttggaccaattatttgttctaagtctttcttgtgaagcagtgcttaccacaatgcaaggtcgtcttgcatttactgggctagtcactgccccatgcctgatctgtctcttttggtgttctcctattagtcttagggatatcacttttgatcacattattactattttgatttgtagggtagtccccaggctcctcattatgtgaaggccacagccagttttctgaactgctgaattcatctacggatgcagaatcaattttgttaactgcat

SEQ ID NO: 42251 - DNA, 540 bp, Glycine max
  Clone ID: jC-gmro02910039b03d1
gctaaagaattgatcacatgtaccacagcagataacaatacacttcccatgatacaaatttgtccacttgtctatgattgctatggctgatacaagtacctattttttgaccacacattccaaatttgtaggagcaatacatgacaataagacaacaaattggtttttccacatcatcgcacatatttcttgtggctttctacaattgatctcattttggagaacttggccatcactcaggtcacgttctcttcaacaggaaacccaagatgagtccaatgatgccaacaagaactacgtaaatgaatggtacaccgccgcggcttttgccggcattacgcctcaaaagctacagttcttgctgaagttttctgttttgctcaacaatagaattcctctcgtcagttaccttggaaataagagctcttgcctcaaaggaagcatcctgatgttcaccccgctcattgaaagcttgtgaagcccctgtgaattccgcagcacttgaatgcccattctcagatacagatgcacgaggggatg

SEQ ID NO: 42252 - DNA, 552 bp, Glycine max
  Clone ID: jC-gmro02910039b07d1
cataacaaacgtaggtgggatattagagtactattattaatgggacacaattgagttcaacacaaaccgaacttattttcaagggacattattacagacccattaaacatcaaagttcttcaaatgttttgggaacacatccaacattacacaacgagcttaaaaccccccacggagacggaggacaaggtgaagggttgattccttctggatgttgtagtcagcgagggtccttccatcctcgagctgcttgccagcaaaaatcagcctctgctggtccggtgggatgccttccttgtcctgaatcttggccttcacattgtcaatggtgtcagagctctccacctcgagggtaatagtcttacccgtaagagtcttcacgaaaatctgcataccaccacgaagacgcaacaccaagtggagagttgactccttctggatgttgtagtcagcaagggtgcgtccgtcctcgagctgtttcccggcgaagatcagcctctgctggtctggggggattccctccttgtccctgatcttaaccttgacgttgtc

SEQ ID NO: 42253 - DNA, 536 bp, Glycine max
  Clone ID: jC-gmro02910039b08d1
gaagttaccaaaccatcatttcctattttgtttttattagtttacaacgggtatacctgtcatcaaactatcaccaatacactgaaatcataatcataatgtaactgataacaccaccagcattgacaaaataaaatggttaaaaaaaagaataaaacaaaataaatcacacaaatcttgtaaaaggctttcttcccaccacccttgcgggcaaagacaccgttgaatccacactcacgtttcctatagattcaagtgactgaaatttatctgggattctttgatccttgtttgagaaccctttagaccacttgaaagacccaattccttgtgacaaagggaatgagagtctcctctttgaatcagtactagttggagttccaccaagcctttctcttggattactactagcacgtactttggccctggcggaaagggttggagccatgtagttaggcactgaaaatggtgggcagcttgtgaggctgtcatcatccttcaatggcacatcaaagggtgaattggaccccacaccc

SEQ ID NO: 42254 - DNA, 506 bp, Glycine max
  Clone ID: jC-gmro02910039b09d1
aggaggcaaaacttttattattaaacagagtacaagagagatactctaatcctaatacaagatacttacttttaagatttgaacaactttacacatggagaatcatgttccttgttacatgaactagcaaaggctgatttttaattgagagatatattaaacgtggaaccaaaaaaaggtatagaaactctcttcaacctattacagcatgaaaataaattatgattgattagacaatgcaatgatacatagcttcccctgctcgatcgaatcttccaagctttttcttggcacataattaagctagggaggtgtaaatgcccaaaagggtttgaagttggtgtcatttgaaagtagtatcagaaagtacgaaggagatggggctgtagtatgtggtaaatgggctctcatgattgtgcacaccttcatatgttgttatcacgtagctgtagtcatctctatccctttccaccctttttttcacactgcatcctccacttgaacat

SEQ ID NO: 42255 - DNA, 579 bp, Glycine max
  Clone ID: jC-gmro02910039b10d1
agcgataaatgatagtgagaatgatctataaacatcgaacataatatccaattgttcaaacttcaaagcttaaacataaatagtcaatttagaggaaatgaaattgctgaatgccccataaatgaagaccttcaactggagcttgaatcatcagtttttgctgctgcagatgcataactaacactactatccctgttacttttgcactgactggattgctcatagcgaagaaatttgatttttatctttgttgagcagttccttagcatatgaagaaaaacactaattggatggcgtccacagattgtattgtcatactccaacagatattgcttgaatgaatctggatctcctgtttctatgatatccatgcccatcttgtctaaggccttaatagatttgtatataggcccatgtttcttgtcatagtgcatgtaattgaatcgagatccccagtgacaaaagtctgatgaaatagagaagaagttattggaatcatcaacatatttgggcaagaatctgcccatacatagcttcattttcagcactaacagcaccaactaaaatgggtacaatttt

SEQ ID NO: 42256 - DNA, 356 bp, Glycine max
  Clone ID: jC-gmro02910039b12d1
aattaaaaaaaaaaaatgttgataaaaaaagaaggcaaaaaacaaaaacgccacaggaaaaaaaagaaaggaaagaaagaaaaaaaaaaaaaaaaaaagaagggcaaaaaaaaaaaaaagaaaacaatcaaaaaaaaaaaaagaaaaaaaaaaagggaaaggaaaaagggggcggcaaaaaacaacggaaagaaaaaaaaataaaaaaagaacaaaaagcacaaacaaaaaacaaaaaaacaaaaggagaaaagaggccaccacaagaaaaggaaaaaacaagaccagacaaaaaaaaaaaaaactaacagctcaaacagggaaagaaagaaaacaaaagaaaaaaaaagggagaa

SEQ ID NO: 42257 - DNA, 496 bp, Glycine max
  Clone ID: jC-gmro02910039c03d1
gtgagaggaaaaatgcattaaattgagaataacaatgaaaaagtacatcaatacaaaaaaaaaagactaaacatacattaactctgctgttgggagcacaagaaattctgctgcttattgcaagagcatgatctaccagcagagttggaaataagaataacaatggaacctacttattccaacacacatacaacaaccatgccataaggggtcttttataagtagacagacaccacatggcatagcataactaatcaaaaagcatgggtctcgcataaatgatgagacccaaaagataaaagatacaagattcatccatgaacaagacaagattcttagctatttacgactgcacaatgcttactgagctctgcctctgtccctgtcttcacattaattcttcccattttctctatggaggatgcaaacttagtagagaaattttcaactgtcccttcaagcaattggatgatttgagactttgtaactgagttag

SEQ ID NO: 42258 - DNA, 302 bp, Glycine max
  Clone ID: jC-gmro02910039c04d1
catggacacccggtcccaagaaaaagttttaatattggcgcgtacagaaattacctaacccaacggttgtataaactctcggacctttcgcgaagatggtattcggacaaacaaattccattaagggtttgaacaactgacctggctttttttttaaaaaagaaataaaaaaaaagaagggtggagaagaaccttatatgggtggggggggctgaaaaacaaagcttgtaaaaggcctagagggggcgcattcgccgactaggaggactaaagagggtggcagcaatggggcttaaaacccg

SEQ ID NO: 42259 - DNA, 479 bp, Glycine max
  Clone ID: jC-gmro02910039c05d1
gtatgacatgatcattttcaaatttacattgcatccaaggaatggatatataataaaaataacaaaatcgtccataacgtacatatacaccagatacaaattttttaagacgtatgatatttgaaatgacttaaacttttacacaagaacgaacaaaatgctataatgaattcccacactgtcacacagttcaaagttattgcataccaataatttcaagaacccttattaacttacactttcaaagggattggcacaactaatattatatgctaataaatataataatcttaagatgatgaagcaggtttggaagatgggttgaaaggaacctgctaagcgcatgtaaggatgtaatgggggccatcctgtttttgtccaacaccaagaaggtcaagaatatacaggtaatgggaaacaatattggtcattgagttccaaatcaccttgttcacaaacaccatatccataaataatgt

SEQ ID NO: 42260 - DNA, 412 bp, Glycine max
  Clone ID: jC-gmro02910039c07d1
caaaaaaagcccccctttccatcaaaaaaaaggattttttttaggttaaaatctttagccctttttcccttttaggaggggggccaaattttttccttccccatttggaaaatggctacccttcccaaattttggggggtatataccataaattggaaggggggttttttttggggggcccggaatcacccttaaagaacgggtttttttttgggggccggggttcttccttcccagggaatagccaaatttttttttataaaacccccccccgggtaaacccgccggggggtttttcctggcccccggaaaccccaaaaacccggaattccggcccaggccttaaaattttttttaaggtctttcctttcccctggtgcctaaaaacgggggactttccccccccccgggt

SEQ ID NO: 42261 - DNA, 468 bp, Glycine max
  Clone ID: jC-gmro02910039c08d1
caacacacatccccttttttcttttttattctcaggtattgatacaaggttgcattgaatgcgataactaatttttgccacgattatgatcgcacataaattaagtatttttctcggaaggtgatttatttcatgccaagtagggacaaagtgaaagaaaatacactaattattattattgttattatttaaaaaaaaatcatcactaaatatagccaccgttgacacgaacaatttgaccgttgacccattcagaagcatcaggggccaaaaatcccacaacgggtgccacgtttttggtctaaccgagcctccccaagggacttttttgcacgatccgattcaccacctcctccgtcttacccttgaagaacatctccgtcgcaatcggtcccggcgcaacgcaattcgccgttatctgcgtccctttcagttccttcgccaggatcttcaccattgccttcaccg

SEQ ID NO: 42262 - DNA, 439 bp, Glycine max
  Clone ID: jC-gmro02910039c10d1
gggggaaaaaaaaaaaaaaaaattttttttaaaattaaaaaaaattgacaaacccccggtttttttatttttttttttaaaagggggaaaaaaaaaaccccccccctttaaaaaaggggggcccataaataaaaaaacggtttaaatcgggaaaaaaaaggggccctttttttttatttcccccaaaagggggaaaaaaaaaaaatggggcaatttttttaaaaaaaagtgtgaaaaaaaaaaaaaaactttgggccaaaaaaaaaaaaactggggaggaattgccgggaattttctgggggggggggaaccccccccccggggacctgccctgaacaaaaaaaactcttgacagggaaaaaaaaaaccttcccccacaaaaaaaatttcccacaggagcccccttttttggggtttggtaaaaggaaaaaggggggcc

SEQ ID NO: 42263 - DNA, 577 bp, Glycine max
  unsure (1)..(577): unsure at all n locations
  Clone ID: jC-gmro02910039c11d1
gacccatccaatattatcaagacaagccagtagggcctctgctagagtaataacaacacggacatacaatgcatactctaaaccttgattgaaggattcattctcattccctgttgctaggcatatactgttagtgagggcccaaccaactggtggaatagccttgaaagagacaagtatttctgatttgacgaactccaacatctccatcaaaactttctctttcaaaatcaatagagtccggaagcatggaaacaaaatagatttgtgctttaaagcaggtagaagaacaggtgggagatgttgcactagccaaggtatagtcagaagataaacaaaaaactgcttagcagcatggttgacatccagtgcgccaggcacttctacatcatagtttgtcagataaaatggccgcacagctaaagttattgcacttgcagtaatgaaaaaaaaatcatctgcctgggtgatactctttgactgagaggaatgattttctaatgcactaatatatctgccaatagacacataacatccacttttattaccccncaggaactgaattaaatctttcact

SEQ ID NO: 42264 - DNA, 538 bp, Glycine max
  Clone ID: jC-gmro02910039c12d1
gagatcagaagaacaaccgcttttccaaccaacaaagacaaccacaccaaatacaacaacaaaggttagcaaaaacaaggcttgtgtttaatccggcaaagaagccaccattagctatacacaagtttgaaacaattctcaagtttactcattaaactgaatcagtattcagagtttaacatcatgtgcaaggtcagcactagaaacaccatgattcgaaaacaccctctcccagagtccctttctatcagcaaccaaaactcaccagcaaaacttcttccgtaacctagctttttcttgactatcaatgtaagcaagcagctcttcttgcctcattagtgcttcataaagagcctttttagttgcaattagctctgcttccaaagcatccacccgacatacagcagcatttagcaattcctctttctcataaggcatctccgatggcttagattggagtgtgtcaaccttcacttcaagctcacctaaccttttcatcattgaggaaaggagatttgcctctacatatgctggagtt

SEQ ID NO: 42265 - DNA, 433 bp, Glycine max
  Clone ID: jC-gmro02910039d01d1
aacaacccaaataatgaatgggtgcgagtttgaaactatgtaatcacaataatatcacttgctaagggcaattcttcacttcaaaagatttttttttacagggccaaacgactattaagggtttattactgttctcctattcaatgaaggagtcattcccaaatcattcctcctatggggggggattgaaaactccgacacttcaaattcgagaaaggttgcccgatgttggcagcctcaaactcgagacagggtcatcgagctgaacataattctacggaagccatccttttttcctggcagcctcgagccttataaaaagtttttgacgctacattcccacctccagctatttaaggctcatgtggaagtggcgctcctgaatatctgtaaacactgcctctagcagagattgtgaacgcccaaatttttc

SEQ ID NO: 42266 - DNA, 382 bp, Glycine max
  Clone ID: jC-gmro02910039d02d1
ggggccaaataaatggtaatgaaatttattttaataaaaggccaaaaatttttcccaaaagggccccctgaaatgaggtttttctttggagctggaggacaacgcatagatggtcagagctctcatgagctgacgcaaaaggcaactgcctaaacttgtgggggccaaagaaccctcctactctaaataaggggtccaaatagagactgcggaattaaatttgtagttttccaaggacaaaaatgacgatttttaagacgaatcccttggaatagttatagaaacaattcagaacttgatccacgtgagactcccaaccgaaaaaaacaggccctagccaatatgccctgtgctgaaattgaggaaaagttgtaggccaacc

SEQ ID NO: 42267 - DNA, 533 bp, Glycine max
  Clone ID: jC-gmro02910039d03d1
gaaaaaaaggacggacaaatatctactataacaatcaataacaagtacattagcaagtattcaagccaagtacatcagcgagtatataaaaatccaaaaactcgatccccctgcacaagagaaaacatcagaagtccaaaaaagagctaatgctcctccaacaagtaacaccactggtttcagaaaccgagttattcagacctttcattttttgctcgagcaagacactaaatcgcagctaaacataaacatacggtaataatgtgaagacaagctactttgaagtaacaccttaaagagacttcttggcaacgaatacaagaagatcaatgacacgtgagctgtatccccactcgttggcgtaccaagaaacaagcttaacaaagttcttattcaaggcaagtccagcctttgcatcaaaaatacttgatctgctatcgccgataaagtcagtggagaccacattatcttcagggtaaccaagaattcccttcaacttgccctctgaatcctccttgatagcatttttaatt

SEQ ID NO: 42268 - DNA, 548 bp, Glycine max
  Clone ID: jC-gmro02910039d04d1
gaaaacaaaataatgcatatcgcactcttcaatttccgtcccaaataacggatttttgtaatttatccttcgtaatttcacacaaacaacaagggaaatgatttatatctctcctaaatccttccaacttaaatcactccctgctaagtcactcaaaccaaacaaagtgttaatggtataatataacatgcagaatcagttgaaatgctggaaactagataaaattatgaagttaatcgtcaattacaaacatcactccatcgtccttcttaaagtagtgtgtggtatgatcagtctcatttgtgttgctcagttctagattgaaaaagtccattgcagcagccttaaatagagggccggcgtgccatgttccccggttaagcttaagaaatttggaacctgaaatcttgaaaactgggacatactcaatggttggaggcacatatgaatgaccagaacgtgactgcacaatcttcttgcctgtgtcatgcttgatctcatttgaatcaacaacagatgacttggccactccaagataccaaacatga

SEQ ID NO: 42269 - DNA, 511 bp, Glycine max
  Clone ID: jC-gmro02910039d05d1
caccgaaaaaatataaataaaacaaaattaaacgcagccatgaatgacccatgagccacaccaatcaatttgcaaacatattcacaatcacgccaacatagcaacaacatcacccacgagcacaacaacacgcagcacatgtacctgaatcatcatcgacaacaactcctcgatgtccatttcggttcattactgcattcgccttttcaacaattcccctttcggggtaaaagacgacacaccccagaggccaaaacataacaaagaagcaagcaaataactaaaatatctcagtcctgaaacaagaattaacaaaaacaactacaaaggaacgacaattagcatgggagtcttggttgttcttcaagcgagtgtaggattctctgcaggagaagtcctccacacgatatctttaagagctggacgaagctccttgctacagaactggttatactccaaggtgtcaccgttgtcctttttaacctccaccaaccaaaacgacggcgtcacg

SEQ ID NO: 42270 - DNA, 501 bp, Glycine max
  Clone ID: jC-gmro02910039d07d1
aatacaataaatcaatctaaatattttcttattaagtgcaacaatatgctgttatcttacaatatataattgagtgaaaaatacaaatatacccaaatcaaacaacttttaaacatcaaataatgcaaaacataagagtaaatccacccttctagttcatgtgatccttaattaagaacttccttctagaaatggatagtcagtataacccacaactggatcaggagtgtagaaggtctccctattgtacttgttgagtggtgcatcaacctcaaacctcttaggcaaatctggattagccaaaaacaaacgaccataagcaacaagatttgccttcttctcagccacagccttgttcccttcttttctatcataacccccagcaacaatgaaagtgccattaaaggccttcttcattggtgcaagagtgtgaggggtttccttattctccccagaaatgtcccatcttggctcaaccatgtgacaataaagcacaccatg

SEQ ID NO: 42271 - DNA, 530 bp, Glycine max
  Clone ID: jC-gmro02910039d09d1
catcggtatctaaattcaataaaaaaagttctataggtaatgcagcaaagaaagataacttaaagaattcaaatagagttgggggaaattcaagcatgaatacatctaaaagaccatatccagtaaaattcccccaataaatcaaagctaagtcctaatataaaacatcaccctgacagaaaaaatgttggctgggctattttcacaaaaccctaccgacagatacccttctgctgccagactcattgatgttagcaaataaacagatcagctaccacttgagaagctgcttgtaaatctgtacatcctccatgaacacattaagcctcaacactgccgcttgtccaaagctttactgctttattaccattacttttctgattctttcacttcttacggaaggaaacagtgcagaaaattaccaaggacagtgctaaacatcttttctccaattttcattttcctttagtcaattaattaggttattaactccaacttcatcaagtctggcatttaagaaatgaaccata

SEQ ID NO: 42272 - DNA, 533 bp, Glycine max
  Clone ID: jC-gmro02910039d10d1
ggcatcataaaaatataattgactagttcaaaactattgtctcaaaacaattaacattaatcaaaaccagaaacgataaataccaaacaagtcactgttctaagacaaacaaaacgaaagtagagaccaacaatatcccacccagaatttacttgatcttcttcttaggcctcaactggttactatgaccgcacttcttcttacggcagttcacagccctagggtgcagacgagcatagcatttgcggcaaatcatcttgtcctggttgtatttgcgagccaaagccatgagggaaggctcgatgatgccaccacgaagcctgaggacaaggtgaagggttgattccttctggatgttgtaatcggccaaggtccttccatcttcaagttgctttccggcgaaaatcaaacgctgctgatccggagggatgccttccttgtcttgaatcttagccttgacattgacaatggtgtcgctgctttcgacctcgagggttatggtcttccccgttagggttttaacgaagatctga

SEQ ID NO: 42273 - DNA, 486 bp, Glycine max
  Clone ID: jC-gmro02910039d12d1
atgggcaagtatgaattagcttctttcattatgatgaatattaagtcctcaaattagctgacgacacatcacagagaaataaacttcatcggaacaataacataaaatgggtgatattctattaatccaaagcatataataaatatccaagcctacaaaatagacaaaacgttaatcagtatccccgcattaatgtctcagtagctaagcgatgacgtattgatcagctagcatacagactttaagatacaaatacttcacacttaggacccatctggctgcataaaggggttggcgatctcatctgtaccatcagttggggacacaagcatcacagcagttcctctacaaacaattaagccaagatttctggtctggtcagtagttttgagaggatcatcaggatctcttaaaaactctacagcttcatctaggacaaggttaagcaattgatcataccctttcagagtccctgtcacttgtctt

SEQ ID NO: 42274 - DNA, 551 bp, Glycine max
  Clone ID: jC-gmro02910039e01d1
acaaagagtcctattcatagatttttggctcttaacaatcaagaaaccttatgcaagcacatctaaatgcccaggatcgattatctaagatctttacatctgagttgatttgagaaacactctcaataactgctggtaactattttctgacttggaattttcaaattcttgtttccaaattttcatctacttgacactttatcactcttcatcatcaaacttgacttcctggttgctcattcaatctcaaagtagaccaacagtttcatgcccacacacacacaaaaaaaaaatcattgcttttacacctttttttcaatctaaatatcatttgaaagaacttccaaatcttcgctgagtccaaacatttccgacagagagctccaaatggaagaaatccaaccagaagaatgttttagttttggccttggaacaattgatgcttcatgagttaaatacggcactatataagttttcatgtcactacgagagatatctagatgatctcctgatacgttaacaaatttaactttcccagcttcgtcaagagc

SEQ ID NO: 42275 - DNA, 529 bp, Glycine max
  Clone ID: jC-gmro02910039e02d1
cacagaaattaagatcatattaccataatcttcataactgatcatcaatcatatttttctttttcatttttctccgcatagttaaaataaggggggaaaaagagaaagataaaaaactgttcaagtggataataaagagtaaaaatagaaaaaaattaataattcctttccttcaacgaaccaaatacatcatttcgcgccgttttcaatttcttctcttcagaggcaaagaacggtgcagaacagatcatcggttgccacgtcagcatcgtccaacggtaacacgtttagatcaaacggcaacggttctcgccggaaagacgacgccacgttgtcgccgtctccgtcgtccacaacggatgacgacgagtcgcagtcgctgcggcagtcctcgggaacgacgggcggcgtccggggatatctccggttgacaatcaccggcgccgtcgccggcactgaggctcgtgggccgatgaaggattctacggcgctgctcataccactggaggtggaccgccggtgatcctgg

SEQ ID NO: 42276 - DNA, 573 bp, Glycine max
  unsure (1)..(573): unsure at all n locations
  Clone ID: jC-gmro02910039e04d1
gaaacttaattgtttattaattaatggaagcagtaactaatgacagatgatgattcattctacaacaccgtaagctacttctactaacttgtacacattaacattaattcctgacgagttaagatggactccatattcaatttagcaactgttatgtacttcaattgcaattataatatgcatgtaatcacaaatcatcagtattgggcacgcacggaataatctgatcgtgagtgcaaatttacatccaaaatttgcagaattcgtgctcaactcatcccatttcctttctcctctatgtcaagctcagccattttattacataactctgtaccacgatcctctttgtcattaatctcactctgcggttcaacacctgaactaataatatagtcatctgatattagccattttcctttgttttcacggtcagattgtttgcaagtatcatcatcctttaccacattatcatctaattcaggcgaagagaaagacagtgatcttaccacgttgntcttggggacatgagaagattcactgcctgagggtagcaacatcagaagcggtggatga

SEQ ID NO: 42277 - DNA, 546 bp, Glycine max
  Clone ID: jC-gmro02910039e05d1
gcacaacagtaaattttatttcaagctcaatcgttcagaatccttgggaaagatggcaaaaatattaaatatacttataacatttaataaccgacatgtattcatgagcatcgggaaaggtagaagggtgaggaagaaggcgagccaggatcaatgataattcaaatttgacccatttgcaagtcatggtggaggtgtccgccgcctccggacacggcgaggtctattatcagagcctccatctgaagattcgtttgcatcatcagatccagattgtccatcataattttccccccagagtgtagtagtgggtctccttattcgcatttggagtgtggtacccctggacatggaagcaggctgaagaatgaggaaaaacacagccagcagaccaccatcatctatggggtcatcaaccccaaatgaagtttgaagtgtgctaaggaggtcgccaagatccctttggcgcttcaacctcctccagctacgctgacgctctgggtctaccgcagatgggcgctcgagaggatgtttaagtcttgcatg

SEQ ID NO: 42278 - DNA, 487 bp, Glycine max
  Clone ID: jC-gmro02910039e06d1
gaatgaacaaaaaaacaagcattctcattgatgattgatcggggcgcaatatctacaaccattaacacttaaatgtcttgggggaaaatacaaagcatgcaactgagatttcaagtgcatgtgaaatctctttactcaaacactattataacactggcactagacactttgccaattaagacagacagaaagaaaagagcatgctatctatctacatctattggaaatcaaaaggaaaacgggtacaccaaacaatttgtttcaccggccatcagcagaagtaaaagaatctgcaaatccagtaggccttgcagggatactactcttactgtcttcaagggccatataacttaagtcctttccttctgcctcttgccatcccttcaccatctggttaaggggaaggctataatcaatgccggaatactcctcggtgtcatcatcaaagggtttccatttttcgacaagcggtgccaacacattcacg

SEQ ID NO: 42279 - DNA, 404 bp, Glycine max
  Clone ID: jC-gmro02910039e07d1
aaaagcaaaaatatttttttatttttccaacttttagcccaacaaagccgaggttatttaaaatctataatacctccccccctttttattcaaggggacccttggttgggggcccgatttttttcggggggataaaacaaaacctgggttttaattaaaaccctatactggggggcccttgctttagggcaaaaatcgcccttggttttggaccggggggcaaaggaatcatcctgggtaaaattggggcgggggtaaaaaaaaatgtttttgggaagggtgggttggggttctaaaaaaaaatattggggaaccctggggctggattaaaaaaaattatttttgggaacgcttggcctgggttcaaagtcttcatacctcctaaatttgggggtggggaaaaa

SEQ ID NO: 42280 - DNA, 320 bp, Glycine max
  Clone ID: jC-gmro02910039e09d1
atacacaagtgatttcttttatagtacttcaaaatggaaaagtgttttggtgttcaggatcagaaaaatgctaaaaggaagtaaaatcatgtgaaaaacactcaattatatatattgctagcaatgggttacaattgaaaccaaacttcacctgtaattcatttgggagtagggggagcggggtaggccattatcattggcataatactatatattgaagctgcttgagttctttttcaggtgctgaagtagcagttgcttcaaaaatacaattctgtcagacttgtattttggattatatcagacttgtgaccccactt

SEQ ID NO: 42281 - DNA, 514 bp, Glycine max
  Clone ID: jC-gmro02910039e11d1
gatctaaaaacatccattaatttaactcggatcccagctacacctttccctgcactaaactctactacaccaagcaaaagctcccgtttttattaagtaaaccatacataaaagaaaaccgaaaagaaaagaagatcaaaggaagataggtagcacctaaggttcactaaattctgataacgagatacaaaagggtgtgcagcccacatgtaactttgtgtctatatcccatgtgaggaacagctccctttcaaagctcatcttttcctttttcttgctcatcttgtccttgttcttgctgagcaggtttatcttgtccttgttcttgctgagcaggtttgtcccgggtcttttcgatgaattctatgatgtcttccttggtcctacccccttcgtattgtgataactttccacttgctgacctgaagtacacggttggataaccttggacatcaaaggttttacttgggatatcggtggcagttgcatccagttttgcaataacaacatcagc

SEQ ID NO: 42282 - DNA, 481 bp, Glycine max
  Clone ID: jC-gmro02910039e12d1
aatggaaaaaaagagagatactttcgaatatatttgtattgccaaattaagtttgagctacatttaacttttagccatcaaatttctaagtatggctctagagagaaatatttagccacatatgtaatggtagaatgtcacaagcctcagtaatatcatttggggggggaagatgatacataaatactacttgagcaaagatagagccattctttaatctttagcaatttgacttatctgaagagagccatttttttgctgccaataaatcaggaagaacaactgcaccagatttccttcattccacagcatttggggtcttaaacctatccaacaatagggcatgcatccctatgctcttagctggctcatagtctttgcgcatgctgcccccgatgtgcaaagcttcttcaggtgcaatatttccggccctttcaagtgccatctcataagttttcgggtttgggtttttgaccccttc

SEQ ID NO: 42283 - DNA, 543 bp, Glycine max
  Clone ID: jC-gmro02910039f01d1
cgtccaaaatttactttggaaatagcattaagtccaaatgttaatttgcacagcctatttatgtggtttttcacatgcacacatatacatattcacaatcaaatacaaaaagagcaggggccagaaaactacaatacaaacaactattgttggcccttgtataacaataatatatatcttttttggagcataattgaatgaaccgtgtgtggaaatcaaatcaaatccgctggttttaatttagatgccttgaggccctgtcctttgatctgactagcgggtgtagacatcacacacaagcggcgagcaatttcggcaaaggatggccttactgctggattaggtgcccaacactgctccattagtgttttccactcaagatcacaatagctagggattgtcggccttaatgtgttattcacaatgcctcctatgattgcgccatagagcatattaccatatggctcatcaccagtaagaatctcctatatgacaatgctcaaagagaacacatcaaccttttctgagaccttattgctacta

SEQ ID NO: 42284 - DNA, 400 bp, Glycine max
  Clone ID: jC-gmro02910039f02d1
gttattgttctttttttggaccccaagcagggtggataagcaagcaataaaaatgaattctaacgagggacaagagatcttgatgaaaaagtacaaaaaacgacccatcttaaaccataaaaaccgtgagttgcccctttaataactggataaaatgggccaaaatcataaaaacaaactggtgtagtaggggaaaacggaaggctaagaggaccttttaaagcaaagaaggtatttttcagaggatctacaaccaagaaatgccccaagagggtcgcgaaaagcttctccaacctaaagaactactacagatgaaccccttggggatgcagggcgaacaaaaaggcggaaagggattgggaagaccacaggctcactgtctgaacggatgaaagcgccc

SEQ ID NO: 42285 - DNA, 541 bp, Glycine max
  Clone ID: jC-gmro02910039f03d1
actcaattattcattttcttgtatttatatttaaaacaggcatattttacaaaggacacccatcaaaacccaaaaaactacacaaatgagctatatacaagcattcagttgacatgcatatatatagtagtgcaatataacgaacaaacatcatatccatgcattctatcacaaacaaggaacactaagaagcatatatatcattattacacatccggcattccaaagtttactaaatgatgcttttatttagataataaggattaaaactctagccaaacccacttcatcaccaatcacacactctttttttttcttgctatgccttgacaagatgatcatcaatatctttagtgaccttagcagcaaagtccaaaaaagaatcaggagatgcagcagtgatattctcctgcagcttttcatattcgaaggtccatttcacaattcctgcattttccttattaatcacttgtaatgtgccccttaaactcttgtaaccttcactgaattccccatcaaagaggctgtatgatattatctt

SEQ ID NO: 42286 - DNA, 420 bp, Glycine max
  Clone ID: jC-gmro02910039f06d1
aaaatacaaactgggccatcgacccttagaataaactcaaattaacaacaaaggtaattacactgggccattttgctcaatgaatgatagaactaacatttcaataatggggtcatgacaacattaaagatcatccaaggtaattacattggcattataccaatgaatctcaaaagattttttttcacaattactctcaatatcacagcaagaacttttcaagggtttttttaatgattttggaagaaccatttcccacaaacctaacctacatattggggtggagggctcataactgggtacccttatgccatttgacactaactcctttaaggctcctcttatttcttcactattcaaaatgtctagaaatctttttgataccccaaattgccagaaaacaacaatggcacaactttt

SEQ ID NO: 42287 - DNA, 472 bp, Glycine max
  Clone ID: jC-gmro02910039f07d1
ccccccctctagtagtcagtggtgggaagctgctcgtgggtgtggctgataaagacaacctcgtaaacaaggccagcgattccaccaccgatgagaggcccggcccagtagatccagtggttggtccaggtccagctcacgacagcaggcccaaatgtcacagcggggttcatggccgctccagagaaggccccacccaacaaaatgttagcgccgacaatgaaaccaatggcgatgggagcaataattcccaaattacccttcttggggtcaatggcagttgcgtagaccgtgtacaccagaccgaaggtcatcacgatctccaacaccaaggcgttgccaactccaactccagcggagagtccgaatgctggaacagtggaggcggtgacgaaggccaggaggagggaggcgacgatggagccgaggagctgggcgatgacgtaaacgatgccgcggaggaaggtgatgt

SEQ ID NO: 42288 - DNA, 482 bp, Glycine max
  Clone ID: jC-gmro02910039f11d1
acgggcccaaaaaccgagtttccctccgcggggagtggcaaataaatatctttataggggggccccaaaaaacaaacaacgggccggggtttaacaacgggggggggggaaaaacccgggggtaccccaaataaatggcctgggaaaacacccccctttacccggggggggaaaaaaaaaaggggccccccccaaacccccttcaaaaaaagggccccccccaaaggggaaaggggaccccccccggagcgggctataaagggggggggggggggggggtccccccagggggccccgtaactttgggcggccccaaggccccccctttttagattatttcccttttttttacaaagggtcgcgggtttcccccccaaagctaaaaaaggggggcccccttggggggcccgataaagggggtaacggccccccccccccaaaaaacttgtgtggggggggggggccaccggggggcccccccc

SEQ ID NO: 42289 - DNA, 528 bp, Glycine max
  Clone ID: jC-gmro02910039f12d1
acaaaacaataaacaaaatctccatttcatactcaatatatgaatgatacatgaccaaaataaaactataaatcagacagaacccggtggcgcattgaattagtatctccattacagttatggacattgcatccaaacccaatagaaagatcagagtattacgcatcccaagaagtaaaatcctactacaatttagcaccgagatgtcctaaaccgcattacatgagcacaaattcgagatgtcctaaaccgcattacatgagcacaaattcgagttgtcttggaagaggaccaagaaataaaagctagataatgttcacccctgcatccagaattaccaatccgcaagactcccaaaggcattaagccttattggcaatgttgttggaaagccagtccagaccttcgtaaaggccctccccagaggttgcacaggtgctctgaatgtaccagcggcgctgtctgagagagtgtagacccaacttgtcggtaatctcagcagcattcattgcattaggaagatcttgt

SEQ ID NO: 42290 - DNA, 418 bp, Glycine max
  Clone ID: jC-gmro02910039g03d1
gggggggcccaccataaacaaatcaaataaaaaccctcccaacataattttggctgcaaagtgcaaaccattgcaatggtatacatagaacttatgtttttcgcactttggggtcataatcataatttggttttacccacaacttattaatgcttgcttttggaaacctataacacccttgaaggaaactggaaccagccccacgggttatcaaaaatatatggggtgactcggttcacactcaaggaattattaaggccccatttttcttagtcacgaccaaaaccactgggtttaatgcctccccagggggcttgaggaaaatatggtctataacaattaactcaaccaatctaaggcttaaaagccttagtaatgcgctcacacttttctagagcatttgggattacgggacaac

SEQ ID NO: 42291 - DNA, 551 bp, Glycine max
  Clone ID: jC-gmro02910039g05d1
aaattcaaacaatcacatttagcagaagagatacaaacatttggattcaatcaatttccaaggggaggtagctaaaatccaatatctaaactttagctacactatcgagaatgcctaaaactatcaacaaataccagaggttccatccaaacatccatgaaaacgtacaagaaaaaaaaaactagagaaattcaatcacctctcctaagtactacccctcgtggttataatttagagatctacttccaattgttaatacaagataaacttccgacatcatccctaaagttgatgaggtcaagacacagcttcattatcaagaagcttgtggtgttatgttgtaaaaaaattccaaagcttcttccctattgaagcttcaccgggttgcaggtaatcttcgtcatcctcattctcaactccaccagcagcatcttccccatgggattcactcctatactcagcatcattctcctccacatcatctgctgttccgttcacctcctcactcaaggccatattgttgacaaaggcccgatggtatcaccaccata

SEQ ID NO: 42292 - DNA, 350 bp, Glycine max
  Clone ID: jC-gmro02910039g06d1
agttgaaaatatcttttatctcggaataatagaaaacaaaagcttacgtgatatgcacaaagggaggttactacatatcatactggtacagatggcatggcactctaaaatgcatgcaacagggaacactatcacttggtcacatacaggcccccatggagaaccataggaatcaattctggtatggaagaaggaactgtataaagggactacggctcttggtgctaatgcttagaacttgaagctaacagtcatgcaagataacttcccttcataattccaaggaactttgaaggtatcactaagggcaaatgcttaaaccatcgttgagccatgacaccaataaatgg

SEQ ID NO: 42293 - DNA, 492 bp, Glycine max
  Clone ID: jC-gmro02910039g07d1
acttgcattataatattatatgataatagggcctttttaggagtaccaaactaacaccttaaaaagacaaaagagaaaatgttcttttaagcaagaacagcaatgactactagaatccgccatgcattgccattggttattgctacatagccattacacactcacatatatgcacatagataacaaaccaccaacttaactcacaacagggttgccataaggcaaaaatatatgggaagcctaacatgctccaagtcttttgccatccacaagtcgtttccagtacaaagcaatttttttttgagtctctattgcactcttaaccttctcactagtctcactagtctcactagggatggctgtgatatgagcaactttggtagtgagggggctaggaagtgtgtccaagagcttcacaaccttctttatgtcagcagcaagtctttcggccaagccacgggtgaaatcctccctgaacaccacccggaggac

SEQ ID NO: 42294 - DNA, 576 bp, Glycine max
  Clone ID: jC-gmro02910039g08d1
aataagaataagaatcaaaattaaaatcaaataaactggataccaaccataaggccgcgacctggtatacgaaactttcattacattaatgggttgttgttcatagggtgggagagaaacaactatgtacagcaacaactacaaggtgggattgttttaaaaaaaaaaaaaagcaaggtcgatatcaccctatatcacctcactcaaaaacacaattgattaaatactagggattgtataactgggcaggcatatactactaattccgggatttccaaaattggacggatactactcttttaatgccatcttatatatttgatttgaagcagtcactgataagcagcagtcagcctcgatttcatcttcaagttatgttttccaactggatggatggcttcatgacagttccttactttccatcccagaatctgaaagctatggaaatcaatctactaatcattaggcgtcaaggccattttctgaattgaacttttgatgtggctgacatataacaacttttgcatctgcaccatcactagccatcaccgactgttttttttatttttcgagctc

SEQ ID NO: 42295 - DNA, 427 bp, Glycine max
  Clone ID: jC-gmro02910039g10d1
gaattctgacaacgaggaactgctatcatttatataattcactattaaaagccaaggttgtcagattttgtatggaatagtgttcgcaaaacctcaaatttgggaagcaaacatatacacatttaccgcacgagagatcggcgaaaataaagaacctacaatttggactgtttcttggaacttcgaccagctatgaattcctgcatcttcttgaattgctccttcgtcattccattataataattatgagccctctccttttcaagggaaagtgcatggccaagatccagcttgaggccatcattgatgaccgccttgtacctcaacaccaagtcttggttatttttcacaatggcatccgcaatttccctgcttttcttcaacaattcacccttttaacaacatggttcacgaaacccaacttctt

SEQ ID NO: 42296 - DNA, 359 bp, Glycine max
  Clone ID: jC-gmro02910039h01d1
agaaaccatactttttatattaaattttgcataaccccatgcacccaaacataatggagttgacaattctcacaacaaaaacacgtgaaaattgatcgggataaatgatttcgaggctttgaaataaaaacaaatgaagggggcacaccttcacatgctaaaacaatttggaataccgagtttgctggagaacaatattttaatattctaaacggctttataagggaaaattacgggccattatgaaaaaaggcctgtaaaaaacgccttctaatggagggacaaactaaaatagcccaggacatccacaatttgtaacgaagaacatgaatgcccaaatgttcaaaaccccgagattt

SEQ ID NO: 42297 - DNA, 497 bp, Glycine max
  Clone ID: jC-gmro02910039h02d1
cagactgtatttgtttactttcattaggtttaaataattatagtagctcagaacatgccctccacgatgaagcttcacttcccctttcccttatccaagagaacacatattgaataattatggtacaaggtgttcctagtacaagaaaactagattagaaagtaaaaacatgtccaccctggccacaattcaagcatagagcacttgacaagtacaaggtgagaattcgcggaaagcagacggcgcctccacaacctcccacgtcacactaacctcaaaatcacctttccctgggattctatcactcttcatctttccaattgcaacgtttaaattgtacgatgccacgtagattctgttgtccaaacccgtcgccaaaaacggactctttataacgtccctcggaaagctccctcctttcacgtagcgccacgtgtcctgctcctcgtcgtacaccctaaccggcgcgtccccgtattccgctatcacgaaaaccc

SEQ ID NO: 42298 - DNA, 538 bp, Glycine max
  Clone ID: jC-gmro02910039h03d1
gcaaatcaaactcatgtaatcatagataagtcaacaaatgatttccatgtaccaaaatgcaaggcataattaaaatcagtgctgaagtatccttcaaccaaaaggtggtggtccataacataccaaaagtgtctaatctaacgaaacaaactcaacctgaaaactgtatcaaagccagtgcagaaaataacaatccatcatcactacgtaaactccaaaatataaaccttaagaaacaaggttgtcattaagagataacgaaacaaactcaacctgaaatctgtatcaaagccagtgcagaaaataacaatccatcatcactaagtaaactccaaaatataaaccttaagaaacaaggttgtcattaagagataaggaagccagctgatcagcagtaccgccagcctgctgctgagcaacattccttaggacgtccattgcctcagccacctttgctttcagggcttctggcgactcatgcaaatgcagaacttcagtctggtccatctcaagaagcatgcctgtcactttggcagca

SEQ ID NO: 42299 - DNA, 407 bp, Glycine max
  Clone ID: jC-gmro02910039h06d1
aaaacaaataatttcatggtactttttaaaagtgatagcaaaaaacacaaatggaaaacgagtttgcaatttgcacaattttaagaagtgaatcatacccttggcccggctatagcctacagatgtcacactagtttccctcctctttgaatatggaatgcgcaagggtttactttatcaaaacctgacattatttttgttgaaggcacttcattacagctggattttttttaccaaaagccacagtagggggagggtcttccttgttttgaccaacacaatggtaataaccttccttggccgaaaaattatctggcttggtatatttagaggccggggagatattcatccccacagattacaagggattttgaaggatcattttgatctgaaaatgctttattggg

SEQ ID NO: 42300 - DNA, 492 bp, Glycine max
  Clone ID: jC-gmro02910039h07d1
ggaacacaaatataaagttgacatttaaaaagcaaaccaacaacgcaacggcaaagccctaaaactcgctgcgcttaacaaaaatgtaatcaggggttctcacaacccccacacattaaaacagaatgataaaaggggtcttgccaccgtcgatcaagaacccaattttgggaacaaaagttgcgagatgatgggggagacttcaaactatgtccgaaaaacaagctacctagaaacgaagacacaagggcaagaaaccaacatttattggaaccataagaaacgacatcccctgatgaaccaaaccgcacgattcacttttttttctgggcagccttggggaccttggctccagtaggatccttcttctccacgttcttgatgactcccacagcaacagtttgacgcatattcctgacagcaaagcgaccaagtggggggtacttagagaaaggtttcaccaccatgggtttggtcggaatcattttaaca

SEQ ID NO: 42301 - DNA, 550 bp, Glycine max
  Clone ID: jC-gmro02910039h08d1
ggcaagtcacaagattaacattattccgaaaagttcaaaagcagaaatccgcaaaacattgtgtggagaaaaattccaattactgcaacttagcaacacaaaacacagaccccaagattattacaccatacaaagttatgttcacttggacaactcctgcgagaaagtgctagccagagattgaatggttgaggaagaaaccgcacttgagccaccaaggtaccatttcttgatggcctctaccacattggcattctctatcacatacttggagtcttctttcccctccaaagataccacaatctcagcagtggcagaatttgctgggaaatggtatgtgatcactgaaagtttcttgaagtacttggactggaaaaattcaataactttttccaaagcttcttcttcttcctcctcatatttgtcctcagctgccaacctatccctcaccgcagtctcaatctgaaccccatactgtgcacccttgatctctttgatcaccacaagtctaataaacttctccaccgcggcagaaatgagagcattgaag

SEQ ID NO: 42302 - DNA, 567 bp, Glycine max
  Clone ID: jC-gmro02910039h10d1
gcacaaaatgataattaaattaacttaaaagaaaacttcaggatcatcaaccatccaaccaaagatcaacggccaccgattcaacaggaaagaaaacacaaaggaaggaaaaccatacacagaagaagattccggagaaattcaataatacacattttttttttttattatttcatttttcccctctagtagtcagtgctgggaagctgctcgtgggtgtggctgatgaagacaacctcgtagataagcccagcaattccacctccgatgagagggccggcccagtagatccagtggttggtccaggtccagctcacgacagcaggcccaaatgtcacagcagggttcatggctgctccggagaaggccccacccaacaaaatgttagcgccaacaatgaaaccaatggcgatgggagcaataattcccaaattgcccttcttggggtcaacggcagtggcgtagactgtgtacaccaaaccgaaggtcattacgatctccaacaccaaagcgttgccaacttcgacttcagcggaaagccccaatgctggaacaggggaggcaatg

SEQ ID NO: 42303 - DNA, 485 bp, Glycine max
  Clone ID: jC-gmro02910040a08d1
acgctggccatggaccaggtggaacagttgcagagtttttaacattaatgcatccaacgttctcaaccagaaagtaaaaaatgtacatccttttgcccttttccccttattaaataacacaacttaaaaacaggggggcagtttggccacagacattgaccgtagttcatttcacagtcggcaacattaaaatggaaggaaggaataacctgatacattttcatatccaaaaaatggaaaattttgttgtttggcattgccaagagttcctaaattattaaatttagcaattacaaaaaaaaaagggattaaaatgagaacagggctgtgtgtgattaagacgctgcagattccttagcaattttctcggccttggcaatgaccttctcaataccgccaaccatgtaaaacgactgctctggaaggtcatcgtattttccatccacacaccctggaagctggcaacgttctccttcaactcaaca

SEQ ID NO: 42304 - DNA, 513 bp, Glycine max
  unsure (1)..(513): unsure at all n locations
  Clone ID: jC-gmro02910040a10d1
caacaaaagtttaaggcatcaaatatcaaggtcgcagtaagaccaactcaaaacatgaccgttcatgaaaacagcgtaggtgccacacaaaatacagtaagtgaaaacccataaatacataagccattacactgctgctacatctaataccgataaatatccaatggtaaaatggcctagtctgtaaacagactctggtatctatcagcacggataatcatcagctgcaccgttctgcgtcacgattactcatgccaccaagcacttaacattgttcccaaaaaattctacgatggcatataggtagaggtatcgatctgctcaggaagttgctttatatccacctgaaaccttgactgaacattgttgagaacatcaacatcagtataacaggaaacaaatgtgattgcaaggactttggtgccaaatcttgcagctcgaccaaccctgtgtangtatgtgtcagcagaatcaggcatgtcatagattataacaatgttgacacgttcaata

SEQ ID NO: 42305 - DNA, 377 bp, Glycine max
  Clone ID: jC-gmro02910040a12d1
ggaaacccacattataagcaaatgaaatagccagaatttggggcaaatccaaaaaagggtgcattggcacatagtatacataacctgggaaactaacagcaatcaaatttgttcgccatttggaatgggaatttgaatacaaataccgggcataaataatataaccctatgtacacagccaatttttggctgaaatttgatacaaaatagtatcaatttgtatcataaaaaaagggcccaaaaaaatttatgtgaaggtaaaggggaagggtatcaactgggggtaaaaattttcggctttcatttacttaaacatggggtccttcctgcacgttcacattttctttatttggttaagccctgttgaccttgttttt

SEQ ID NO: 42306 - DNA, 463 bp, Glycine max
  Clone ID: jC-gmro02910040b09d1
attcaaaaccagttcctgatccattgattatgatttggtttttcaaagggattcaatccaaaaaatagtctgtgagaactatcagatcaatgtttatgtaccccgaaataatgagatgtgcaaatgtggctagtgcacaatcactaatttattgactacaacaaggatagttagggaagtttaacttaattttacacctttcagccgtacaagacttgattgtatacaaagaagactcaatatgatggatggaaacaatctcattaggaacggaacttgaggctcactgattcatagcttggaacatagagaacatctccatatgatgccattgtgagaggggaagaaatgagtttttgcgaaattgaagtgatatcctttgaggttacttcatccactgccttcaagaaatcctcacaggtttcctctaccatatgtaaaatttgtcttcctatatcttctg

SEQ ID NO: 42307 - DNA, 510 bp, Glycine max
  Clone ID: jC-gmro02910040b10d1
gaataccaagaaccgtaatatatttactatttttcttttcagatttacataagagtctaggtggtaatggtataaccaatgggtgactactgactagttagtaaaagaaaaaaaatcttgatcaacaaacaaatttaaattaaatataagaataaatgacccatgacccaagcttcttcaatgcctttgagacggaaaaccaatgtcacccaaacccaaaaatgcccaaaaaaaacaagaagaaaaaaaaaaacttctatataattcaaccccttaattagggacatctcacatttcttccaggtccaccatagtaaaagtaattcccccaaacattattaatccctccttgtatgtcatagcaattcgggtgatccgctagaacccgaagatttgacaatggtaccaagttgttatcccaatccacaacttgcatgttcctaaaatatgaagctttcccaaaaccttcactagcaaaatgtccactacccatttgagtcgaagtgtgag

SEQ ID NO: 42308 - DNA, 506 bp, Glycine max
  Clone ID: jC-gmro02910040b11d1
aaaaactaagttacctgccatttactagtagaatctgttcagaacttacatttcagatgccaaaagcatacactcacttgaaaaaggaaattacagagccatttacagaataaccttcccaaggaaaaatacaggtaaaacaaggcaagtgccacgcagaactgcacaaataaaagctcagctcactcattgctcgcaccaaaagcttaaacgagcctccatatgttaattaaattcacttcaaaatcagaagaacatcaatggttaaagtagtaaaataagttagaatagacgtgcattttcttcaatttacagcttggttatgtagaagccttagttattgcaagagctaaggtctcttaggtcagccattggtgatgtttcacctaacagttgggtgtagtgaaactcaatttgtagcagtctatggtaaagggatgctgaaaaaatgagacctttcttggcatctgctttcaattctctgatagggattgcagctaggaagc

SEQ ID NO: 42309 - DNA, 410 bp, Glycine max
  Clone ID: jC-gmro02910040b12d1
aaccatgttaaatgacatcatatgacatcatatgatccatataacccacatcatctaatggaatatgacttgattattgtaatattacaactgattcaccatatacaattcacattaaaatttcactataatcgtgaaatctgtaagttaaaaacatttcaggaggttgaataaaaatacataaaaagcattaaaataaaatcaacagaatttatttccctatatatagcgagacataaacgtaagtaaagagcagaaaaataaaataacataatccaacctgtatcaacaattcaatctgtgcaatgtacaggcatcatatttttaactgtccaaagaaacatgaattgttaatagccaaaaaaaaaaagatttcatttgaacacaatctggtgaatacctaaaattaa

SEQ ID NO: 42310 - DNA, 513 bp, Glycine max
  Clone ID: jC-gmro02910040c09d1
acgaccaaaattttttaattcccaaaaattatgattctggaaaacaatttgtcgcaccaaacaccccctaaagctagatttcaaataaactaggcatcagacatacatctactgccttattttctcgcttcaaaattccacgcccggaaaacctatattctctgaagtagtagacaagtttatttttcgcaaaaaatacatgtcctatgcagtcatcaatagaatcttatttaaatgatgcttagtaatcttgggctaaacaatcagtagggctccacgggggctctgaatttggcaccagcatacacagcagcagaaccaagttcctcctcaatcctcaggagctggttgtacttggcaagcctttcagatcggcagggagctccagtcttgatctgaccagttgctaatccaactgagaggtcagcgatgaaggtatcctcagtttcaccactcctgtggctagccatgacaccccaaccagcttggttagacattctcacagcttcaata

SEQ ID NO: 42311 - DNA, 400 bp, Glycine max
  Clone ID: jC-gmro02910040c11d1
aaagaaacgtgaatgttataaatggaaaaatgaaatcagcatcactaatataaatagagagaaataattccaagccagcagtataacttgaaaaaagcaatatttctacacagcaaaacgtgtctgctaatatgtagggaacttagggtccacattgggggcccaagactctaggccaccaacaatatccttggcagaaatgaaacccattttgtgaagatactgaacagccctttgagaatcatttccccttctgcatactacatacaactgtgcacttgatccagaaactacaccaccttcctcttcctctttcttcaaagctgatgatacttcaggcagcctagcctctaatgttgagagtggaatgttcagagactttggtagagatacaatcttg

SEQ ID NO: 42312 - DNA, 367 bp, Glycine max
  Clone ID: jC-gmro02910040c12d1
aagaaaacagagaatgttaacttctgattatctgcaactgcaatgcaaggatgagcacaaggtatccaaactgtaatcgccgttttttgattttcgtgaacaaggaggtgctagatactttcttagtaaactaagcacaataatcaaaatgttttctctgtctgaggaaatttacagcagcccaaatggggaagatcatgataatgtcttcaacttgtctgaacattcgtcataatctgcgggtgctttgaagtttttcactgatttacccaagacatttaaaacagcaacacgctgcaattctttagcttcctctaatgaaagctgaattgatctcttctctaactcaacagcatgtttgctaagt

SEQ ID NO: 42313 - DNA, 431 bp, Glycine max
  Clone ID: jC-gmro02910040d10d1
aacacttaacattaatttatacaaacagaatttcttcattaacacttaacagcaaacacgagaacattcaatcaccccaaatacataacttaaccatacataggtagatgaaggaatcatattccttctattcacttttattgaaaaccagggaaagtactgcaacaaccatagagcccctagatggagatactgttgggaattcctctgaaagtcaatccctcctcactagaaggatagagcaaagtgtaaggcattttagccggcccactgcggtttctcaacgtctcgtccttgttcttctgtataagcttttgttcaatctcttgaagcttctttccaaacctcttgaaggcctctagtggaccagcatcagaagtccaatagtcaccaccatctctctccccaaggtagaactcatcagatgtgtg

SEQ ID NO: 42314 - DNA, 463 bp, Glycine max
  Clone ID: jC-gmro02910040d11d1
aagtccaacaaatccttccagatcaaatattattcagttttgtttataacaaaactttttttttttcttttccagtagatacaagcatgggaaaaggaatcttaagtattgaacaacacacccctgcccctataagccagtaactattggatcagaaaaatgatttattgcaaaagttaggttgaaagagaaataacacatatcttaactatatatccaagattctaccccgtatcatggcctcggctttcctcacctccttcactggtccgatgatgaagaccttgtcaggtgggcccttgggacctcccgtgagaatttcggcattgcaagactgcttaattgacaaaattgttgcccctcttttcccaataacaagtcccatcttcccttggggaatatcaagaactgaaagaatttcttcttgggatcacttccatcagcattcaggttatctggaatc

SEQ ID NO: 42315 - DNA, 380 bp, Glycine max
  Clone ID: jC-gmro02910040d12d1
gccaaaattgcaattctgatattgactacaaggacgttcataagtgctgcagttgctcattctttattctacaattctactgctgtctgaaattgtcccgttttatgaagactacattcttatagtattccatttatagggcaatcagcacaaaaatcctggggtattgaaagggaaatttggatcaatttccaccggatcaagtgagaaattgaaatcaggaattggagaattggttgctgatgtgttggtggaaatgatctcattgatatcggatttcgaatgtgacctgttgtagatcccatcaaactcattcatctggaaagttggagatgggaaataatttgattctggtgtttgtggggataacaagtgtgttt

SEQ ID NO: 42316 - DNA, 444 bp, Glycine max
  Clone ID: jC-gmro02910040e07d1
cacatctatttcacaagtatgacagattcttgtaaataactacactggtttacgagatacaaagtgacctcatcaatgtcatcaaggtgacaaatttgcaagactaattacatgatcaccaatcctgcagatatacatgattgacttttatttcagacctacgtaccttgttaatcagggaatttgctcctcctggagaataatggcaaaaatacaaattacaaggtttttttagggagatcacaaagtgtccctaataagatatgtatatatatatatatatatatatggacggtgctgattccgataatgactaactagctggcagccaaatgggatcctcatcagactcagaagatttaaaaaacgggaacgagagaaaacttattggatatttgaaaaatcaagacagggaaaggatgaaccatttttcattaactcctc

SEQ ID NO: 42317 - DNA, 415 bp, Glycine max
  Clone ID: jC-gmro02910040e09d1
agaagtagtacatttttcttggtttctaatataaaaaatagattaagcagtgtaaaaatagaataacaaaataacatagtaaaagaaagaaaaaaagtaaacgccgatcaggccaatgcagcagcagcagctaaagccattattattctcacattaccacctacgaccgagaatatccataaacctacaaaacagttcaaaaaaagaaagaaagaaacaattccattccaaaaaaaaaaaacaatctcagacctctcagtacttataatccttaacatgaagtgactcagaagccccttccccaagcgtgggatcccccttataagttccgagagtagcctccgaattcgccttgcaccttacaagcaacgcgctctgcgccttggggatattctcgtcctttccaccccacgcc

SEQ ID NO: 42318 - DNA, 503 bp, Glycine max
  Clone ID: jC-gmro02910040e10d1
caaaataaattaatctcaataatgaggtaaggatacctgttagtcacactttaaacaaacatgtgatttagatttacaaaacaggatgctgctcatgtggaacatgagagaatccgaatctaataatcaataacctgtaagaaggaacctagagaacctttaaattacagtatagtaaaccactacttacttactatgtaactatgaatagtaataatacaagtactttgtcaccttaagatcactaaagaaagaaaagcttttgggaaaactaaattcacaagacctacggactacggtgtgggtgagttcagaaaagaacccaaagagaaaactaagtggttaatcggtggagccctgatctccatagccataagggtttttgctagcccaattccattgatcacggcacatctcatcaatgccatattttgccttccatttaagctctctttccgctttctttgttgatgcataaacaatttcagcatcaccaggtctac

SEQ ID NO: 42319 - DNA, 514 bp, Glycine max
  Clone ID: jC-gmro02910040f09d1
catataaaaagcacacaacacttgcgagtgggatacttttacttcttaaatggataaatacattcgtggtttcaaaaagtaaccagagcttcaattattacagcttatttacaacacgcttaacaaatttacaaagaaaatcctccagaaagcgtaattagactgcttcggcaaagccaacttggagatttccatagtcaaagacggtgtgatatgccctcatgaaaacatcgccaagaatccacaatggaccctttggtggaggaacatcaaaagcaataaacccactaaggcagacatttgtaatgccttctccagttcttagaatatactgctctggtgggaggacaaaaggcttatttccaattgtgaacgtattgtttggcatcttggaaagactattacaggctatcactgactctccagaggacttggtaggctctcacacagttgattacatagttgaatactctgtccttcgatgccttttgttttaggtgattttggatccaag

SEQ ID NO: 42320 - DNA, 376 bp, Glycine max
  Clone ID: jC-gmro02910040f11d1
aaaggaaaacatgaccccttttaaacaaactttaccggcataaaagtttttccccctgccaaccgaccttaattgttttatgtacaaaagaaccccccccaaataatgatccctcctttccccactcaaagcaggaagggttttatcccattccaaaacccaaataaagaagacgggaaattcctgtaagcttttaatgaaaaagcccaacccccgacttgaaacaaaatatttaagccaatgaaaaaaaaaagaaccccgtttgaaaaaattaaatccctccccccacccccaaatgttgttgtggttgtaatgttaaatataaccggaaccgtaacctccttttttaagttactctccaatgggtttgggcttg

SEQ ID NO: 42321 - DNA, 480 bp, Glycine max
  Clone ID: jC-gmro02910040f12d1
gtctgcaatcataatcaacaaagagccgagtacatcagcaagtatataataatccaaaaactccatcccctacacagaagagacaacaaaaaaaagcttaatgctcctaacagggtaacaacaccggttcccgaaaccgatttattcatacttctcatttctgcccgagcaagaagacactaaatcgcaggtagacaccagcacataatgtctagacaagctacttttttttcagtacaaccttaaaaagacttcttggcaacgaatacaagcaggtcaatgacacgtgagctgtatccccactcgttgtcataccaagagacaagcttcacaaagttcttattcaatgcaattccagcctttgcatcaaaaatacttgatctgctatcgcccacaaagtcggtggagaccacatcatcttcagtgtaaccaagaattcccttcaacttgccctctgattccttcttgatagcattttta

SEQ ID NO: 42322 - DNA, 393 bp, Glycine max; identical to SEQ ID NO: 8055
  Clone ID: jC-gmro02910040g08a1

SEQ ID NO: 42323 - DNA, 518 bp, Glycine max
  Clone ID: jC-gmro02910040g09d1
caacacaatattcaatatttgaagttacttgaaaagttggtcaaaagagtcaaacattatgattttaaaatcttacaatttcaataacatcctgctcataaacaagtaaactacgtgctccatcaatgcttacaacattgtgacaacaaaccaggaaaaaaaaaacctccgactgatgattcggcgaatccacggttattgcaatccatatagctgttgagtagagaaccacaaccgaatatcttgcctcacaatgatcctccaatccttggaacatcgaataatgtaagttgatagctatttcaaatgaggataaaaaaatcactagaaccacgctaccaatgtccagtttcattttattaaataccattttcaaattgaggaaatgaaacaatcaagaaaaataactttaaaaagcataacatttaacccttgaacctcaaaataagcaccacagcacaccacgccatgccatggatcaactttgaataaatcgaaaaaaagaatcaaattatccc

SEQ ID NO: 42324 - DNA, 348 bp, Glycine max
  Clone ID: jC-gmro02910040g10d1
gtaaaataatgttattttagatgctgaaaataaatattcatacatcttcacatatggattactaatttactggttacattggattgcatggtctcagaataaataaatcccatttgattgagtgttgtgtagtctttttgttttacaaacctcgtcaattgattcaaaaatgataattttgaaccaattaaatgacattgacaacacttttatttttaaatggaaaataagattcttttatttgtaagagaagcaaaagtgcaaaactactataaaaaaaattataaattgtccttggtctttcagagttcgtccttgacatcatcggcttctttggttttcaaaacg

SEQ ID NO: 42325 - DNA, 342 bp, Glycine max
  Clone ID: jC-gmro02910040g11d1
cctgctagaaataaagcgtatatcatcaaagtatggtaaaacatcaattcaggctaacacgaaactgacaaaaaaaacggctactccaacttcaaaaatagtatccaaaatttcggacctagaaaataaacagtacatgtaaataaattttaaaaaaaaggcctccttaaacccaaaaaaaaatattttctagttgtgcaacgatgatccggaattttcaatgaactttcactcataattttcatggttatcagcagcagagttgaaagatgccaccctggcaataaattaagccttcttttcctaataagtaagcttctcaaagtggaccctttggggctc

SEQ ID NO: 42326 - DNA, 465 bp, Glycine max
  Clone ID: jC-gmro02910040h08d1
gaacataaaaaacagcgcatatctatcggaaagtacagaatcaaccataaaagaatgaccagaccagatgtctaaagctaccaaatgcaatatttacatgcttacggaagtcgttacttgctttcaatgacataaattacaaaaggaacagaagaaaaaaatttcataatttgttattcaagttagaaatgctcctaggacaactttgcagatgtatcaaaaccttgcttctgcaattctgccctaagccaacaccttcaagaacaccctaaaattagaagcttgctagcaattttgctataaatagcagtcaaaatttgcacatgctttgtgaatatatgcagttgaggtttgaagctgattcatgttgagcatccagactaaaccattacaatacactactactccagaagtctgaatatttgacatcaaccaaattttgactcagttccaaaatagctaact

SEQ ID NO: 42327 - DNA, 431 bp, Glycine max
  Clone ID: jC-gmro02910040h09d1
ctaaaatcaaggaaattgaaagaaaactattttgaattaaaatcgttgttgagattcaaagcccctaaaatacaactgacatttgttcgcagaatacaaatgaattggcatttgttcgcataactagaacgttaaaagaaagacaagagggccagagataatagaggatagtttttcacatatacagcccttcaggcaccccttttttttttttaaacatcactttatccttggccttcttaaagtcggcatgagtcaccttcattcgacgttctcgtagagcaagtaaaccagcttcagtacatattgcctttatatcagctccggagaattcgtctttagtcataacaaattcttccaagttgacatcatcagctaatgtcatccttgacgtgtgtatctggaagatgcgtctccttgttttgatatca

SEQ ID NO: 42328 - DNA, 427 bp, Glycine max
  Clone ID: jC-gmro02910040h11d1
aaacagacaaattagaatgtatcatttcaatgaatatatcaacttaaccaaacaaaacttggccgagaaaatgttgaagtcatacaaaatccgtataactgacagatatcaaggggaagttatatgatggagcaggcaaaaagggaaaaggtgcaacagaggcatacgatacgggaggacgcgcttcagtccgatagggacgcctggccttgatattttgatcgccgttatcatcatccaactctgaagactccgtagaggatgcagatttcacaaaaccctttgctttgtcttctaagaattgttcgttttcagaacgacggtgaatcaaaagcccagacataaacacagggaggtaaaagaagactggcatggaacattctcctttggcttttttttggtacggtttctatagaatgaaaatgct

SEQ ID NO: 42329 - DNA, 438 bp, Glycine max
  Clone ID: jC-gmro02910040h12d1
gaaatgaagattgttttttcatataaaaagcacacaacacttgcaagtgggatacttctacgtcttaaatggataaatacattcgtggtttcaaaaagtaaccagagctacaattataacagcttatttacaacacgcttaacaaatttacaaagaaaatcctccagaaagcgtaattagactgcttcggcaaagccaacttggagatttccatagtcaaagacggtgtgatatgccctcatgaaaacatcgccaagaatccacaatggaccctttggaggaggaacatcaaaagcaataaacccactaaggcagacttctgtaatgccttcttcagttcttagaatatactgctctggtgtgaggacaaaaggtttatttccaattgtgaacgtaatgtttggcattttggaaagactattacagcttatcactgac

SEQ ID NO: 42330 - DNA, 496 bp, Glycine max
  Clone ID: jC-gmro02910041001a1
gggaaaaataagtttaaagcaatatattgctattgtttttaatacacaatagcatgcaaggaaattcttacaaaggcaagactaatcagctattctatcgctaataaaattgaaattaaagaaacaaaaatagcttcctagagccaaaatttacaacttgcttctccactaaattcaacagaaaaataaccctagaaaaacacttcaccatatatattttaaacctattttagaaatcctctggtggatatgcacatggagtagattgctgtacatcttgaggcactccactccatcaaaacgagtctaggtaattatagtgacgttttctgttgaactctaacaagctaccataggttcggtcagcaatacccacaaatagagcttctgtgtctgggctaaaggatatgccagcaatctcaccaaataggtcaatctcttgaccttgttcataacctgaatgtgagtcaaaaatatggacgaagtctgcaggttc

SEQ ID NO: 42331 - DNA, 575 bp, Glycine max
  unsure (1)..(575): unsure at all n locations
  Clone ID: jC-gmro02910041002a1
aaaaagaatccttaagattaaataattagcataaaaaggacaatacaatctccaatattcagtaaggaactcaaattacgctggccatggaccaggtggaacagttgcagagtttttaacattaatgcatccaacgttctcaaccagaaagtaaaaaatgtacatcctcttgcccttttccccttattaaataacacaacttaaaaacaggggggcagtttggccacagacattgaccgtagttcatctcacagtcggcaacattaaaatggaaggaaggaataacctgatacattttcatatccaaaaaatggaaaattttgttgtttggcattgccaagagttcctaaattattaaatttagcaattacaaaaaaaaagggattaaaatgagaacagggctgtgtgtgattaagacgctgcagattccttagcaattttctcggccttggcaatgacctcctcaataccgccaaccatgtaaaacgactgctctggaaggtcatcgtattttccatccaacacaccctgnaagctgcaacgttctccttcaactcaacatattttctggggca

SEQ ID NO: 42332 - DNA, 509 bp, Glycine max
  Clone ID: jC-gmro02910041002d1
aaaacaaaggaactcgagacaaaacttttctctaataccttttagctacatataaatacacgtatgatttagacaacacttctaattaaaaacaagaatgaaatacacgcactttgtaattgatttaaagttacagacagcaccgagaaacatatatctacatcattattgagcatctagctgtagaaaacccgaagtaaaattgtcacacaataatagcatcactagaattatgaactaagtactttgttgatcagagactttggttaaactggaaccgtcctagcagaccctgccatctctatagcctcagcaccatcatctttattctgcccacttaactcttccagtgattttccctttgattctggtactaacaaggtgaataccattccaaagaagttgatcacaccaagcacaatgaggggagttcttaaccccaataccagttgggtaaccatgatcaaccttgttggggatcgtactttgtgcagcatacaagaatccaa

SEQ ID NO: 42333 - DNA, 504 bp, Glycine max
  Clone ID: jC-gmro02910041003a1
aaagaagaatcattttcagtacatggcattcagtatgctaagaaattatgacaattaggcgttattataatgccaaataatacaattgcagactaacaaactcatatgttgttagcaatacatcaaaaataaactgatggtgaggtaggggaatttataagaaattatgtaaaacagaaaataaaagatgaatcattattgacattattttgccatgtatacatgtaagttaatagaagcagactcaaaggctagaagagccccagctggcatcaacagcatcaatgatctttgcatgtagtgtggctccagaacaagcaactatgccacgatcaaggccttctaaatataagccttttgagaagtctaggggaagtcctccagcatctgttaccatcccaccagcttcttgtatgatgataacgcctgcagcatgatcccatattttctccttgtaaccggcccttgcaaacttcatgaaaacctcagcatccccacgagcta

SEQ ID NO: 42334 - DNA, 400 bp, Glycine max
  Clone ID: jC-gmro02910041004d1
aacaaaaaaaatcacatttcttatgaaacaatactattttggtagtgaacaattgtgaagacaggaaaaaaatcaacagaatcttacaaaagattaatatgaggttctcctcccaactaaaagagaaaccccaaagtaataaaaaaatttcaccaacaccatgtgtaaaagcatacaacagttatgaaatactagtatatactataccaatcctgtggctgtataaaatttacaacaaaacaaaccaaaaaatgcaataaatcgaatggaaccttatttgtccaataaatcctagtcccccacttccaaaatttccaaccttccatagctaccaaaaagggaaaaaaaaaattccttcagcatagtagagactcacggaacatgtcatctctaggctcct

SEQ ID NO: 42335 - DNA, 471 bp, Glycine max
  unsure (1)..(471): unsure at all n locations
  Clone ID: jC-gmro02910041006d1
aaacataagaaatcaacttttgacatggacaattctgaaaacatgacagaggtcgcaaacaacaggtcctaaaccaccaaaatagaagcataatgatgatatcacttcacagtttgaataatggagaactatatcacacaggagtaaaaacaaaaaggaacgaacaatactggttcagggtaatgtaacgaagcatataccctttttactcgaaacaattacattgataataaaaccttcatttatgaatagtcctctccttcctcatcatcttccgctccttcagccccaacctcctcatagtccttctcaagagcagcaagatcctcacgagcttcagagaactctccttcttccataccctcaccaacataccagtgaacaaaggccctcttggcatacatcagatcaaatttgtggtcaatgcgagagaacacctcancactgcagttgttgtgctgatcatgcata

SEQ ID NO: 42336 - DNA, 500 bp, Glycine max
  Clone ID: jC-gmro02910041007a1
gagcattcaaaagtatccattgcaccgagatgagtcctatacgcttacttgacaatatacaatacaaaacagtatcaagagaatgatatcaaactcaacgtgacaaaatggctttcgttactttgctacctggggaacatataaaagtaaaagaactatataaattaatccagctgaggaacccaaaaattcagatctgggccaaaacaaataggaaaaactgagtaaaaaaaatctccctcatttgctattacgctgctgtggcagaggtgggggctcttaactcgattttctatcctttctttccgcaatacccaaacttaacatacttttgaaccctttattttctccacaaaagaaaattcgaccagaaccttaaagaattatgttttaggtcttccttattcttcaattcatgaggctccgagcttctctttgttaagaacaaaggaaagaaaggaaaagtactgaatgcaacagcacaacgcaagacacacaca

SEQ ID NO: 42337 - DNA, 432 bp, Glycine max
  Clone ID: jC-gmro02910041007d1
agaaacgtgcatatgcccaacttagcatatgataaataagcaaaatcatgtcaaaatacaaacagttaatagaactgtgttgctattattttctgctgcaaatacagagtgttatttgaggatgccaggaatatcaatcaacattgatgatgaatgcaacaattatcataaaaaatcaaaatcacacatctaggacattttattgcattttttccctgtcatttaacattgagactacaagtctaatccatccgttagcatgtattttaatacacccgagccttgggagggaatgattcaacctcatcatccaatacattcaaatgcaccggcctgtagtccaaccggacctttttgttctcccagaaatccacagtgtgtttcatccagttcccatcatctctaactttgaagtcttcacgggcatgagct

SEQ ID NO: 42338 - DNA, 426 bp, Glycine max
  Clone ID: jC-gmro02910041009d1
aaacgaaaataatttcaatttataaaaccaacagtagtaagacagactatcaaaattgaactttttttttgcacttctaaggaattaatttattagttccttgcatttgggtggatggccgagatggcaagagtgatgaaatctgctattttttcaggcatttttcctatgttttagaaaacaaagatcatagcatttcactagaaaggccgagatggtataaccaatgactttctgctgctatttttcaagcccttcagcttgagaggagtccacactaagggtttgcgtctttgatgcctagggctgccggcaaacttactgctgctcctcataaagttggtgatgctgtctcgactgaggttatagcttctggcaatggggcaaacaaccttgaatactgagtttccctttggttcctttccg

SEQ ID NO: 42339 - DNA, 406 bp, Glycine max
  Clone ID: jC-gmro02910041010d1
acaaataagataaaatcaactcagcccgtcattaacaaggccatggaacaatttcagtgttatacatatgcacattattttctcgaattaagatcatcatcacaaattaatgtcccccacaacttattcatgccagattttagaacagcaattcatatcacagctttgaaggcgactgataccagccccacggttcatcagatatgtacttggtcacttgcttcacacttaaatagttctcgagtccccattctcctagttcacgaccaaaaccactacgtttaacgcctccccatggagcttgaatgaagcttggttgagcacaatttatccatacaattccagcctgaatagcctttgatatgcgctcgcatctttctagatcttttgacattacagcagaccc

SEQ ID NO: 42340 - DNA, 422 bp, Glycine max
  Clone ID: jC-gmro02910041011d1
aaatcagacaaaaaccatagtccataaaagtataataatgtaagaatggaaatatatattttcacaactatacagacatgttacattatttacaaactcattatcaaaataatgctactaagaatccaaaaaatgcgtagcaataatgcttctctggtgtgtcctaaaaaaatactaatattagttataaaatactgaatagcctataagatatgctcaaagtatggtcaaaagcaccaaaagggccatcataaacgcagaggtaggttttatcttaaatgagagattatgtgacagctcaagaacattagactggtttgatgtttcttcaggattcacagctatggcaggagaaatagcaggggaaattgatccggtaatagctaaagtagagagttcatcaacataacagttagattccc

SEQ ID NO: 42341 - DNA, 464 bp, Glycine max
  Clone ID: jC-gmro02910041012d1
ggaggaagaatataaatgacattatgagcccaaccaaaccaatggtacaatattttattctaaggcaagattttatctaccatcctaacattaacattcccaaccacacaacatgttacataacattgtctcaaaagattggaccagctgcgagaatctcttctgtcaggttgttgttgcccttgccaatcttgtagttggtgaaggtttcaaaaatgttcttgaacaatccagccaacttcaatagtgtctccttgtagccctttttgtttgaccaaatgttcacagggtctagaatttctgaagggacaccctccactttcggtggggatctcaagcccaaaaattttagtcttcttgtactctgcattcagcagacttcctgagtgaatagcatcaatgatttttcttgtgtatttgagattaatgcgacttccatagccatagctgcattttgacatgtg

SEQ ID NO: 42342 - DNA, 299 bp, Glycine max
  Clone ID: jC-gmro02910041015d1
agaggactgatccaaaattcaatatgcggcccatggtctaattccatgactaaaactgtaaagctcaaatatactatcctcctaaaaggattagatgttgaaatacaagtaattccaatgaaagacaaactctctcgagtgatagttccttggtatcttagaaggagcattattcaaaattgaagctacacttctgtgggcaaaccatgggaacctactaacaaggacagtagccaagaaggagcgatggtctctaatttaggcatgagtgagccaatgccttttcctcagaaagctct

SEQ ID NO: 42343 - DNA, 261 bp, Glycine max
  Clone ID: jC-gmro02910041016d1
attaacactattagttttttggaaaaaaagaaaatcggggaaaacaaatttaaaacccatccccagaaaaaagaaccgggggggttttaaaaaaaccgtggggggaaccacaacaaaccccctttgtgacccggtatcgtaaccccccaaaaattttgtccccctaagaccccaaaggggtgaacccatttgggcccaaaaaaattcaatggagggggggggacccccggggggattttaccccaaaaccgaattagaaaa

SEQ ID NO: 42344 - DNA, 398 bp, Glycine max
  Clone ID: jC-gmro02910041018d1
cctcgaatgacatgaaatttgaccattagaatgattgtattttacataacctgttttcccaccgcattgcagagatgaacagctcacaaatacatacaatgtagaatggaattttatttggaatatcaatgcacaacagaaaaaggatcgtgtcactccagcagggtagacaatcagacacagtggcgagacttgtttactcctgaatttgaacaggctcaaaacccctctggatagaagccttcacagcatccaataccagctgtgttttgctagtaattgttggccacttcttgtcaggcttagagtttttgaatttgatttctgcgaccaaccgggcaaattctctaatcaaaagagcctcctgagggagatcagtggttactgtatgcttactt

SEQ ID NO: 42345 - DNA, 301 bp, Glycine max
  Clone ID: jC-gmro02910041020d1
atataatatttatttttttttttttttacttcttcatttttttttgctctttattgattacttttttaaaccacattttatttattattattttttgggggcccaaaaaccggaaccccgcaacatgcagacagacaggactaaaaaaaaaaactggataccaacacctcccccaaaaaaatttatgtcttttagtaaaaacatgccctcttaaaacacccttacgtagaaaaaaaaaatgctatcaggggagccacaccccaaaaaccttccccccccagaaaaaagagggggggggggg

SEQ ID NO: 42346 - DNA, 562 bp, Glycine max
  Clone ID: jC-gmro02910041021d1
aaaacgccaatacaagaggagccatcatattaagactatatgatagaattagcactcggcagttgcaacttattcagcacatcaaaattttgataaagtaactgatcaaattccactcaagtgcccatagcaaaggctgcaaacaaccaacactagtgttcggccatccgtaagaaactgaacaaagaagaaatgactgggagaaacttcaggatctaaccaccttccacctgtatgtgttcatgtaatgactgttggagcggatcgaccagtgaattcttccatcttcgaaagtttcaatgcaacttccacaagaggagcaagggcttcatttgaaagtctcccaatctttgatggatccttctcatattgctcaatgtatagtcgaattgttgcaccttctgatccagttccagataggcggaaaatcaatcgtgatccatcctcaaacaaatatcggattccctgatgtgatgagatggaaccatccacaggatcattgtactcaaattcatcaccgtgaacaacattcgaaacatctgaccttatccccttaatatct

SEQ ID NO: 42347 - DNA, 428 bp, Glycine max
  unsure (1)..(428): unsure at all n locations
  Clone ID: jC-gmro02910041022d1
gcaaggaactgtaagaaacatgaaattaagatcgtaaaatccttaatccgtctcaccctctaatgtgactcgtctgtggacgtagtttacagacttattatatttaaataggacattaagtaacgttcctcagtggcagaacacagacgagtacaaactacaaaatgataatacaacttacatactagcattcaaccaagaaaacaaaactaaaaaacccaaactaacaacaaaactgcagttctgagaaatctgaaaatgattcgaagtgaaagccataattgattttaagttctaattgctggaacgcaactctggacgaacaaagtctgcatctggtggcacagaaatgtctactgtgggtctcagttcagcgcaaactttaatggctccatgcactgggtatgacangaagttgctgaataaat

SEQ ID NO: 42348 - DNA, 464 bp, Glycine max
  Clone ID: jC-gmro02910041023d1
atatcaaatttctagtataattgttttcattgctagtaaacataaggcaagttatatcattcaaaatatagctacaatgacgaactttattcttctcttccacgcacaattatatgacgtcccaggcccttcatgaaacgatgaagtgatggtaaaaagacaaagacaacttaggagaacaaacaagacagaatctaaaggacccaattattatgcataataaagaaccacttccttagttcaaacttcaaagctttgatgtttccctcgggtgatgcacgacaatgtaattataagcatccagagtgagaaaatcatcaagcattggtgacgtgcattggcgagtgaagatcttgcaagcctccttgtacattcccttcttgaacttctctgtccccacttccttttcaatcctagccatctcttcttaacaaccctaccaaaagttctttgttcactttcac

SEQ ID NO: 42349 - DNA, 500 bp, Glycine max
  Clone ID: jC-gmro02910041024d1
ggaataaacatttttgtaacatatactgagacatgataaaccattccacagtggcttaggcgagacataatggttccatatacaataatgatgaggacaataaaaatgacaaccaaattgcctcttgagataattatagccggtatgcactggacaacactgatatgcacaaccagttagaagccacaataactacaaataataaaaaaagctatcattacatgattacagcacacagcagcagctgcaactgtataggcccgtatcaaagtatattaacatggctgtgaatcgaaagtgtgcagattcctcaacatggctgctaaaaacttccctgacatcgatcttctacacttcctcttgactgagggtgttactttttaagatgttatacttgcagagggggcatgtagcattaatatacagccatttatccacacagacacagtgaaaatggtgaccacaaggaagttctcttagctcaaccccatcatcgtaag

SEQ ID NO: 42350 - DNA, 448 bp, Glycine max
  unsure (1)..(448): unsure at all n locations
  Clone ID: jC-gmro02910041025a1
ttgtaggatcaagagccttgcttcaattccaagatcctcctcctccctcaaccgcacctttttcttctcatgttcctttagcgccggcgctgttcgtcatcggagattcctccgttgattgcggaaccaacaattttctgggcaccttcgcgcgcgccccgatcaccttccttacggaaaagatttcgacacccaccaacccgccggaagattctccaacggaaggatccccgtcgattatcttgctcagcgtcttgggcttccttttgtgccaagttatcttgtgcagacggggttgtgggggatatgataaaggggtaaactacgcttctgctggtgctggcattattctctctagtggctctaattgggacagcatatctccctcaggcaatcagcaatntacagacacacttcagcagtttatattcaaaatggcgaggatgct

SEQ ID NO: 42351 - DNA, 381 bp, Glycine max
  Clone ID: jC-gmro02910041025d1
atgatacatatttttattcaatcgctaatctcaaaatttgaaagaaagcgttatttggcaaaacctgaaaacagtgcataggagaaaaaacaaaagttccctcctaaacttatagcgagcacatgcaacgggaaattgaaacattaggggaagaaaacgaaatcatgcttgcacttttgcattttgccaaaagattctatgacccccctttgatcagttgcagtgcagcctactatttgggaagggccggaattgctcccttttgggaagaagtaatagctccacatgcattggcaaactttagaacttattttaaccattgttcatctttaagtatggactgatcatcgacaatcttgggcgataaagcaccaacaaagg

SEQ ID NO: 42352 - DNA, 169 bp, Glycine max
  Clone ID: jC-gmro02910041026d1
ggggctacaaaatcttggcaaggccttatttattgaagggaaactttttttttagaaaaaaaccctgggaaaggaaataaaaatggggccattaattgcctatggtacacgtgaaccaagcttggagggagcataaactcctaatgccaccacaaaaactggtgtcccc

SEQ ID NO: 42353 - DNA, 227 bp, Glycine max
  Clone ID: jC-gmro02910041084a1
aaaaaataaaaaaaaaaaaaaaaacaaaaaaaaaaaaaaaaaaatcaaaaataaaaaacatacaaaaaacaagggtcggcccccatctggtgtgttcgtcaacccgagatttatttcttgcccgtcctttgatggcttcccttctttccatattcagagtcgtattaaacctgggcgtaataatcggtttagctgttgaactgtgtgaaactttaatccgtttacat

SEQ ID NO: 42354 - DNA, 469 bp, Glycine max
  unsure (1)..(469): unsure at all n locations
  Clone ID: jC-gmro02910043a12d1
atattcaactctgtttttatttaaattataaataaaattacatttcaaatcatcattcatatgaatttacattatttaataaattttattgttaaactcaataagcacacactcactctttaccatgcatacccacccgaaagagtgcattcccatgttcgattcacaacctgaagcggttcaaggaagattttccatcaagggcctttgcatagtagtatgccacgaaatcttttatggtagtgtctctgtacattggcggattttcttctgaaattagttccttaattggaccatataacttctgtaaaccttcaactgggtcatccgaatgtccaaagaaggtcccaaagaagcttgctacagaaattcttgggcatgtcttctttgataagacccggtggcacacacttgacaacttgtcatttgtgatgagctgganaaagtctcctacgtttacaacaagagc

SEQ ID NO: 42355 - DNA, 549 bp, Glycine max
  Clone ID: jC-gmro02910043b08d1
gccgtaagttcgaatctccttgctaacaaaaactaaaagctaacattggctgattaaaaaaaataacaagttccttaaactaaacaaaccaaattgcctcaaaagtcaaagccccattatttttttttcttacccaagtatggggatcaacgagggattaacaagttcatcattcaacagaaacaaacatgacaggtaaacaggattgcaagggaaaataaaccactttgtgccctcatttaaggagagtcttcacaattgatttgacattgagcttcttgaggtcagtataagactgtccacagcccacaaacatgacaggagctccagatatgtaaaccattgaaagtgcagctcccaccttatcatctatggtgtcaaatttcgtgagcaagatcccatcaatcaatcttggattaagtgatgttgcaaggtcagctaatttctgattgaactttgaaagctgatcaacagcgtcattaccaaccagtgcttctccaacaaattagactagatctggattgtaaggtagatgagttttgacagtgc

SEQ ID NO: 42356 - DNA, 397 bp, Glycine max
  Clone ID: jC-gmro02910043b11d1
ggacccaacactgaagggaattattttatatatacctatttggggccaaaatgttgctcgaaaagacaattttttatgggtggcctaaatgggggggcttgccttttctttttaacagttttgaatttaaacccagcttttggaaaaagaccttttaacacactaatttggttttttaaaccaccttccatctgatctcaacatgcattactccattccttgaatttattagagggtacttatagttaatgccaccattgggcaccacatctcttaggataatttccacatgccccaatgatttctttggcaaaaaaataaagtttttcctcttgctcataacctcaataagtatcttctcatgtagaggaggctcctctagcatgaattggaattt

SEQ ID NO: 42357 - DNA, 348 bp, Glycine max
  Clone ID: jC-gmro02910043d12d1
aaaaacattacaacaccgtaaagactgggacacttcgaatcagggggcatatcagggttatacatgaccagcgttctcgcgcacgaatatgcccacaatcaatttaaaatgaaaacgggaccaccttaaaggatcccccaacaagcttaaaacccaaccgaaaaacggatgacaaaagtaatggcttatacattttgacacaatgtcaaatacatgggaactaactacttggcagacactggcaacaaaaaaaaaaagcatcactaccgtggggatcactcttccctgcaaactggaggcccctacaaagacactaaaccttcaagaattggcgataggggaatgtat

SEQ ID NO: 42358 - DNA, 417 bp, Glycine max
  Clone ID: jC-gmro02910043e12d1
gggaaaaaggggggtaaacttttactataaaagtaaccgtaacattttctgtcttaaaaaaatggaacataacgtagatttttccattccttaacaacgctgtttcctttcatttctctcccaaacaattcatttacccacaagataggatatgactatgatctataaataattgggaattcactcctggggtgaaaaaaatgaatcaactcgcctaatgggcatctgatttttccatgccgttcaccaaaagtttcagcactttctctctaaagaaactctattattttctattccttcgcatctgggtcaaaggacacaggtagggaactataatcttgtgttttggggagggaaaagctacgacgctctttcccccctggcttagaagaagcattgccataccaaaccattcct

SEQ ID NO: 42359 - DNA, 329 bp, Glycine max
  Clone ID: jC-gmro02910043f10d1
caaacttgattccaagggctaaagggtacacttgaaactgtcactatgccaggctaagattctttagtgcgacactacgtattacatggctgaaacaagttttgaacaagtggcgatccaggatttcactacgcatagtgacccagcggcatgccacatccctacattttatatttaaattcgtacaattaatgcaattccttcttcgacttggctatgtgtacaaaggaacatcagaagggcacgcttctggactcttctaaatggtatgtccaattaagactctattgctcctgaaggtttgatggtattttttcataaacataatt

SEQ ID NO: 42360 - DNA, 277 bp, Glycine max
  Clone ID: jC-gmro02910043f12d1
ggaagacaaaaaccagtttattttacatattgggaacggtacataaacccttcaggatgaaagggcattgccataaaaactttctacaaacaaaaaagtccaaacctttttgggcggcctccatataaaaaaccccccctattagatttaagccccccttagttttccaaaggccatttttaggggccctcaaagaagttgaccccaggggttttaaaccaaaaattgccttggatgaattgggctaccgggaacttgctggccccaattgcagttt

SEQ ID NO: 42361 - DNA, 568 bp, Glycine max
  Clone ID: jC-gmro02910043g10d1
cttatcaaataagctaatgatacattattattattattattattattatacaacaacaaaaatggatcgatatggcaacattatgttattttatgccttgacggtcctaaatgggatgtaaaaagaatttgaaaaaagggtggtaaatggtttgactgggtcctgcagtgcgtttttgatcttttatctctatgaactaatacaagcctggatctcttccaaagtttttcctttggtttttgggactaattttgctacaaatagaatagttaagagggaacatccagcatacaaaaacaatgtaccaggagaactccagctcataagaaagttgaaagtatatgaaactacccaagctcctagccaagccaccaaaaccaccaagcttccagcagtccccttcaaatgtatgggaaatatctcagacattatcacccatggaactgatccgagcccaattgaaaatgctgctatgtagattcagaacgccagcaaatgctaatataggtacccactcaggcaataaagcttggtccttgagaaagaaagcaaaggcagcaacaaagca

SEQ ID NO: 42362 - DNA, 481 bp, Glycine max
  Clone ID: jC-gmro02910043g11d1
aatcgaagcattttcaggcaataagttcatttgggaacaaagaagacataagtgaagcaacaaaatcagactcactagtaagccagcggaaggagttttcaaaaagattcctttttctttggccactggccgagtcattttttgtatccaaatagaaacaaaaaaaaattgccatccatatgaaatgagctaggcaatagatggcatattttgagcttcatttgagctctttttggacttgtgctttgatttcttctcccgcttcttgccctcgtcatgagagtgatgaccccaacaagacttcagttttcggttgatatgcttcaattccttctcagaaggacttttgtattttctaacccaagaatcaattgcatccagtgattcagaaagctcggacattgtatgcatggaattctcacgggaaaaaatacccctaagataactgtcaaagtcaatgactctgtggagtgcatttgag

SEQ ID NO: 42363 - DNA, 305 bp, Glycine max
  Clone ID: jC-gmro02910043g12d1
ggacgtgcaaagaaaaaattgttttttaactcaggatttaatctgaagcatttacccccctggttaccaaattacaagtttccttcccttccccctcattgcatttttgcaagggaaggcacgtcatattttggttttgacccatgtttttcataaaaaccctgttgtttttcgagaaaaaaattttataaaaacaacttttaagagacctaatcaaaactgggtgagagatccttatgggtacttttctggcttccataaaaaattcattggcttgggtttcttgaaaatggcaaacctaaatt

SEQ ID NO: 42364 - DNA, 455 bp, Glycine max
  Clone ID: jC-gmro02910043h10d1
ggaagcaaaatgcaaaatgagcaaatttattcatgccgaaattttccatcctctgatacaaacaaaaaaatttgcttgtgcaaaaaagagacaatccccttttccataattattaataaaaaggatttgttaaaaccacaaacattcttcatatttacatttcaaagtaaaccaaacaggtaattaatgtgagcagcaagagcctgcaccaaaaaaagagccaactcttatgctatacttcaattcccaagcataacaaatgaatgacctacttgatgacattttttttaatttgccggcaggaatcgaagacagataccaggggatttaaacaactcacgcatgatacttaactaactgagctagtcccctgagctaaacccctttaattacttgacggcatatgaacggatacatactgactcaagagccttagtgtacaaagtagaaaaact

SEQ ID NO: 42365 - DNA, 419 bp, Glycine max
  Clone ID: jC-gmro02910043h11d1
cccgaacggaaacttccgcaatcagcatacacgtttttacaaaaaaagcccaaattcattggccgggggggggccccaaaatttacccactaagaatctatttgctatcggggccctaacttagccaacgttccaaaatttcgaaatttcaaaaaccattaaacttgggaaaaagacgggttctccaatcattggttataaaaacgtaacaggcaattaagtcaaatttaatcaacttcttccatctggctaccctcagcatttgcatcagcgtcctaaagaggaggcatgttagcatttgcttcaccagcattttaataaatgctcaaaccaagcttaagcatcctgtgaatcctgttaccgaaagggttgggatcatcaaggctgaacccaaaagttttaaaagcagtcctaaaaag

SEQ ID NO: 42366 - DNA, 363 bp, Glycine max
  Clone ID: jC-gmro02910043h12d1
gaagatcttgtgacgaattaattgagaaattatgaaagagtgtatacaaaagaaaccataatatgccgttaaatgtttgcacaaagtacgtttgcaaccttgattcactccagaaacttgcttcgttatagttgatcaatgcctgctataaataaaatagcaacttggtcccattatcatcagttcataatcaaagtttccgtaatgctctaagattgaactcatgcttgataagatttgatctcagtaacatggaacgaacatcacgatcaaattcccttccagtttccagaaccctttgaaaggtggcattcctttgatctgcatgccgcgcatacaaaattttgttgtgcgaatcaattc

SEQ ID NO: 42367 - DNA, 582 bp, Glycine max
  Clone ID: jC-gmro02910044b04a1
aattatcttccgtttcaggattagggtttcaccgttacagtgaaacatgggagaaccaaaacgaatctatctgcgtatctttgcgctgctcctcttcatttccgcctcttcgtttcagcttctccgcgctttcgatgaccccgatcttttacgaagtcgttcgacgaggatttcgaagaccgttggattgtgtctcagaaagatgagtacaatggtgtctggaaacatgccaagagtgagggacatgatgattatgggcttcttgtcagtgagaaagtaaggaaatatgctatagtaaaagaacttgatgaggccgcgggtctcaaggatgaaacagttgttcttcagtttgaaactcggcttcagaatggccttgagtgtggtggtgcatatctaaaatatctccgaccacaggaggctggatggaaatccaaggaatttgataatgaatctccatattctatcatgtttggtcctgacaagtgtggtgccacaaacaaagtacacttcattttcaagcataaaaatcccaagagtggggagtatgttgacaccatcttagaatccccctttgtcccgtct

SEQ ID NO: 42368 - DNA, 85 bp, Glycine max
  Clone ID: jC-gmro02910044f03a1
aaaaaaaaaaaaaaaaaaaaaaaaaaaaaaaaaaaaaaaaaaaaaaaaaaaaaaaaaaaaaaaaaaaaaaaaaaaaaaaaaaaag

SEQ ID NO: 42369 - DNA, 494 bp, Glycine max
  Clone ID: jC-gmro02910045g12d1
ggcattgaaacagcagcaatcattaatgcaataaaatcagtattattattctcaaccacagcaaacacactgcacggccagagaaagcaacaaccacattttgttttctaaaagcacgatacaatctgtctttaaccataatagaattcatatctcacataaacctttatttattcaaagcaacttagatgcgacttgggtcagcaaagaagctgttgatggagggcataatctcaggagttctggcgcgcacatacttcctgaggaaatgctcagcatacttctctccctgagcaaagttctgcaacactcctgcctttcttccctccttgctcaccctgactttagggatgatgcagatattacgaaccaagtggaattcacagatcccaacagcggcaccaagcgcagcgaacagtggatacaccttgggtctgagccagaggatagccatggatagttgcagcggtgaaaccagaaaggggggaaagcaa

SEQ ID NO: 42370 - DNA, 357 bp, Glycine max
  Clone ID: jC-gmro02910045h12d1
aacgccctctcgaggggaattccatattgatcacactgtttcaaatgctacttcttattataaatggcaggggccagaacagagtgcaataaagaattgtcttgtgggcctgacgaacccctcactagatttgccttccaactggcgatggggctcaaagatgaaagagcaaatccctggttctggatgtatagtgctgaaccaaatgacgccatggctgggctcttttcattagagagacatgtcctttgcacaaactacgaatttaacatgtttgagtcgagggaccccgaaaattgcctttcgaacaagttctgcatatggactatttttctcacagcttaaccaacttgaact

SEQ ID NO: 42371 - DNA, 510 bp, Glycine max
  Clone ID: jC-gmro02910046a01d1
gaatggaagaaggcatatctttaaattgaattgatggggtggaaaacccgaatttaaagatttccaatcatacacaatattgcaacaacaaaaagaattttaaaaaaaaaagactttctttttttactttttttacccaaaacctaagcaaaatataaaaacaaacgacacttttttttagactctttaaatccaaaagctgatcacaatcaaaatcaatggcgttatttatgaaagctccataagacttcaaacgaccaaaagccggtttctccattgatgttctcttcaaacatgaatttactcttcaatagcaaggggcacagactcagccaatttgcggtacttgagagcatagaacatctcgaggtaacgtttgctctcacggcgttcaagattggtcacgtgcttccagaagccatacacaccaatgagtgtcaagagcctgtccgagtaaatttgccatgtgtacttctcatgaatacgcttgagtccaccctgggagatttt

SEQ ID NO: 42372 - DNA, 507 bp, Glycine max
  Clone ID: jC-gmro02910046a06a1
ggaaaaaggtgaagggcgaagacacgttcttctctcaagtgctgaaaaaaaggaaatagcagaaagttatatggataacaaatcaccgagcaataaggcatctgaggagctggcacgtgagttgcttattgctatctctgattctttaccagataaaactctggattccgattttgtgcccgaaagcaaggacgcagacagctttgcaagaccaaacggtgattgggatgacaagtttaggtctgaattgatttcaatctcctatgttgaatctcccgatgtcaaaatctgatatattacgagtctagactgttagtaacttatgctacccttctggtttgttatgtggatgaatttccgctgtgccaattgttgtgaattgattatactatgtgggctatcttgcaacccacatgtagatactctcaccagtcacatgcttggttttgtattctaaaaatgactgataaatacttaattagtactctgttatatttttgttcatag

SEQ ID NO: 42373 - DNA, 508 bp, Glycine max
  Clone ID: jC-gmro02910046a06d1
ctatgaacaaaaatataacagagtactaattaagtatttatcagtcatttttagaatacaaaaccaagcatgtgactggtgagagtatctacatgtggggttgcaagatagcccacatagtataatcaattcacaacaattggcacagcggaaattcatccacataacaaaccagaagggtggcataagttactaacagtctagactcgtaatatatcagattttgacatcgggagattcaacataggagattgaaatcaattcagacctaaacttgtcatcccaatcaccgtttggtcttgcaaagctgtctgcgtccttgctttcgggcacaaaatcggaatccagagttttatctggtaaagaatcagagatagcgataagcaacttacgtgccagctccttagatgccttattgctcggagatttgctatccatataactttctgctatttccttttttttagcacttgagagaagaacgtgttttcgcccttcaccttttttc

SEQ ID NO: 42374 - DNA, 503 bp, Glycine max
  Clone ID: jC-gmro02910046a07d1
ctacgggcaaaaatttactgcgtataaagttcagaaatacagagattagttatttacattgaaccgaagttagatcatttatagtcctagagcaatctccaacccattctcgctcattacttctcattcagaatgctacaaggtaaattcgcaaagcgagaggacccaacagacactcgggaagtttaattaaatggaacaactcgaagttggaagacatgaaaagcagtacaccagatgctggcagctggaatttttcacaaagaccattaatttaggctaacaaaatactactacattacagtaattattttcacaaaaaaatattacaatcagattagcaactgtatttttcattggattctgtgcaccggtgatgtcacggcataaatatgtgggcactctaattcacgtcatctgataatgatctcagctacctatgcggccaatagaattgtcgagaggaattgaagaggaagttcaaaaaggaagccagaaacctc

SEQ ID NO: 42375 - DNA, 411 bp, Glycine max
  Clone ID: jC-gmro02910046a09d1
ggcacaggacatcacaagacttttttaagattattactaagcagtaatgaaaacccaatttgggatggaagccaaaaccaggttggtaacaaagtccaaaatcaaattaagtcgggaaaatgggggggagggagtcagctttgccaccaaaaatgcgacccttgggggcggggaaaaattcaaatccgggcggttgggggacatttccttaactggcaaccccgatggggtaccggaaaaggtgaccgggaaggtcatgctaaagggactcgttagaatacagaccccaatatttgtcagcaacttggttcaccttgttaatgcatccataactttttggctggaggaaggggtcttgaaccatgccaaggtgcttataccacaatgacatggggaaaccgggaatttgac

SEQ ID NO: 42376 - DNA, 574 bp, Glycine max
  unsure (1)..(574): unsure at all n locations
  Clone ID: jC-gmro02910046a10a1
gaacatgtaattatattttagttataaatacagatggcactaacaactagttacaacataagattttaacaaaaatttatttattttaatactaatcatttaacaaagggagaaaaagattaaccaatcgccaaagttcaaggcagatctggcttaacaaaacttagcatactaacgaattatttagcatttttacattcacttgctcaaaaaaaccaaacacgctagtaatattatgtttgagtcagcaacggagcaataaattcccgacacataatagtaatagtagctgcaaacgtggcagatgcttaacgaaaaacgacaatatttacatgcaacccacggtcatcttagctaaagacttcagcttcagcggggcctgcttctggtctccccactgtacagcctgcaatcacatagtacaacacgtttcattataccacagtatacatatatatcaaccgttgatttctcacatgatctaacggctcacatcaccccaatcctttntttacaactttagcaagaaaaatcacataatttaaaataaaataaagaaaaatttataaactta

SEQ ID NO: 42377 - DNA, 329 bp, Glycine max
  Clone ID: jC-gmro02910046a11a1
caaataaaaaactattgtgcttttttaagtgtgtgatgcaacggaccacctagtagacggggatgcataaacaacgatttcagggaatgagggtggtcccaatccccggaatgcaggtgtactaaaaactcaccaaacgaggtcgactgacaacatttaatcgaagggcatgattcaaactgtgaatgtggcgactgatacgtggatgacagctgacatataatatcttataaaataatagttgacgtaaatgcggtgccactgtggggtcgttccttaaggacatcaaactgatggcatcggtcgaactatatatacccaattcaaaa

SEQ ID NO: 42378 - DNA, 535 bp, Glycine max
  Clone ID: jC-gmro02910046a11d1
aaataaaggatatgaaatatatcattagtgactttcaatcaatgaaaaagataatcacaaagcataatgtcatctctgaaaatttgagcgcaactaattttccttctaaagatggatgtggtgatcaagtaggtattcagaaaggctttccctatccacccaggatttacttgacataaaatcaacaaatcgattttatattgttgtatacctgacctctaatatacccaacaaaatcagatgaccttttaatttctcaatgtaaaaatatcatatccctcttaaacatacatactgttgcatggtcataataagccagcttcaaagagattcctccgtctcaaagtctcatcaacaagcttgaaagtcttcttcacaagcttctgatcaagggcagtcgcctgatagatcttgaacacgcgatctacacagtcaggagcagtgctctggaaatacaattcctcaaactttttcttcacaaactcgtacgcatgttcaatcttttgtttcccttgtgaaactggctggtaatctt

SEQ ID NO: 42379 - DNA, 439 bp, Glycine max
  Clone ID: jC-gmro02910046a12a1
aactcagctgtgggtagcacaaaaaattctggttcttattacaagagcatgatctaccagcaaagttggaaatatgaataacaatagagcccacttattccaacacacatacaacaaccataccataaaggatcacacgtatgtagacagagaccacatggcatagcataactaatcaaaaaacatggcatagcataaataatcaaaccccaaaaaataaatgatacaagattcatccatgaacaagacaagattcttagctatttataaatgcacaaggcttcctgatctctccttctgtccctgccttcacattaattcttcccattttctcgatggaggttgcaaactcagcaaagaaattttcaactgacccttcaagcaattggatgattagtgcctttgtactgagttaggcaataatgcaccatctgactca

SEQ ID NO: 42380 - DNA, 522 bp, Glycine max
  unsure (1)..(522): unsure at all n locations
  Clone ID: jC-gmro02910046b01d1
cccatgggaaaaagggtcctcaagtgtaaaactgattaattatcaacataggaagaattcaacttacaaacgccctgacattatgtatgtaatcaaaactgattgtacaacagttttttgatgaaaaaaatatgtagcccattttgatgaattaaatgagcttgaaaagccctaaatacatttgagagaagggggggtgctactatctataccaagaccagttaatatggccggtatctgcgcccatggccgccatcattggggggccttcccttacttgaacttccggcattcctgtggccactcccactgccaccaccgcccctgccacctttatgatgtgagggtggggcttgaggctgcattcctggttgntgcaagacatatccaatcctgccatcagccaaaagcataggcatcatggccattccagcgggagtttgacctcctccatataacaagggctgtgcaagacctggagcaccttatcctgcccaagtgcaccataggcacccccaacca

SEQ ID NO: 42381 - DNA, 496 bp, Glycine max
  Clone ID: jC-gmro02910046b07d1
aagtgatagatgttcatttatcattgcttatcaacaaatttgtgtcaatcaaactattggtattgcctaacaatctgtgaagaccatagcccaacaccagaaacctccctagggcttatggcacttatactacattacatatctgtagaacaagggacaacagaacatcttttggatatatgaatgaattatatccaaatgcaataaactaaatcaatctgtacaaaataacaaaacccttggtctctaaagactatctttgtcttcctatattcatcttctgtatcttttcacttctcttctttacagagtaattccagcttctaaacctttagaaatcatgaaccagtgtatacagatcataaatcaaagcttgatgacatcttgccctttcctcagtcattttatctgaggttgcagagaagttcaacaacggaaccagtcaactacctcaaagaagcttattccttgtgagattttgcccaaaagaagccct

SEQ ID NO: 42382 - DNA, 464 bp, Glycine max
  Clone ID: jC-gmro02910046b08d1
atcttgcaccatttttaggaccacacatttccttggatttcccacttgtatatgtcaagcatacatacagaaattacatactacataaacaacatgggcttagcagtttcctgatcctatacggagataattttaccagtaccaaatgataaagttcacaacataaatatttatacaaactccccttagtccagtatcacatcacaaccacaatcaggcatatctttgtatttaatggctggatggatatatagcagctacagttgagaccatggaatctactccacacacatttcgacctctgcagatcttgtaatatccattctttccccagctttcgccccatgaattcttaatgatccagtaagggttgttcttaaaacgaatgggagcatatgcaccttcaccataaccaactagaagaaccccatgatccaaatgcttcccacagatgtatgggcatg

SEQ ID NO: 42383 - DNA, 495 bp, Glycine max
  Clone ID: jC-gmro02910046b09d1
acatcccacccaaacccagctgggttcattatgttatggggggctgaaaccaccaccattcagttaaaagcttgactgatgtccattgacaactaaaaacaaactatgggtatgtttttttaaccaattgaaggacgaagaaaaaaaaagaaggtccgcctcaactaactaagacattttttagtgaatctggggcaccactactaccgttgagcacaatcactttaccctcagaatcagaatcaactttacctgagtcaccctccttaatgtttttagcaagcatttttttagccatgctatcctccaaaagttgcattatggctttttttagaggcctaaccccataactaggattatatccttagaaaaccaccctctccctaaatctttttggcactgaaagatcaatctttttagctttcagcctctggaacacctccttaaacattatgtctgctatctccttaacctccaattttgtgagttgcctga

SEQ ID NO: 42384 - DNA, 390 bp, Glycine max
  Clone ID: jC-gmro02910046b10a1
gaacacaaattgaatttgctgcgtttattactaataattatcggaaacacaacacctgggtacaactcacaaatgccactatgaatcaaaaagcaagcatacacgaccatattaatctatgaacaaatgagttaaagagatcactaaaaaaggactgaactttacacagttactcggcattgacatttcagagaataactttactgttaggaatagtccgggacttggacacaatctatatcaggacgtgctagatggacattaaacacatagaatacacctgatctgaattataaacattggatcatcatgaggacactgtcatacttttatttaatgaactgagacaggcatacatacgtataatttggattgacatcaagctagctt

SEQ ID NO: 42385 - DNA, 519 bp, Glycine max
  Clone ID: jC-gmro02910046b10d1
attaccaaaaatcagagagcacatatcaactaacaggtgataaacccagaaccgagacaaaaaagtaatcgctaaattcaaaagcaacttgatcgaatacatcagaatgagtaaaatagacgactctgcaaaaatataaaattaaataaaacaccatctttcaaaaacaaaatcttcagagcttaaaagaatgcaaactatggttgcaggcaacgaagtttgtcactacatggatcacctctaagctcttcctttttatacttaatgaatcaaaaagcagggaaattccattaactgaatcacataaataggtttggcctggatgccttgtatgttgtcttcagcttcctagttggaggcctaatcttcttgaacaccaatgggaacttgattttagaattgtgaaactgcttggtgctctcccttttgcacagcttatctgggatggtggcagtcttaattatctggatgcatggatgcctcaccctatgacgagatgccatttcagtgtacatatgc

SEQ ID NO: 42386 - DNA, 367 bp, Glycine max
  Clone ID: jC-gmro02910046b11a1
ataatagattgttattcccaaatttttattcaattgaaagcggaactgagatagttgtagacaacattttcactcaagatttgcaacactctggtgtttgtaggaccaacacatcttggtgtcttgtactgactaacagcggatcctagacctaggtaatgatcaagaatcttctggaatgatcctctccgaacaagttgtagttcgagggcaccaatgcagtacactttgcgcgaactggcgtatcctgcatcaacgaaagacttgtccaaacaggtaccgcattcatggagtacttcttggctcgcttctgcgctgatttcccaaaagaagacatagtgccctggttctttggataaatcaacct

SEQ ID NO: 42387 - DNA, 465 bp, Glycine max
  Clone ID: jC-gmro02910046b11d1
aacgcaggaacactattttcttttatttggtacattgaaacttgaaagcatgatctctaatctgttagccttgcaaattattctaacacctcatcgcttagcatactactgacttcactctctgactttattttctttattcgcttacatcgacattttactcaaatcacaaagcctagatattaattaagcttacaaattagtcggcactttgttattttttattaattaaacaaattgtcgactcattctcttccaataaactagatggacattgccaactttttctcaaaaacacgattaagaattgcagccaatcgaactcctgcttgagctaaccgcatattgactattggcaaacgtgacaggaagtaatcatcatttagtacggatccttccgtggcatctttatacgcccatttacaggcatctatggtactttcagatgcgtatgtagctgggcat

SEQ ID NO: 42388 - DNA, 326 bp, Glycine max
  Clone ID: jC-gmro02910046b12d1
acccccaaacatttttttatagttcatacagtacaaggaattgtctgcgtctctgaacctttctttgagggtcatcatacattacaaaaagaaaactgaagtaaaatagttcatagcctaggtttaaacagggtataataaattacacgaaccaaaaagaatcctttagaaaatatagggaaaaagaatcgtaggaaatgtcgtcgtgatggcaacaagcaccccccctcaattttgagggcactaatgaaaggtggcacaaataaggccctttcaaaatcctttagccacaactctatgttttattaatatcttcggcaccccca

SEQ ID NO: 42389 - DNA, 262 bp, Glycine max
  Clone ID: jC-gmro02910046c01d1
agtgaaattaaaagaattccattgtttctttcgggggggggggggcgttttttaatttctttgaacccaccattttgattccatgcactaacaaaatggggccaaaagaaaccaaaccttttttttcttataaagctaacgctataccctttttcgaagcccgaccaaaaagggcaaactctaaatcctatttcttaaaaaaacttttggcacaacctcccccttgaacgtggagaaaatcttaccttccccaggcccaaag

SEQ ID NO: 42390 - DNA, 546 bp, Glycine max
  Clone ID: jC-gmro02910046c07d1
gacctgcatacttctgttatatacttcattgaaagattatctagattctgatttatatacagaaaaaaagagagtagagtttgggtatatcatgcagcagcgccaccaatagtgaacttcaaactatctattgctctagttttatgctcataagaagtggcattcaagatgataatgaaccgctatgtttgctaggcaatggtgtgtttttccgggactggcgctttgtttgtacaagtacaggttcttgctcctcccagttttcgctcattacatcactgtcactgtcatcatcacccttaaacaccggatggatatatgcattctgaaggaactctttcaaattgaagtttggctctcttgcgcgctccaatgtgtccttcatcattgcttcctgtaatggatgcttaacgaaagcaggttcatatcgtcccttgcaatacagatggaatgatattgtcagaattgggagagtaatgagcaatggagttgagttagcagcttcttttgtactcaataccccattaacagcagctgtgagatcac

SEQ ID NO: 42391 - DNA, 538 bp, Glycine max
  Clone ID: jC-gmro02910046c08d1
agataacaaaaaattattatctttaagagcaatgctgaacattctgtttcaatagcacataatcttatatttgaagttcttaagaaagaagctccttctacatatttgacgacgagcaagttaccttcgcccgtgattttctaaataatttttgattttgtctttaattattactatgcagatttatttcctaagaacttctcaaatcataaatcctttggaagaaatgagatgcaccgaggatgaaagcacacacagcatttgctaaatggatagcgatttccaaatgataaaacagcaaaggctacttataaaccgtaaccagcaagaatatcttagcttcatttagccttcagaacatcatagtacgacgcgggttttttcttccactcaccacagagtttctccacttcagcggctacacgcagtacagtagcttccgcccatggtcgacccattatttgcaaacctattggaagtcctactttattgtaaccaaccgggacagaaatggcagggaatcccaaaagatttgcag

SEQ ID NO: 42392 - DNA, 314 bp, Glycine max
  Clone ID: jC-gmro02910046c09d1
gttgggggagaaccttgcaaaaacatgaatttcaactttccagagatcaaatgggtgtcataaccatataatggggctcttaaaaattgttggctctgaagggttaagtttaatcaaaacccgaacttttaattttaaaccattccctggttccaatccaacatcacgaagggtggaaccaccactttctcgcgcaattcacttgttgttttttttaggcctcaactggttactatgaccgcacttttttttgtcgggttttacaaccctatgatgcaaacgggcattgaacttgggggaaaacaatttggccc

SEQ ID NO: 42393 - DNA, 446 bp, Glycine max
  Clone ID: jC-gmro02910046c10a1
agtaaaattgtatactctctataatttgagattattacatatttctagcataaatcttgagagaacattttttttgcttcatcatataaaatatatatgttctgacagagcacgtacaagttcacaaaaaaaagggggaagttgataaaaaaatacaggaaaaaaaaatcagaattgagtcagagggaaggaaacatagagaaaattttagcgatcagatcataagaagccagcaggagtgcaaaagtcccttgccaagagtgttggaaccccttttagttaagcaggtaccttgtcccccttgagtggcttcaccacttaccatgtgaagtcagggtcatctctgccaaagtgtccatatgcagcaatcttcaagaacctgccctttccacccctcttgagatcaaggttgagggcgaacatgcgcggcctgaagtctaaactct

SEQ ID NO: 42394 - DNA, 428 bp, Glycine max
  Clone ID: jC-gmro02910046c11a1
gggaaaaagactggccgttcttaacatatggtctttcattaatataaaatgaatcaaacttggtccattgccaaacttttactattttttatgaattacatttactagaatggcactatgtgggttattcaaaagaagaaagcatgtccacccaaatattacaaatgagtggatattaaaaccaaaactctgcctgtgtttcttatacagaaagattggtttcagaatgaacttgattgaaattgcaagagctcccgctcagctaaaacttttggaactgttgactttaatttcaaatcacttttctgggcgagatcaatgagaaccacctgcgcagagactccatatattaatctatgtcctgcaaccttgaatattctgtccaacatccatattgctttttcttgaacctttggattctcaacttg

SEQ ID NO: 42395 - DNA, 473 bp, Glycine max
  unsure (1)..(473): unsure at all n locations
  Clone ID: jC-gmro02910046c12a1
cagtgaattaacttgctactgttgtatttgaaaagagttaacttgtagttcaacggatgaaggattataattatgcataccaagggtacaagcgtagtttgatataatccagctaactcatactcagaatgaaccagttaaaaacttatcaaagtataagaaaagaactggaccattttaaaaaacaactctcctcaccttctgcaaataaatgatcactccaacaagagaataaaatgaaaggataacaaaagctagaatcaaagggttacaatctgcaatgcattgcttccagacaaatcgtgatgatagtagtctttcccttcaataaccctatctatcgaaacagtttagaagcactttctgtgcacaattgatggaccagattcgncatattctgcctttgcaatccacatctgctggaaggtgctaagagatgccaagatagaaccaccgatccagacactgtattt

SEQ ID NO: 42396 - DNA, 494 bp, Glycine max
  unsure (1)..(494): unsure at all n locations
  Clone ID: jC-gmro02910046c12d1
agcaaaatcataacctgcattaaggcatttagtatatataatatatcactatataccaactaatcagtatacaattacaagcaagttattctggagcagggatacaaactaacgtgacaacagtcgaccaaactagtcttggaattcaaagatgaaaataataaaccaagccaacaaacattttaaaatggacagtaactctagaagacatttcctaaatggtgacccccacgcattaatttttatacttcatatatgcatccctcgggtcttgcttggatatgggtttgacaagggtagctttgcccatagctatgtgcaggtacgaaactaaaaaacgcttgaaaatcataaaccacattttgattaaacttgtggagnncggnnggggagagggaattggtactagcagcaggctcaattctacgcagcatgaaccctactcccctggttgaaccatcttcatcatcatgggatgcataagcaaacccacc

SEQ ID NO: 42397 - DNA, 465 bp, Glycine max
  Clone ID: jC-gmro02910046d01d1
cacgaaccaaacagaatttataaaaagaccagaacaaacaacagtttttcaaaggccactattgaccatggaaacactttaacaagagtaaacctttcaggaacattaaaaaaaaaaacccaaagatcttcggaacttccacatgcttaaacttcaagacacctacagaacattttcagacttttaaaacccaccacgaagacgcaacacagggggaagagtagactctttctgaatgttgtagtcagaaagagtctttccatcctccaattggttcccagcaaatatcaacctctgctggtctggggggataccctacttgtcctggatttttgctttgacattatcgaatgtgtctgacctttcaacttccaaggtaatagtcttgcctgtcaaagtcttcacaaagatttggatacctccccttaaacgaaggacaaggcgaagggcggactccttttggat

SEQ ID NO: 42398 - DNA, 495 bp, Glycine max
  Clone ID: jC-gmro02910046d05d1
gcatatattgacgattgatctggttagttatagattgcattgataactaggaaatattttccacataacaaactttggagaacaagattggtagaattgtgaattgtgtgtggtatcatcatcttgctaagaatgatctctacattcgatatgacaatcattcatgcaaatcaacgttggagtaggtttgcattgattattgcaatctgcctggcctcaaatcacaatcatgctgatttttgctgaatctttagtatctcaatacaatgtagccagctgcttctcatattcttaatcaaggcagctgctacctaagaggtgtatccactttaagacacactaatcatcggtgccgaagtatcgatcaccaaattcccccaatccagggataacacgatactcttcatttatttcaatgtcaatctcagatgtgacaatcttcaatgatggaaaccttttgcacacgcaatggattccctcaggagcagaaatgag

SEQ ID NO: 42399 - DNA, 418 bp, Glycine max
  Clone ID: jC-gmro02910046d06d1
aaaaaagaagagccttttttttcctttttttaagattaaccaaaataaaatcccataattttttgggaaaaaaaattccttgccaaaatgatttttttaaacaacaaacaaaagggccccccgcttttgagggctttggcccattggggagaacaccctaattaaaaccccccaaataagggggaaaaaaccccttgccccccctacttttttttaaaacccctttcttaaacctatccaactgtttaacccattttttgggaaaaaagggctcttttgggggggggggccccccaaaccgggaattgggttcccccgtgaaaaacaagaaaaatttgaacccggcccccaatttggttgcaacattgccaaaactaattttttttttggggggaaaaaagggaacctttttgccccc

SEQ ID NO: 42400 - DNA, 535 bp, Glycine max
  Clone ID: jC-gmro02910046d08d1
aaaccaaatttggaatctaatatatgaggaaactaatgggatcgttggtatagtgaagttcacaaacaatcaacaaaagaaaaagaaaagatgatttactaagactgggtaagcaaagaaattgtcaaccatccacgttaaacaggaaccggaaaacccttcttagccatgctatccaaaacatcgttgagggcttgacataggcccacaatctgctggtcccatcgctgcaactcttcagtgtcatcatcaaaatgtatgacagcctcaacctgatcgatagagcccctcatcctatcctcataaatgattcttgatgctatcttctcagccttgtgaggtgggatccccaacagtgtgcctagctcattaaagctgatattagtatagagtttgctagcactcaaaagattatgctcaatcatagcacggtccagcacagtgaaattgtctggaagaagagcttgctgatgtggtttcaattcttctgcaaaagcatcaatttctggttttctgagaattctctccaatacac

SEQ ID NO: 42401 - DNA, 372 bp, Glycine max
  Clone ID: jC-gmro02910046d10d1
catgggaaatgataggcaatagggaaaaagatattaagctaataacatgctacgagaaaagataaacgacaaagcaggagacaacgagttgttggctcattcatttggaaagataaccatcaaacaagagacaacgagttgttggctcatgcatagcctaagatcacagtagatgggtctgctattttagctatataagtctgcatctatgtaatttttaccagctttggagatgagataatacagtttcatttatgatataatagacttttattaaagctaggatcttggctcagcttcacattctagacaaggtcaagtccattgcgtttgctacaaagtctgcattttttttggagaaacacaacgggg

SEQ ID NO: 42402 - DNA, 417 bp, Glycine max
  Clone ID: jC-gmro02910046d11a1
gcagtacaagctccgtactttcattacgagcgcaaatgaattaccatacaataatacaatcagaaacccttttcacaaaactagggtcatctaaacagaagggaacctaatcaaccccaaaaagacaaccatgtagcttcaggaaacaccaacgaatcgaaacaagggaaagcaaactcccaaacctagctatattcatacatctaaagggtcagtctatagatcgctagcttcttctaacttcaataaacacggatccaattccaactatcttaaccacactgtgcaaaccatcaaaaacactatctatacaacaaccaattacattggattattaccaacttcccaagtagcaatgaaatcacttgtctaagaacttgaagtagatgctgcctcttgtcttgattccctcaaata

SEQ ID NO: 42403 - DNA, 460 bp, Glycine max
  Clone ID: jC-gmro02910046d11d1
gatcgagcaatacatcatttcattatatagcgtaacaagttcacttgtgcacattcaagctggctgaaaggagagcatattacatatatgttatctcaacaaacaagaaaatcaatacaaacttgattaagataccatatatatagtactagatataaatacacatatttcccagaagatcgacaacctaataatagatacatcatacatgcatcaaactagttgaagaagcaggggcttcaatttcatacttaattcccacccaaattaaagcacttaatcttccatgattgccaaattaattaagtagcccatggtgtccttcaaaaaccttgtcatagtaatttttcttttcttatttttgaaagaagaagaaaaaaaaaaaaaggactaaaagctctcacagcctatcttattcttcagagcaactggttacagttagccgggggatgaaaatact

SEQ ID NO: 42404 - DNA, 496 bp, Glycine max
  Clone ID: jC-gmro02910046d12d1
atcatcaaccagtacaagcctcaactttaattcatacaccttttcatatatcttacagcaagtcttttatgacccatatatgtagaacaccaaagcacttaagctaaaccaacaacttaacaataggacttagagattagagatttatcatacaaacacattttcaacattacaaaccgaaaccacacatcatctagacacttccagtcaaactaaataactaatcaaaaccctttccaagatcatacaagaagttaaggctttccaggagattttggatcatgggctggatttggtcttgttccggggtagtccacaatatccatcaacattctgctctctacaatcccttctttcatttcttcctcgctattccttaaccgcataactggatcctccttagccagaagatcttgcactaaaggatcaattttcccaatcatggagcttctgatggcaggaacagcagcaacaaatacaacgcaggaaagagtct

SEQ ID NO: 42405 - DNA, 524 bp, Glycine max
  Clone ID: jC-gmro02910046e05d1
actacatcattggatcatttatatgaacattaacattaacatatatcatatatacatatcacatagattcaaccattgccgtccgaaaaaccctattgatctatacacatccatgcatatcaattccaaacacgggcttgaatctaagtccatgacacccgaatttgaaacaaaaaaaccggaagacacaacccattttaactttaaaaaaagaagaagaaagaaaaagaaatagagaagaaataatgatatcgttaaacacttaacagttaacagtgttgtgcagtgttttcacagtttttggttctgttctcagcaatctgagccagcgactgcaagttacaacgtacgatcgtgtcgacgaacacgcatgtttcctccttagtgttaccctgtggtgcgtcaacgacgtatgactcgatgacaagtgtcccgttcccgttggcgtggagcgtcgtcaccgaccggtagttcctgaagcggtggtcgccgccgacgacgcttgaactgatgacatggcgctc

SEQ ID NO: 42406 - DNA, 495 bp, Glycine max
  Clone ID: jC-gmro02910046e06d1
agataaactcataaacaaaatttgaaataaacgatcagtcttccctgaaacaaaagtttggccaacttaaggagaaaaaaaactcactacccgagaatccataatatcaaaacagaaacactacaaagtttataagtgatggcaaccaaatagaattccagcatttccatccaattaacataattatgctttgaggcgtccaaagaacttctgcttctcctgtgtggtctggaagcgaccatgcccaaactttgaagaggtatcgataaacttgagtttgatctcctcaagagcaacacgagaagtctgcttaaggagggattgacgcaatgtaatgaccctcttcttgggaccaacacagcatcccttgaccatgataaaatcatccttaacaacaccatagtgagggaaaccacccattggggtaatgtctttctcggccctatcaaactcagtaagagcagagtgagattcatctccagctttgccaagctt

SEQ ID NO: 42407 - DNA, 515 bp, Glycine max
  Clone ID: jC-gmro02910046e07d1
gggagcaaaagttgaataagaatttatgaagagtaatcctggcaatctgcatcatgcctattgatcataaaaattctgcaggactcaaagataatatatatgcacttaatataacaaaaggataaccatttaaagatacatctataaataaagggttcaagtgttcactacaaaaagagaggcttagaaacaaatatctctacataaactaaagaccgtgatctttatggatcatatactatctagagatatatgtgtaacttccatctctaatcacgagcaaatgatttgatttgagcttcaataatttttgatagtttgttcaaccatgtctttcaaatccttgaaactctggctccaatttattggccatggcctgctgaatattctgcttatgcttgtggggaacaacatgtgtgtgatataagatgacattccgctttatatcaaagtccctaatgaaatgaaacctcattgcataagatacttgtggatcttgaaaaggaggtctctga

SEQ ID NO: 42408 - DNA, 434 bp, Glycine max
  Clone ID: jC-gmro02910046e09d1
gacccgaatgatgattcatacattcaattgaattgtggaccaggtgagagcgaaagcatgcacaaaatgataaggaaatgaacttaaatgataacgtctggatcatcagccactgcagccaatgatcatcggacaccgtgtcaacaggagagattacacccatgcaggccaaccatacacagaggaagattccggagagactcaataatacacgtttttcctctccattatcccatggttgcactattgttatcagtgctgggaagctgctcgtgggtggggtttatgataacaagctcttaggtaagcccaaaattctcatctactatgggaggggcggcccagtagatccattggttggcacaagtccagctcacgtcaggagggcctagtgtcacagcacggttcatggttgttccggagaaggccccacc

SEQ ID NO: 42409 - DNA, 537 bp, Glycine max
  Clone ID: jC-gmro02910046e10d1
gaatcatcacgcgaagattataattgttgaaactgaaactgaatcttaattctgagataacattcaaaatcaaaccgatacatgaaggatcagctataacatattaatttatagctgtgctggtgcaggacacttagtagtgtgccatgaaattattctaacagaaaacaacaacctaatgacttatacgtggaattagctacaactacaaacattgagcttaacctaaccgtttttaggtgctgcatagctttcaaacggtgggtctaacactagtttcttttcagaaagttcttgtaccattgagcagaaagcttagggtacctttttaagccatctttgtaatctacaaagtttaatccaaaccgaacagtgaaccctgcaaaccattcattacagtccaaaaatgaccatgcaaaaaatcccttaacgtttgcgccagccttaattgctgatcgaagataaaagaaatgacgataataataatcaattcgataaatatccatgagagcttttttcacggaaagggttggatca

SEQ ID NO: 42410 - DNA, 495 bp, Glycine max
  unsure (1)..(495): unsure at all n locations
  Clone ID: jC-gmro02910046e11a1
gcgagataaacataagaaatcaacttttgacatggacaattctgaatacatgactgaggatcgcaaacaacaggtcctaaaccaccaaatagaagcataatgttgatcacttcacagtttgaataatggagaactatatcacacagcaggagcaaaaacaaaaaagaacgaacaataatggttcagggtaatgtaacgaagcatatacccttttaactcggaaacaattacattgataacaaaaaaaagccttcgattatcaatagtcctctccttcctcatcatcttccgctccttcagctccaacctcctcatagtccttctcaagagcagcaaggtcctcacgagcctcagaaaactccccttcttccataccctcaccaacataccagtgaacaaaagccctcttggcatacatcagatcaaacttgtggtcaatgcgagagaacacctcagcactgcggtgttgntgctgatcatgcatacagcacgctg

SEQ ID NO: 42411 - DNA, 509 bp, Glycine max
  Clone ID: jC-gmro02910046f05d1
aataagaatatatcaactacgtttcaatcagagggcaccatgttaacaataatgaaaacaagcagaaaaataaaatccctaaacactacgaaatccagccacgaagacagacacagagtgcccgaaaacaatccaaaatcccgaaaaagatattcaggtcaagggatgaaaaaaacacaacattaacagagtatcacaacaaaacacaaacaagaacaccctgcaaatcactactattgttttaaacctcatcttcctgagggtcttcctcatcttcatactcatagccctcatcatcagcagttgcatcttggtattgctggtactcggacacaaggtcattcatgttgctctcagcttcagaaaactccatttcatccataccttctccagtgtaccaatgcaagaaggcctttctgcggaacatagctgtgaattgctcactcaccctcctgaacatttcttgaatagaggtagagttgccaatgaaagttgatgccattttcaac

SEQ ID NO: 42412 - DNA, 260 bp, Glycine max
  Clone ID: jC-gmro02910046f07d1
ggataccatccataaggccttcctggattaccataaatggtgggtgcattatcggctagtcgttgagcgggttgatgataaacatccttgtacagctacaaagggggattttaaggggaattaaaacacaggctgacaccacgctatttcaccttgctataaaacacaattgttttcaaatcttgggattgtatttggctgaacagtatactactcatttccggatttacagagttgacccggatactctttagtgccat

SEQ ID NO: 42413 - DNA, 415 bp, Glycine max
  Clone ID: jC-gmro02910046f09a1
catacataaaatgacatttaatgattcaacatgtagcgacatcaaggacaaagaaatatgaatgccgccgagtcatctaccataatacaccactgcgctgccgttacgatattcacaggccgaagaattcgtgcaatgagacaagcggcggatacgtaataatgaataagaaacctacaatgctccatccacctctgaattacaacgaagaaaagagaataagctatgattgcgccctggcacgtgaaacagacgatacctttagtactagcacagcatgcgtatggatacaacacatggggccccagaaaggcatgatgaagaggcaacacctggctgatagttaagcactacccaacatgagaaattactttgtgggctatagaggccacgctggcatgataagcgtacaagc

SEQ ID NO: 42414 - DNA, 533 bp, Glycine max
  Clone ID: jC-gmro02910046f09d1
gaaacatgtcaaattaaattccaacacaaaattaatcaataaaaaaatgatgcactgcaggtttcaactgctccatcccacagaaatatctgggcaaaaaaagaaaagaaaaactccattttttaatctgaatcctggtggcagatattgaaacatcctttagtatctgtcgtaggagagctacaatcacattttcttcttcacttgcaagccaaacacaatttgaaacattgattgcaccttctctttcagaagaagatacagaaatagagggaaagaatattaggattgaaaggaggggaagaggaaaaaaaaagagatgctgcccatccagtaacaaaataagggctcctgccaatccaggaatttcaaaacagccacttctggatcctttttctaaaagctctctgaagggcacttgtagtgtgagagttaatagtgtatatgtatgctccaacccactgtggttggtaagatgggaaaagaataagccttctccacagcaatatgatgtgaccatgcaaatacacatt

SEQ ID NO: 42415 - DNA, 490 bp, Glycine max
  Clone ID: jC-gmro02910046f11a1
accaaataaacagtgaatgttaactcctgatgacctgcaatgcaagggtgggtatccaaactgtacaagaagcacagttgggaataaatagccgtttttttatttttgtgaacaaggagatgctagatactttcttagtcaacttgacaagagattataaaacaatcagcataaacactaagcacaataaacaatcagaatgttttcactgtctgaggaaatttacagcagcccaaatggggaagatcatgataatgccttcaacttgtctgaacattcgtcatgatctgctggtgctttgaagttcttcactgatttacccaagacatttaaaacagcaacacgctgtaattctttagcttcctctaatgaaagctgaattgatctcttctctaactcaacagcatgcttgctaagttcaactgaggacagggagcgaagcatttggatatattcttcttgatctgattgggccaattcctcaaaaaca

SEQ ID NO: 42416 - DNA, 451 bp, Glycine max
  Clone ID: jC-gmro02910046f12a1
gaaaaataaggggaccttccaacaattcatgtatcaaggtcgaattataatttacataattattgctagcggaggataatagataaagactagtttaaaatgctagaagccaagaggctcttgacatgaaacggcgaacagagatgaaacttgaaggaacacacatgtgaagttgaagctcaagggtatgtttcagaggctgggacaggggcataggaaccaactgagacgtctccataaatcaagccagtcaaacctcctccaatcaatgggcgcaacccaggatatccagttagcagccaagactacactgaccacagctgggccgaatgagcgagctgggttcattgaaccgccgctgaatgggcctgctgctaacatgttgtgacccacaacgaacccaatagcaatgggtgcaaagatacccaatgaccccttctttgggtctact

SEQ ID NO: 42417 - DNA, 539 bp, Glycine max
  Clone ID: jC-gmro02910046f12d1
ctcaatctcacgctggtgagatacagactttgccacatgtatcacctgcgagactcgagcatgtgccctattcttctcagcctccagcaacccaagtcgttttgtttcagcagcagctcgtttttggtgaattgcagcacgtacacactctttatatttactttctcgagccatccttctcatcaatgtctgagatgacctttctctatgagaagcccttctttgcctgagagccttgagaataagcatcctattagcctctgcctgctgaacccgtgattcaacttttgttccaagcctcacacgttcattctcatagcgcatttctactccacttttagctgcttgacgcaattcatccagtcttgctaaacgcatttgggccttagtcaagatgctcaacctcttctgttcagcagcctgcagttttgcttccagtctctgaccaagatcttcctcctgagatgaacaccttgaggggcttcttggctttgcacgtgccttgcttgagagtttctcatagtatttctgtctgcgaa

SEQ ID NO: 42418 - DNA, 522 bp, Glycine max
  Clone ID: jC-gmro02910046g06d1
accatgcacttttaatcaacttatgttaatgggaccaaaggtacatcaagccaacatcatcaagtatgacatgatcgaccagcccattttacacgataataatctattttaatgtggcaacctggctaacttgccctgttgaaagggaagaagagtgaaagaagagacaaatagctgaaatgtcatccacggcaatgccccgtctcttgcgtttccatgcatgcaccgcacactccaccaaacgtttagctgccttagctttatctgctgctgaagatacaatatccactgcttctttattagagattacatcccaaaccccatcagtggctagcacaacaaactggtctctactagttatatttctgtgtgttacctcaggcacagaaataagaccatgccctttgatgcagtagtcaccaaaggccctagacatggctagtcccggagactttttattcggtaaccacaccctatgcacccctggctcgttctttaagcagaacacacgcccctggcact

SEQ ID NO: 42419 - DNA, 495 bp, Glycine max
  Clone ID: jC-gmro02910046g09d1
atccgtataataattcaattgaaaaatagactcattgcgtttcgtagtcctattagaggaatggtatatggcgttcacaaaacaacagacaccacagttttttagggggggaaaatgaaaatggggcatgcacttactacataacaaagtgtacctatgacaaaatattactaccgttatttaatcctaaatgctcctgtatatttatccttcaatagaaaaacctgcatttgttatcagaaccggtgccagccacccactcccactatccatggtttacccgtttagaataagtatcgatactaagtaactcatttgctttccgtaacgggaaggtagacaccttctgctgccaaccacacattgtcagcacgcttttcacgaacaccacaaaccttctgctgacccccagcaatacgactgtatttcttatcatgactatgtagatagcctccagtgttaatatgctgaaggcgaatcctttgatcctgcttt

SEQ ID NO: 42420 - DNA, 522 bp, Glycine max
  Clone ID: jC-gmro02910046g10d1
cgtaataaaagtgccgtttaatcagggctaatgttaatccatatgcttcatgacgaaactgaaatgataaacattgattcaaaacctgcctcaaaattaacatactatcacagaaaagattgagctatagttgacgaaactgataacacaatcctacagcgaactcaatctaactaaacaattgcctgggacttgttaaggatcactccctcatatttcacctggaaccacttcatagcatcctcctttgtgacacggtgctgaattccaacccgggacttgcacctgcggcgacgtccaacacgatagccaggacgctccagaacaacaaagaaatccattccataaataccagttgaaggatcatacttgattcccaaatcgatatgctcctgaataccaaagccgaagcaaccagtatcactgaaattccttctgagaagttcatattccttaacctttaaaccactctccaaaagttgcattgccttgtcacctctgacaatgacatagcatgcaatc

SEQ ID NO: 42421 - DNA, 539 bp, Glycine max
  Clone ID: jC-gmro02910046g11d1
agtaaaaaagcaggaatgtaaaattaaaatttaaaatatttcccatgatttgtttgagtacagagatgacagaagagaataacttaaaaaagaaaaatgacacactaaaggggaagaacaccacagaggaaagtgcaaacggctccccctgtcatgaaagagactttaatctacacttatccacaatcttgaagacataatcgagagggtcaaagaaacgttgcaaatacaaagccaaaagcatttcccattattaaacttgccatatcaacctccatctctccaattatcttctttccactagagccatcatcatgaagagaaagacatctcaattatgggggttactcctgaatgatccaagggccttggctgcacctgctctcaagatgaactggtggtagaaggctgcaatggctgccccaataaatggtcctacccaaaagatccaatggtcatcccatggcttatcttggttgtagataacagcagctccaagactcctagcagggttgataccagtgccagtgactgggatg

SEQ ID NO: 42422 - DNA, 348 bp, Glycine max
  Clone ID: jC-gmro02910046g12a1
aaagggctcgctgaaaataaattttattgaaccagatgggaaaaatagctagaaagtctcgagacagcaaaggctagatatcgttttgttaaaaaaatttacaacaatgactcagtgataaccaataggagctggagcctcttttaattccttcccttgatgatgaatatcagaagcaaagtggttaacatccctgtgatgagcctcatcagcgcgaatcacagtgacaacatccttgagagttgcatccttgggaagcctccagtagtccatagcaatggcaggggcagggacattttcaactttaccactctcaatggcatttaaatgctgagtgtatgaaatcac

SEQ ID NO: 42423 - DNA, 533 bp, Glycine max
  Clone ID: jC-gmro02910046h06d1
catcaggaatgttatttattttatttattttgaaaaagaaaagaaaaacaatttagctccaaactattgtagtttcaaagtccagaatatcctatttcaataaatatctggaaaaaaatctgtcccgtgattggggaaaaaggtacactatccgttcctccaatgcatattacattcagccctgcaaggacactcaataaaaaaaaaaaatccatgttataggcatattccgttacaataattcaacctaaaataaccagtggttgaacacaaagccaggggaaaattcctttccttcaacaaggtatatagactgaatcatttatgttctcactatctggagaatcatgagacccctgctgttcatgtatcagtaccacttagttaacttgcattactggccatctcttgtttgattagtttttgaatcagaatcatgttcatcatcatgtgatgtcaagcccaaacttaagtccaatgtgctttcattcagatcttggcgcaccacttgatttttgtactgagactgactt

SEQ ID NO: 42424 - DNA, 530 bp, Glycine max
  Clone ID: jC-gmro02910046h08d1
cattcacgtcttgcgttctgagacagcttaaattgggtgccacctcacactctcatcaccatattccaccacttattatgttcctgcactctcgaggaaatccgcccttattgaccacaattgctcgcccactgatgtcatgtaagggctatctgttcgaatgggggctgctcattgaaacgccccatgcagcatttttatctgaacatatgggcttacagcttctttcattaaaggatccaccagttccaccacacttcctttattatacttcctgacggcccatctgggtgtaacccgctgtgcaacagatttattcaactcaacaggacggggggctgttacaatttctaaaagcaaaattccaaatgaataaacgtcactcttgggagtgagatggtatggtttcatatactcggcgtccaaataaccaactgatccctttactttggttgaaatgtgtgcttgatcagggctcactggtcctagccttgcaaatccaaaatcagcaactttagctcgcatgcttt

SEQ ID NO: 42425 - DNA, 394 bp, Glycine max
  Clone ID: jC-gmro02910046h09a1
atgtgtgaatgttgaacgtgagaggtgccgtgcctggagagaagccacctcccagtaatgtattttcctccgcgctctacagacacaacttgcgtccagacgaacctgaacgcgcttgacaaggaagctgacctggcaacaaatgcactggctataccaatcctaagacaaaaaccggggcttttaatggaacggaagcgccatgaagggagtcgatcaacaataggaatcggacagggatgcgggactcaatgaggtttgtacgtgaagaccgcttgcgagcatatggaacatgatgcccctgacggaaatgaaaattctgggctcaagaagttgggagatgacatatgggggtggctcaacgagagatccgttggagcatactacatccctt

SEQ ID NO: 42426 - DNA, 386 bp, Glycine max
  Clone ID: jC-gmro02910046h10d1
ggataccaaccacaaggcctcgctggattaccatcaattttcattgcactaacggcttgttgctgaaagggtagacgataaacaaccttgtacagctacaaggtgggatcgtatgggaaagaaaagacaggctgatgtcaccctatatcacctggctataaaacacacttgagtacatactagggattgtatatagctgaactttatactactcattcccgcatttacagaattgaacggatactctttagagccatcacatatatcgacgcgaagcagtcactgataagcaccgagtatgcctcctttacgacttcctgttaagttttgcaactggattgcttcttggcagttacctactttacatacacggatctgagagctgc

SEQ ID NO: 42427 - DNA, 422 bp, Glycine max
  Clone ID: jC-gmro02910046h11a1
aatcactcaagttgaatctgaaacattctgtaaggaccaaaaaataaaagtatgactcagtcccaacccccaagtcacaaaaaaagttgcaaaagacaacacgcatttttcgaagagtcaaaacccataaattctgcacaatattactataaacacgttggccatcaagatatggaatcagggcacaaatttaatgtctttgaagtattcatgctccacagggctcctggcggtaattcttttggtgggatccacgctatgcttattcgaaagaagattaataccaggtgcctcaagattgggaaccacatttggttagtccttggatggccatttgggaaatgttgatttgaaatcaggcagtgaaggtactccaggccatgagtattcatttgggggacccaagattttgaatattttaa

SEQ ID NO: 42428 - DNA, 514 bp, Glycine max
  Clone ID: jC-gmro02910046h11d1
gtataataattgaaacaataatttataataaaataacagtataaaacagtgcatcacattaaactcaaattagaatgtatgggtatatataatatactttcacttatatttgttacaacattgtcaaaaatatttgattccaagtatctggaactccaggcaaacaccaatgaatgcaatctgcatttcttggattggccttttcctcctcagtcaatagctttcccccggtttcagtgtaaacagaggaatgtgcatcaatcctatactctgagatttgtgttatgttgataaatgtcactggaactttcattttcttcaccactttttccaccacgctcatcatgcccttattagagccacttccccaatgattctttttccctattggctttgtctcgttgaaacatttgataccatctttgttgccccagtctaagcttcttgtgtgtgttggggacatagttgtgaagaagacgctggttttgtttggataatagttgaatcaacccaa

SEQ ID NO: 42429 - DNA, 315 bp, Glycine max
  Clone ID: jC-gmro02910046h12a1
attgaaaatactatctttcaagcaaaattcggaaaataataatttgaaccaacaccgatgcaaaattctattagagcaaaaatacatctgtgcaggggccaaataacagcattacaacattcacgggcaaaaccacaaacaaaactaacagaaattaaatctaaagtagcattgttcacaagagaaaataaattcgactaagttcaaagtaaaataattcatgaaacaaatttaaagcttgtcttcaaactccgagagaggagtgatctgtgccttcaagccctatctattgtgaatgtcagtgacaagctgtgc

SEQ ID NO: 42430 - DNA, 403 bp, Glycine max
  Clone ID: jC-gmro02910047a03d1
caattcaaaattattatttattgaaacgccattaatcaggaatatgcgagactgtaattggtccaatgtaaaaaccgtaacttacaaaccaaacatgagtcattcagaaattgtttacactctcaggtgcagattaagcattgacagataacaataaacatccattattcaacttcaaatgggcctgaagccccgtaaaagcagcagcacataaaacattcagaaactgtgacaaagtattgtacggacacaatctccatctaacatgagtgctttttagcaaggtaaactaccatgtaattgcttattataaaatagcttcgatgccaagaaaaataaaccgaatcgacctcactttgtccaccagtggaggaagtctttgcgcttattgatctttttctgc

SEQ ID NO: 42431 - DNA, 319 bp, Glycine max
  Clone ID: jC-gmro02910047a05d1
gaaaaaaatgcttggggaaattaattgagggaagctagggattcaatgtggctgcaggagaaggcctaacctgaaaaagaagaagaactactccatttaacaacatggggtgcaacttcccttgctatcctaccttgagcgctggttggtgaaacacataattacattctcattcacccatttcttaacaagcctaatctaattaacacaaaatgggaaacgttcatgctctcttcccactaaaagttgcatttcgacacttcccattgcgccattgcttaacaacttcattgtacccttcagaagaatccaaagctaa

SEQ ID NO: 42432 - DNA, 228 bp, Glycine max
  Clone ID: jC-gmro02910047a06d1
caattcataggaatagggtcttttaaaatatccaaaatttactattcaaaatatatttcatagtaacataaattatttttatcgttttccaatgaaacttttaataacttaatattatacaaaaaataaataaaaatattattaaaaaaattaccaattctacattattataactatatagtcattgttgttaaatttcatttaaaaataaacctttgagataaattt

SEQ ID NO: 42433 - DNA, 435 bp, Glycine max
  Clone ID: jC-gmro02910047a07d1
ccaaaagacagatgtgaactttttattcagagaaacaaacattgttacatcctcgggtagataacaatattctctctttatccatctaattgatgacatactacaagtctaaaccaaattacatgctacaacaaaaggacttccccaccccatgactactacaacatgccttgtctagctattaggatcaacaaccctttttctccactacatgatactaatactaggtgtcttacaacaaacctcccccctctctctctgcctgactccaacaattccctcaatgcttaattacaacaaaacccttctcctgatacaacaatgcatcaaacaccaagtcttaaaaaggactcaaacttggatctctattgaccatctgtacatctcctctggagaaactggaatggagaaggttgtcaccccgtctctgagtca

SEQ ID NO: 42434 - DNA, 439 bp, Glycine max
  Clone ID: jC-gmro02910047a08d1
gttaaaaatagtatattgcctgaaagttatatatatattgcatgaaagagactgatcatttgaaaacaaaaaaagatgccccgggacatgggtctgcattatacgtagaactatctactttaacaggagaatttattcagtaaaactgggggtgcatcaagagaaggtccacaacttgtccattaattcaatcacacaggaacccctaactcgttgatcttcattatccgtttgttcagcgaagatctctgacgcttcaaatttgaagccatggaagcaacctcagctcgaagtgccagagcttcacgactaggtatataccgcagcttgtcaagcaaatcagcagctcgggtttcaaccttgtatgctgattttgccagctgttgaaattgggttccggcactcactatttccgtatgcccatatttcattttcttct

SEQ ID NO: 42435 - DNA, 345 bp, Glycine max
  Clone ID: jC-gmro02910047a09d1
aaaactaactgcaaatatttataaatttaaattacaagtcccattttcctaatatatagggacacatcatggatgggtatacatgaatagctaaaacaccacaggtaaaacattagtgctcaccatgacttacaacaatggagtgaagtgatatccccccttagacctccttatgagcgtgggcattttgtgaaaaaaaaaatgtcatggtaggatatgaggaggagagggattaagtacttaagtggcacatatattattgcacacgtggggaatgtccaattgagatgaaaaactctctgaactctcttttcctaagcttggggacccttttacactctggtt

SEQ ID NO: 42436 - DNA, 379 bp, Glycine max
  Clone ID: jC-gmro02910047b02d1
ggggaaaacccccccccctctcaaaaaagggggggaaaaaaggggggttaaaaaaattttttcaaaagggggggttaaatttaaggaaaatttttttttcttagatctaaaaaaaaaagcccaaaagaaaacccccaaaaagccccctttggggcaaaaaaaaaaagggggggggggggttttccccttttacccccgggggaagagtcccaccaaaaggcccttggtaaaatgggggaaaatatgggaagaaggggaaacaatgggggttttttcccccaaatggaatttttcccaccgggggggggccttttttaaaaaaattggaaaaaacctggaaggggtgccctaaaaagggaggggttaaaattttttgggg

SEQ ID NO: 42437 - DNA, 353 bp, Glycine max
  Clone ID: jC-gmro02910047b03d1
aatattgaaatttaacttctatatttcggggcggttatacaacacatgaaaaaggagggaggaaatctgccccctttcaatggtcaaaataaataaatgtccgatcctctaacccaatatttacctcacaaaaaaaaaaaaaaaaaaagattgacacatcgcgctcttcacataccaaatctcacttttcaaacgaattgactaggcaaagaaaaaaaaaaaaaaaagagacctctgaagataaaatacagagccactttcatcatgatccacctaccaacaggtaccgggggtaaaaacacgctcaaaacatgacaactagaccaccaattggtatggcctctcagcttcat

SEQ ID NO: 42438 - DNA, 175 bp, Glycine max
  Clone ID: jC-gmro02910047b05d1
ggattactagcgtatttggccatacataacgaacggggatgctgacattttaacattagtcactacctaaacatattacgtcttttacccatatgatatgaggacatgggtggtgaacgagttttgaaacactcatgtaccctcatagctggatgataacccattttatgtgttt

SEQ ID NO: 42439 - DNA, 507 bp, Glycine max
  Clone ID: jC-gmro02910047b06d1
acttaatacctattggtatttctcccttttctagtaaaagggacgatgtaaatgaacatgtttaaaaattaatgtcagatgtagcttttacaacatcaagactcaagtaaaccaaaaacataacaaatttgaatactatgacacattacccagttgattatgttctaagatacgcaaccaatacaatagccacgataaggtgtaaaaattgcacgggaagacctcacaccattcaactcttgaaagaaattcaatcatcgacactcatgaggaaaatgattgtagcgctctatcaaaactttcttcagctgatgatacccgtttgaccaatacatgctctgggtgagaaagtttcagctggctgaatgatttgttagatggtttgccgagatgaagacagcatacaactagattggctagagtttctggatccctggcatccttgttaagagcttcaaccaaaagggtctcagcttcgtcgaagttggccatgtgcatgcagcaaac

SEQ ID NO: 42440 - DNA, 302 bp, Glycine max
  Clone ID: jC-gmro02910047b07d1
gcttgcaaatttcccgcatcctcaggaagctcaatctctttcgtaaatgggattcatcaatatttacatgttacagcaaaatttggattgaaatacatatagcacaaatgggaaagaaggaaaggtaggagatctaatacatgagaaaaggacgggggaaaaatgaatattcaatccaatttatgacccatgcttcacattttggacttcattgtcaatgctgggaagaatcatacacggacaaactattggcagaaattttatgaatctcaattgtgccaaaaatcaatatttcagagaat

SEQ ID NO: 42441 - DNA, 199 bp, Glycine max
  Clone ID: jC-gmro02910047b08d1
atgaaacaatagtaccggggtacttaattaaatactaaatagccttttaaacaaatctcacaaatctacaaaaattatatttatcgttccccaatgaaacctttaacaacggaatcacacacctccctaaaataaaatcacaatccaaataactaccacaactccattattaatagtacccagtccaccctgttaaatt

SEQ ID NO: 42442 - DNA, 478 bp, Glycine max
  unsure (1)..(478): unsure at all n locations
  Clone ID: jC-gmro02910047b10d1
ccaactaaaatcgcggttgctaattattttttaaaatcagggttgaaataaccttgtttattacaggataaaaaagcactctaatgaagaagggggaaaatggaaagcatgaatcctgcttagctagcggaaggaatcctatacttctgaagcgcatcaatgaaatcttgaatatacttattatgaaggtcttcggaactgaaaaccttgcccatgtccttggcattctctcttagaggactcccttgctcatacacaatcgcaaacctcaatgttttagccacatttgccctagttaaagacccatctttctcgtgttgtggaaacctaacagacacttgatttttcttcagcacctctcaaaacagacattggtcaagctaatagggcagagtcacaagcncgtgcccaaaatgaacctttttatatacagagccagagccacaatgactcatgcaccctccaattgttccatgag

SEQ ID NO: 42443 - DNA, 396 bp, Glycine max
  Clone ID: jC-gmro02910047c01d1
gaacttgactaacaaatttaatattaagatttggctgccaacaatactgagaatgatttaaggtgacatatcaagttacacaacttttatttagtctctatgagaacctgaattcctccctgactaactgaaacattggaaagctttaacttgatagcttcaaactctgcattttccatctcctggctagacaaccagagaggtaaacaatgatcaatcaagtcctgtccacaactaaagggtgaacctcccttaaaactccaggttctcccaaacctagtaattgttgctaggttagaatcagaaggctccttagcataacactctaatatctccctgatggcattgcaccagataggccgagctaccttaaggaagtcatgcaacactatcact

SEQ ID NO: 42444 - DNA, 574 bp, Glycine max
  Clone ID: jC-gmro02910047c02d1
ctgtgaattcatggttttcactattattgcatcaagtgtcattggctatatatagagaatgcttaaatcatggtttgataaaaaaaagtctacaagaaaatactcaaaatatatataagaaaaaaacaaacatgaacaactgatgcatttgcaattatacaacagtagtgtgctttctcttttacttgtacttttgtaattcccaaataggttgcacaaaaaaagttcacttatttgggtgtcccgaaagaagcaaactatctttcgtttacatacaggatccaagagagttgttttttggcataatactgaatggaatatcattgattgtgaattagatccagtatataactatggcatcttcgacaaattagaatgtccgcgagtatttcctaatttcatacatgattgaagatatggaaacaagatccttgttcaatgcagaaccaccaacgatcctcttgatgcaatccgagagtcttgtgttataaagcaacaactgagtcaacgcagcccttaagatctccataccacacaagaagttgcttgaagaagtgataacgtctttatgcat

SEQ ID NO: 42445 - DNA, 517 bp, Glycine max
  Clone ID: jC-gmro02910047c03d1
aagaaatcctctcgtcatttatttatactaaaaggcaatagctaataaatcaatagcctttcgggctgagtatagccataacaggattaggggatctttccttaaatcagctaatacccccaaatagttacatacaaacagaacaatgtaaaaataaaagggcaaaattatgacgccgtgatccaacgactgttcctcggctgggtttttcctcatatatacgcacatccaaaccaagaccaagtaacaatttcaatttcagattccgcgcaaaccccggttcctaaggtcaagaaaattactacagtagtagacatggcgatgtaagtcgtttcaattcacaaagcagcatcgagaaacaaatgctgcaagttaattttgctaccctttcaattgttcattgttcctataacaccaacacacgggcaatgcacaaaaagcctgtaccatgactgcttaaggatcccgactcagcgtcttcgcaagctgaaccaaataagaagatgcacctacggat

SEQ ID NO: 42446 - DNA, 131 bp, Glycine max
  Clone ID: jC-gmro02910047c06d1
aaaataatgggacaaggattcttaatctaacacaacatataccttaaaatccaaatctcacattttcaaaactaacattcactaattccctatgccccccttaacgattgactcacacccatacacaaaat

SEQ ID NO: 42447 - DNA, 225 bp, Glycine max
  Clone ID: jC-gmro02910047c07d1
aaaaccatggggacaggggccacaaaccatgacgaccaattcctttcataaaagtaaccaaacctacaaaaaatctacttactgatccccaaccccacaactaacggtttaatctacctcacaaaccaaacagtataaacacccataaaacatcctcacctcaattaatgttgaaaagaggcccgtgtgattaaattaaatacacggatgaactatttgctccta

SEQ ID NO: 42448 - DNA, 62 bp, Glycine max
  Clone ID: jC-gmro02910047c09d1
aatttcccgggtacgacgacgctcactagtgcggcggaccgccctttttttcttttcttttt

SEQ ID NO: 42449 - DNA, 480 bp, Glycine max
  unsure (1)..(480): unsure at all n locations
  Clone ID: jC-gmro02910047c10d1
agccacacaagtttttgcttgtcacaagctctgtaccctctctctgtggtgctctgcttccctcaaaatcaaaccttgataatatgcaaatatcctaatccaaaaatcaacaagagcaagcgttacccaatggaagctgaaaggcccccactttcacaacacaactctaacactaagcccctctctcgcctcaacgaatacgtagccaaaaccagagttggcaaatggttcaagctctaccaacgcaactccaccttcaccaccgagctccgcgccggcaccgacaccttcctcaccatggcctacatcctcaccgncaacgcctncatcctatccgactccggcggcacctgctccgtatacgattgcgtgcatctctgctcagacccatccatacctctctccgcctgctcgggcctatcccttcgcgtgatccagaccgacgcctcctgcaaattagcccggataacccgggctacg

SEQ ID NO: 42450 - DNA, 455 bp, Glycine max
  Clone ID: jC-gmro02910047c11d1
gaactgaaatttttatttaattgctacaacacaatgcaacagcatatcttcagtttttctactagtaagtacatactaatgatacactgaaatcgcaaacacatcaattaaagtacttttttttctcaccaataaaagtacttgataaactgaaaaggctccattgccatatattggtaaatgataattccttgacaaatattactaacatattttttcacacattctttattaataattaaaatttattaaaaatataattatcttaggttacttcttattattagagtttattgcactaacactcctttaattgcttcaggacaaaacttagatatacttttgtaagggttggttgtcttcttctccaatcaaaattaaaatctgattttgataatcggggtaataaagggttgcaacaaagattacatggattatcaaaataaaacttcaac

SEQ ID NO: 42451 - DNA, 175 bp, Glycine max
  Clone ID: jC-gmro02910047d04d1
attgagataccatggaaccggggggcttaattcattacaaattcgctgacaaactcaacatatgtcattggcttagaaaagttccaccgtgaaagagaacaactggtaacaagtttgtaatggacacggatgaaataaagatgacaagcatattcgggcgaagttggctgtataa

SEQ ID NO: 42452 - DNA, 269 bp, Glycine max
  Clone ID: jC-gmro02910047d05d1
caacctatgggatccgggggattaatttttgaagaattagcggaatgaggttaaatgcgatcatgaaatagtgtatttaatccgtggaagagaacgaagtgaatcatgatggtaatggacacggttgttcttatgatgacgagaaaattgggttgggttcggatggatattcggatgtcaacggttcggatcaaaaaggaaccgtgggcgaagtttaagctgatattgcaagaaggtgtgatttccaaagggactcccactcagggggt

SEQ ID NO: 42453 - DNA, 176 bp, Glycine max
  Clone ID: jC-gmro02910047d06d1
attcaatgggacaagggttcttaattttttagtagatagccttttcatttcatttgaataagttatatatataattgttgtggtttttaaccgaaattttaattcacggaataacatcccaccttaaaataaatatgacatctataaaatatccaaattccctttttaaactgatc

SEQ ID NO: 42454 - DNA, 104 bp, Glycine max
  Clone ID: jC-gmro02910047d07d1
atattgaattttttatttacaataccttggggcccggagtccaaactctctaattacaatcctaatataaaaaatctttcaattttaaaaataataacattctt

SEQ ID NO: 42455 - DNA, 398 bp, Glycine max
  Clone ID: jC-gmro02910047e02d1
caaatgattatgtaaacctttgtatcgcacaaatattttaaaagggggacaggtccctggttcattacctaatggttaccaaagccgaaaagacccacatgtttgagcaccacctcatatttcactatttacaaaattaaccttttaggaagtttgggacttaaaaccttaatgggggggccactcttattttaataggcaccgagacttaagttacagaactttttatttgtttaccaaaggctattccaaaattcctttttttcaccaacatcttgagggcgcttccaccattccacatacattacatgggaatatttgattacagccagacacactgcatatatgctactgtgtggggggctttgctacatatggccacaagattttgtggcaca

SEQ ID NO: 42456 - DNA, 493 bp, Glycine max
  Clone ID: jC-gmro02910047e03d1
agcaaaaagcaacagggttaacaatagtaatcaaaatgaaaagtctgccctagttaaggataatgaattggtattttgaagggttctgatgctagttatacatataccaaagcctaaattaaacattcactcatcaatagaacattttaagggttccagtgggaaaaaaaaggaagggggttttggacatgttacatgagggttcactttcaatatttaagggaggttggaggttacccattttccaatgggaattgagggaccttatggttattaccaacatttattgggagctgggcaactgttttgaaccatgtttttggcaagttggcagggaacttattgtcccccgaaaaaacctcggggaaaacctgaactttggtggccggaagccctgccagttcaaatgcattgattttgggtagatatgggttaataacaactgggcgggcagtgacaagaacaactacgcattgaatagccccccacacat

SEQ ID NO: 42457 - DNA, 304 bp, Glycine max
  Clone ID: jC-gmro02910047e04d1
attaaatctttttttccattttaggaaatcatgggatagggggactgaataaatgacaacattggggtttaaccatatgtgacagatcttcgtaaattttatacattgagcgagaatgaaacctttaacaacggaatctctcacctgccttaaatagaagggtaggccgaatcaggttgacatgaactttgtaatgtgctcatcttcaaccttgggggaatcaatttacagattacccttttggtcccttgataaaaatgcggagtatgcgaatgaccaatatgctagagacacaattatcact

SEQ ID NO: 42458 - DNA, 315 bp, Glycine max
  Clone ID: jC-gmro02910047e05d1
agaaaaccatgggtagagggtgcttactttaatggatcattggggactaataaaatctgtcaaatctacatgtatttctttcatggtacgagaaggccaccgtttacaaggaaatcacgcctccaccctaaaaggaactgagaaggctattcaagaccccaacaactttatagtagcgctcgactgcaaagctgggggcctagattgacgagggaactttttggcgtctttatatgcatgcagagttccggaatacataaaagtcttggggtacacatatcataagacacctctgttactttggccacatggctt

SEQ ID NO: 42459 - DNA, 234 bp, Glycine max
  Clone ID: jC-gmro02910047e06d1
ggaaaccatgggaccagggtacttaatcttttgcaaaataggcgacaaaaccaagttgtcaaagccacaaaaatcccatccagggttcgccagatgaaacccataaccacggaatcacacaccagcataaaggaaaaatatcgaccaaatcaggtccccaacgcccttatgataagtacctcgtcaaagctgggaaggttcaatcacgaacaaactatcgtcttctatgcaaaa

SEQ ID NO: 42460 - DNA, 179 bp, Glycine max
  Clone ID: jC-gmro02910047e07d1
caaaccatgggaccgggtgtcttaattttatggtacctaccctatccaaaccctcactcatacttaaaactatcattcctatagatccattcggccacctttaaccatggaatcttacaccaacctaatttaaaattatcatccaatccatttcctatcttccttttttaacacctccc

SEQ ID NO: 42461 - DNA, 369 bp, Glycine max
  Clone ID: jC-gmro02910047f01d1
aaatataaatatatcttacaggaaaagattcaaaatacacatctaaaaagaattcataaatatataccacgcgggcttttgtgctcatagatccaacccgagaagcaattgaggaactaagaatggacaagcgtagctacaacaaataagggtgagagaatttgctccttttaagaagagaacaaaaaaaatggggattgttcatctagtcttgaagccaaaagcttcaatgccactcaatcctagaagagatgtggaaatagagggttgaaaccaccaaaaacaaccttttctccatatttttttggttttccttagaaggaagtttagagatgattttactcaaagcagaagagaagctttaaacac

SEQ ID NO: 42462 - DNA, 502 bp, Glycine max
  Clone ID: jC-gmro02910047f02d1
attcaaacatgtaaatatgcccgagctatatttacgtatttttacttaacaataaaaatctcaaattacataaattaggggccgcgtcattttttaacaaatctggatgataccaaaatttctctctgaggatgtatctatctatatagcaacaaaattgtgaacaaggggggctggatgaaatacagcagcttccattcctctatatcttcgtcagccgcaaaagagacaacttggaacccaatctctagaaaaaatcaaactagctttcatcatcagtacttatttcagaagaatcatcttcctcgtgataatattcatcttcaacttcaacttcatcttcatcttcactttcttgcatttggagttcatgcacagaatggcttatagtctgagaagccttgtcaatctgtgatgtcagcagttgcagacgacctgataattgtaacaaaggctgatgagttgcccctctaaaattggtaatcttgtctaaggaattgag

SEQ ID NO: 42463 - DNA, 147 bp, Glycine max
  Clone ID: jC-gmro02910047f04d1
catgggatgggggtactgaatctttcaccaaaaggggggcgaaccatccgtgtctaaccctcgtacatatctttcgtcgtgtgcgattgaaacttttaaccacgcattgctgttcccagtttaaatagaaggatcgcccaaataagt

SEQ ID NO: 42464 - DNA, 232 bp, Glycine max
  Clone ID: jC-gmro02910047f06d1
gaaacaatagggccaggtggcaaaaatgtttaaaaaatgggtgtataaaaaaaagtgtcaaagaaaaatgaataattttttgggggggagagtgaaacctttaacaatggaatatcacacaaggtttaagtagaaggaccatcggaattagttggaaatctggtttattaaaagtgggtggcccaaactgggaaatttgatttaggggtaaattattagtcttatatactaa

SEQ ID NO: 42465 - DNA, 243 bp, Glycine max
  Clone ID: jC-gmro02910047f08d1
atataaaacgttttttcttatcataaaacataaataccaacttggggaagggatcgcaaaaaaccctacaaaaccaagctcccaaagctacatattatactcttacaggtagaagctgaaacacattacaacgggttatcttaccaacattgtgtagcatgatcaggccaataaccatgcctaaccaactattgtgttcggcaagtatattttttcttatgaaaaaaaatgccgacccttaat

SEQ ID NO: 42466 - DNA, 411 bp, Glycine max
  Clone ID: jC-gmro02910047g01d1
acaaaaacctgaaaaagcctttgatttcacaatttcaccacaaagtttggtgcattctaaccgatcgacaaaaaggatcaatcataataattctttcaacccaaagtaagagaaaaaaaaacagattgaatgaaagaacatacaagaaaagtctaaattatttacaaacgatataaataggggaaccggaattcctttggctttatcctctatgatataactataatataagggtacattatatcatatgtaattaaaaaaccagccaaaaaaaatgtcttttgatgacaaatcatgaagaagctatttgatgagcttgggcctgtccattggggaagggcaatattctgggcttgctgagagacaattccactgggatttgaaaagcattgttgttaacggtggtagttt

SEQ ID NO: 42467 - DNA, 283 bp, Glycine max
  Clone ID: jC-gmro02910047g02d1
gcttgcaaatttcccgcatcctcaggaagctcaatctctttctaaattaaattcatcaatatttacatgttacagcaaaatttggattgaaatacatatagcacaaaagggaaagaaggaaaggtaggagatctaatacatgagaaaaggaggggggaaaaaagaagattcaatccaccttatgacacaggcttgacattcgggacatcatcgagaatgaaaggtccaagcttaccggtcctgaatagagtgaggaactttttggataccattaaccgcgctt

SEQ ID NO: 42468 - DNA, 467 bp, Glycine max
  Clone ID: jC-gmro02910047g03d1
agagcaaaataaggattataacaaagtcacctatatataatggcattcatggttgatgatattaaattgatgtttcaatattgatagcacacaaatggatctaaaccataaaaccttatatagcactaacatttattttaggaccacaaggcaagagatacttacatattaaaattgattacataccctaattatatctcacataccttttcaatcatgtccctctcgagctacaataagttcttctaagttatcagcatcaccagtgtccataggcaacatgatctcatcctcagttgtgaaattataattaatcccaatggctcttagaagctggtatacttcaaacatggtaggcctctcctttggcattgctgtaacacagttacatgcaaccttcagaaattggaaaagctcctggtctacacccttcccaactagtgattcatcaatggcttatggagttt

SEQ ID NO: 42469 - DNA, 320 bp, Glycine max
  Clone ID: jC-gmro02910047g04d1
aaattatagggtcaggactgaggatttagaatcttttcacaaataacggggctttaacggttatacagaagaatcagtgatcttaaagagttaatggaaaataaagacttttgctatggggaagatttaaaatttaaagctataaattatgctttccatttgggataaaaaccaagcttacgtgatacaatgaacaaaaaaaagggtattggaaggaagcacctactgttaccataccctatatctgcatggcctccccaaagacccgcagtcactcgccgtaattaactggggagctccgttgaatcacctccatttgg

SEQ ID NO: 42470 - DNA, 434 bp, Glycine max
  Clone ID: jC-gmro02910047g05d1
gaacactaaatatagaaagttgacatttaataaacgaaagcaacacaacgcagcaaagtcctgaaactcgctgcgcttaacaaaaatgtaatcaggggttccgacaaacacaacacattaaaacacagataaataaaagcaattttgccaccgtcgatcaagaacccagttctgggaacaacagttgcgagatgatggtggagacttcaaactttgtccgaaaaacaagctacctagaaaagaagacacaagagttcagaaaagaaaccaacatttattgtaaccaacatcccctgatgaaccaggccgcacgattcacttcttgttgtgggcagccttggtgaccttggctccggtaggaaccttcttctcaacgatcttgatgactcccacagcaacagtttgacgcatgttccttacagcaaacctaccaa

SEQ ID NO: 42471 - DNA, 341 bp, Glycine max
  Clone ID: jC-gmro02910047g06d1
ggaaggcacttgtatatatatagacataagttaccgtttgcatgatggtatggtagtaaaatttcagcacccatccactaaataaaaatgggatcagtttttaagtgaattgtggccccgacccgtcacaaattacgctccacctctctgcggttcatccaaacccgtcttcgaaataactgggtgaaccggacccggacccgattttggtacggaatgatacacgtgctgtttaaaaccgtcatgaaccaccgccgtgttggagggcctgaaaggttgcaggggggtaatgtgcctaacgcccgttcaatatttttgacccaaccccggacccaaaggat

SEQ ID NO: 42472 - DNA, 279 bp, Glycine max
  Clone ID: jC-gmro02910047g08d1
atagccgtataaccatttgattggacctctaaaagctcttggtggaagggcataagaaactgtagatgtaacaaacaatacttatagaggatggatactccatgagcttagtgccatccataattacatattcgatggaaaccctcttgagatccgaactgcttctgtttcaacgacagttactccacctaataccagcggatctcatagtcgtcatcattctgcatcaggttcacattgtaaaacacattcttctgctcatgtaaactctaatggcca

SEQ ID NO: 42473 - DNA, 360 bp, Glycine max
  Clone ID: jC-gmro02910047g12d1
agctccagccagttaacctatttaaacaaataatcaaggaaacatttgtttcgatgtatgaaattttaagaaaagatacaatttcaaatccatgcggggaatagatactgaaactaaagggctttcttcacttgaaagaagtcgggacggtccttgttggccgtatctacatcctctggagatgccactgcaaccacaacccctttatccttaactgcttccatagcatccataaaaattttgaagtccttcaaactagtagataatatctcttcacgtctcctttgcctttcttcctctgggatacccagttagtacccgaacatactactataacctttggcatcaggaagttgatac

SEQ ID NO: 42474 - DNA, 520 bp, Glycine max
  Clone ID: jC-gmro02910047h01d1
aataataaatacatctttattttctattttcatataatatagacataccacctattttccaagaagtacattttcatttgtcctcttccccaacctcacttagccactatttacatatcctctacccccaaacttaggtataattttaccttagaaaccaaaccctataagtccttatcaaacatcatcaccttaactaaggttgaaaagagccttgcttattttgctacatgccattcttttgatcactgcaccatcaactatttcataggtgtcttatttctacctcttcagccttttccagttctattggactttctatatatacaaaacgctagaaaccactacagaaaaaaaaaggacggtgacacttcccaatacctgccctaggaaagctcgagtattggattttgatgaaacgacgtcgaaacactcgcattagtatagtagtatttttatactacctaagagcattatagcaaatagcctaaaaatacccactatcactaatattctatga

SEQ ID NO: 42475 - DNA, 512 bp, Glycine max
  Clone ID: jC-gmro02910047h02d1
aatagaactgtgttgctattattttctgctgcaaatacagagtgttatttgaggatgccaggaatatcaatcaacattgatgatgaatgcaacaattatcataaaaaatcaaaatcacacatctaggacattttattgcattttttccctgtcatttaacattgagactacaagtctaatccatccgttagcatgtattttaatacacccgagccttgggagggaatgattcaacctcatcatccaatacattcaaatgcaccggcctgtagtccaaccggaccttctcgttctcccagaatcccacagtgtgtttcatccagttcccatcatctctaaccttgaagtcttcacgggcatgagctcctctactctctttcctagcttcagcagagtacattgtgatgcatgcatttattaaaagattttcaaattcaatagtctcaatcaagtcggagttccagattaaactgcggtccttcacctggacatcatggaagctctcccatgtt

SEQ ID NO: 42476 - DNA, 475 bp, Glycine max
  Clone ID: jC-gmro02910047h03d1
ggggccggggcaaatcattcaaaaagaaaaatttccaggcatggaccttttacaacatcatgagtctaatggctttgacatttctctgacactagagaacattggccttacaagatccgactcgaattgaagggggatttccagtccaaaattcaatttaacccttgacaccataccaaaaaagttccccccgatctggcttgcctaggacgctttccatttcagacccaaaagatcccaaaacaattttaaaattaaacttaatgcaagttaacacctggtcccgatcattttttagtgtcatcttcaaagagtagggtcccgggggagcaatccaaggcaatggttgggtgtgaaaaatcaaaaaattgccattggcaacaggacaagatacttcatgacagaaatcaattctttcaatatggacaggccccccacacgatgaaactccaattacaacttttcccccataaat

SEQ ID NO: 42477 - DNA, 520 bp, Glycine max
  Clone ID: jC-gmro02910047h04d1
atgcattgaacaaatgaagaattaaacgttacacgcccaatacttcctgaaatataagtaactgatgaaaaacatcgtcagtagaccaaggttatagcacattaacacggtgactgtagaacaaacaccccaatgctttaccaccatcaaagatttcggtgagacaaggctaaccctgtggtcacagtttcaaagggtttctggaacatttatggaagcatctctcttggacaatgaagtcacaaaaagggtactatgcactacagcatatatatgtttaattaacatatcagggactataaacacaggagtactatgcactagagtcatagctacacaaccactattgctcaaatttttagatggagactacgtctatggttatgccaacctaagagccttgtcaaactctgcacactgcatcatttgtctcttcttaagtttgctttttttctgaagacaccccacaaataaacttggctcatatcccacaaatcttatgacatgtttacagatcatg

SEQ ID NO: 42478 - DNA, 498 bp, Glycine max
  Clone ID: jC-gmro02910047h05d1
agagcatcgcgttatgttatcatttgatgaacaaacctctacaaacaaggtaacatggagaatatccatatacagcacagcctatggatcaaatcacattcaaatttaaataaatactaaaatcaaatatgaccgaccgtctactgaaacataggaagcaagaatttccattcctagggtggttctctattataaatatacacatctatgctaggtatgtcggtcatctaaataacaggccggtcttttaagtgtccgcatcataatcattgcaagctcccttccatttaactcttggtattacgactatgtgaaaccggaggaatctttgagatgatcaaagagctctgcaatccttctaatagtcttgatgttggctggatcctgcgattggatctccggggctcaaccatgtcggatgctgatttcatgggattgtcgattaaagccttttcatctaaacttacctgattaacacgtgcaggcgcaaggttcctt

SEQ ID NO: 42479 - DNA, 473 bp, Glycine max
  Clone ID: jC-gmro02910047h07d1
cctggaaatacaaaaagttaaaacaagtcattacaataactttttcgtcccaaaatagccataactttgttgactaccaataaatcaccctttactagaaattacaacaaaatacattcattttcaatcctaccactagcacttttttttccttgatgtgcaacagtgcttctcttatcttccttttacaccttttttcaagaccttatataccaaggcattcctccttatataccagccaatttccccaacctatctctcaaaatcttcagccccatgtacctgcccatcatcatgacagttgcttgaggatttgttccaggtgattcatcaaatgttgagccatctaccacgcggagtctgtcaacaccaagaaccttgtaatcagggctgactacctttcccaaatggcaccctccatggtagtgccaaattgtgatcacggtgtctttgcagactgcgctatcgacgct

SEQ ID NO: 42480 - DNA, 309 bp, Glycine max
  Clone ID: jC-gmro02910047h12d1
caacttgaaaaccaactaacatgtgtatgtcatgtgtcaaacatgcaatacatttcaaaaatcacacaactaccacttcactcccacgaagaaaacaaggcacacgcaacacaactagacagaaatttccaaaccaaaaccaagaccaaggatttaaaactattttcctaacaattcccactaaaacattcccattggctagccaactgaaacagggtctgggatgaaaaaccatcctttagtgcactagcagcagaattttttaaattccccattttttcacgcattcctatacctttttttccatcc

SEQ ID NO: 42481 - DNA, 391 bp, Glycine max
  Clone ID: jC-gmro02910048a02d1
gatataaacacatccaacattgatcccatttttattcaataccggggcagatggcattaaattgacaccaaacttattaattactatacgccaactttcactaccgacctaatttactatgcttcctaaacactatataacatcacttttttttacatgaaacatattcaagcgttaccaccgtttttttttaaacccaaagtacaggttttgtataatctattctgaggaaccgttcctatgtgcccagaggattgttgtgagaataattacggacgcatcccatcacatttgcaaagtcccgcctgcacaccgaactaataggaactattctattatttcggatcacaatctgatacgatgggatttaagagtcttaccagtcactggc

SEQ ID NO: 42482 - DNA, 484 bp, Glycine max
  Clone ID: jC-gmro02910048a04d1
aaaacaagtaaaaaaaattgcaataatgttaatattggaagaggttaatcaagaaataaggaaacagacatgtctccatctctaaattgatcttgatcactagccattaccatattggtaaagttctttcatacaattacaaacaaagaaaagaaaaacttagggtatgtttgcttctcttctcagtttttatttttttatttaacaaactgtgttttgaaacaattctacttaacctatcaatcaatttatcatctaaagtcacttaagctttgacacttattttccaaattccataccaaatgttttaaaaactaaaaaacagaaacagacaggagatgcttctttcccttttcatttctcaatggcaagcagatggagagaaaagaactagcatgaattcacatcaaatgcagagagaacgcagagaaggaacatccaaatggagctcagtgagctgcgtcgcagacttgcagataagcac

SEQ ID NO: 42483 - DNA, 329 bp, Glycine max
  Clone ID: jC-gmro02910048a05d1
aaaaaaaatggaagggggtattgatttaacaaaacttatttttagtaaaaaacatgcaatttattttggccacaaaaatacctagttcgaactgtaaatatccataatacaagcctgtaaagtaaaaaaattgatcaaacaagttcatactttgaagctagagagtcaaaccagccatttccccaagcaataacttaagggaatctagcttctcctggttcttttctcgaatatttggcaaaaccttttttttataacctttagcattcataatcttctctaggctttctatttgctttttcagctcatctatcttcttgatcttcccc

SEQ ID NO: 42484 - DNA, 415 bp, Glycine max
  Clone ID: jC-gmro02910048a06d1
agtgaaaaactctttattttgttattattaaattaatataaatgggagggacgaagccactgatgtggcagccacactgaaggcatggcaaagttcccatgccatgttcgaaataccaaggccaagatgttcacaaaaagaaaggataggtcacgtaaagggtctagtgttacataaatattgaggaaaaggacacggttccaaagtcctaacattgctgtccagcatcttcccgatgggcaggtcctagaaaagaggtaagcttggagggaaacgcacatgcatccattgtctctcatatgcagccaaatgtgtccatccaatctcatcaagcaaagagagcttaaggtcatagaatttcttcttggcaggctctgcgtcatcttgaattatgtcacaacagtacctttaacgc

SEQ ID NO: 42485 - DNA, 537 bp, Glycine max
  Clone ID: jC-gmro02910048a07d1
aaaaaataaattaattactaaataaataatgtataagggaatgaactttatgcttattacataaattattctatgaaaaaaataattactaaatgttattgttaatatccctcccctacgcgggtacaaaaaattccaataaggtagtcagatttatatatacagaaaagaatcagctactctctatccatcatcaggcaccaccaaggttgttcaaaaatcacaaactgcaacgcaatcttgacctcaatgcgatctcaactgcaataatcttgaaaccttagttgtactaaggtaactttaaatatagtgctccaatttgattagcatgacacttgtatcatccaaagagcctcgtgaaacagacaaatctacaagctttttacaagcctgcagcaatggttgtgatttgttgttgcctacgagaaaagaacgagcaatatctactgcttcctgattaccaaccttatcccataatccatctgaagctaaaattaacaagtcatgttcaggttcaattcggagaaacttggtctc

SEQ ID NO: 42486 - DNA, 454 bp, Glycine max
  Clone ID: jC-gmro02910048a09d1
agtaatgtatgaatccattgggagcaaatccacaaagtcaggggctacataaattgggagaaatggaataaaacaatataaaaatagcagggtatttgtagttcgagacataaccatagacaatattaagttaatcgcaagaatacaattcgtaaacagtcattaaaaagtatcatcaagtacctaagcactttctcattgaatctgaagctgaaactaagcacttgcttcgcatgtctgcatatttctttacaacaagctcctataacaattaaaacagatgcctagattgtactggtttggaaagcatatgatttgccggatgttgcaaagagaaccataaggaagagttaaatgagacacgggcagatttttactttcatgaaagcttcaacttcagctttatggcttgtgaactttgaacccaaaaactcttggaacatagccttgtgct

SEQ ID NO: 42487 - DNA, 572 bp, Glycine max
  unsure (1)..(572): unsure at all n locations
  Clone ID: jC-gmro02910048a10d1
agacttgatgaatattctatcatatagatacacgggggggaaacaaaatgtataactcaacactgaactacaaaataatatacatacgcaaaaatgccaaatactgatcaaagacaaaatgtatcaaaactaataaacagctgaacaaggcaaaacaaacacacccttaaaaaggcatctttcattttttttcatagactaaatgtataactcaacactgaactacaaaataatatacatctaaatatacaagccccacagggatacagagtaagacgaatggcgctaactctcaacgttagctttatttccagcaaggatgatagagatttcaagaccacggctgaaggcttgattgaagagaaggcgagattggaaagtcgaaatgaatggaaaccacgataaaaatgctattggtgcaaaaatgatcatacccattccagcatcgtacattctagcaaactcacgaacagaatcccacatgccgagactccaaactatcttcttccatgcaattgccaaggataatattccccatccagtanggataaatgcaaggatgcttgcaaata

SEQ ID NO: 42488 - DNA, 403 bp, Glycine max
  Clone ID: jC-gmro02910048a12d1
gggggggggaaacaacccccggggaaaaaacccccccccccccctttttgggggtttcccccacaaaaccccccccaaaaaccccccctgggggggggccccccccccaaaacccttttggggggcttttttttgggggacaaaacccccccccctccccaaaaaaaaaaaacccctttaaaaaatccgcaccccccttaaattttgggcccccccaaaaaaccccctggggaattggaaaaacttttaaaaaccctttaaaactccccgggactttttaagcccaacccccaaagggccgggaacacccccccaattttgggaaaaacaaacccctcccccaggggggcccccccctcccaaagtttgggcctaaaatgaaaaaccccccctttcccccccc

SEQ ID NO: 42489 - DNA, 510 bp, Glycine max
  Clone ID: jC-gmro02910048b02d1
gcatcaaggcaagaaataatattaataatagtggtagtaatagtaatggactttcaattaaattacattatattacagcatggcaaatcaattaaaatatacagcttattttccatagtgttaaatggtgtgtgaaaaattccaacgcgtaattagtatctagaatttgtttttgattgatgatacattttcacaaacttttctactccttacttccagggtttttgtagtagtaattttttagccgggaaactgcacaaaattgcaaaagatcactagaggcactatgacatttaaaatgacatgtccatggcatcatggtctggggtcttgtgaccaaaaccagattcctcacttggtcgtcttttaaccacacttgctctttgcactaaccgaaccaatgcttgcaccacctcagacatcggaggtcgaaattcgggttccggctgaacacagagggcaatgatatcagcaaagcgtgacagtgactttgcaggatacatgccgttc

SEQ ID NO: 42490 - DNA, 333 bp, Glycine max
  Clone ID: jC-gmro02910048b05d1
atggagaatgagaagtttctatacaaataacaagacaatcggggttacgtgacaagttatgggataattcacaccttctcactggccactctgatcacttcactagaagaaatgatatattttcaagcaccaactgtgttagaaactacaactatcaggttaaagcctagaaattatttccataaatatcttgaacatcttgcttacataccaaacgacacccacacctcactattcccaatgattggcaacaataacttttttgtacaaattcaacttcactgccatcaccaccctcataaatcatgtcacggtatttatcaatggacaaat

SEQ ID NO: 42491 - DNA, 575 bp, Glycine max
  Clone ID: jC-gmro02910048b08d1
atctgaatacaaagtacatggttaattggaggactggcatcacttggaatgtattacagttttatacaaagtagaataagagaaacagatactacaactgaatcaggttcttgaaacaataagtaacaagaaggaaccacccaataagaatggaagtgaagaagaaccaaaactttaggaaggtgaagcccccgaataagactccaagaaaaaatataaccacaaatggtaagatagaccgaagcatagatgttttgctgacccaacgtccattgaataaaacgaaaattgccagattcaccacattccatccgccagacagaaaacccaacctgttcaaattattggcaacatacgagtggcagttgcaggtaaagagattgtaagataaatgttggaattcttgagtgctttttcttagtgcatcatcccaagtcctcaaatctcctttagtttcatcctgaatgtagtgttcctcaccattgtacacagactggactaaagggacgcaacacttttctttgggaatatgaaatagcggggggagctccaaatgcaaattgccacacacacaa

SEQ ID NO: 42492 - DNA, 365 bp, Glycine max
  Clone ID: jC-gmro02910048b10d1
aaaaaaatgggactcaatcctccttaataaccctggggggggaaataaaaaaaaacccggggtttattttccctcctaaacaaaaatacttttttgttcaagagctccccaaaaagaaaaaccccaatttaactcccaaaaagcaaattccttttaaatactttgacaaactagcccccccacacacaaatcctgaaaaatttatattttggttggatacatgaatactttaacccttgcccccattgacctaggggggaaattggacttgaacttttcttgaactataccactgttaccatgaggcccggggacctttccccaaatgccgcgatagggggttccggtcttttttaccctccctt

SEQ ID NO: 42493 - DNA, 494 bp, Glycine max
  Clone ID: jC-gmro02910048b12d1
gaaaacacacctttttttattttggaaaaagaaaaaaaacgaaagcatattcagcaggcaccccgaatcagcaaattaccctcgccgatcctttttatttacacataataataattaccagtagtaacgtgacccaacaaacttagcatcatattcatgcaccatcgatcacgcaacgaggagagaaagagaagtaggtttaacagcatcaccggaggcgcagaagtcgccggagattgttggttgctccgtcatcaacgccaccagcggcggtttcggcgttgcaaccgagtttggatctcaaagagaactttggcagcggcaaactactgggtggcggagccagattgaaaaccgcccccgaaacgacgtcgtggtggttgtttcccatccctagcaccactttgggaaggtctttgggatcaggtccccagcggttatcagattgtgtcaccgatctcttcttcgcttcctctcgcttcgttggtttcgat

SEQ ID NO: 42494 - DNA, 548 bp, Glycine max
  Clone ID: jC-gmro02910048c03d1
gatcatctccatgatatccaggcacaagaggcacacctgcaggggccatgtattctcttggatgcactcttgtcacccatatctcgaatagcagacgcaggaggccctataaacgtgagaccactgtcctcacaaagcttggcgaagtcagcactctccgacaagaatccatatccagggtgaatagcctgcgcgccggagcgaatggcggcgtcgacgatggaggctccgttcaagtaactgagccgcgccggtggcggtccgattcggatggccttgtcggcggacgcaacgtggagcgagtccttgtcggcgtcgctgtaaacggcgacggtttgaatgccgagcctccgggcggtcctcgtgatcctgcaagcgatttcaccgcggttggctactagaatcttctcgatgcggtgtctggtgctgctcttccactcagagaaggctcgtgtactcacgtgcgagtgggagagcgtggttctgcggagcaacgccaagaaagccatggaggttggtgcgaaatggaaaggatgacagattgagaa

SEQ ID NO: 42495 - DNA, 550 bp, Glycine max
  Clone ID: jC-gmro02910048c04d1
cacaaaaccaataagtattatcatcattttattcagcctttaggctgggtcaggtaaaatgtaagcttagttcactacaaactggaaaaaaaaggcagctataaattagttaaataacataaagaaatatagaagccaataaggcaataaccttcactcctacaagagtcctcaagttcaggagctttaaccagatctaactgacttccagagcttgacccactcttccatggcttgagcagcctctgaaaacataggatcaaccttccccaggtgctccttcactgttttggccacctcgaccacgcaagcctctgctgtagttgctgattgtggcaaccttaatgactgaaagaaaggaacaacatcctccatcaatttcaccccttcccactctttcttcaagctctgtattgcatcacccctttctgttctccaaacataaggtaacccacttttacaccaaggcctaggtgatcacatataactgtcacacacattccacaccatatatcttccatagtttcccaccttaatttccctttccctg

SEQ ID NO: 42496 - DNA, 535 bp, Glycine max
  Clone ID: jC-gmro02910048c05d1
aagcatccttgggaagaatcattattttctctattaaccaggcatgggtacaatccaggaaaatataaaaattaaaaaaatgatcaagaaaaaatattaaaaaaaaataactatctaaaatttaaacaggcacccgtccctagttccgcttttctacattcacaatggcacgagtatattgaggtaaaagccccaaaagaatgtgctatatataaactctagtaaattgtaactgaccctaaggaatattgttcataccacgcgcaaaatgacaaaattcagggcactacaaaaccacaacaccaggaaacaaacaaccagtccataaaatctcttcgtggcaccttgagaagacctcagatagaaatcccagaagctggaaccaactgtcttgatgggacctagtgatgtggcgcaagcacagagacaaaattttgattttcacaccaccccaaccaattgcttttaggctgacggggctccttcattattcgtaccccactcttcgtcagcctcgttaccattaacgagtact

SEQ ID NO: 42497 - DNA, 536 bp, Glycine max
  Clone ID: jC-gmro02910048c07d1
atactctcattccaaatctttgaatttatgagttgccaggagacatgaattgtaaagcaacaagaacaaggacaagagaggaaggtgtaagaagtaagaacaatgagagagacattacaaccacatcccacattagtattaattatttcttaggagcaagcctagacttaattttctcaacctccttggtacccacctggaacgccttggttaacacattgtctggaaccggtggcgtcgctgcaaacaacgttagagcaatggactgtgtgccaggcaattgactgttgaatgctgcaatcactgaagcttgttcctttccattgttcttttggaagtgaaccaacccttttgggaacacaaatatttcacccttgcttatgctctttgatatgagcacgttggctgtggttataacccacatctagtgttcttcaagcacaacactacctcggtggcacgtgggtgcgtgtgaggtgggttgatgccacctggggcatagtcaatgcgtgataaagacacgccagggtgttgag

SEQ ID NO: 42498 - DNA, 526 bp, Glycine max
  Clone ID: jC-gmro02910048c08d1
gtgcaacaatgatcatttccattattctagtgtttttattaagacaatgatgaagacaatctttgagttcacggtatgctagtgtttttaaatacatggacattgcagtattttgcttgtagatgaatgttgcaccatttgattagtcggtctccaaactgcagcctttgttcctgtttgcctgtccactcacttcagtcccctttgttcttgattatgtttttcaatttctcatttgcagccactagttcagcagttatgcctggttcattggctgaatgccctgcatcaggaaccaccctaaaatctgcctctggccaagctttatgaagatcccaggctgacatcataggacagcaaacatcatatcttccctgaacgattgtggtgtttatatgccttattttatcaattctgtccaacaggaatgaatcagaggggaagaatcccttgtttacaaaatagtggtttttaatccttgcaaatgccagcgaaaagtaatcgtcatccccttttttatattctc

SEQ ID NO: 42499 - DNA, 536 bp, Glycine max
  unsure (1)..(536): unsure at all n locations
  Clone ID: jC-gmro02910048c09d1
aaaattgaattgatgggtaaaactaccccaattcgaagcttggccaatcaagatccaaatcatgcaacaacaaaaaaaaaagcaactttttttttccttctctttctctcctcttatcgaaagcttaatcacaaaactaaaatcacggacattatttataaaactcaagtgcgacaaactccaaatgagaaagaaaaaagccggttcctccatttctttatccaactctttatcctcagtttactcagcagcaaggggcacagactcagccaatttgcggtacttgagagcatagaacatctcgagatagcggcggctctcacggcggtcaaggttagacacatgcttccagaagccatagacaccggtgagagtgagaagcctctgagagtaaatttgccatgtgtacttctcttcaatacgctggagaccagcctttgagatcttgtcccagtgagttgggtcaagcttgcacttctcaaagaagtcaacanggagatcagcagcacggtcaccatggtaagggtcaatgtgga

SEQ ID NO: 42500 - DNA, 469 bp, Glycine max
  Clone ID: jC-gmro02910048c10d1
gacaaatcaaccaaacggatcctttattgagccgagactaagtaacatgtaaacaagccttgcctataacaacccgggtaaccctgtgttcaaaaggcatgaattagtaagcattttttttaccacaacaaaaatgcgccaaatgaaacgggcaaaaaatatcaaaactttggcgtcgttaatttcacacggccaaaaataaatatcttgctgtttttaaccactaaagcaaccaacttcagcaaagggcgaaaaaaatccgctacaaaactttttcattagaaacctccatcctaagaaactatttagaacttcagaactatgttggcaaaatcctgctagccactatgcagttttcacttttcgagagggaggccgccgaaatagactgattagatcatcaagacccctagtggtgatgaccaagaaactgaagagcacaatcaaatacgatcccagcactagaagc

SEQ ID NO: 42501 - DNA, 475 bp, Glycine max
  Clone ID: jC-gmro02910048d04d1
aacattaaaaagttataaaatgcggcacagtaaaccttgggactgagcactatacctcaacttcctaattagtttttcttttctttttttcacaaagggctccctaatatttagtctagataatcaggtaccaattccatttctttacagccaagaaaggataagctggggggattgaattaagcagcattacttcaaaccagtgaagaaagcaacctatgcaagaggcttgagtttcaatcggagcaaatgaaatccatagggagcacctcagtatcacaaacccaaaacttagtaacatcttttaatacaagtatacaacagcgatcccccaacataattccaaaatgttcttgaaaacaaaggaaacaagtctctcgctcattccctccgccttttctcttttctggaatgtgaactgtctttctcattgctataacgagaggatctatttggagattcatgctttctgtgc

SEQ ID NO: 42502 - DNA, 323 bp, Glycine max
  Clone ID: jC-gmro02910048d05d1
ccaaggaaagcgccctttttaaacttaaaaaaaaatcaattcaaaatttattccacccaatttactggcaattcatccccaacaattgttacagccccgcttgttgcaattttaacagttaatgggagtttccccttatttaaaccaacccaaccctccatatgtaatattctttccatggcccttaacatttttttgttgccccaatgttcaaccccagctccattttttgaattctctttgaaaaccctcaacttaaaattttttttctcccacattaaaaggataacaaacaaacttttcccatgttcctcccccccccc

SEQ ID NO: 42503 - DNA, 500 bp, Glycine max
  unsure (1)..(500): unsure at all n locations
  Clone ID: jC-gmro02910048d06d1
aagctgagaagtatcgagcaaaagtacaccatattagggtaatgaatgtaaaggtacaaagctccagtcagattttgaactaggcagatgactaatatgaaaccaatattcccaatatatatagcactcatttagtagacagtaatacaaccaggagaagtggtgtcccatggtgaggatttcagacaacagaaagctaaaagcacaaagaaagtaattctaagaaaccctccattggcaactaaaactagaatcggtattcaatcagtccccacttgcacaacccttgcacccacagtgaacacactctatgaccttctcctccctaagttgcttgggaactctgcaaacacaagtggtggcaaaattgtgatcacgtggctgcatgcacctcaggcagcaaagacgttcataaccaggcttcttccattttgcaattagattgcggtcagcatatccttgatctaaacagaattcatacangtctttagaaatttcct

SEQ ID NO: 42504 - DNA, 423 bp, Glycine max
  Clone ID: jC-gmro02910048d07d1
gggaaggacaagccccaacaaatcaacccccgcttaaaaattaaaatcccaatactagtttctggggttttcatgacaacaattttaacaaagcatactttaagcaggaagcaatctgtccataaatttttttttttacaagttcagcatgaacttttatgcccctttgtaaatatgactggttatccactgcgcaaggcaaactgtaaaaaaatacaattattctttccaagttttcaacagttttaatttttaaaaccaaagtccatagttccacattgtattgagatgatatcctacgatttttaaaaacaagaaaatgctcccccccctattgaagatttcaaattttaaaatgtgttcaattgagaaaagaatttcccattggaattgccactccacacaatctttaaaatcaaaact

SEQ ID NO: 42505 - DNA, 592 bp, Glycine max
  Clone ID: jC-gmro02910048d08d1
gagcaaggaaaaagaactacattgctggtttgcacactacagggtcgaaggtgtctcaactaattagagtgttgccaaggcattttgacaacaaaatttgaaagtactaatacagagctaaaatctactctgacatagtttataattacaggcaaagaataaggtgccaccacctattgcatcaacttgtcacacgagtaacaaacaagcatgagcatacttaaaaatggatggcacttcctattccgcgattttaaagattgatcactcaacctcaaccctctgaatgagcaattgtctttggttgtgttacactttgccaaggtaaataggtgatggcttgccaaataaggtatactacgaaggcaacatatgcagcagttattacacccactacagtgccaatcattggtccattcacttcagaggaaaagaattccgtcaaaagatagccattaatcactatcaccagagcagccacgagccatgaagtagtcttgaggacagcaccaattctgaaagtgcccattatctgctcctttgacaccagacaaagcaagggaataagtgcaaaggggatctggactgactg

SEQ ID NO: 42506 - DNA, 522 bp, Glycine max
  Clone ID: jC-gmro02910048d09d1
gagactaacttatttactgcagactaaaggatagagacaaatgaacaaggttctctaaatcgtcatagtaaaataacacagctccaacacaagccaatcttttcgtccagaatgtgccaaaagttcagcaaaacaaacagcattggaggaaaagcctaatttaggagtctcgaaatcctagattaaaatacgtctctaccaacaaactacaacagcagaaggaaagctcgaaataaacatataaaatattactttcttgatctcaaagtcatgcttcgctgctattctctgcttcttcaagcatttgcacaacctgtgcaaccccttcttcaatttccttccggatgactccatcaggcatatcaaatgtccttcttttgaaggaggagagtgatgctgatctttcaccaggctggggatctaccacatcaagcattgctttcagctcatccaccattgaccctttgcagaacttaccataatatcagctccctcaatggcatcaaccagtaggagcaagac

SEQ ID NO: 42507 - DNA, 461 bp, Glycine max
  Clone ID: jC-gmro02910048d10d1
aaacaaaaaaagaaggagaaatcttattatctgatgtaagcgccccacaccatttaattctaattcccccccctcaaaattacagaatgaagccattggcaatggctctattggtattgaaatgggtagtttcatacacaggcaactcttccctatacctttcaatcccaattgctgatagattatccaactcaaaaagatcagaacttgaacaactagccacatcatcatcatcttcttcttcttcttcatcttcataatgcatgacatcatcaaactccacttcactctttttctgataattcttcaacaagtctcttgctaactcctccaccctgcgactctcctgcatgacatgcagcctaagttcctcacttctgttctttccattgctctcttcaccttcatgaagatttttgtgaccacaaggcctacaatcttcatccactatgacactcact

SEQ ID NO: 42508 - DNA, 580 bp, Glycine max
  unsure (1)..(580): unsure at all n locations
  Clone ID: jC-gmro02910048d11d1
catcaaacagagttttacatggtaaaaacagaaccaacctgtacggcctcaaaactttaacaacaagaaaacacaaacagatcttgtgactagcaatagtctcccgatttcaacggccttcctcccccaaaaaaccaagacatgaagttgtagcaataccagggcaaggctcatctcacttatcgagccaggttctaaccccccaaaaccaacgtctaacattggaaacacacacacacacacacacacacacacaaactgacaaaagcgtcgacgcgtgcttcttccaaaaaaaataaaaatgacatgcatggtaaatacgaggcacaaattaatgcgcacattacattgcatacctaggacgacgagatcatatgggattgatctaaatcatataccgtccatggtcggaaaccattacatgtgtgtgacgtggagattagttagagaaaacacaattaccttgttgatcgaatcatgtaattatttctcctgaaacttattacaagaacaaaacaaagcanagatgtatgggaatagatagattgaatggatgtgaaagaaatgaatttaagtgaga

SEQ ID NO: 42509 - DNA, 490 bp, Glycine max
  Clone ID: jC-gmro02910048e04d1
gcaaaacacaatatttatcatgggggattggggtcaataatatataaagctacatccacatcccttgccaaaatcaacatattttcttctaattttgacggctctatataaagattagctaagaggagtttagcatgacgtgttacaatatttattacatcaaattttcctcctacgagagtctcttgaggcacttcataagtgtatctgtttgttcaggcttcccaacagtcacacgaacgtaccctttcagctcttttttgtcatagtgacgaatcatcacacccatttgtgctaggtcctcctttagcttctttgcatcctttcctgatgtaacctcacaaagaatgaagttagaatggcttggaaatggccggaggaatggaacttctttcaaaaggtcataaagtctccctctttctttcaacaaagcattttttacattctctagataggtaggattttgcaatgctgcacatgcagaaatttc

SEQ ID NO: 42510 - DNA, 501 bp, Glycine max
  Clone ID: jC-gmro02910048e07d1
aacgtcagagtaagatagtaattagaaataggactgaattgatattgcaatcttgaacctcaaggtatacatcaacatatttaaattaataataatgagtaaaaaaaaaaacttcgtaccccattgcccagaggctctttgctatgcgaaggtatgggggagggataatgtacgcagtcttacccttgcatatgcaaagaggctgtttccgaattcgaacccatgaccaacaagtcaccaaggcacaactttaccgctgcaccagggctcgccctcatttaaattaataataatgagtcagcaaaccaaaattactcgaagcacgaaattgacaagggtatagaattcatgtcttaaagaagatttcttaatttaacattataactctacaggtaagaagccatgttgagctcaatttcttctttggccttgatgtcaaatggttcctcaccaaaatataaatctagaattgacttacataggagtttactctggatgctt

SEQ ID NO: 42511 - DNA, 501 bp, Glycine max
  Clone ID: jC-gmro02910048e08d1
gaagaaacaattgtctgcaaacttaataaataaatagcgttaaaatttcatatgggacaacttcatgctgtctgataaggaaataaaaccaatacaataggccaaaactgcaagaattgccccacagacaaccctatattctcacgcaatatggtaagaaaaaacaattgaggaatagaacgagaagctcccacgccacaattccctaaccttctcttttggactcaatcgcactattaacactcataatatacacattctagagaaagttccctttccaatcacaattgactctgcattctcaaaactgatatagaacaccatgcaagaatgaatgatggaaaccatcttatggcaaaaagaatgggtacaaatatagagaccaccaaactggaaaaagcttgttcccaaaaagagcaagacaccaactgccaagccagatgctatgaagaaatgatggatatgcagcaaagcaatgacaactatgtagaaaggatagat

SEQ ID NO: 42512 - DNA, 421 bp, Glycine max
  Clone ID: jC-gmro02910048e09d1
aaaattgaatttttgggtaaaactaccccaattcgaagcttttccaatcaatatccaaatcatgcaacaacaaaaaaaaaagcaactttttttttccttctctttctctcctcttatcgaaagcttaatcacaaaactaaaatcacggacattatttataaaactcaagtgcgacaaactccaaatgagaaagaaaaaagccggttcctccatttctttatccaactctttatcctcagtttactcagcagcaaggggcacagactcagccaatttgcggtacttgagagcatataacatcttgagatagcggcggctctcacggcggtcaaggttagacacatgcttccagaaaccatagacacccgtgagagtgagaagcctctgagagtaaatttgccatgtgtacttttttttaata

SEQ ID NO: 42513 - DNA, 497 bp, Glycine max
  Clone ID: jC-gmro02910048e10d1
aatgccacgcaaaaggaaaatcaggtcatttaactcaaaggaaaacaagcatcgtaattccacttatagaaaatggtacacatataataatctaaaaacctagagaacgtagatttgactaaaaataatccgaatctcagggaccataattcacccattaccaatttttccagcagaatttcagcatcaactctcacccacaactatttttccaagcacaattcaaatagttatgcaaaatgtagagaccagacaaaattaacaaaaattaagcagagcctgtgttctctggtttgtcagtctccattggttcagcagatgctggtggcggggctggattagcattgtccccagcattttcattagtactggcattaggattctcctgaggtggttgttgctgctgctcaccaccctgaggaggtggggttgctggtgcttctggtgtagctggcttgggtggcaatggctttggtttcgtataattggcttacaaa

SEQ ID NO: 42514 - DNA, 531 bp, Glycine max
  Clone ID: jC-gmro02910048e11d1
aaaattgaattgatgggtaaaactaccccaattcgaagcttttccagtcaagatccaaatcatgcaacaacaaaaaaaaaagcagctttttttttccttctctttctctcctcttatcgaaagcttaatcacaaaactataatcacggacattatttataaaactcaagtgcgacaaactccaaatgagaaagaaaaaagccggttcctccatttctttatccaactctttatcctgagtttactcagcagcaaggggcacagactcagccaatttgcggggcttgagagcatagaacatctcgagatagcggcggctctcacggcggtcaaggttagacacatgcttccagaagccatagacaccggtgagagtgagaagcctctgagagtaaatttgccatgtgtacttctctttaatacgctggagaccagcctttgagatcttgtcccagtgagttgggtcaagcttgcacttctcaaagaagtcaacaaggagatcagccacacggtcaccatggttagggtcaat

SEQ ID NO: 42515 - DNA, 551 bp, Glycine max
  Clone ID: jC-gmro02910048e12d1
aatgccacgcaaaaggaaaatcaggtcatttaactcaaatgaaaacaagcatcgtaattccacttatagaaaatggtacacatataataatctaaaaacctagagaacgtagatttgactaaaaataatccgaatctcagggaccataattcacccattaccaatttttccagcagaatttcagcatcaactctcacccacaactatttttccaagcacaattcaaatagttatgcaaaatgtagagaccagacaaaattaacaaaaattaagcagagcctgtgttctctggtttgtcagtctccattggttcagcagatgctggtggcggggctggattagcattgtccccagcattttcattagtactggcattaggattctcctgaggtggttgttgctgctgctcaccaccctgaggaggtggggttgctggtgcttctggtgtagctggcttgggtggcagtggctttggtttcgtcataattggcttacaaaacctgtccacagcttcagctttctttcttacgtcagctgacaaaagtacaggg

SEQ ID NO: 42516 - DNA, 474 bp, Glycine max
  Clone ID: jC-gmro02910048f02d1
atcattaaattggcccattaatttagcacacttttttttgtacattcaaaaattaaatttaaaattttcatcttttaaggactaatttgtcaacccatcacactttcaaagacgaatttggctatttacccctaaagttatgaactaaaaaagctatgtgatctgctcttccttcaatcttaaacttgccacaggtcgctgctcattgccagtaacacccctgctgctggaactatgtttcacgtcgggtatggcaaacttttgtgcttttaactgggatgcactattgttggcaagtgtgtggctattagtcttaactgcaggcacatcatgattgggttttccttcgtatgttgttatgacagctttaggatccattgaagccctttcaacatgcttccgaactttgaaccttgggtcgggcatttgtaataactcctacatttaaaaaaaacatgaatacttttttttcaa

SEQ ID NO: 42517 - DNA, 565 bp, Glycine max
  unsure (1)..(565): unsure at all n locations
  Clone ID: jC-gmro02910048f03d1
attagatacagatacttctctgaattataaatacagcctttggcgacagctaattaattaacgttacgtaagatgagatagagcacaccatggaactgaaatggaatgacatgaaaccaaagcatcacatatccattaggactagtattctcactaacattaaaacatatatagagacgttaaaccacaccatatatgtatatatatatatatatatatatatatgataacacatatatatataatttctttcactctctggtctctggccagaacacatggatagatatcaagatgcataatcaggcagagaaattaaaaccacttcaaatttagtaacaccttagcaccttgggaagggagttccacaagtgttagcaactctccttgcattaggagagtcaacaaacttcttgagattggggttcttgagatattggcaaaggcatggtttctgttccttgatcttggagcagcatangtttgatggaggggttgaagaggttattgcactcacacatgcactcagctgcactgggctgcaggtcacttgctttgacacttg

SEQ ID NO: 42518 - DNA, 344 bp, Glycine max
  Clone ID: jC-gmro02910048f05d1
gggggaacggagtcaataacccttgatgattaaaaaaaaaaaaaaaaaaactggccttttttaaacaaaaacattattattttttacaatcatttcgtcaacttataaactacctcaccattttataatttttaccccataaaaaggcttgtataaaactttatttcctttgcaacagggggcattaggtgcattaaaacaactgatgaaagcctcatctcccttaacttaaactctttgtataaacttaaaagcttcaaaatgtacagtttttcaatacaacccacaacttttttttcaattggcttccacccattttgagagataggccaacataacctttt

SEQ ID NO: 42519 - DNA, 479 bp, Glycine max
  Clone ID: jC-gmro02910048f06d1
aaaaccctgattggggagtgtaaaataaaaaaaaaattcattaaaaagtatcattgatctactttattgggatttctaaggcatcctcgttacgtttttatatgcatttaccgatttaacccaaacaaacccatattttgaaatatctctctctatctgatttttgtaaacttccttaggtttcacataatttttcgactaatataaactttgaaacctggactatgaggaatttattactactatttcctgagagattaggactaaagttaatcatgcatcgaaaccgataactggattgattaaatgtcatttttgactgaactccaattatgattgaagaaggattctcttccctcttcacataacaactttaataaagttgtgatagacacaaaatatgcaatgtggaaccaaaataggaacttagtaacggtttgtttcactgggaattttgttagggccataccctcgaaccc

SEQ ID NO: 42520 - DNA, 399 bp, Glycine max
  Clone ID: jC-gmro02910048f07d1
gaacccactaagaaaggactgggataaattgatagttaactaaaggatccatgccctctatcttttcaattattaattgtaaaaaaaaaattcattttcccttaaaaaaactatttgccttaatcaactaaatactgaaaactttgaggcacaccacctactgcatttaataattaattcaacaagttaggattctccaaagactaaaattcacactgactaaaatttccggttgtaccacacacaggatttctcccattatttacataccagccacaattcccatttggtggatgttcatttaaaaaatggcctacccttttggaaagaacaattctctgttctttttcaatataacccttttcatggaaaacccttggaactggccttctattttaa

SEQ ID NO: 42521 - DNA, 455 bp, Glycine max
  Clone ID: jC-gmro02910048f09d1
aaaaccctgattagggaaggaaaataaaaaaaaaattcattaaaaagtatcattgatctactttattgggatttctaaggcatcctcgttacgtttttatatgcatttaccgatttagccgaaacaaacacatattttgaaatatctctctctatctgatttttgtaaacttccttaggtttcacataatttttcgactaatataaactttgaaacctggactatgaggaatttattactactatatcctgagagattaggactaaagttaatcatgcatcgaaaccgataactggattgattaaatgtcatttttgattgaaatccaaatttgatagaagaaggatactctttcgtcttcacataacaactttaataaagttttgatagacacaaaatatgccatgtggaaccaaaataggaatttagtaatggtttggtccactgggaatttt

SEQ ID NO: 42522 - DNA, 488 bp, Glycine max
  Clone ID: jC-gmro02910048g02d1
acagaagataaacttttttgacaggggcagaagcgtttgaaggttaacattggtgctcccttgaaaagcagaagaaagcaaaatatgtacctaaactatggttttaaatcattggttttcagatattctttataaaggccaacttagggtttcaaatagcatacaacttaaagatactgagttactgaccaccaatagcagcctcaattacaaccaagcacataagaacaatgatgtcttcagagacgggacaggtatagagcttcctttcatgtctttgggttctgatatgcatctacactaataagtaccacccctcaatgcaagcaccaagtgaagtacagaaccaccctcaatgttgtactctttagctgttttgtcatcagcaagctgcttaccggcatatatgaatttctgctgcacaggtggaattccctctttttctttacacgttcattgaaccaactgaaacaattgaccggatcaat

SEQ ID NO: 42523 - DNA, 542 bp, Glycine max
  unsure (1)..(542): unsure at all n locations
  Clone ID: jC-gmro02910048g03d1
gaagaaaatcaatcagagtttattaattatttgggcaaacaagagcatattcaagactgaaatgaatcatccaggatgttggtagggttgactattccaggtaacttcgttgccaattctgttacttattgatactaatggccttttgtggtttgtttcctatactaatacttggatttgaatactataaagcaccagcaggctaaattataagaatgattacatcacctttgaaccaacggtactataaggatacaatgatacacgaacaagcggctcagcaatgtaaggttaaacattgcactgtttttggataacatttcatgcaattccttatcttaaaaatgggttacatcatgataaataacgattcttataaaaactgggaaattgctaaagagaagcaccctgttcgaaagtggaccgtatccacgatagcaactttacacggattccaaactggcccaatcataattcctgaggacttgcaccacggcaacattctttatattagncatctatgttcttcatgtattcctttg

SEQ ID NO: 42524 - DNA, 396 bp, Glycine max
  Clone ID: jC-gmro02910048g04d1
agcttaaatataaaacggttatgaattagtaaaaatttcacttaaattacaaaggactagggaggctgacagggaaaaccaaggagccttccatgctttaaccatcaccacaataataatgaccaatctttttccaacgaaatgttcgtttcctaaaagtgcctaaaaatacctgttactttttggtgaacgaacatttgaaacttgctcaacagaaaaacaagcccagattaaatggcacgtgccaaacataataccaaaattcacagaattttattaataaataacccatatagccaaatatagaaccttaagcatactaatttactttaggaaacaagttatttgaagtgttgatttaagcgcagacgaattccttgggaacacccttttcac

SEQ ID NO: 42525 - DNA, 486 bp, Glycine max
  Clone ID: jC-gmro02910048g08d1
gttggatctaaaattagtaggatacaggggaaaagcaagggtaaaaacagacaattattttgcactatctaatgttgaaataaataaagaaatgcttatttgattgaaaatacattaatttgtaatgtataataataataataatgatatggggggtataggtacaaattttgctaacattttgtacacaaatactttcccgcagaaaaacggtgaaggtgattgattgctctaatcaccgttcaaaaagatcaccatcgaaatcaagcctcgaagtccaccatcaatttgttcaacttcttgttgttaattctctgttcgataaaactcttcccgtagtcatcactttgctgcaaggaggaagaggcaccaagcgtcaacttgcgggcgagctgaacggcgtcgtcgtgggtgttgataatgtgattgaagcacaaataacgaccgtaggatgagacatcctcgtagacgcagatgtgggcgtcg

SEQ ID NO: 42526 - DNA, 358 bp, Glycine max
  Clone ID: jC-gmro02910048g09d1
gtggacttaaaaaagcacactgcatttttatcaaagcatcattaaagcacactggattctaacagcacacgttcctaaaaaggggaagttccaggtcttgcccaacatacacaacacaccataatttattttatatacaatcttatggggcccaaaatgcaaatgcctggactaattaaacaacaaccttagtctgataggcagtgtccatagataaattgggtacccataaaatggcctttcttccaaggaaatggcaaacaggggtagttccaggatcaactcccatgagttcatgaagcatgtgatgattcattccacaagtatctgtatggcaaacagcaagtgcctgagtttt

SEQ ID NO: 42527 - DNA, 263 bp, Glycine max
  Clone ID: jC-gmro02910048g10d1
cagcagtactagttgttattagtgttaaatttcacggttcttcaacaggtatacaagatacagagagtacctgagagaggatattacatttttgctctctaccgacaagtattataacaatacaaaattagtaacacgagctgaaacttctctttgcagtgttctccctgttctataaatcactttctcttccagaaaacattgctaaattgggtaggtgtgtgcatactattggtttaatgtcttgtgatatgcaacagatg

SEQ ID NO: 42528 - DNA, 450 bp, Glycine max
  Clone ID: jC-gmro02910048g11d1
ggctaacatttgattgaaattgaaccgtaaacaacctgataaggaccttagaaatattacattcacaccacaaacaaatagtaattgaactttaatattagaagaactttcaagcagcgccaagctaagcgaagttgcgaacgacaataagggacaagggacaaatttttgagcaataaacaagatgctctgattttattgatcagcttaggtagagcagtttattgatgataacgcattttttggacttcagacaaacgcattcaaatatttgtcgacagtagtgtatttcacctcaggataaagggtagaagcttccaccccgaaagaagggtcaatctcatagtttgtacaatcaccctttacatgcattgagtggcctaatgccaacatcaaattagcagggaaaggagactcctggatgtacttaaaaaggtgatcttctggaat

SEQ ID NO: 42529 - DNA, 287 bp, Glycine max
  Clone ID: jC-gmro02910048g12d1
gggggcccaaaatgcgagatacctacccccttttccgaagggaaaacttccttatagggggcgcaaaatttaaacaccgggaccgcgtttaagcacctgttgaagggaaaaaccccgggggggcccgcccaaaataacggggaagcaatacccctttcgccagtggggcaaatatacaaaagggcccgagacggagccctttcaaaaaagagtccaccccaaaaggggaaagggcaccccccgggaatccctaaataaaccccggcagagttttgggaccctcggaa

SEQ ID NO: 42530 - DNA, 510 bp, Glycine max
  unsure (1)..(510): unsure at all n locations
  Clone ID: jC-gmro02910048h01d1
agatgatgagaatgttattataatgcaagtgactataataatgggggcgtagccaaaagaattaatgagaaagtgtgatatcccaagaagtctagaaaaaattagtccctgcacggccatggtgcaacaagtagtgcgctatctgatctctggcttgctcggcagcattagagcgaaggttattattctggggcagcatctgatcatcaaagatgtcaaagttccactgaggcttcatttcctcatccctcatctcacaaatattatgcaaaacacagcaggccccaagaagcacgggcaagtcctcaagcttgacttcagtcctcttctgcaagcaagaccacctncctttgagcctggcgaaagcgtccttagcaatgctctgaatctccccaaccttctgattaaacgcgtgctgcgtccaagtaagattctgatgagtgtaaggaaccaaaacacccttcatcagagggtgtcccgagttttccaccacccacaacgtccttaaat

SEQ ID NO: 42531 - DNA, 549 bp, Glycine max
  unsure (1)..(549): unsure at all n locations
  Clone ID: jC-gmro02910048h02d1
acagcagaaagcgaatgataagccaattatattgatacagggttgaccagatttcaacaagaaaactctaaatcaaactaaaagctctacaagagataaacaccccttaactaaacagttggatttagaagtacaaataaagaactcccttctttaaactattcacgttttggaaagacaaccaatttacggagggagcagggaaatattttttggaagcaagaaatatgtttatcaggaaatgaccagaccacctacaacagatgatcaaaatcatcagaacctacataaatgcaattatcagtccattctctaatcgtcatcctcttcctcgccactgccttcctcatcatcatcttcatcattcacctcagatacagacttctcagattcttcttcatccncaccagtaggaccttccgcctgtttcttgttataggctctcatgttcttctcgtactccactttccttttctcagactntgccacataaggtggcttttcagcatcagacatggtcttccattttgctccagcagctttgcccac

SEQ ID NO: 42532 - DNA, 454 bp, Glycine max
  Clone ID: jC-gmro02910048h04d1
aaattaaaaaaaatttaaattctctgataaattaggctccggagttaaaattctctatccaaatacactctaattgagatacaaaatcatttgttgatttcaattaacaagactttgaaaaattggaagtagaacggggaggatacctcctcattcacatcctaaacactttaaagtacctcgccattagattctttgattgtgttgcaaagataaccgatcactcttcaatagttttccataatttttctgaagagctcctttggtgctggtaatccggtgaaattctcatattgtccatatgcttgccccataaacatctccaatcctgttacaatagtggctcctgattcttctgcttctttcaagagtctagtaatcttgggcgtgtagacagcatcaaaaactagggagtaatatttctaagcgtgcttagaaacaggcgtctcatcaa

SEQ ID NO: 42533 - DNA, 439 bp, Glycine max
  Clone ID: jC-gmro02910048h05d1
gactcgatcttcgtcaaactgatgttgctaaacgcgaacgcggaaagcactttgaaaagcgccgaagttcctttgtcgtgtgcgaaaacaatgctcgtcttgaaaggacggtccgtgcgcgggatgataggctctctcgcgagcatcacaaaccgcgtgacgttgctcggatcgtcttggattccgtccgccatcacgttcaggccgtagagctccgccgcgcgtgcgctcgcgatggcggcggtgtcgcggagattgttgctggcgacgaactcggcagcgccggcggtgtcgtccacggcctcgcgcgccacgttcaggccgagtttggtgagagtgtgctcgcactgcgcgagtgcctgcggatgcgaaatcacgcgcgtgaggaactcctttcggacgccggggagagcgaagaggcagtgatggacccggagct

SEQ ID NO: 42534 - DNA, 519 bp, Glycine max
  Clone ID: jC-gmro02910048h06d1
gttaaggcttgtcattcattaatcaagccaggggacaattggaacaataacagccatttaatggcaagagatgaaatgaaaaggaagaaataaaaggcccattgaagcaacaactttctttctttctttcattgagactattcattagttatttggattgtatcaggtgtgggaagatcctttatttgcatttgtttgtacatccagtggcgattctccagcgtgacttggccgccaagagagcgaataacagacccaccactgcatgctcccactttgcagcactcttcaagagacagacctttgatcactccatacaaaaatccacttgcaaaaagatcccctgcccctgttgcatcaattgccttggcttcgcctatggccgggacccgtgcaatctcgtttccatgtttagcaatgcatccattaggacccagggttactacggcccattggcagtatttggcaagaaattctacagcagttgctggatcagcattttgttctccccttaaaagc

SEQ ID NO: 42535 - DNA, 577 bp, Glycine max
  Clone ID: jC-gmro02910048h07d1
atctgaatacaaagtacatggttaattggggcactggcatcacttggaatgtattacagttttatacaaagtagaataagagaaacagatactacaactgaatcaggttcttgaaacaataagtaacaagaaggaaccacccaataagaatggaagtgaagaagaaccaaaactttaggaaggtgaagcccccgaataagactccaagaaaaaatataaccacaaatggtaagatagaccgaagcatagatgttttgctgacccaacgtccattgaataaaacgaaaattgccagattcaccacattccatccgccagacagaaaacccaacctgttcaaattattggcaacatacgagtggcagttgcaggtaaagagattgtaagataaatgttggaattcttgagtgcttttccttagtgcatcatcccaaggcctcaaatctcctttagtttcatcctgaatgtagtgttcctcaccattgtacacagactggactaaagggacgcaacacttttctttgggaatttgaatatagcgggtggcagctccaaatgcaaaattgtccacacacac

SEQ ID NO: 42536 - DNA, 499 bp, Glycine max
  Clone ID: jC-gmro02910048h08d1
gaacatggaaacatctgtgattgtacatatatagttttaatgaacgtgataaattattatataaataaggtttgaaataattgttagacatgattttgtttgatgggattgttattgggataatgattacaaatattcatactattgacaaatagtatgatatataatttctatacaattaatatgattaatgatttaaggagaatgaattgattttgcttggaaatatgttaggagaaattaatttgttatatatcaggttgaagattctttatataagataagttttatttaaaatgttagcgaagtataattcatgtatttatcaacaataattgtttttaaaatttttacaaaattctttaaaatcttaaaaattcataatatttgttcaaatattataaattcattaaaatataaactacaaaatcctaatcataaaaatcttaaaaagttattatattgttataaaatcttttaaaattttcaagattttttt

SEQ ID NO: 42537 - DNA, 397 bp, Glycine max
  Clone ID: jC-gmro02910048h09d1
aaaccaaaccttccgggttaatttttttgaaccaaattttggggggaaaccaaaaaattttccccccggttcttttttatttaaaaccaaaaaaaacccccctccccctttttggttttaaaaaaaaaccggggaaaaccgggggggggtcctttttttcccaaaaaattgaaaaaattttcccccctcccttttcacaaacttttttttttttccctccccctcccccggtatttccccttaaggggggggggttctttttttttttttttaaaaaaaaacttccggaaaattttttttcccacccccaaaaaaaaaaaaaaacctcagggggggaggaaaacttttgatcaacccaccctttccggggggggggggttaaggccccaatcaaaaa

SEQ ID NO: 42538 - DNA, 236 bp, Glycine max
  Clone ID: jC-gmro02910048h10d1
ccccaatggaggtttgggaagggaatgttctataattaagtttcagttactcccgcagtccgtctctaaccaattcttctaagcctttcttcagtctttctgcggcagctctgcaatcattctccgtcaagcctccaaatgaaattctaagatggccgggacaaccacaagcttttcctgggataccggcacccccttgctggttggttggccgcgaaccacattaaaatcattgg

SEQ ID NO: 42539 - DNA, 273 bp, Glycine max
  Clone ID: jC-gmro02910048h11d1
atgaggttagaatacactgacgcgttccgtgtgagtaagattataatagcaaacaaagttacaacccattttattgataaatgagagaacacatgtctcagattatacaaaacaatgtatcccagtaggggtcacgaatgaatagattgaacccttcagactaaggaagctcaatagtagcaaatgattaaacaaggacaattggcaaacaagcaaaaaatagcaaatgggaaatcgaccgaatatagaatcagtatgttgtgaaagttgaca

SEQ ID NO: 42540 - DNA, 376 bp, Glycine max
  Clone ID: jC-gmro02910048h12d1
agcgcgaaggatatttattttcatagctgaaactgaagctttgggatttacatatataccttcatacaatgaaagggggtttttgttaaagaaattggagggggactatgtttgggcacatatttggtgtaccccttttaatttacctgttgtaatggggaaggggggtttattcataccttattagggggggggtgatgggtaaaaagaaaagagaaaccgaagcggggcattatatgaagatttttgatttgggagggaattttttgaagaaattaattgggcccggtgggattttgctcctaaaccgaggatgacgtctcattttgaggccaactagaattgcaaccacttggaagggggttatgttaatgaa

SEQ ID NO: 42541 - DNA, 552 bp, Glycine max
  unsure (1)..(552): unsure at all n locations
  Clone ID: jC-gmro02910049a07d1
atataaaagttgcttcactagttacacagttcttgctagcagggcagcacttgtcacctgtaatcttgtcacacacacacatccacaaagatagcaatgattaagcacttccaacagtgttttacaacattgaaatgaccaaaaaaaacataacaaaatccaaacgtatcctttattcatctaaattagctaatcaaccccataacaaaaccaccccaatggctccagcaacacagtgcctcattcccatgtcttgcacttcttgtcttttagcctcatacttgaaactgggagtggtggaatgctctgctcatgcctgaacacattatcaggatccaccttgggctttattttcaccaacctgttgaaattatccttgaaatacatattgccccaagcagttgcctgtatgtaacttgtgctgttcttcttgttcattcccaaatcaagaactctatagttgacatatgcctcccttgggaacttggacacatanagtgnnctgtaggtgtaaagcttcctaatccaaacttcatgctttgatgcattctt

SEQ ID NO: 42542 - DNA, 553 bp, Glycine max
  Clone ID: jC-gmro02910049a08d1
gcaaaactcttcttaataagtaattcaatctgtacaggatgggcgggtgacctacatacaatttaccatctcaacttcaccaccaacccacagtaaacacagggctggatacttctggaagacgtgggaagcaacaatacaactctatataaactaaatttaccaaattgcattcggagtttacgttactaaatagaaaggaaccacccctccaagaccacacaccagacagtaaaatctgtctgttgcaaccactcatcttaggtgagagtcatatgtgtcaaagagaaagtctggaatgaccaaaggcaacttatctatgtacatgaaaagccttctaagattctcccttgtcactgttgccatgtctactacattcctattggcagtgaacacccagagatcaccccaggttactcttttaagattgtcgcggcaaaaagggcatgaatgggaacttgccctccattcgtgataacatttcaggcacatggacatggttgcagtcgggcaacacaatcttactattcatctccatgcattattcacattc

SEQ ID NO: 42543 - DNA, 336 bp, Glycine max
  Clone ID: jC-gmro02910049a09d1
aacaaagctccatgctttggaaaatagggcgggttattcacaaggggatacacagttcattaagggggggcctccacaacataaattggttgttgcttccaacacaccttttttccctttcgggttataaattgaggaaaaaccttaatgaggaaaaaaaatttaaaatgagaaaagagtaaacctatatactttaattggcatcccctagcttattgaaatggaacatttatatatctcgtttgaaatcactgatgcatgtacatgcctatcccttgttgatctatatgccttaacgggccacaccctacaaacttgaacgcattttaacaaggg

SEQ ID NO: 42544 - DNA, 430 bp, Glycine max
  Clone ID: jC-gmro02910049a10d1
aacgaaaaatctcaagatatcttcattgaagagggaggtaaaagatcatgtctttaaattcaaatagacataattaactctaattgcagggtaggaacaaatggttctacgtaaaatttctccaccaacctgaccctgccacccaccccaattcactggcatgcgactgggttccaaaacaaatcaaaattgatctaacaattttttaacattacaaccagttcttccaatcacaaccaccatatcaatatcacagaactcgtaaaactacgcaagaaaatgccatggcaccccaagcatccaaagaaggaccctcatattttacattctgtcttctctcctccttggagcacaagtgatgatttcatcaactctaaggatcatctcagctgcctctgttgaagatagcaatacagcttgcttgactttg

SEQ ID NO: 42545 - DNA, 399 bp, Glycine max
  unsure (1)..(399): unsure at all n locations
  Clone ID: jC-gmro02910049b08d1
gatctaatggaattcaatgattactgaatattgtctcgttggccgagactgagaatacctgaatggcgcatcctgtgatgcagattgagtctatacaaagaaatagacatgttaaataactgtctgactaggagtaaacacagggaaacttgaaaagggtacattaaacagctgaaggaatgaaacattatttatgttcataacataaaacacgtatccttgggtctatgatctatgtagtagaaccgcgatgctgttcataacangancagagtgcatgaataccttccttgttgaagtctctagaagttgttctgaaacccgaatttttaagcttagcataagtctcatgaaaggcacattcatagaaatcttgcccttgcaacttgagggtcttgg

SEQ ID NO: 42546 - DNA, 390 bp, Glycine max
  Clone ID: jC-gmro02910049b10d1
ataacaacacaatatagacttgaaattcaaaagcgggaggtgcatcataggactagtcctatgcagcttattgctcttacagagacacattgttatataaacaaagcataacaatgaaaaagaaatagccttgccaccgtcgatcaagaacccagttctgggaacaaaagttgcgagacgacggagcaaacctgacacaaaatctgataaacaagttccctacacgaaaaaatgaagtactaccaacaagaaaccatttattgtagtcataataatacaggctccttgataaaccatccagcacaattgatttggccttcttctgtgcagccttggtctccttaactccaattgggggctttttctcgacccttttgatgactcccacag

SEQ ID NO: 42547 - DNA, 309 bp, Glycine max
  Clone ID: jC-gmro02910049b11d1
acccccactttaccaaaaaaaatttaaaaaaaagaatttcccattaaaaaaaaaattccccgacccaattaatccccaaaactttggcattggttggaaaaaaaaaacacccccccccccaccttaagcctccttctttaaaaaaaccaaaactttaaaaaaaccaatttctaaaaaaaccttctttaccacaaaaaaaaaaggggggaaggggttatcctttaacaactgggggtttccattttacacctattcgttggcttcacaaacccaaaatcctcccacacctttttgttagccttggattgg

SEQ ID NO: 42548 - DNA, 402 bp, Glycine max
  Clone ID: jC-gmro02910049b12d1
ggcaagtcacaagattaacattattccgaaaagttcaagagcggaaatccgcaaaacattgtgtggagaaaaattccaattactgcaacttagcaacacaaaacacagaccccaagattattacaccatacaaagttatgttcacttggacaactcctgcgagaaagtgctagccagagattgaatggttgaggaagaaaccgcacttgagccaccaaggtaccatttcttgatggcctctaccacattggcattctctatcacatacttggagtcttctttcccctgcaaagataccacaatctcagcagtggcagaatttgctgggaaatggtatgtgatcactgaaagtttcttgaaggacttggactggaaaaattgaataactttttccaaagcttc

SEQ ID NO: 42549 - DNA, 357 bp, Glycine max
  Clone ID: jC-gmro02910049c05d1
ctaaaaatcattatatcttagaattcattgtttaagtttgaggggggtaaaaatttataccattacatacaaaattctcaaattgtttaaagcacaaccatgaaaacatggccaaaatatccaacgctgtgacgttaatactcttcaatagatcatcatcggttgcaccaacataactcactctggctttcctcctttaccttttgatttctttatacaattataacgaaatttttatgagggggggatttttttgacgggatctggggtcaaaagcaaacctacccattcaactttaataatcatgaaatattctcatcactataattttgcttcatttttcatgatacagcaaat

SEQ ID NO: 42550 - DNA, 338 bp, Glycine max
  Clone ID: jC-gmro02910049c08d1
aaaaacaatatagcattaaacttcaattgaatgttacatgcgcaagggatcaatgttcaaatattcctaatttacccactccctggcatcgacaattattgattccagattacaaaaaaaataccattatctatccagcaacctgtgttttcatccccaaaattggaacaaaatagagacacaaggaattactccaatgacccttctgtaactttggtttctaccccaaaatataaagaaacaaaatcaaaagatagatcaaacttaggaataggacttcattgtgatacaacatttgctcctcaaggaaggaaaaattgacaggaatgtggacctaa

SEQ ID NO: 42551 - DNA, 428 bp, Glycine max
  Clone ID: jC-gmro02910049c09d1
aagtaaatagttcagttttctattattttatttcttaggggggcaagagttgcaatttaacaagattctacgccacagagacgcacgtgaacaatagaatagatgtagaagcagttgaaatgaggtgaaagttgaagggacaaagaacaaggcaaatactgctattcaccaatattcctaattttgtacaaatggtattttcttttaaaatcaaatacatagaaaaagaatggaagttttaacaacgacttaacgataaggagcaaatcatgacgaacaatcttcatatgaaagcaatatgtgaaaagctagttttacatgccactgagacacatgtaaacgtctgagaccacaaatacttcgagtgtttctaagtcgagcagcaaccagccttctggttcactggctgtcctcgaatttgaactgtt

SEQ ID NO: 42552 - DNA, 359 bp, Glycine max
  Clone ID: jC-gmro02910049c10d1
caaaaagggaggtcttttatttaaaaattgcttcttagggaccatagcgaaaaaattgaataacctttaaagcaaacctggacagggtttttccacattttattggcaacccctaacatagggaagcttctattttctccccccctttaaacagttttccttgttttaataaaaagcttattatttccctaaacgtgcatataaaacctctcctgaccaaatgatcaaaaaatttccgtgtatacccacttttgcaaaggcttagttggggccaattgaaagggaactgggaagttagattcccctgccacatcaccttgtttggttaagtgccaacaactctggaatttctaatccct

SEQ ID NO: 42553 - DNA, 390 bp, Glycine max
  Clone ID: jC-gmro02910049d04d1
aactcgcaaaagccttgaattgaaatcattcacctttgtcgggaagttaatcctgacttattctcattgaaaacatgttacattgggaaaacgagacaactcaaaaggttacatctctcctattattctttgatgtgggagagacaaacactgtaaccaaaacaatgcaccagttattagccgagaagcagcaatgttgcatttgcagcaagaagaacacagccctacaaataactccactgtggacttggtccaccttgctggataaaagctctctaggactaggaacgaagacttttctgcttcaatctgttgatctagtaggcctacaaaaaaatgaaactagtgttacactgatttaccttgacattaaaccacattttcaggact

SEQ ID NO: 42554 - DNA, 417 bp, Glycine max
  unsure (1)..(417): unsure at all n locations
  Clone ID: jC-gmro02910049d06d1
gaagagagccacaaatattatattataataattcatgggggggaacaatgtatcatcaaccatataacagaatttctacgaattcatactaacaattacggattaccaaaacaaaactggggagccaacactacaggaaagtttagaaaataaatattaaatttttaagtttctgcaagacttgccaccctactcgtcatcagcaaattcggnctttttccctgtgccttccgcagcaaggttgggtctatttccacgaccccttccagcgccacctgttacaacaaatcgaccaccaccaccacttccatcaaatggagcaccaccagcactttcaccaaatcgaccgccaccaccttttacaccaaattgaccaccatcaccaccaccagttttaccaccaaattgaccgccacc

SEQ ID NO: 42555 - DNA, 352 bp, Glycine max
  Clone ID: jC-gmro02910049d09d1
gttatgaaacatatgatgagtattgaatagagtaccagagtgggtaaacattcaagtgcattttcacctataacaagattgcaagaatatagacacatttgaactaacaatttcagttgatacctagattcggatcctagtctatgacagactcgcacaatgtttataatatagtgggcttgtgaagggtaaaaaaacaagagcaatgagttgtttgctcactgacaaatgaaccagttactgtgaaacagttaaagaaggtactgtatatttggtcatctaaccatgacttcttggatcagcaacttgatgcaccttgcttgccttaacacttgaatattgacctacaaca

SEQ ID NO: 42556 - DNA, 259 bp, Glycine max
  Clone ID: jC-gmro02910049d11d1
atataaaagtagtttcactagttacacggttcttgctagttgggcagcgcttgtaacctgtaatgttggcacacacacacatggacggagatagcaatgattaatcacttccaacaggggctgacagcattgaagtgaccattctgaacctaacagaatccaaacgtatcctttattcatgtaaattaggttatcaaccccataacaaaaccaccccaatgggtccagcaaaacagtgcctcatttccatgacttgcac

SEQ ID NO: 42557 - DNA, 383 bp, Glycine max
  Clone ID: jC-gmro02910049e04a1
gggagaacgaaaaaattgggggtcagttttatgcatatgcatatacaaatttacatacatgcctttatttgcccaaggctaaatagaagtaaggaccaagtggggattgacggggactagttgcatgtaaaaagaattctatcgagcacgtctctggggttataaggaaaccaaggtgccactatgatttcgagcgtgcaacaaaccacggatattgctgtttgaagcttcattctcaaaaccaataagcttttaaaatggacattggacactggacaataataagagcttgagacttttttgaattctgaagggtttgaccaaaaagagaagcggaccacgggcgaagtgatttccttacaatgccttgccttgaaccagtt

SEQ ID NO: 42558 - DNA, 288 bp, Glycine max
  unsure (1)..(288): unsure at all n locations
  Clone ID: jC-gmro02910049e08d1
aagttagtattttttttcatttccatttataaaaggaaagtaaacattgggtctcacccgttacaactctacatttaaaaataaaggtttattaaagttacactggattatagacgtaaagaaactacaaatttttacactaaaaacagnnnntcttttatacatactctctgttgtcatttgtcaacactacaaaaaatgaaaaagtaaggtagaatctttaatcattcacaaatatggagcaggctgcaaagggcattctgctttctaagataatacatatgaaag

SEQ ID NO: 42559 - DNA, 491 bp, Glycine max
  Clone ID: jC-gmro02910049e09d1
atatatgaataaaaaatatacctctagttttctgatggaaggggtctatacaaatgatacaccttaaaaaaacatgaaaaacagaaaattaccaacagagaaagaaacaacaaatatttgaatccacaagaataggctaaagattaaagctatagcactaataaataggaagcctaacaaagactttcatctccatcagaatcatctacaacccttccacaccacttaatagaggatattgctgatatgaaccttgccatggaaactttaagttacctccattggaccttggtgaactctgccttataaatgcaatggactcacttgaaataggtggagttttgcaacatattgttaaatggcttcacataaaatttgaaacacgcttggatcacaacgtacataggccttgcattttagtagatttaagaattcaacaataatggagcttggcataggataccttggtcctaaaattttcttggcacttt

SEQ ID NO: 42560 - DNA, 435 bp, Glycine max
  Clone ID: jC-gmro02910049f05d1
ctgtggattaattgttgagttttcccattcattggggtggttttacggtgtttttttttgattttaatcaaaccacgtgggcttaattgtttggttataacaaatgaacagactttaatttttcgaaacttagtaaaccaaaattcgcggaccaagaaatggcctgctacagaaaaccaaattcgtggctaggaggataggcatattctaacgtcaaattctttcttaaacaggtacgtccagggtctgcttggcctagtaaaaaaaattgtggaaaagataaccatcctggggggccccttagtttagggccggccccactaaactaatgggagtttcaagctccgcctttgtcttccgggacaaaacaccctcgggttttggaggaaattcaatttaattcccccccaccgaaaaaaatttttccaaacatta

SEQ ID NO: 42561 - DNA, 480 bp, Glycine max
  Clone ID: jC-gmro02910049f08d1
gtattgaaattaccgtaatattattatattctagtaccggaaggaacaatacttttaaatgtgtaccatgatcgctcctggtccaggatatccaatcttcaatatttgattaacatgattgtattatattttagaattttggttagtttcgctaagttgctgtcgcaaaacccttctcataaccttgttggatgccgtccttggaagagatggcagtgtgactacttgagaaaccctgaacagtggatttagtttcttttggagagctgaattaaaagatatcctcaattggtgtaaatcttgctttgtgctatttgaatccttgaatacaacagctatagtcaacaactcaggcccaccaccagaaggtggtacccctattgcagctgtttccagaatgctgctatctactccattgcatgtgcgttcaatctcaactgaactcaccttgattccccaaggttcatcgtattattcgac

SEQ ID NO: 42562 - DNA, 358 bp, Glycine max
  Clone ID: jC-gmro02910049f10d1
aggggggggagaccttaattaataaaaattataactcatcagtagcaaaaacagttcaaaacaaaaattccatgccactttgcgaaggactacccagattatttgccctaaacgatgtcctggggcccaaaacattaccttaaagggtccccgccacccattaaagcttcttaagccctataaaaatttggaaaacactaaaattaagcagcaccctttcccttttttttaggggggttttttatgtaaaactccaacttcttaccttccaaaatgtatccataaactctgccccattgaccagggcttgaggaaatgcccgccagcaaacccccaccaccaaactgcttcctaatgg

SEQ ID NO: 42563 - DNA, 259 bp, Glycine max
  Clone ID: jC-gmro02910049f11d1
cggccttacgggggggaatctttaagtcccacttggctgaaccgtgggctctggagggcctcttggagcacctaatgatcgggccctgaaatcttcattttctccaagctggaatcaaagataataaggctgataggcctaactgtatcctccatttttttattcgtgggaaccccacattatcccccggtttgcgacaggacccaaagtttgcgatttcatgaatacccaagcctgggaaagcctggtggttctcttg

SEQ ID NO: 42564 - DNA, 464 bp, Glycine max
  Clone ID: jC-gmro02910049g04d1
aattggaatttagtttcattgcagatttctgggtactcaaacactttaatcatgtgaatttttctacctaactctaatgcatacacctttgtcattcaaaggaaattttttgataacttgctccttacttattaactagcagtttcagaaaaaaaatcctaggatatgacaaaatgctactacataatggaactgatggccatagatggttttcaaacaagttcaccaatgaaacacccactagttcttccaacattcattaattcattttctcaagctcaacctactcaaatgcaaagcaagtgcatctctcaccctaacagcactctcatcctccactccatcaaacgaaggaagcccctcttccttttccaccccttcatccggcattgcctcattgaacttgagaacaaaattatgcaataagcaaccagcaacaagcacaaggggcaaatgctcaacac

SEQ ID NO: 42565 - DNA, 410 bp, Glycine max
  Clone ID: jC-gmro02910049g06d1
gggaaaaaaactgaattggttttgtaaagttttttttgttaaataccttaaagaatcaatttattttaacaaaaatccttgactcaaagaaaatttattcctgtttttaatgtttggggccctcattttgctacccaatgaaccacccttttggcccatacgtttacgaaaccttggtttcaactcaatcacttgcttctgaaacctactttcccatttttaatgttcacttctaacactcacacttttccacctttgatgatcacttctaacccttatcattttggttttcaaacccaaatcactatcatactggtctctaagccttggattggacaagggctcttaagccgtatttagctgaacaaacatccttgttgactcccccttcatggaaggatcctggcccc

SEQ ID NO: 42566 - DNA, 525 bp, Glycine max
  Clone ID: jC-gmro02910049g07d1
atagcacaagctaattttaactaatttcattatatttccttagactgacctacaagtgacaaaaatgatcgtgttatagagaaatttctgaaatagaattaatgagcacaagaatgcggccccaaatactgcacatccttggaaattcttcagaaactgttattttgcctatcaaatgaccctaatcctatagaatttactagtttcacaaaatttactagtcagattctggaagtaaaatgtcaatccctcttcattgctttgttgaaaaaagctcttgcggttgctattgcaaggtatgcaaagacggtcagagtgatgcccccaaacagaacaagacgatcataagcagcattttgtactgtgtagacccgcatacctattgtattccagttgctctctgtccagacagggtccacaacccccattttgtcagaggaattagggggcaaaacattccacacttctgattcaaattttagccgtgttgaatatgcttgcacatacctcgttgaaagagaacac

SEQ ID NO: 42567 - DNA, 456 bp, Glycine max
  Clone ID: jC-gmro02910049g09d1
gcactgaagcaagctttactatataacacagaatctagtgggcgccaacaattaatgatggaagttttctagtgttacgttctttgatcatacagatcagattctgatccgcaattacacagtgtcagccaaaaaaggcttgatttgtattgagaaagctattttctaatggggtagagaaaatatgtagattcgacttggttaacgacaagtatctgaatttggtaatttgcagtgttaacttttttataactgttggttcatctcccaactttgctttggtgccacgccacagtgcttcgggacatattcctcaagcttgcacatgagatcttgggcagtttgggcagagacaataatgtgacgggcagcgggtgtaatgaaaccttcgtctacagcattgtccatgaatgacagcaacgagttgtagtacccatccacgttaaacaaccccac

SEQ ID NO: 42568 - DNA, 562 bp, Glycine max
  Clone ID: jC-gmro02910049h07d1
aaaataaaaatgacgtgagtttcattcctgatatattgccaagatacaaggcctagatcatgtgatacacaactgtaaaaatacataaattaattgcaatccaaggatagatgatgactgactaaatcggatgccagagggtcgcagaaaaagcccagaactgcatttgttatatccacaaatttgttttcaacaggcccattgggatgtcagtctacttaagcagatgaaaatggttggactaaaacaacaaacaagtggatgaaaattagaatgtaaattcaggtgttggttgaagacacaactaacttcacctccaacccaggcttgcattttggattttagtatcttcatcccaaagtaaatcttcattcaccaatgaagaacgcaggtcactcgtggttcctcccagtagtagtagggcatcaacagagtcatagatggtgaaaatataccaaccaagaataaatcatacaggctttgtgttatatataaggtgagtggagtacatatctctacaaaagaatagcaatccaccacatcagtaatgccatttttttca

SEQ ID NO: 42569 - DNA, 332 bp, Glycine max
  Clone ID: jC-gmro02910049h09d1
aattacaatattacgagataaatctattatgagaacttgagacaacacaaatacattgcaaatacatcaaaatgatggaaggaaaacaacatataactacatagacagagattataatttctactatacatatttgactgtgaaaataaccatagagaccctgctaagatatccaaaaagcagcggaaagaagattaagtgatgaactcagtgtttacatcttagatcgatcttcccatcactgctcagatttggaaaatatccgtttgaaatctctcatcatacaaactccaatgaccatacctttcagtgtggaagacagacctggggat

SEQ ID NO: 42570 - DNA, 428 bp, Glycine max
  Clone ID: jC-gmro02910050a07d1
aaaaaaaagtttttttttaaataaatgaaaagggccgggacgggtcgggctcaattgtttcccaaaaaacctggggggggcacatacaccccccaccaattttaaaaccaaaaactgggaacattatttttattaaacccctttccaaaaaattcctcccagcttttttttaaaaggggttttttttcccccttttgggggtcccctcaaagggtttttttttcccccctccacatccccaaaatctttcagaatcggtttccatgcttcccataaccctccacccctttggtttttgccccccaagaaaaattttaagccgggggggacataactttttttccccaggtccggggacctttaatcttagtcaccaaaagggaagtccccaccctcccccccttaacccacccccaaaaccccccccc

SEQ ID NO: 42571 - DNA, 522 bp, Glycine max
  Clone ID: jC-gmro02910050a09d1
cacataagcgaagtaacttgaaactcaaaaaacaccacaactcagactacctgactaaagcaaaagggaataaacaaacaaaaacaaaaatcagcaaatgactatcattggtttaacagctcttggaagaatctccaagtgttggggtcgatccattcccttctaccagcccttctgcattcattcttccctctgctgcatttgcagtagcagcttcattcatcaaggttgcatcaagagactttggaaatgtaactgtcccaaatgtgaaatcactgggcttgctgacctgttttggtaactgctgttccttggactttttctcctgagtcgccttttcacgagcctcatagaacccaaaatcatccaagatgcatgtttggcttgaatgctccttgaaaattttggcaatttgaacacccttctcaaacttaacctcctgagtatccctgctatttgttacaggtttgttttcattgttttcaagcgttatgtgcctcaacacgctatttggaatatcct

SEQ ID NO: 42572 - DNA, 439 bp, Glycine max
  Clone ID: jC-gmro02910050a11d1
cgagacataaccatagacaatattaagttaatcgcaagagggcaattcgtaaacagtcattaaaaagtatcatcaagtacctaagcactttctcattgaatctgaagctgaaactaagcacttgcttcgcatgtctgcatatttctttacaacaagctcctataacaattaaaacagatgcctagattgtactggtttggaaagcatatgatttgccggatgttgcaaagagaaccataaggaagagttaaatgagacacgggcagatttttactttcatgaaagcttcaacttcagctttatggcttgtgaactttgaacccaaaaactcttggaacatagccttgtgctggtttctgtggcttcagttgtccataagtcatcaagaagaggtgtggaaatgtagttccaaagtaagccccatcaatgttgccttgat

SEQ ID NO: 42573 - DNA, 493 bp, Glycine max
  Clone ID: jC-gmro02910050b06d1
attgagcaacattaatcaagattgaaaatatattgaggggtgttcggcagacaaaaaaatatatagagctttagtgaccttggtatcattaacattcccaaaataagatgcaagtaaatcctatcaaccacgttatttggtacctaaagagcatagcatctcctccagctactggcatagatggaatagaagagtaaaccattcagattttgacaaaaggaccttcatcctaatttatagacggattaacttcggtcttcattatatttgctgttcttgttcttggacaagcaccaaagcgggttctgcatgaattatctaaactccttaaactgtataatgttgttggattgtatcaatgtcaagtcccttcagcttcaccactgactcaacatgtcctttcagagtatgaagctccctgagccttgcaacctcggcacgtctcttagcttgctcagcaatctctgacagctccctgtaactggtcttgtca

SEQ ID NO: 42574 - DNA, 434 bp, Glycine max
  unsure (1)..(434): unsure at all n locations
  Clone ID: jC-gmro02910050b07d1
aagggtggcaaagttatctgtttatcagcgatctatttacggaaaatgggatccattcatcaattggtaaaaacagtcagtattatattgctataaattgcaacccttgctcgaatattttcttatacatacttctatttgtgtcgatattagacacttttgattatctagagaatgatagattccctcttgttcattttgaaatggaagtgcactcagaatgatgggaaaaatctgttgaggttcaaaggaagtgaatagaagtcttcagctctagtatcctggttgaaggtcctgaatttttcccaccagtgtcttccactgtctcggcgagttgagccctctccacnactnatagtttaatccaagaaggaagctactatgattgccactgttgctggggatgagaaaatcacttgcactatatttgtgaa

SEQ ID NO: 42575 - DNA, 513 bp, Glycine max
  Clone ID: jC-gmro02910050b08d1
gcaatataatgtcaacttttagaattgataaaacagcacaaagggagacagtgaaatgatcattcaattatttgaacacaaacaagtgtttatttcaggagaagcctactaagttcaggttctaaatcataatatgcagatcaagatgtctacctgattgctatgccactccaacaaacatcactcaagtgaaaactcaaacaacatggtatgttgatacttctcgcccggacgaaccacaacagaaggaaaatttggctggtttatggcattagggaatccctgtgtctcgagacataacccagcatgctttccatatatagcacctccttttccttgaacaccattcacatagtttgcagtgtaaaattgcacaccaggggcatttgtccacaagttaagtactcttgaacttgatggatccctcacttttgcagcatgtctcaaaccctctttctcttccccacaatcaagcacataattgtgatcatatcccagtccaacctgactaat

SEQ ID NO: 42576 - DNA, 379 bp, Glycine max
  Clone ID: jC-gmro02910050b09d1
agcatgaaaaacgacttattgatgcaaggcgtaaaacttgtactggatatgggctaaactgggacaacggcatacaaattcagttcaacttccacactataagaaaactggataaaaccgagaattatgaatggtgaaaggatcacggagaaacctgcaacgacaaggctatggatcataggatctcgagctacaaataggcctctactgacatctaccataatagagttctcttcgataataagaacaacttccacgactgccttatgccttcctgcatggacataaacagatggctatattactcataacgacaggactgtatccgacgcttgatacattcacaacgatgtatctttcataatctcgaacattactg

SEQ ID NO: 42577 - DNA, 422 bp, Glycine max
  Clone ID: jC-gmro02910050b10d1
caacgaattaaataaatgtttcaatatataattaattgccaaggtgtaaaaaacttacgacatacaaaactgcacattattctcattctcatggtaactaaaaaattatagggcaaaaaagagagatttaaaagaataaggatttttttttcccctagacatattaatcccatggactcaatgaacactcctctggggtagttggataacgcgcagaatcctggcagcagtcatagataacaaggttcctctgaacccaagcataatcctttttctgatcatcagaaaggcgccaagcatcatactgatcccaccaatctttggttgtggttgagacacaggcagggtatgggtcttcccactggcaaccatccacactgaagtccttgtaggatgacacaaatggggctaatttccagtta

SEQ ID NO: 42578 - DNA, 415 bp, Glycine max
  Clone ID: jC-gmro02910050b11d1
gggcatggaaaaaaggtggcaaagcaactaccatcattcaataagtaaatgttttacacaaatcaactcatgaacaatgtacataactaattcagccaaacgtcgttttttgccactggcacagatccgaccaatcatatgcttgtcttgaactactgcagcattttgcaataaatctattagcagagaatcacaatgcaattctttttttcttcttcctttttttggtttggagatctgtacaaatactgagctgtcaggagaatatgggcttcattcacaaaggttcttggcttctgaaattctatgattcggtcttgcttattagcgggggtgggactgaaactaccccaatgaggaacaatgttgcaattgagttgaaatcataaagatcacccacagattgtgacttttc

SEQ ID NO: 42579 - DNA, 398 bp, Glycine max
  Clone ID: jC-gmro02910050b12d1
gggatattagggggctattattaatgggacacaattgagttcaacacaaaccgaacttattttcaagggacattattacagacccattaaacatcaaagttcttcaaatgttttgggaacacatccaacattacacaacgagcttaaaaccccccacggagacggaggacaaggggaagggttgattccttctggatgttggaatcagggagggtcctttcatcctcgagctgcttgccagcaaaaatcaacctttgctggtccggggggaagcctttcttgtcctgaatcttggccttcacattgtcaatggtgtcagagctctccacctcgagggtaatagtcttacccgtaagagtctttacgaaaatttgcataccaccacgaaaacccaacac

SEQ ID NO: 42580 - DNA, 485 bp, Glycine max
  unsure (1)..(485): unsure at all n locations
  Clone ID: jC-gmro02910050c06d1
atgctcactaaagaacatctggcaacaatataatgcaacgtaaggcaattgcacactgaaaggtgtacataaatacatgctatcacataactgacattttgactgaccacaacaagtattgcataaataaataaaaacaaacttgtctcaaccaggcaaatcttattcctatcacaagtcacaacccaagccaatctcaaaactgtaaaaccatattcaccgtcttcaactcttcatggatggactaggtacaaagccctaaccgcttcacattatatgcacagaacaacaaatggccatatatatcaatagagaagagagtgatttcccttatttgagattctcgaaaatacatatccgngtgtttatgttcgcatcctttcttccattcagctatggaactggttttgtattcgcatcccgtcttccgttgagcttatgtttatccctaatcacattagaagtgctaacagggtgtttgacta

SEQ ID NO: 42581 - DNA, 529 bp, Glycine max
  unsure (1)..(529): unsure at all n locations
  Clone ID: jC-gmro02910050c07d1
agacaacttgtatatacagggatacttgatagtttagttgggcatgaggcacaatatagacaacagaatatacagtattacttgactgcctgaaactgaaagtataaatcgatagagtaagtccttgaactaggccttcaaagattttgggcaacaaatcaatcccacagagatacaaatcaaatactaaattattttgagttaccacttctttagtcctctatgtgaacaaatgtggtaacattttagatatatgtgggactaatttgataacaaaaatcttaaaaacattaatgaggtgatgccataatctttggaagatcaattttgcagtttattctaaaacaaaatcacaaaacacactgcacagaaatacaggtatacaaccacaggcgctatagcttcaaacatactcccatacaaaccaaatacaagatctacgnggagtagaggctactgatgagaagcctgaagaagttcgtctcgaatttgactagctacatcacgaacagcaccaggtacatgtgga

SEQ ID NO: 42582 - DNA, 511 bp, Glycine max
  Clone ID: jC-gmro02910050c08d1
agacaacttgtatatacagggatacttgatagtttaggtgtgcatgagccacaatatagacaacagaatatacagtattacttgactgcctgaaactgaaagtataaatcgatagagtaagtccttgaactggtcctccaaagattttggtcaacaaatcaatcccacagagatacaaatcaaatactaaattattttgtgttaccacttctttagtcctctatgtgaacaaatgtggtaacattttagatatttgtgggactaatttgataacaaaaatcttaaaaacattaatgaggtgatgccataatctttggaagatcaattttgcagtttattctaaaacaaaatcacaaaacacactgcacagaaatacaggtttacaaccacaggcgctatagcttcaaacatactcccatacaaaccaaatacaagatctaggtggagtagaggctactgatgagaagcctgaagaagtccgtctcgaaattgactagctacattacgaaca

SEQ ID NO: 42583 - DNA, 423 bp, Glycine max
  Clone ID: jC-gmro02910050c11d1
agaacaaaagattttgttgggtgcatgggcagttgttcagaaaatcaacaatataagtgcactttattctaagtacacctccttattttaaaaagccaaaataagaaataaaatgatgaatcactgtcattgattcgacaattatttatcggcaccaggacaataatacataaacattgaatcttggtcatgtatacaatgaaacccgaatatgaaaattttaaaaaaaaaatagaaaataataaatttagctcctgcacctggtgatggcactgcagccacggctgtaagggttggcctgggcgccaggctggcaattgtagtaggaggctccccggcgagagcaggggacagagtttctctgcagcgcaccgtagctgatgtacttggtcgtggctaaaatgcgccggctgatctcgctgt

SEQ ID NO: 42584 - DNA, 522 bp, Glycine max
  Clone ID: jC-gmro02910050d09d1
ctcggaatagtaacacgcatactaaggaattcgtaatttaagacagcggaataaagtgtatataatgcatccatctcaacactgcaaagctatgtaaatgcgtcactactacaataaaattaaaacagacaattcagaaagatccaaatttgacaacctatactatatcaactctgaggagacgttttagcagcctgttgaacaggctgtgcaggtgctccatcataggctccacgagtagtcccacctacattaccatcgctggaatatactggaggctgagcgtaaccagcagcaccataagaactgttgctgtacgatggaggagcctggccataaccaggttgaccacctgctggggcaccaccatatgacgggggaccataccctggctgcactgcaccaccataaccagatggtggagctttttgagaacctgattctggttgggcatatcctcccgaaggtggaggctgggaaggaggatatccagattgcaaatgaccagattgaccatatccc

SEQ ID NO: 42585 - DNA, 509 bp, Glycine max
  Clone ID: jC-gmro02910050d10d1
aactacaacaccatataaccggctcttatttcattaaaattcagtcaccatatccatatgccacagtacacagaggcaacaccatcacataccataaagtgaatccatcaccaaatcataacaatttcatatataatctcaaacaaaaacaaaaacaaaaaaaaaaggcatcagcaacacaaaccaaaaccaaaaccctaactttttttttctcttccttcaaatcttatcaatatcctcatcctcgaactcgatataatcatttccggccccatcctcctcctcatcaaggccagcgccgatgccctcgttgagcctggtgctgtcaggaagctcgccgtaggccttgaggagcctggcctcgtcgggcatgtacttgaggatgacgtcggccttgtcgtcctggtagtcgcggaggccgacgaggatgatgtcgccggcggcgatccagaccttcttgtgcatcttgccgcggatgtggcagaggcgcttggtgccgtcgatgcaca

SEQ ID NO: 42586 - DNA, 516 bp, Glycine max
  Clone ID: jC-gmro02910050e06d1
atacaaaaataataagaataataattatgctgtgttcacaaggaaaattgcatctttaattgagccaagagaaaagaataataatatacatgcctagctattttgatcaagcaattaaatattgaagacagcctagcagttgcgcaatcagagatgaaatgaaatatggagcagcagaaagagagaatgagggttactgcagcttttcccccttacccaccaaagtaacacaaattagaaggatataaagatatgtagattgattggacagacacaagcaaaactctccccaggggccagaataagtctaaacatagcaaggagactgatgcaactccaaccgttaaccatttcaaaatcttaggtgctttctgctggaacctggttcacaacaccaatgttgttcataggtttgggcctccactcagtcctgcccctcacaatctcagcaccattttcgagtcgaagcaaatgcttgcactcaacatgttcactgtgagctagattgcccatgtc

SEQ ID NO: 42587 - DNA, 528 bp, Glycine max
  Clone ID: jC-gmro02910050e07d1
acccgaacaaagtattttacagtacattcctcactcaaggtaaaatggccatccaaacagtgtagattaaattaaagacctgattttaaacaaactacatatcatagttgtacagagtgacatttatgcacaaacctaagtaggtgacttgactgacataacgttggttaacctccaagaaggaaaaacgtaatgcttccatgtgaagataaagaaactaagaccacaatatatctaagacaattaaccacatttctcgtctgtttcacatctacaatgtcttcaataaaaggatgaatctcaaccggaatttgggcaaaactctcatgggctgatttctaagatgaagggtgagctaacatgctatcatggtcagaatgttatgcatcagcatgctccggacataaaggatcacattcaattgatttgtctctcgcggaaacccagagcctttggagcatcaaagtaagtttcaggagacggacacattataattgcatcaagaaatgctagttcacgcaatttggc

SEQ ID NO: 42588 - DNA, 344 bp, Glycine max
  Clone ID: jC-gmro02910050e08d1
gagatcaattcaaattgcatatgggttgggaagtcaaggccgtatcagcagtaatttaacctaactaatgagaaatattcaaagcattgaaggaatacttcttgttttttgtgtgtgattgaaggaatacttttaaatacagataaaatatatgcgataaaacttaaaagagatacctacatttagcaacataagtaactgctggagtcgatggttaaaaccttaaacatcaaattttcaacctaaactgacggatgataaaacccaaatactggctactcatctggtaaggggatgtctgaacactcttcgttcttcattcaatacaaaattggcccttgaaa

SEQ ID NO: 42589 - DNA, 509 bp, Glycine max
  unsure (1)..(509): unsure at all n locations
  Clone ID: jC-gmro02910050e09d1
caaaagtctataaacaacattcttttcttttatggaacatgtgacatccttttggtcacctgagatggttaactcataaatgtcctaaaactgtataccatagaatggcaactcttttcatctacaacaaaagggaattttaaaaaaaattcagcgctcaatgttagtttttggtcctcttcgaagaaaacaattggcgaagaaagccaaactttcctctgtttcgggcagaaaactcagtaatggtgccattacttgttgtagccacctcaggttcattgtcaggtggtactggcaaaggaggagacggtggtgagagtgtgaagagaaacgcgttgagcatgcggatgatctgactaaagcttggtctcaagttaggatcttcaacccagcaagattgtntgacaaaagcaagttcaggggatatatcatctggaatgccgggcctcttttgcttaaatgcagcagcataagcagcctgtaaattggacatcccttcaaagggcatg

SEQ ID NO: 42590 - DNA, 509 bp, Glycine max
  Clone ID: jC-gmro02910050e10d1
gaagtcctaagtccatagaaatttttatacatgcggaaactcaaaggtaaacgaatcaaaggtacagaagcaacttaaacattttggtatccttttgggtatggcactaccacatccataagaaccaacattgacagtggcacgtatattagtttaattatgcaataactgagacataatcagtggcaagtattcccctgttgcagtttgaaacaaccccaccccgccaatctccatagagagttgcttatcttgcaccatttttaggaccacacatttccttggatttcccacttgtatatgtcaagcatacatacagaaattacatactacataaacaacatggtcttagcagtttcctgatcctatacggagataattttaccagtaccaaatgataaagttcacaacataaatatttatacaaactccccttagtccagtatcacatcacaaccacaatcaggcatatctttgtatttaatggctggatggatatatagcagcta

SEQ ID NO: 42591 - DNA, 491 bp, Glycine max
  Clone ID: jC-gmro02910050e11d1
aacccagcatcacacaagtggtttttgggaatcatttcagattctgttatacacaatttagaagaagaaaaatgagtatcgacctttataaatccacctcgatacaaaaggggactttacatccccaaaacaaaatgaaatagatgcatttcatttgatccaacagctaaataaattacaaattataacaatatatttgaaaccagtgtggaccttcaaagtgaaaattccatcagtatttaaccttcctctccaaattcctttgtgaatctctcgtgaacatcaagggcggctttgcttactgtaggcctttgtctagcgagtaccttctcaaaatctgtcctcgtaatagggggcggaaggatcttagaagcaagtccttttgcagcaagctcttgcattgaggattgaactgcaccctgttgctttggtccacacgggatccacataccctcaggattctttaagaagaacattgcatcttgggtttt

SEQ ID NO: 42592 - DNA, 397 bp, Glycine max
  Clone ID: jC-gmro02910050e12d1
gaaaaaggggtatatcaccttcatgatttccctttttttaaaattttattcctcgtttttcataatttattatttatacaacatcccaagttttcttcctctataggctttaacaaaagaaaattaacacgttttacacttcacactaaacgacaaaagcaggcttacagaattttaaaaatttaaaaacacttcgaagtcccaaccaaatccatcaccacctttattatccattccctgtttccgttcccaacgcccaatatttacaacccttacacaacctcgccatgtggcagtcttcaaacaagggttttgctttgttaagtctgggggtcccacatttttggcccgaaaaacctcttttcattcgcaccatgcgcatttgaacttcccccgg

SEQ ID NO: 42593 - DNA, 502 bp, Glycine max
  Clone ID: jC-gmro02910050f08d1
acttagatgggactaaaactaactaatacttgccgataaaggcaaaaggggcaaaaacaaaaacaaaacaaaaagatgggactattttcatgcgcaggatagcaagttccagtgttcatcaagccggtggcttaggttattagtttttatggatggagacattggctatgtatgtacatatggatcaataagatgaggtgaggagcatctgtatctgtattttgtacaaaatgaaaagtaaaagaaaaggaacaatgcaatcaatgaggtaaaaatgaattggacagtgctgcagatactttacaaacagggcaccagttcttaagccgcatccactcctgtatgcaaaccacatgaaatctatgttcacattgcagatccccaacttcatctccaacaacatattcctcctggcaaatgcagcatttgatatcatccttatcctcattacaactctcatctgcatcatctaaaggtgcagactgagatttacttcttttca

SEQ ID NO: 42594 - DNA, 347 bp, Glycine max
  unsure (1)..(347): unsure at all n locations
  Clone ID: jC-gmro02910050f09d1
gggcgccgggaaatccaagtttacggccccataatttcaaagncaaacctcttttatagtgtcccctaaaataaatccattggcccccgttttaccacgacaagaatgaaaaaaccctgctgtcacccaatttaatcgcctaaacaaaaatgcccttttccccagctggcgaaataaaaaaaaggtccgccacacactcccttaccaacagtttcccaacctgaagggccaaagggcccccccctgtagaggtccattaagcccatccggtttgggggatacccccaatggaaccgttacatttgccaaaaccgaaacgcccaggcttttacatttcttcccttttt

SEQ ID NO: 42595 - DNA, 351 bp, Glycine max
  Clone ID: jC-gmro02910050g06d1
acaaggggaaataacttttttttaccccaaaaactcctttgggcaaattgttacattttgcaaacaaccaaatccacattttgatagaataatgcggcccccccccacttaaaacaaattttactgggggcctcaaaaacaaattggtatttttcaaaaaacatttccctttccccttaaaaaaaaccaatttccttaaaatcctccccagtttttcctttggggttttcccccatctggggaaaacgtgccttcaatttttcccccaaaaaccggccttattatttttattcggcctttttccttgctttttcccccctggccccttaaaaagccttaataaatttgggc

SEQ ID NO: 42596 - DNA, 521 bp, Glycine max
  Clone ID: jC-gmro02910050g08d1
aataaaaattgtcaccttgccagtttaaaatgtctggatgggaggcaatggaatgcacaaatttcaaaacaaagaagaaaaaagaaaatagtaaaacttcttcaaagcatcatacacataaggtctttcacctacctagagtgagaaccttaaaacttcaaaaaaaatctaaccttgttctcatacatctagaaaagctggaaaaaaaacatatggtgaatgtggaaaccaagatgcacatagaaataaactaggagatatttatgaataacatctgatttgtaggggttttagtttcatatggatccaaagaactgttccagagatggagcactgaacacatttgcagcagttctttcagttttgtaaggagatacatgaagttgatacttgataaacctagccaactgagtgacaatttcaggatttgaatcaatatgccaatcaggttccaattgccgaacaaacgatgaccgcccattctctgtgctgcagaacagaaccttgtccttgaccagacc

SEQ ID NO: 42597 - DNA, 507 bp, Glycine max
  unsure (1)..(507): unsure at all n locations
  Clone ID: jC-gmro02910050g09d1
atcttcgaaatcatcactcttataaccagaatgtttgttgctggccaaaagaaatctaatttggcatattacaagagacttcacgaatcatgcaagttcagatgtacataccaggtggaaaaagaaaagatattttacacacaaaagacacaataaatacagtaaatccttctgttgtttccatccccgccatacacaaaggttgatgaaactggagtgggttttatctgttgatcgtgtaggaagcattgattggaagagacattttttcttctcagtgttggtctccttcacgtaccattcgttggagaagatgagtcatttttcttctccccgttggcaacctcagcatgattatcctcatcacttccatcctccagagaagccttttgttgcagctctttgactttgcggaattcattatagtgggcctttctgtgctctctgaaactcaaacttctatcttcctcatcctcttcagnttcttctgcctcatcctcagatgat

SEQ ID NO: 42598 - DNA, 396 bp, Glycine max
  Clone ID: jC-gmro02910050g10d1
gcaagttaactggtttttaataacattaacagtaaaaaaaataacttgcaaaaaaatttggttcgatcaatatcaccacttcaatttttcaactaaaaaggaaaaataaactgattgcctgatccaaccacattgcattgtttttataaacaatttacatggcggattatacaggcactttctcttccttctattatcaactgtaggattcctcatgtcattttttgcaaaaccagagccagggggcataccatatggcattggaaaaggagcttgaaaaggtgttgctgtcacagcaacacttgttgcaggtactggtggtagtgcaaacacaggtgcctgagatgaggttgaaacaggagctgcctgtttggccctaagttcaggaagggattt

SEQ ID NO: 42599 - DNA, 423 bp, Glycine max
  Clone ID: jC-gmro02910050g11d1
aatcagtaggctgtaacagaaatggattacatgtcctttttctacaatgatagtccacataaactcaatacagaagatgttactgactggacaatttggctagggtgagcgccaatacctttacaccatttgacatatcttcaatggtggcaaactcttcaggcttatggctgtaccctttgtaacatggaatgaaaatcatgcccattggagacaacctggccataaacaatgaatcatgataggctctactaatcatcaacttgcttgtcaagtttagttcttttgttgcagtctctactgccttgatgactgcttcatcagaaatggctggtggatcctgattgatgacacggaaatcagagagcttgacacctcgtgttttggtattttaattgctgattgatgaattttctcaaccac

SEQ ID NO: 42600 - DNA, 483 bp, Glycine max
  unsure (1)..(483): unsure at all n locations
  Clone ID: jC-gmro02910050g12d1
aaggaagaaggaatttgcttctcttttttttgttttatggggagtactagatgcagacccttttactacacaagtcttccactttaaaatagacattaaagaagccaagactaatattttacagtgttccctctttccgggaaaatttacatcaattatagataactcgtggaggtggttggttccccttcaacttcatgatgatccataatcttcagtccggttgtaaccaactatggaggatggaatacaatacattacttgtcgntgactcctattttcttttcactgtcatctttggtaataacaatcccaaccaatttacaaggctcggcattctcaagcttttgaaccacagctctcatggttggtctcaaagccggaagagtccccgtgcacagcactgcttggtctcaacaccttgcaagcttcctttgtatacatctccggaattctcgaatccaccgcactcctaagtccctc

SEQ ID NO: 42601 - DNA, 523 bp, Glycine max
  Clone ID: jC-gmro02910050h05d1
aagtaacggattgtctctcaaatttgtttcattgcattgtatgctagttaatacggcaggagttcacataagacttgtttgttagaaatatgcctgacatagtattcctattctacagctgcaaactgtaaattatacaatttagcacatgcaaaatgaaagtatgtgtactccatcttgtcgactgtgatcgaaaggtatgcaatgttggtgtcttggatattagaaacttctttgattgcgtctagtagaaaaaccagtgtcgtcttcatctttgatgaagggtttaaatctagcgaggccaccacttccactgtatgcttggcttctgtttgcagcttgatgatcggatggatctggattgccacaaatctcaagtttgattataaatgtagctgtgcttcctttgtcaggaccctcactctcaatccatatgtggcctcccatgaggtttacaaatcttttacaaatggcaagcccaagacctgcaccactgctaggtcgagctggtccactccgagac

SEQ ID NO: 42602 - DNA, 502 bp, Glycine max
  Clone ID: jC-gmro02910050h07d1
aaggataactgggcatggtccaagggattatcattattattattattattattgatggtggctgtatacttgttatagctggcgatttcctcaccgcccaagctttaattgggatccttaacttaaaactatgctcaaacttaagcattcagggcttactttacatgggtacaataataggctataacaatgatcatcttacattggacttgaatgccaatctcaaaattgagctcttgcctttactcctctgcaggaggggccacccatcgaccatgctcttttattaaaacgatcaaggcattggttgcatgctccattgcaatttcacgcttcaccacagtcttcccaacatagaggtcaatcttcccgggagtgcctcccacatacccaaagtctggatcagccatctcccctgggccatttacaaggcatcccatgaatgcaatcgaaacaccagggaggggtgatgtcttctcccgaatttgtgcacttacttttt

SEQ ID NO: 42603 - DNA, 519 bp, Glycine max
  Clone ID: jC-gmro02910050h08d1
cttctccccttcttaaaaccttttttcttcttcttgtacagtgggtgttacattacacctaatttcaacatctaataatattaagtaatatacaattcaccttttgcactttgcagcaacttgccatgccactacaccgccgttcttgtaccttctttctttcatcagtcacaaaaactcccgaaaaaaaaaaagaaaaaaaaaacctaacgtaacgttacaaagcaccaataatcttaggtttcttgctacactctaacgagaacagttccatttctcttctcttgccattgcagcacccacttgcattattgttattgccaacaatagtatctgaaccgggtagtttcaaaatgttaaccccaaagagccgaaccatctggatcggttcgacaaccggtccgaccggtccgaacaacgcgacctcgttgttaacaacattcctcgtcttccaatcgatgtaaagctgcttgtccggtccagtggaccggtgaaaacaaaccgtgtcaccagctttca

SEQ ID NO: 42604 - DNA, 521 bp, Glycine max
  unsure (1)..(521): unsure at all n locations
  Clone ID: jC-gmro02910050h09d1
attgaaagtactaaattcattaaaacatgattgcaaattgggcacattgatagcttttcaaggtccgctaatggacccgggatgcacacatacacaaagttcaggaacataaaaaaagaaaagaccagattatagactttcacatacttcagttcacaccaaacaagggacctgcagaccattctcaaactcaaaacccaccacgaagacgcaagacaaggtgaagagtagactctttctgaatgttgtagtcagcaagagtccttccatcctccagttgcttcccagcaaagatcaacctctgttggtctggggggataccttccttgtcctgtatttttgccttgacattatcaattgtgtctgaactttcaacctccaaggtgatagttttccctgtcaaagtcttcacaaagatctgcatacctcccctcagacgaaggacaaggtgaagggtagactccttttgaatgttgtagtctgtcagcgtacgtccatcttcaagctgctnttccgcaaaa

SEQ ID NO: 42605 - DNA, 485 bp, Glycine max
  Clone ID: jC-gmro02910050h10d1
aggaaaaagaagacaggataaacagataactgagattcaggtgccctgttaggggtacaaatacaacataaactgtaaccaaaaaggagaaggaaaaaaaaatgaaaaagaaaaaagatcacgaacagcaatatgagaattgatgcctgatcggacttcaaatatatgaacttattcaagttttatctcttttcctgcaactttttcacgttgttttccctagacgggggattaaaaaaccccacaccagttagagtgtggctgttaaaattcttctcaatgataaaaaataataataataattcatagcagtaacagaaaaggagaaatcacttaatgaaaatcaggcttctctgggtatgtgcagccaggcctttggatgataacattggctgcataacacccagctctcacacattcttcaatgggcttctgctttaccaattgcgaaagaaattcttccacaaaagcatctcctgctccat

SEQ ID NO: 42606 - DNA, 489 bp, Glycine max
  Clone ID: jC-gmro02910050h11d1
cataaagatcataatgaattaacaatgtatgtcccgttcaggggttggagaaatgacccacatgaaccaaggatcatgatcttcaaacagaaaatagaattgtctcaattaagtaacactaaccacaaatcatcgtcagatctacgttaatctaggttttccctactccagccccatacatgaatggttttaaaatgccaagaaacatccaccgcaaatgttaaattaaatacaacagcaataataatataactcatttttgcctacgacgtatgtcatttttcagtttttgaagcacacgccacaacatgagatttgaatttctccagctcggccaaaacctcatcttctggtctgtagatcaaatcactcatgcgccatatctgcaacgttcccccttcttcagtactttcacagtcatcagacacactaacaatcgcccatggatcatatgcattccaatggaagtcaacaactgtatccctatga

SEQ ID NO: 42607 - DNA, 442 bp, Glycine max
  Clone ID: jC-gmro02910050h12d1
aggggcaaggggcatgataataataataagtctaacattaaaggtgcatgaaaagagaaatacatgatgcataagggggttcatgttactgggatgctccggtacaaagaaggctattctccaagcagtgaagggagtagccccagcttttttgataagctcatacaccaaaggcattatgagctgggtgggtccaccacccatgttcccccaccccgcagcagttccattcgcaagccctataatcttactggtgaacattgtgctcatccaatactggcatgacacgaacgttgccaaggagaaccctatcaagaaccgaaccattatgtaccccgcagcattttttacaaaggacatgcaaaacacggttggggcccagagcattattaggaaggcccacccctaacggggacctaataggtcacaaaccgcacccatt

SEQ ID NO: 42608 - DNA, 461 bp, Glycine max
  Clone ID: jC-gmro02910051a02d1
caaccaaagaataatgtctaaataaggtttcttggggggctatatctcaagggacaacattcatacatagggggagagggtccattccacaagctcctctatatttactttgcagtaggcaaaagggggtctctagcagcaaagttaccaggtttccctctcaaatttgatagaaccaaatacaagaatcctgcaaaaaagaagcttacaaaccatgcattgttgtagatcacaacaaaagtgtcaggaactgaagttgcaattccaactttttgcaagaaaccaggaaccacaggtaaaactccaacaactagggccagaatagcagccacattaaaccctcttgaatacctatatgccccataaggactcctagagttcaaggcactaacattcaaatttgctttctgtacaatatagaaatcagctagaacaattcctgctataggccccatcaaagc

SEQ ID NO: 42609 - DNA, 409 bp, Glycine max
  Clone ID: jC-gmro02910051a03d1
cagaaggcagttgattcataattatttcatcattcaaagagaggaatttgtttgataagggactagagcacccgtgtctgggggctaacaatgcttacgttgagggccatccaagcactctacaaggtctgaccttacgctttctattctactatactcacaccaactttcttacgatattgcgcctataacataccgacttcagccttcttacacaattgctaaaccctaaactaccatgcgaaaatcaatgtggtctcttcctactaccaaagaagtctggtttgactcctccaaaaccgttgggtgttttctaagacacggtgtggtactatccaacccaggcggcgaggctttttggccggaaatgaaagggatctccatcgagagggggccgtctcttcaacat

SEQ ID NO: 42610 - DNA, 523 bp, Glycine max
  Clone ID: jC-gmro02910051a04d1
ggtcactaatattattcatgatggtataacgtagggaaacttgatcaaatatctaataaaattgtcactttgccagtctaaaatgtctggatgggatacaatgtaatgcacaaatttcaaaacaaagaagaaaaaagaaaatagtaaaacttcttcaaagcatcaacatacacatatggtctttcacctacctagagtgagagaaccttaaatctttaagaaaaatctaaccttgttctcatacatctagtaaaactggaaaaaaacttatggtgaatgtggaaatcgagatgaacatagaaacaaacttggagacatttatgaataacatctgatttgtagtggttttagtttcatatggatccaaagaactgttccagagatggagcactgaacacatttgcagcagttctttcggttttataaggagatacatgaagttgatacttgataaacctagcttactgagtgacaatttcaggatttgaatcaatatgccaatcaggttccaattgccgaacaa

SEQ ID NO: 42611 - DNA, 354 bp, Glycine max
  Clone ID: jC-gmro02910051a05d1
aagatgagattgcttgtaaaaaaaaataaacaggggccatgggtaatgtttacaagtcgaccaaagggacacacattgccaataccagccatcaacaccctgtaccttacatttatctttctcatgaaccctatgtaatggggatcacacaatcctttcgttgcttacaaatcacactaatatggatttaatactccatacctataaagtgactaccgtgctgaatcaccctatttaaagtaccatccttgggaatgatcaacgcatgctcttgtttgccgtggccatccttagatagcttggatgacgaatctgttccgggttgaagagaggatctgggatcttggcaatctt

SEQ ID NO: 42612 - DNA, 478 bp, Glycine max
  Clone ID: jC-gmro02910051a06d1
atgactcgggggttatttttgattttgcaaattacacaatcacggccgtacatcacacgtgagctgggcctcttccaacttaaaagcagaggataacattggcccatgacgcaacacatgcaccacctaataatcataattttacatctttacatacaaaatacaaagactttaaattaaaattaaaaaaaaaaaagataaacagatcatcttgatgaaatgaaaccgaaacccagaaacattgttttgattttttttgttgttcccaacttgattaagcatgaacggtttgattgaatcacttggacttgaagggaatggccctgattacgacctggtggtagagtgctgcaagtgcagcaccaatgaaaggtcccacccagaagatccagtgatcatcccaaccaaggtccttgttgaagatgatagcagcaccaagactacgagcagggttgataccagtgccggttatagggat

SEQ ID NO: 42613 - DNA, 559 bp, Glycine max
  Clone ID: jC-gmro02910051a07d1
attaaaaatttgcatgagttccctttatgacacttgtgaattggtgggatgagtgaaggacgactcaaatggataaaatgagagaagaaatgatgattctacagcctaagattcaactattttgtcttttcctgggagcagcttgcatcatcttttctcccttctgctcacttttcttcaatttccccaaatttgcgcttcctttgttctatatcccctttatatacccagcgatatccgtatttcttcacctccgcatatgactctttcaacactccatcatatctcgaaacccatctgccaagatatctgtgcttgagatggaaatctgcaatgatgtcatgtcgtttaagaaagaataggcacatgtgatctgatttgtctaaaacaagttctagatctacatctccataaaaatccactcgaatatcaccaaacaaatgccttggcccttttgaatttgaaaaacccattgctaagagtgtttcatgaggtacgacgaatattgcacaaaacgcaacgccaatccaattacggtcatgcataacaggagatgcgt

SEQ ID NO: 42614 - DNA, 286 bp, Glycine max
  Clone ID: jC-gmro02910051a08d1
cccggggaaaacaattaaaatcccctgattgcatgattcttatcaaaccggcaaaccccagccgggcgggagtgtttcacaggatccaccggttcaaaaaaaaaataagcaggcaagggccatttcaaacccctttaccattttcagcggggttttcccccaaattaccaggttggccccgggaaccccgccccacttggggttgccggggcggaaattaagggggatctcccttccttaaacctcttagtcccaaaaaaggttctccgcccccccaaaaaaagga

SEQ ID NO: 42615 - DNA, 510 bp, Glycine max
  Clone ID: jC-gmro02910051a10d1
ctaaaatgaattttttttataaaaacaaaaatatataggaatattatggggcaggcatgatatttacaagctaggtaatagtaatttcatcagtagagtttgtacataactctttggaagatgcttttctgagtaaaatttctctttccacatagaatgctggttttcgaggcaagggaactactacactttcatttgttaacattgaaattatttgagacattgggggtcgatcatttgcatatttttctacgcatatgagaccaatgtgaatgcatcttgtcacttcattgagatcaaacaaatcattaagcgatggatccattaattgtagaggcacaccttgaatccataactcccatgcatgtcctatcaaattcatcgggcggtcgtcattgaagctagtatttcttctcccactaataatttcaaggaccaacactccaaagctataaacatcagactttacagaaacaattcctttcatagcatactcaggagacatataac

SEQ ID NO: 42616 - DNA, 360 bp, Glycine max
  Clone ID: jC-gmro02910051a12d1
gcatgttgaaactaggaagtgtatatattatgtaattaactacaagggtaacttaggtttctatatggaagcattaatatatatataactatgcactatatatattaaaattaaaaactaaactttctacttacgtgacacctaattaaatgcacgtcctccatgattgaactcaataaactttgccatatatcataccaaatcatgaagcaagtgtgtccccatgacattactaaacggcatgttttgtccttcggcatccaaaagagagtactgaactgtttgacactcttgaatctgatcccgtgggtaaaacaatcagctcttgtgtgccggttgcacgaacgctaaacttacccc

SEQ ID NO: 42617 - DNA, 519 bp, Glycine max
  Clone ID: jC-gmro02910051b01d1
ggataacaaacagcataattaagatacatgtgccttgataggggtacaaatgcagcataaactgtaataaaaagaagaaaaggtggaaaaaatgaaaatgaaaaaagatcacaaacagcaatatgagaattgatgcttgatcggacttcaaatatatgaacttattcaagttttatctcttgctgcaactttttcacgctgttttccctagccggggggttaaaaaaccccacaccagttagagtgtggctattaaaatccttctcaatgataaaaagaaaaaaattcatagcagtaacagaaaaagaggaatcactcaatgaaaatcaggcgtcggtgggtatgtgcagccaggcctttggatgataacattggctgcataacacccagctctaatgcattcttcaatgggcttatgcttaaccaattgtgaaagatatcctccaacaaaagcatctcctgctccatttgtgtcaactaatttctctctaagtaacggcatcacggggtaaattttta

SEQ ID NO: 42618 - DNA, 568 bp, Glycine max
  Clone ID: jC-gmro02910051b02d1
gttcccctcgctagcccccaaaatagattaatattcgatgcgggttatgagatcggaagaacaaccgcttttccaaccaacaaagacaagcacaccaaatacaacaacaaaggtaatgctagcaaaaacaaggcttgtgtttaatccggcaaagagaccaccattagctatacacaagtttgaaacatttgtcgagtttactcattaaactgtatcagtattcagagtttaacatcatgagcaaggtcagcactagaaactccatgatttgaaaacaccctctcccagagtctctttttgtcagcaaccaaaactcaccagcaaaacttcttccgtaacctagcttcttcttgactatcaatgtaagcaagcagctcttcttgcctcattagtgcttcataaagagcctttttagttgcaattaactctgcttccaaagcatccacccgacatacagcagcatttaacaatttttctttctcataaggcatctcagatggcttagattggagtgtgtcaaccttcacttcaagctcacctaaccttttcatcattgaggaaaggagat

SEQ ID NO: 42619 - DNA, 471 bp, Glycine max
  Clone ID: jC-gmro02910051b04d1
gaattgaaagaaaactatgtggaattaaaatcgttgttgagattcaaagcctccaaaataaaactgacatttgttcgcataatacaaatgaattgacatttgttcgcataactagaacattgaaaaaaagacaagaggagcggggataatagaggatagtttttcacatatacagcccttcaggcaccccttttttttttttaaacatcactttatccttggccttcttaaagtcagcatgagtcaccttcattcggcgttctcgtagagcaagtaaaccagcttcagtacatattgcctttatatcagctccagagaattcatctttagtcataacaaattcttccaagttgacatcatcagctaatgtcatcctcgacgtgtgtatctgaaagatgcgtctccttgttttgatatcaggaagaggaaattctttcttcctgtcaattcgaccaggccgtagcaaagctg

SEQ ID NO: 42620 - DNA, 546 bp, Glycine max
  Clone ID: jC-gmro02910051b06d1
gtctgaaaatcgtagcattggggatatcacggatcaaggaatgaaaataacttagcaacgagtaagaaatatttggggatagcccataaaattggaaataaactgtaagtaggcttcaagtattaaagctaaatatcattaaacacctttcaaagtcttaagacataactgtcctagctctgtgaatcagaactcaaattattggcaaggtctttatcataccaagactaatgttccaactatcaacttatatatcacaccaaaaaccgcgcatccaaatctcaatgctcaaactcgtgtggatctccaggttttttccacttgaaaactttagtagggttcaacgggggtacggaagttagctccggcgtacactgcttcagcaccaagctcctcctcaattctcaagagctggttatatttagcaagacgctcagacctgcatggagctccagtcttaatttgacccgtagccaaaccaacagaaaggtcagcaatgaaggtatcctcagtctctccacttctgtgactggccatgacacccca

SEQ ID NO: 42621 - DNA, 329 bp, Glycine max
  Clone ID: jC-gmro02910051b09d1
caataaaaactagatttttattttcatcttattgtacaataagaatacagggtattcaggcccaccccttgctattggtacaagtaatgaataaaatttaatcaagaaagaaagaaagaaatcattcaaaagtgaggttagagatgaggtttgcttaaaaatgtaaggtgtttaatttctattgtattgacagtggtatactcaggcctgtccgtgcttgatccttaattttaataatgtagctaggaatctcagattcttgcccccaccttggccatttgtaatcttatcccaacagccaggcaattaatagcaccttacccgatagc

SEQ ID NO: 42622 - DNA, 407 bp, Glycine max
  Clone ID: jC-gmro02910051b10d1
aaattaaaacgctcttagatattccaatcaagtgataccggaagtcaagctgatactagttaccgattctagaaatcaacacaatgatatttatttatctatttacctatcttgctattctaccctatttgtcagtcaacatctgcaggagcaggagtacttttttgaggcaattgcatgcttactatgtcttctcttggaagagaatagattgaaccattgcctagttcatttgacatttgttgattttctggtgctgttagagccaaaaggtgtgaagcctctttgtttttgcgaagtactagatatgttgtgccaggcaaatacattgacatgcctgaaaatcctagtgtcccaagaaacaccttatccacaatttttaagtgactatgaagcagcagcttgat

SEQ ID NO: 42623 - DNA, 551 bp, Glycine max
  Clone ID: jC-gmro02910051c01d1
aaaaaaaaaaacggatatgaaatcaaatattgaacaaagcagggattacagctatataggggagggacatcatgcccaaattgcgagcgaagacatcaatccagccccaaggaaaagcatgcagtaagacagtatctgcagcctaaagttacaactcatcctcttgctaagaaaatccgcagcgatcaaatctaccaaagccatataaaccaaaatccccgacgacaaggaatccaagataccttcggcgatgagtgcaccggggctgtaagggttataccccgaagagatagccattccaatcccaacacccaagggtgtagtcagtgcaaaaaaacaagccattatagttgctgacgaggctttaaactgcgcttgggaaatgcaaccttcaagcgcaaacccttcaaaaaactgatgaaaagataacgccgcaattaatggccttatggtacacggactttgcgaaactcctaaggacaacccaattataacagaatgtgatacaatcccaagctccaacacctgagaaacgacgacgtgtcgaacgt

SEQ ID NO: 42624 - DNA, 403 bp, Glycine max
  Clone ID: jC-gmro02910051c02d1
aacaaaaaaaaaaaccccccccctttataaaaaataaaaactttgaacaaaaggggacaaattccgggcgaggccccagaaaaaaaaaatgccaaaaaaaaaaaatttgttttctaaaataaaaaagggttttttttcccaaaaaaatttttccaaacttaaaactgggggttttttccccaatccccccccccctggaaaccccccccccaaaaaaatttggggaaaagggggtttcccaaaaaaccccccccgggacccccccctcccccccaaaaattttttttggaaaaccccctctccaaaaaaaagctcccccatgcacccccctggccccccctttttggtttggtaagaaaaaacattaaattccccccccccaagataatttttttaaaaccaa

SEQ ID NO: 42625 - DNA, 457 bp, Glycine max
  Clone ID: jC-gmro02910051c04a1
gaggctgtaatcaatcaaccaaagcaacgatgtcgtggtttacaaggacaatcgcaaactcactcaaactgggcgacgaggacaatggcggtgacctaaaatcccctccgaagaaacccgattcggaacccgttcaacccgattccgcatacacccccaatcccaccacgcgcggagttaaagaggatttttccgagctcaccaaatccttttcccgccagctctggggagtcggctacttactcgccccgacgcccgatccccaatgcgaaaagcccgtcgccgattccaatcccaatcccactgacgacgacgaacaggaagatatcatcggaggaatccgcaacgatttcgcggagattagtggcaagttcaagagcgggatctccttaatttctggtcctaagacagtgtccgaattgactaagatagctaggagtttgcttcatcttggatc

SEQ ID NO: 42626 - DNA, 509 bp, Glycine max
  Clone ID: jC-gmro02910051c04d1
atcaaatagaagatttagtttatgtacggtgcaaggaataacggtacatagcacaatgcccagtggagactggttttatttacagaaacgcattcttcagaatgtcaatcgtagagtacacaactatatgcagatattcacaaaatataagagaatcatatttaaaaataaaaaaaaacttacctctgggacatattccaaggcatagtcatattacatcaatgtcatcaacattaagccaatcattggaatccttggtcatagaattacgagcacttgaatgctcagagccaacatgtttgccttctacacagtttaaatccttatcagagttaggtgaacttctacctaactgaacccaatctcgagagtcttttgttgaagaatcagagcctgatctagtttttttataactttcatgtacatcaccatcatcctcctcaagatcactgaatgatacatcctcgtcattaccagtgtgaacaggagttccactgggaccaaccatt

SEQ ID NO: 42627 - DNA, 445 bp, Glycine max
  Clone ID: jC-gmro02910051c05d1
aactcatcaaaatctgttttattttgccggggcaacatattctcatgtacatatcaatgaaaattgatggcttttctagctcaggtttatttactgcatcataattattacataaataaacaaggaactagaaatgtcaattttacataaatcagctagttgcagcttaagcacttttgtcagcagctttgcctaaggaggtgaagttcaacctgataagcggcttcttcattggtaaaggtgcaggaggcccacttaacaatggtgctgatagctcagcaggctcaagctcctccaagatctcattggagaataaatgagttgaacaagtaatttccttagaaataactggctcttctgccactgcaggctttgagagtaaagattccatgttgtttttcatgttcccaccagaatctttggcttgatttttatactgagtatc

SEQ ID NO: 42628 - DNA, 477 bp, Glycine max
  Clone ID: jC-gmro02910051c08d1
aatggtaagcattcacttctttattaatattaacggtaatttattcaaggggctttcatgctccaagattcttgggggcattcaagaaaaaggatctaaaacatctcatactaaattaaatgcattgctcaagtttaatggcaagatcagaattaaagtttgccgaaagaaaaaccactttgtaacataaaacggtaataaaacagaacttattgagttggtccaagaccattattttagctgagtgttcgttccttcttctggggatttggggaaaactactaggggaagggggtatcttatacaatttgaaacacttgcaaggggaagctaggtcatgtacatcccacagcagggtcaagaacactttcgtttattgcttcttcagtggtcttaaacggatacagagttagagattttgaagtccagatcccaaagctcaaatgtgcccttaacgaaattgtaatgtgcaccttt

SEQ ID NO: 42629 - DNA, 449 bp, Glycine max
  Clone ID: jC-gmro02910051d01d1
agaaggcaactgaatgttgtccagtacaatggcaaagtgactacatcccgttggtaaaaactaaaaacagaaacattttgacacacatgtccaaaaatcaattacaagccaattttctaaaaggaagaaaacacagtcacggacacttggcagtatttgcctgtatcacaattaatgggtaataccggaaaacacctacacttcctaacaaccctatccattgaaaaaaaaaaaaaaggaatctgaacaacaaaaacaccacccgcagcaacccattttcattttcattttcacaaccaccacctcaagcacgttcaccgcgaatcctttttgccagctggatatccttgggcataatggttacccgcttagcgtgaatggcacacaggttagtgttcttaaagagcccaacaaggtatgcctcagcagcttcttgtaatgcaagcacg

SEQ ID NO: 42630 - DNA, 499 bp, Glycine max
  Clone ID: jC-gmro02910051d02d1
gagcattacaaggctactggcctttctttgacaaaccccaagagctttgggctcttaacaagtgaagaaaaaaaaagaagaggaaagagagagatcatgctaaacaaagacaaagtattcaagaccccccccatacctgcacatgccctcttttttttatttttgtccccatatttaatatttctaattttgttgagcatattacaaaattcaacccctccacttaacctgagtactatcattaataagtaataacactagctagctagtacatcatcctccactttggtgtgtgtttgtcacataatggagcaatatccatcactttcatactcatcctcaacatagtgcttgattggatcaaatggtggaggaggtggtggcagtctaaagtatggagtagtgtaagcatgcatgggcatgataggagcaccaacataatatgaagcaatactggagacaggatatgctgtgttatagtttaatccatatgctggag

SEQ ID NO: 42631 - DNA, 591 bp, Glycine max
  Clone ID: jC-gmro02910051d03d1
aatcttatcaactcgtaatagaatacgtttttgatttattgatgggaggtacatcattatgcttatgtggtaagtatcaaaaatctttcttttgaaattcatcatacatttataaaggacagccttcaaacgggctggttttgcacaaatgattaaatgatagatacaaatattataagcttaaagggaaaacagaaacaagaagaaaaaaagaaaaagggagaaaatataaagaatctttgacgttggagaaagagttcaatctatccatctatctcttttggaagttaaaggtcttgattgcagcaccaaagattaatgcaaaggcaacggcgatgccagcaaccacaacagcacaaattccaacgaagtcatgtttgaaaccaaaatagtcttctatgaattctttcaccatcttgttatcttcacccggcattctttcagttatatctccaaactgagatgcaatcaatccatacaaggtccaagccacaggacatgcccaatagtaccatctccaccacacgggcattttaggtcttacgacgataaatccttgaaagagattccaaattgcataaaatgcagcag

SEQ ID NO: 42632 - DNA, 491 bp, Glycine max
  Clone ID: jC-gmro02910051d04d1
aaaatcatgattcattcatctagctagttcatgtaggggacagtcatacagaaagagacaagaaacatacataactaagtcagataaatgtaagaatttggttatataaaaaagcatagttttctgacaagtacctcaagatctcactgagaatttgtctcattcatatagtcagatctagagtactggccattattttcccttgttcatcacatcgatcttgttgtgcttccttgatcaacctgctgctaggattagaggatgaggataattgagagcacaatgagagtgataggtttgtgctatcaacttcatggttatttaatgttccttcttcagcatcattaatctttgagtttagttttagtgacagatccaaatcaagggttggatgatctgaagccttccttttcagtgtcttcaattctggttgatttgttgttgggtttataggcatgagattttgtgctatttgttgcataatattgatt

SEQ ID NO: 42633 - DNA, 582 bp, Glycine max
  unsure (1)..(582): unsure at all n locations
  Clone ID: jC-gmro02910051d05d1
aattgaaatttggtaacttcccattaatatttttttcagaacatatccaaaataacaagggcgtagcttttttctcccgtatcaaaattcttcatatagaaactgaacttacaatctacaggtagtgtttgatcttagagacaaaaataaattataatttataaatgagaagaaatacaagaaacaaacatgaatcattttagtcaattccaagacgacatactggatttttctttataagcccaagatccacctgcggaaaacaagaaaaatatcaaaggtatgttttaaaaacagagaaaaaaacacatcaataaaggaccaaaataaccagatggtggtattcagttcaaaatcgagatgagtccgtcttcatagttatcccctaaaaataccttgtgtccaaagagatctctgatgttatctatcccgtatagtatcatcgttggcctttcaagggaaagaccccaagcaataacttggacatcttcaggaagtcccatcggctgcaacatttcaggtctgaacatgccagagtttcctatctctacccattntntaaagccttcatgataactaaaa

SEQ ID NO: 42634 - DNA, 560 bp, Glycine max
  Clone ID: jC-gmro02910051d07d1
atcgaaaatgcttggcaattaaataaagctgctggaaacagcaactttaactacaaaaggaaatacggaatacaacaattcttcatgacatttacataaaaacactacttactcactagaagaattcaatcaaccattaactacaaaacaatggggcgtacgtggaaatccacctcgttacaataaatcgacagttgaagaaaactacaacatcatcaaagtttcctgatttatgccaacagctacgaaccaaagcatccatgatccaacggcttaattcaaattcaatcaacactggggagtatatcttcaaacgtgccactgtcgccataacctacgacaaccatatcaaagttcaaaccctttggcaaaacacccttaattgaacaactacccttcattcagagcaagcatattggaacttgtgccaactttcccgtttctaacactaaatacagtttctctccctcgcattaaagggagcaacacaatcctaaaaaggccctcatttgtgcatgttggtgcattgcaactaaagattctacacaaagacaacattt

SEQ ID NO: 42635 - DNA, 330 bp, Glycine max
  Clone ID: jC-gmro02910051d08d1
cttcttgctctttcttcaacctctcccttaaatgtggggcaatgtggttctcatccacattgcatattactttgaccttgtcagcttcacgtatatacaccagcatataagcatttgaatatttggtgaatttaaaaggagtgttgttaaatccaggatttgtctgtggtaactcttcctcaccaccatattgctcctctaatgcccgtttagtgtcttctttagtcaccctctcatcatcaaatttataccactgctcagatagagtcggcctgataaaagcataataatgtccaccatgcacaccaccactgtgaaccaaaacgctat

SEQ ID NO: 42636 - DNA, 506 bp, Glycine max
  Clone ID: jC-gmro02910051e01d1
gaggaataatccatgtaaccaacaccactgtgatggaaactcatcgacggtgggtaggtctgagtttcaaattaaagatcagaagcagatcatttaaaacaaagaccattatttagttaacagaaacctccaagtaaactagcttctactggatttgcttgcattaaagctcttcatacatatgaattctgaattctcatcaacttaaacaaccaataaacttgagaactacctacccatcatcaacatattagaatagagaataatatcaacaataacaaagtaggctgcaggcttgagacagggagctaatagctcacatggcacttgcggtttcaatctttaccatggcgaacacaacgcacaggttcaatccctggcctgtcccctttcccttccctactttccagttccacaggaccttcctaatatttgtgggcggataatgtgctacgcatttccacagccaataattcaaccatttccgatttctccagcacgtgctc

SEQ ID NO: 42637 - DNA, 484 bp, Glycine max
  unsure (1)..(484): unsure at all n locations
  Clone ID: jC-gmro02910051e03d1
gtaggtaaaggcgaaggagtatcattcaacagagaaaaaatacggcatgaggggaaaaacaagatagaatgaaagcgaagataacaaataaagagaatagtttcacataacgacacaggcggaggggttttcgtcgctgaaagcagtggtgtagcggacctcagtggagctggcacgtgcgagatgggaatagtgaggatcatcggtgttgcggacataaccggagggggctttcttgtcgtagactccgggtgcgtaggggtgagcaacgacgtcgtaggggacgtagggccagagctctgctttcttgccggtgcggtgagcgatgcgggcgaccaccttagaggcctcgacgtagccgaccacagagactttgttggccttacgctccacatccacctggttcacgcctttcatnccctccaccgccttcctcactttcctctcgcatccttcgcagaccatcttcacttttaccttcacc

SEQ ID NO: 42638 - DNA, 524 bp, Glycine max
  Clone ID: jC-gmro02910051e04d1
cagaatcaatcatttaatttctttgattcattttcaggcagagactaacatcaacataagatttatatagttgtataatgtatgctcaaattgaatttgacttcattgtcatgaatgttatgtttcaagcttcctggtatagcaacagtcagcaccagaattcttgttctttgacaacataactgcttccttcttcaacattgcattgtttaaaatcaagggtccatttctcaaaagagcaattagagaaattataatatcctccatgtagagaaagcaactcttttctcactctatcttgtatccaaggatagctgagcaagttcaataatgattggttaatagattccttctcacagaatttgcattgctgatcaaagctaagatgagctgtggcagcttttgtcctttgtttggcaagttttccattggcaacccacttgtgtatgaagtttcttgattctgcatcttcttgcatattcatcaaagcttcaattccagcgcagctactatgaccaatgact

SEQ ID NO: 42639 - DNA, 271 bp, Glycine max
  Clone ID: jC-gmro02910051e07d1
ggttataggtgatttcataattctacttttaaaaaaatattattatgccccatattctaaggtaagaaccactcccatttattgactttaaaagaacccaactctatctatctatcaaaaaactgcaccttgtcctcaaccaaagagccaaacccacgcttttggcgaaaaatctttcccacaaaattgcacaaaaacatttagagaacgcttgccacctccaaaatttcgagcggggacccgcaactttcgcccagaatctttaacaacc

SEQ ID NO: 42640 - DNA, 501 bp, Glycine max
  Clone ID: jC-gmro02910051f01d1
caaaacacagtacattattatttttttacatcacttcttttgcataatcagaaattgattcttgcatatatatatgtatggcccacgtataagtaagtctggtgtaaacattacaccaaaataagcgcaagaaacattactagtatttcaacttttttttttggttaaaataaaaaagtaacttattcaatttgagattccctttaggttgttcctcattattggtggtattttctactgcagtagttataccctaaggccttaaaacttgggatccggattccccaatcactccattcactcttcaacacattcacccacattcagcaatttaaaaccgtctgatgaagatcagaccactcatattttatctcgttcgatcaacttcaattgtctgatcttcatccaatggttaaaaatacgctgaaggcgcatgaatgagagtgcaaagtggagaagctaggcatgagttggagttgtgtttggtggtgttggtgctga

SEQ ID NO: 42641 - DNA, 574 bp, Glycine max
  Clone ID: jC-gmro02910051f02d1
attgctataaattgcaacccttgctcgaatattttggtatacatacttctatttgggtagatattagacacttttgattatctagagaatgatagattccctcttgttcattttgaaatggaagtgcactcagaatgatgggaaaaatctgttgaggttcaaaggaagtgaatagaagtcttcagttctagtatcctggttgaaggtcctgaatttttcccaccagtgtctcccactgtctcggcgagttgagccctctccacgactcatagttaaatccaagaagtaagcaactatgattgccactgttgctggggatgagaaaatcacttgcactatattgttgaacgcggtggtgccagtatgaacagggccatgtccggatagcaatacatattcgttgaaatattgtggaacagataaacccatgaagagagaaaagccaacgatgaacattgacctataactgtttagattgcagaattgaaggaaaccaaggccagctgatgctacgtaggcatagagaacgcaataaatagctgctataattggcaaaggtattgaagcaagaact

SEQ ID NO: 42642 - DNA, 568 bp, Glycine max
  Clone ID: jC-gmro02910051f04d1
cacataaatcacctctacaagtagcatgataagtcacaaatgagggacaaactttagttaatatacaagcaagcaacaaacaagaatctagtcaagcttgcacaataagtgaatgagatggaaacagacagaagatgcaaatatagtctcaatgtttgtcagcacaaaatgatcaagcaagccatcacctcaagttcagtgttggcttcttcttcttttgttgttttgtcaaaagtagggagaatcgaccaaatccaaatttctttctctttgcagaaaacggtttctgaccattttccttctcagcttgcctgtcaaaggatgaatccccgttttgtttgcctagcatctgaccaagagacaccttccgtttcgccgagcttctttctctaatcattccactggcttcatactcttccggcatcatcaacttcctgctcaatatttgtcctatggacagtgtcggctttagaaccggcttgacctcatcatttaccagattcaacccattgacatcgattaaccgagattccttccattggtgagaggggaagcatttttaaacttg

SEQ ID NO: 42643 - DNA, 512 bp, Glycine max
  Clone ID: jC-gmro02910051f05d1
aaaaataaaaatttaaattttattaaaattaaattactggatccagaaattaaaatacaagaaattgaattacttcattcaataaaatatttacaaaataaaagaaatttaaatcaagacaattaaaatgtgtatttaaatttcctagaaaattttaaaaccttcatccatacacaagcaagtttgaaaagactgaaaaagggattaggctatatacaatacaacatcacttctacaaaagaaagagttacagctacacataacacaaactactcttctttcaggtctagggacttcacttcagccaaaagccgtttatactcatcttgagcttcttgtatttcacttttaagcatcgtcaccttgagattaagttcttctcctgtcttttcaaattctaaacattttgcatgcagtttcttgttttgttgcaccaagtgcatagtctttcggtcgaacacctggtcagctggagtagcaatgatctgtttattctgactgaaaccaacaca

SEQ ID NO: 42644 - DNA, 505 bp, Glycine max
  Clone ID: jC-gmro02910051f06d1
ggcataaattcctttaaaaattttattgtaatagggagcccagaagcaacaaatacaccccttatgcttagcacaattaacatcatcctaaattctgaagacactcctaaaaacctatgggatccattcaacaattacaatcctaatatacacacaacaatctcaaaaatcagaaccaagaggtccaattttaattctttagggctagctccatgatccaattagtaccaattattttttcatctgctattccttggctcatccaccacgatatttgaagctgtctttctctagttgattgattaattgttgtaacatcttcagatactggttcgtcatatgatcaagtatcatccctctagaaagtctgagctttccatacagatctctaggcgtttcatataggtagacatgtttctcatcagaaccattgtggtttgaattaggaatattttcagacaaatgtgcagtagggactatatgcatgatccttcctggaggataa

SEQ ID NO: 42645 - DNA, 477 bp, Glycine max
  Clone ID: jC-gmro02910051f07d1
accggcaaaatttgcaaaggcatgattgcgtgaatgggtggtgaaacaagagtacgatcttgattgaggaagccaaaatacaggtacccctacttcctaagtatcataattatgaaaaggaaaaataggaaaacttaatagaataatccatcccacttattatctgaatattttgactagatataaaaggagcgaaaataagttaattttttttgtcaaatccaagcctcaaacgaaaatcctcttccataagaggaagcccatctcgcagcttaacctttggttcccagccaagcaattccattgcttttgttatgattggttctctctgtcgcggatcatcaggagtgttcttcactacctttatctccacatctggattaataagctcccttcactgtctcagcaagttctagcattgaaaatcacctggatttccaaggatgattggtccaatgtcggatccttccatgagac

SEQ ID NO: 42646 - DNA, 341 bp, Glycine max
  unsure (1)..(341): unsure at all n locations
  Clone ID: jC-gmro02910051f12d1
ctaccagtcgaatgagggtgtcacacgcgcctanccaggtcttgagttgtgcgagatttgacaaaccaatcaaatcgaaacaagggtgatgttcgaaatgctgcctttaactcatcccaggtcccatagccaagtttgtgcaccatgcatatcatgaatctgtcacattcttcggtgtacaacttccctttgttttgcccatactgtatcttcaactctagccacggattcttgtagcggtccaacttctttccaatagccttcatgatctcatctttccgagaaattcttgcctcccccctttcaatggttttaataattctgtcataatcatttaattc

SEQ ID NO: 42647 - DNA, 562 bp, Glycine max
  Clone ID: jC-gmro02910051g02d1
gggaagatatggataattcagattcaaagccattatgatacatacatacggatgcgaccattatctttttctatgtacaattattgttattattccatatataaagttttctcctgaacttcagcctacggaataaaaacagcaaagtgaataagtgagatacataataaaaacaagccgtatcgggccgggcccaaaagcaaaccacgaagagcctacaacacttgagtgggcccttttatttgggtcatacattttccacagcccatcatgtccagctgaacgcaattggactaccaaccttatgcttcccatccgtccattccaaacgtgcgaagctggtcgtcccagacggcatcgaagtgtatgtaaacgacaccgtatagtccttcttttcgtacaattccgtgaaactcaacgtattcggttccaccacagtcttcacattcgaatcccccaacgacatcaccgaagctttgtacgttcccggagcttccacgttagtcaaaaccctagagtacttcacggtcttcagagtattggaacccttccccaatccccg

SEQ ID NO: 42648 - DNA, 388 bp, Glycine max
  unsure (1)..(388): unsure at all n locations
  Clone ID: jC-gmro02910051g03d1
gactaataaaatggaaaaagtccttcgaaaataatcaatatgggcgtaaaaaccaaacatctgaaccactcgtaagttacataaaatcacaacatagaactccaatgcttttgtacactgtggtctgtggaccaaaagaatcattcgcaagtgcgaattcaacttcttgccataaccgtagatttttctgttcgtgtttgattaaaaaaaaatagtaagaatgatcaaatctataacaaatcttcctcgaaacatttgttgcaaactctgggatttcattatttccaagccacggggtcgatatcatccctggctggcttgggtaattcaagccttttaggtantgnntttgtcctgatccataagggctgggtctggggctgacata

SEQ ID NO: 42649 - DNA, 500 bp, Glycine max
  Clone ID: jC-gmro02910051g04d1
ggaattgaatgctactaaattttcattacatgttttggggaaagtatggaagtctacatcatcaaagtttgacaaagatagttcaaactttaaagcatactaaattgactgttcaaaagaaaagagcaatggcaagaaaaaaggaaaatgttcaaaagaaaaagggctatagcaaaagaaaaaagatacactgggcagagattgttccgtactttacagtttaaccatgaggataacaatgacttgatgaagctttcaacattcctacagatatctaaaatggagattaaatcctatttttcttcccacacatatctcttgtaactattcacaagccagttttgtatcaaagctagtcaagcatatggcaaaggcctgaaatgcagagagggggtatcgatagtccattgtaaacatatccttgccaaccttgccaaactgaagaatgatcttgtcagggtcagaagaagattgtgttggctgagatggtgtaggtcctg

SEQ ID NO: 42650 - DNA, 453 bp, Glycine max
  Clone ID: jC-gmro02910051g05d1
acgccaattcactggattgagaacaaaagggaaacggggtatgccagcatacaggtgataattatatatcagctccacaaattgataacaaacagtagtaacattaatgggacaatagagttcaacacaaaccaaacttattttcaaaggtcattacagacccattacacatcacatttcttcttaaaatgtttgggaaaatccaacatcgaacatcacacagaaatcagctccagcttaaaaccccccacgaagacgcaacaccaagtgcagagttgactccttctggatgttgtagtcagcgagggtccttccatcctctagctgtttgccagcaaaaataagcctctgttggtccggtgggattccttccttgtcctggatcttcgccttcacattgtcaatggtgtcggagctctccaccttgagggtaaaagacttacccgtaagggt

SEQ ID NO: 42651 - DNA, 477 bp, Glycine max
  Clone ID: jC-gmro02910051g07d1
aacaatgaaaaagtacatcaatacaaaaaaaatggggataagggactaaacatacatcaactctgttgtgggtagcacaagaaattctgcttcttattgcaagagcatgatctaccaacgaagctgaaaataagaattacaatggatcccacttattccaacacacatactacaaccataccatatgggatcactcatatgcagccagacaccacatggcatagcataactattcaaaaaacatggcatcgcataaataaccaaacccaaaaaataaatgatacaagattcatccatgaacaagacaagattcttagctattaacaaatgcacaatgctttctgatctctccctctgtccctgtcttcaccttaattcttcccatttttctctatggaggttgcaaacctagcaaagaatttttcacctgacccttcaagcaattcaatgatttgagcctttgtaactggattagtc

SEQ ID NO: 42652 - DNA, 393 bp, Glycine max
  Clone ID: jC-gmro02910051g08d1
ggggggggcacacaaaggggcacatggggttatttgatatcacaattaacgaaaaaagagtccaacaccatgggaatatatatgcccacattacaaaagacaaactatcacccaaacttaaattagaaaatcttaacaatcagcagggcaatatattgcacaaaacaaaacacttttactaccacagttcaaacataggtatcaatgagggaattcctcatctcatccacaattgcactaggctgggcttctcttaacttgaaaacactttcaatcacaaatagctccgttgcgggggggtcggaaccacaaaatgcgggccaatcattaactggcattccagccgctattactttactaccccgggttacgggcccaggcaccaaaggaacc

SEQ ID NO: 42653 - DNA, 325 bp, Glycine max
  Clone ID: jC-gmro02910051g11d1
cttctgttcgaaaatacaaaactcatactggggttcatcgttaagaacacgataagaaaatgtcaaaatgctaaatccagatgtggcaaagcacaggtgcatcataacaatgataggacacgccgagcacacccattttagcacaatagattaaatctgataataagacccctaatgctactagtcctgctgaaagcatttaatttaaatttaaaatccaaggactagtctggggaaacatgctcacatgttacatcaatgactttcattatataacaggaagagataccctgtagcaatattataaggttcaaaacatatacac

SEQ ID NO: 42654 - DNA, 258 bp, Glycine max
  Clone ID: jC-gmro02910051g12d1
aaatcaaatttttgcacggggccagcaagaacaaaaaaataccagtcttgatccaaaagtttttattttccaaatgaaaacagaaaatattaccataaaatgtcatttaaagaaaaagaaaggaaaactacatatataaataacagcacgaagaatgattgattgctctaacatacattcacgttggccattatttgtgaagcctcaggaggattcatcgtattgaatttttaactaaagattgaccaccgcgtgctt

SEQ ID NO: 42655 - DNA, 525 bp, Glycine max
  Clone ID: jC-gmro02910051h01d1
aaaacaaatgcctgttattgataattaggctaaaaggccaccggacacgtattattattttaatataaacgtacacaaacaaactctaaacgagttttttttttttggtggttgttgttgttacaaaccccaagcaagtttgaaaagtggtacacaataatgaaataatatatgaggcatctcagatggccacactatgcaaaacaacagtttcaatggtaagttcaggtccaaaaccgaacaacacaccccattcaagtccttcacctgtggttttatgtccattttcagcagatttcctcctcatctcatccaagatgaaaagaacacaagcacttgacatgttcccatattcactaagcacatctctagtggccttcatcttctcaggtttgagacccaacttttgctcaacttggtccaaaatcgcaggcccaccagggtgtgcaatccaaaagatggagttgtaatcagagatgttcaatgggttgaaagcctcaaaaagtgccttatcaatgttttttg

SEQ ID NO: 42656 - DNA, 563 bp, Glycine max
  Clone ID: jC-gmro02910051h02d1
acaagaacatgtaaatttttcatatattggaagggcactttaattacagtggaacaagaagtagctagccaagacacaagtagaagcccccaaggtcatgcaagtaacaaaaaacacgagcagaccacaaaaagatcactacgaccctctgatttcactgcctaaaatttgcaaccctcgtgtctcagcaaaacatccgcaaatgtcaaaaaatccattgcagaagcagccaaagacactagcgaaacataaacctaaaaaattacaaaacataataagtacatactaaaacccaaaagcagagcaaaaccaaaccaaccatttgacataacgaaaattcaccgagtcatcatatagcttcccaatcaatctccacagaagggaacttctccaacccaaaattctccatttcatcccactgattattagaatccgagaagtccgagaaatccaagaaagtaacactggattcaggcgaagaagattcaccagaaaacattgggttcttgtgctcgaccttaaaatcctcgaactccggataaacatattcagcgttcgatttt

SEQ ID NO: 42657 - DNA, 542 bp, Glycine max
  Clone ID: jC-gmro02910051h03d1
aaaaatcaaattaaatgattatttataccattttcacttgatttgtaatgcaatcacagaaaagttattggcaaacacaagttagggtgatacattaatcatctataagtgtaactttgatctcacccaagaaaaatgaaaatcaatcaatattatatacaccagaaaatgaacaaatctacaaaggcaaaatgtaccttttttccatcgtgtctcctgaataaggcaaaaggtaaaaacaaaagagcactgcagtgtgcagtttttcgtgagaacctgaaatactaatatgaacaaatgaacatctcattccaacgatcatcacttttgtcaaaattcaactacaaagttgactacacaattgctggatctgggaactggttggattttccatgaagtatgtactgaatttaccagtgcttgagcatgttacgttcagctggttgccaagttggtttgactcgcaatatgctgcctctgtatggcagctccattttgaagttggaacgcaagacagataatggcaccaggagcagtgatca

SEQ ID NO: 42658 - DNA, 385 bp, Glycine max
  Clone ID: jC-gmro02910051h05d1
ggaggaaaaatgtttgaattaaaaagcttagtaaaccccttttccaagttccaacatcctgaaggcaactaatttacatccacatcaaagggtacttgtttttccccatcctctccttggagagaaaaaaaaaggggagagaaggggggcttactaaggtacatttctataatctggataatcccaaaactttgttattgaacactaacattgacattcacatccaaaggagaaaaaacattccctgtatatgattcaaaatcagcagttgacacttccaagtcgccatcaaataagcttccaccagttgacgacgcaccattgtctgaatcagccttcaccccatgaaaggaatccccagtaaccagcgcttgaagcaacttgg

SEQ ID NO: 42659 - DNA, 529 bp, Glycine max
  Clone ID: jC-gmro02910051h06d1
gataataatactaaatatttacattgtttcgagaagaaacacggctcggtattgtgaatgaacttcaacagccatcatcatactcaaatccatctggtattttttttgtgtagaagataataatcacactcttgaacaaaatgcagttcaaggagctgaaaaaacaagccatcagctcataacacaaaataaaagaagaaaaaacacccaataaacaaaaaattcaaagagtgttttgaatcaccacataacctttaaccaaactcattccatccaagcaccttcaccttccttcaaatcaaataaccacacctaaacttgtgcatcctatatatgtaaaaacaactaccaaaaaaacgtacaccaccgtcttcacatgctttcatgtcgacctccaatcaaaaatggagtttaattccgataacccactttgatctttaatgcaaacctctattacacacatgagacccccattctgagcttactacggggatccaagttgatcttcaatgcacgcattcacaccaca

SEQ ID NO: 42660 - DNA, 499 bp, Glycine max
  Clone ID: jC-gmro02910051h07d1
gaactggaacataagctctctcatcatcttaggggggcagggactaggccttgtctcaaacacgcataaatgtaatgacaatcatcacacaaacgctataaacaaagaatagtagtaatgtgcagaagagaggaagagtagataatatggagttttctattgaagcttatttgaaatactaatataatcagatgagatgagcataaaagagaatggcctagtatcggctataaacaggattggatgatgaattttcaacagcgaatgtgaaactttgaacagttgccttcaaagtactgaggactatagacagaagtaatggaggcttgtgaaatcacatccaatagataatgagttattttcaagtttgcattcccgtatctcgcggctttgtctggtgcttctgctactgcttagagggggcggaactctgacttgagagttgcacattagatagcgaaacagacccaccttgtgagaaaattagacccacagaagt

SEQ ID NO: 42661 - DNA, 489 bp, Glycine max
  Clone ID: jC-gmro02910051h08d1
agatcatgatattgttgtaactttattatagttttcttcttctataacagatcgaaatcattgacttattggcatagtaataatttttttattatgatgtaagacatatttgatgattttattggcatagtaatagtagcaataataataacaaccaaatcagcagtgttgtcatgttcaataaccaaatccattctattcatcacttctgctatgaatccaccacaagagattggtcaaagagtttccaccatcaaaacctttcaggtttcttatcttctgcagtgcactttcattgtcataaaccccttcaagggcatacacaaaccccttccatccttcaccaacaccaccctccctatccaaagcaggcaaagtccactccacaagctcctttacaaagtcaacattggagaaaatggcttcagaaataggagccaatggttagagctgaatgccaagcctacactctttccactcagcaggagc

SEQ ID NO: 42662 - DNA, 395 bp, Glycine max
  Clone ID: jC-gmro02910051h09d1
aaaaaatggggtattaagggctcaaatcacaattgtccaccaaactcaaatcacggaaagcaacattattaggatctttttgcaataagacccacttccaacatgtaacaatacaacatttatttttttgcaaactacagctaccttgattgaggaccattttacattacatccttcactcaaggactccattgtccagttttaacagagcaagatgtctaacttatgatgttaaacaagccagtccagcaagttctggggggccttttttgccacctttacggttgctgcatcttcagggttatatctcacagcccaaccgggtgaaactttgggaaatattttaacaaaactggcaaccccaaatttagcagctaggacttgttcaaattgtt

SEQ ID NO: 42663 - DNA, 478 bp, Glycine max
  unsure (1)..(478): unsure at all n locations
  Clone ID: jC-gmro02910051h11d1
ataaatgaatctcctgaattctgcaattgatcagctaaaaggcatcggggagtaatacaaagtatcaagtgcgctccagctagacattattctctcttgtgtattactttctaggttctcccaaggtgtttccaaggagtggttatttctccttaaatttacatggacataaagacacgcagagacattaacagacgtccacaccttttataattggtaggcaactctattttaaccatttagctcccacctgccttggtgcttttacaaagccataaataagaaccacatgtagaaacttaattatttataggcaaaaaacaaagtggaatgatctatggggnggacggcttagctcgatcttgtcagaaattttcttttggaaggcctacttggtggatgtgttgtgagagaaatccaatgctagctgacgaaacttatgggtgagggctgatggcccacagtaaaataccccaac

SEQ ID NO: 42664 - DNA, 561 bp, Glycine max
  Clone ID: jC-gmro02910052c01d1
gataaaaggattcaatggtgttatattataaacaacagttggcatgctggcaatgaatgatatccattccccaaaagcatttcttccaatgtgatacacattattttgaagtgtttttattattaaagcatacaacagaaaatactaatacaaagaagacatattataacgcaaacttgaaaatgaatcaagttctattcgtcaagctcaataatcttcacaactgaggagtcaccaactttctggcatacaacaactcgatcatgtgcctttatgataccaaaagccttgccatggtctaaagcaaccttcaaaattgattcatttgttgcacttttagactcagctggatgtcgtggatctgcaagcatagggaaaagacctctcacaataagtgattgccttgccttcaaagctccagtgaaagtccatcgaagttgatttgtctttagttgaggaatgacaacggatatcacaggcatggttggacggtacttagcatcaaccttgcagccctgccagatgaagtaaagcacataataacagaagccttaaccttga

SEQ ID NO: 42665 - DNA, 550 bp, Glycine max
  Clone ID: jC-gmro02910052d01d1
gagaaattaaatactttcagtacttattattgggaacacagggtaactaatataaataacgaatccccctgacttgataataatctgttggcccttcttaaattaaatgactgaacaatcggagcgaatgtttccattctgtgcattcttgattccaactcggcccaatttggtcatagcagcggcgaagttggcatggaagattttgctgctactagcaaatgcatttacagtggccttggatcttgagtccgtgaagagaacttggtctgaagagaagaggcccttcccttgctgaagattcttgaaataaacattgtcgaatgaccgcggagtgcttgggtccatatcgattgcaatccttggatccacattccttgggcacattgactttagctgggttgcgtatttttcgttcagtgtagggtccactcgacttttgctcttgaaattgtatactctgttcgagaatttgttgcaatgggagaatccaacagtgtgagcacctgatagagctatcattttcgttgggtgaaaccgttggccgcaa

SEQ ID NO: 42666 - DNA, 491 bp, Glycine max
  Clone ID: jC-gmro02910054a01d1
atatgactctggtgttatttttgattttgcaaattaaattacacaatcacagccgtacatcacacatgagttgggcctcttccaacttaaaagcagaggataacattggcccatgacgcgacacatgcaccacctaataatcataattttacatctttacatacaaaatacaaagactttaaattttaaaaagaagaaaagagataaacagatcatcttaatgaaatgaaaccaaaacccacaaacattggcttgatttttgttgttgttgttgttcccaacttgattaagcatgaaccgtttgattgaatcacttggacttgaagggaatggccctgattacgacctggtggtagagtgctgcaagagctgcaccgatgaatggtcccacccagaagatccagtgttcatcccaaccaaagtccttgttgaagatgatagcagcaccaagactacgagcggggttgataccagttccgtggatgggatgg

SEQ ID NO: 42667 - DNA, 239 bp, Glycine max
  Clone ID: jC-gmro02910054a02d1
ccaatgaacatgacaatggcatgggttattattatacttcacaatcagcatttttttgttcaagactgataataaccattaaattattggcatggcaacaatcggaaaacgagggaagggaatagaagaaaacaatgaacaacccttgccagttagttgcaccaaccaacagggcaccaaccatagtaccaatcaaaaggtaaaaagagagagagaccaattcctactaagaaaagcat

SEQ ID NO: 42668 - DNA, 286 bp, Glycine max
  Clone ID: jC-gmro02910054a04d1
ctctactagcatttatccatgcaaagtgaactgatgaactaacatagctactattaattaatcaaatactacagtgataaaacaacccaaaaacaaaaccaaatttcaagcattccaatcaagattacattacaaacttaataacaaaatgatatttaaaaaaaatagaaagaattccacaaggatgctcactattcagcatccaaattatcatattgccaagggttgaattctggtctgatgtcaggcacttcaatgcactcagaactatcaacggcagcacaat

SEQ ID NO: 42669 - DNA, 392 bp, Glycine max
  Clone ID: jC-gmro02910054a05d1
ggcaaaagagcatgataaacggaggctataaatgcaaatatggggaaaatcaatccaaggtttcctcctgaatccatgccccaagaacttactgattattctatgaaagaattccatttcgaaaacagactctaagctaccgggagtgttctaaatacactccatataggcgaacaaatctacaaactgaaaatgctataagttttaacaaccaaactcatataagtagaatttctaagcaaaaaatgcagtatctttgaggccaatttcacttacacctgctgttcactagaatcatacccatttgttccattgacaccatgtgctgtcttgctatctgaggaccttctacttaacacaacgatcgatgtgtaggccttcaaaagcatcag

SEQ ID NO: 42670 - DNA, 368 bp, Glycine max
  Clone ID: jC-gmro02910054a06d1
ggtaaaacaaaattttcttccttaagaacaatggattacaaagcagtgttaaacaaaaaaagaaagggtaaatctacatattttcaagaagtctttggcttcgggaaaacttttttctccatgaaattgatgaaacgcttaccatatgtttttggttccaccactgatataatcatagggtcatattgcagtgatttgcaggcatgcttaagtttcttttttacagtgtattcttgcgatatattaattatgcccatgtatagcgaccacaacattaacctcaaaaaggtctacttatgattccttcaccttatccccctgaagtttgcgtgttgcttgagccggaatgtttacttctaattgcaccc

SEQ ID NO: 42671 - DNA, 495 bp, Glycine max
  Clone ID: jC-gmro02910054a08d1
aagcaccaagggggcttggtatacataaacataaagcatagtattacaagggactttgtttgacacaaaccttaattaattgatcaattatcttagtacacactttaaaatggtcattattaattataattatatgatgagttaataatatattggggttagggcttgggataaacgaccacttttcctggggctcttgaagtttttaagtaggaaatggttttaataacctgagaaaatggcactggagttttggcatcgagtataggcttcaacttaccactctcaaaggaagggcttaaattctctaagatagatccctttgaggggagcacaaaaaacatatctggtggatgtccaggtggcactattgtcacaactttcccatcttccttaacggccttaaatgctttatcaccttgccctactacattatacactaggatcgtttttttctggagggtcttgaaaagttttccttttgtgtaaccaata

SEQ ID NO: 42672 - DNA, 489 bp, Glycine max
  Clone ID: jC-gmro02910054a09d1
attggccgctggaatttttcacaaaagccattaatttaggctaacaaaatattacagtaattattttcacaaacaaaaaaatattacaatcagattagcaactgtatttttcatttgattctgtgcaccgctgatgtcacggcataaataggttttactctaattcacctcatttgatctcagctacctatgccgccaatagaattggcaagaggaattgaagaggaagtacaaaaaggaaaccagaaacctcgttcctataccattaactgtgccattccattgtctgacaaagatcaatcgccttgtaaacaataaagctgacgaatgtttcctgaagcatataaccagtccttgaagtagacatgaagtgcagatgacaattctcgtttgcgactatcttctaaaggtgcttctcgcaagaggtgccttatctcccctaaattattttgatttttatgctgagataccatatacgcatttggtaac

SEQ ID NO: 42673 - DNA, 581 bp, Glycine max
  Clone ID: jC-gmro02910054a10d1
agtcctgaaacatcatataattggttctgtggttctacattcaaagacattgtgagaaaatcaacatgaaaaagactaataattgcagaagtcaacttcagaaactgaacaacttgtcaaaggtgataccaactaccaagtgccaccttaaactaagggttcagcagggccattgttatcctccaagctaataagggctaaactaaacacaaagaaacttggaatctcaattatgcaacctatttattaaatccaacacacaggggtttgatcctcataacaagcaactaacaaccaaacaagtagtatgccaacttcgatgagcaaaaaattcacaggcttcaaaaacaaaagccagagaagcagcattgttttgtgacaaacaaaactgcagcagcaaatctatgactactaaagacctggtatgtctaacctctacaccttccttcttccattggaattccccttgttcctttgttcttgatcagtctccgacacagaaaatcacctccgtttccatagcacacgttgattacagcagcagctgcaacaacagcttctggagaccctgttgcaccact

SEQ ID NO: 42674 - DNA, 286 bp, Glycine max
  Clone ID: jC-gmro02910054a11d1
aaatccaaactcttttccatatattatccaacatgttacatgaaaggtgaaaatatataaggaaaaaagggccaatcaaaactatgaatcaatggaagtaattgttgttagagactctttttttggcacatataaatgaaaaatatctaagccgcactgtaatttctcctcaaggatttgtggctaaaagggggaggagtggatttattacttatatatagagagagcttttaactccaagcttctttcaggaaatcaatacttttttccttccaagagtcattta

SEQ ID NO: 42675 - DNA, 568 bp, Glycine max
  Clone ID: jC-gmro02910054a12d1
ccacaatacataataatttattaaagatcgagaaatcgtaaaacatgtccatatgaatcaccaatcatacatgatacataatttaatattaaaaattcaggtgcttcctcttagaagtccttatcttcaggcttgagccacctctactgtttcagaacccttgtttatttcaacaccgtttacacctttgtcttgattggtaccacagggttctagcttggtccccttctctgacttcttttcttcatggtctgtttcatgctcacaaactgagatgccaacctttggttgacataggacttcttcggtaatccattttctcaattgactggtagccacttcatctaatcgtggtacggtgtgaccttggggatgccttattatcaggggtttgtcaaatgcagatgtgagatcctcagaaggaagtttcagccaatctttttccccaatgaaatgaacagatttagctttgatggtgtctttgtaggcaacatcgcatatgctgggatttctgaatttgcatcctgatattgatatgagaaattttattgggggatgctcctttagt

SEQ ID NO: 42676 - DNA, 362 bp, Glycine max
  Clone ID: jC-gmro02910054b02d1
ggtccgtgaacatgctccatttcatgaagttaactgaggtacagaaaaatcacaagtgtatagtcctcaaattgaagctacttttataaatcagatgattaactaaatctctgggcctctaaacataaaaccaatatggaagacttggcacaaaaataactttggaggaagttacacattcacaccaaacaaattccttccagcttcagaataaacttcttgattgcgtgaaagcagaaattcaatcaatcagctggatctaattctcttctggttgacttttccatcagacttcaaagtcccactggagtcaccttcagaagaagcctctctggacttcggtaaggaattaggaaagatca

SEQ ID NO: 42677 - DNA, 478 bp, Glycine max
  Clone ID: jC-gmro02910054b07d1
aaagttcggaatatcacaaaaagatttggcctaaaaatagaacaacaataataatctcaagccccaagctaaattatcagtgtcacacggaaccctcatgttttgtaaaaaaaaaaatgacccagtagggaacatagagagccaaaactttgattacagtaaatctcatttcacgttgacatgcaccatgtcagctataacttttatttccaatcaacaactacttccatgggaataaaatgtagaaactaaaacctcgtgccaaaaaattttggaaagaatacaacatccatttgttactctcacatggctgacagggtgttagtagaagatgttgacattgcagctagaacttcagtaaccgacgccatgacacttagagcagctttcaaaacctcctgggggcattctggcttcacaatggttcgaacctgttcaaggtactcctgaagttttttaatgcggcccatgtagtcct

SEQ ID NO: 42678 - DNA, 490 bp, Glycine max
  Clone ID: jC-gmro02910054b10d1
atccctaccaaggctgactcatgttattttgacaacatttacattggtcatatgagacacggttatacataggtctcctttccaaaacaaggtgattctcagagttcataagctggaaatttagacaaggaaggatcactcatttccaaaaagaggtgagccatgccccctagcccttcaaacattgaatatggtttatcacccccatgcattttccctcgagatatcaacttatgagctctggcaagcaaaaagcaagcaaaagctttggccctgtataagtactttacatacccgggaagttggtccagtgacagaaagacatatgcattcccactaataccatggcatatcccaacttttttaagcggaccacgatgccaaaccacttctgctgcttctatagcgggatccaggaattctttatatttaaaaaccttatgtgttttgacaagggtgagtgccattccaggagctccatgacaccaat

SEQ ID NO: 42679 - DNA, 452 bp, Glycine max
  Clone ID: jC-gmro02910054b11d1
aaaaacaaatatgaaactatggccttgcattaaaaaaataatccggtctaccactaatgcttatggaacatcaaatcatgtgctttgtcttctttcacatgatatgaaaacgaaaatgaactcatgattttttatactaggatgacttcgagaataaaaattgtattgagaacgcatcattattaagctagaccaacggcctactttgatgatgatctacagaattgggcagagtccccaactctgcatcagttgttgattttgcaccattgacccttgcagaagaggataagaccctctaggtcttggagctcgtgaatccgagactaggcaacatctttgaggggatcccgatctctatgagcagtaggccactcccatgccggactgtgaatggtttcagaaacatcagagtcgactatagcaatgaaactggctttcttgccgtcgtt

SEQ ID NO: 42680 - DNA, 321 bp, Glycine max
  Clone ID: jC-gmro02910054c02d1
ataaattaaaattaataaaaatatccattttttaattattccccacccccccaaaactgccaaaaaaaaaaacaccaaaaaaaaaaaaaatattaaaaaaaattttccccataattacaaaacacgctgctccacaaaaaaaaaaaaaaaaaaaaaaaaaaaaaaaaaaaaaaaaaaaccccaaaaaaaatatcccccccaaaaaaagaaaaaaaaaaaataatttttaaaaaaaaaaaaaaaatccgccaataaaaaacaaaaacaagggattatttttttttctaccaaaaaaatctttataaaaaaaaacccccaaaa

SEQ ID NO: 42681 - DNA, 516 bp, Glycine max
  Clone ID: jC-gmro02910054c03d1
atccgatgtcgaaaagcacttgaaacataaatgccaaatagggaacaaatactacccaaaaaatactcatccaacaaaactgtagaacgatgaaaaattctgtcaaacctatcgaaagacaatatattaggtgcgatcagaaattcactgaatttaagaacaactcaaaagacacggtacgatttccccatggtactcttcagatacaggcagcgaacgttctgccaattctttttcaacaaagagacaaggaagttaacactcagttgtacattttggaagatttgcttttcctccatgctaacattccccacggctactcccatgcaaagcaccttcttaagctggaacttcaccatggccttggtctcattaacctttgactcgagagattcttggtgagtcacaagcgtagggaacttccctgccttgttgagaccaggtcccaagagacgaggaatctgcttgatgactgcttcagaggccaaaaaggcatgatattttatggctagtttt

SEQ ID NO: 42682 - DNA, 499 bp, Glycine max
  Clone ID: jC-gmro02910054c05d1
aaagaaacaccaatcatcgggcatttagttggattgaacattgagagctttaaaataatagcagtttcatattgtcttccctacaaacaacaggttacataaaaacggaaacaaacagaaccagttttatagaacagtaatggaaactagatctagccggaacagaaccatcccctcaaaagagacaatcaaccggcaacaggaagttgcggcatgttatacatcttcaagccaccgcaatacattaccaagttcaaaatcacatatcatgttggccatactcctcctcctcctcttcctcctcatactcatcctcatcagcagtggcatcctggtactgttgatactctgacacaagatcgttcatgttgctctcagcctcagtgaactccatcttgtccatgccttccccggtttaccaatgcaagaaggccttcctcctgaacatagcaaagaattgctcacttactctacggaacatctcctgaatggaggtaga

SEQ ID NO: 42683 - DNA, 357 bp, Glycine max
  Clone ID: jC-gmro02910054c07d1
ggacttaaaaaagcccactgcatattcatcaaagcattattaaagcccactggattctaacagcacacctccctaaaaaggggagattccaggttttgcccaacatacaccacacaccctaatttattttttatacaatcttttggggcccaagatgcacatgcctgggctaattaaacaacaacgtttggctgataggccgtgtccataaataaattggggacccataaaatggccttgcttccaaggaaatggcaaaccggggtagttccaggatcaactcccatgagttcatgaagcctgtgatgattcattccagaagtttctgaggggcgaacaacaagtggctgggttttg

SEQ ID NO: 42684 - DNA, 480 bp, Glycine max
  Clone ID: jC-gmro02910054c10d1
gaaattcagtagatcaatctaggagggaagaagtggctgtctgtcatcatgtccaacacgatgagtggcctcctcatttgctccagctgccatatttataaaggattcctttgacctttgtttgtcatgaacatcatgcagttccagcacaccattttgttcatctttaacttttgaaagtggtgaaaagaactggtgcattgagatgaatacaatagagatgccaataacgaagttcattgttaaagtatgtccaaatagtacagcagatgctataccagtgaagattgttgctactgttgatgagtacttcttcaaaattgtatctgcatatttgaagaagaaagaggataaaatcccttgggcagcattgtttgctatcaaaagcattgtggcttttgaatgaccttgtaggatatcaaagctgctaggccctttgacaacaacagtcccaagtatcccaagaaaattgaatatagc

SEQ ID NO: 42685 - DNA, 501 bp, Glycine max
  Clone ID: jC-gmro02910054d01d1
aaagaaatgtattctatacttctcttcatttaaaaataaataaatagagataattacaaaataaatgagtcaaagaaatcaataaccctccaaagtaatcataatgatttattacaaacagtaacgctaacgcatatttctcaaagcctaaacacgtgctacgaatggataacaaagaagagaaaagctcctaaaaactccggcaaatcccagttaaatccaaatcaaggcttcaccagaaacaatccatctccgtggtccattcagtatcctgtggggaattcgcagttaccatacttagggggctgagtgacgacataagcagtgccaccaaaatcgcacgtgccggatgcacgtgccttcttctgatagtaactgttgaaggcgtaggaagcatgtgcctccaaggtgttaggattgtaacacgtggcacctggttgaattggagtgcaatcaagcccaccctcttcgcaagcgtagttaagagcgttctgcactttt

SEQ ID NO: 42686 - DNA, 489 bp, Glycine max
  Clone ID: jC-gmro02910054d04d1
gaggactaaagacaagatatgtcatttaacaagacagaataattcctacaggtaaagtgcataacaattgagtataccatctaataatgaaaataacgcaaataacataatgcttaaagcaacgttcatatcagaagggaaaaatagtttgaatcccatccaacaaaaatcatgcgattaaaatccaattaaaaaagcataaagtaaaataagtttttaaaacaggtatctggaggaaagcaactacatttagtccacttcctcaatcttggggccagcaccacttccaccagaaggaggagcagcatactcatcctctgctgcaccagcaccacccacgtttggaccagcaccaccttggtacatcttggcaatgattggattgcagatgctttccaattccttcattttgtcctcaaactcatctgcttctgcaagctggttgctgtctaaccactggattgcttgctcaattgcatcctcaatctt

SEQ ID NO: 42687 - DNA, 572 bp, Glycine max
  Clone ID: jC-gmro02910054d05d1
acataacacaataccaagtatatatgtatatggactcatacaagaaaacttgaactagcagtaatttgtaaaacacacgtacatcttctaatatctatataattatgctactaacttattagggttccaaacatggcccgtatttctttttctatatttgacatactatattacaagattaagataaacagccgattatttatggtactttatgccaataccaacttcccagattcacatattgaacgttacgttaattgggtatgagcttgaaaggaggctttgaaagagatggggatggatcatatcgtccataatcttttgtgttagccctaagaagcctctcatggatggttcttacttcttccttattcagtggtttccttggtgttccctcttcgattgcattcacatctttagcgaagttcttgatagagttggatcgtactctacctgcaaaggaagttgataaaagtgatccagatatgaggagaaagaggagggtgaacttcttgagaagcatgagagtacccataatgatttgtgcaacaacttgataatattttctacgt

SEQ ID NO: 42688 - DNA, 446 bp, Glycine max
  Clone ID: jC-gmro02910054d07d1
gggggcacaaaacataactttatccgacgaaattcaatgtaccattaactggggcaaatcaataaacaaacaatttattggattaaacactaaaaacacttttccatcaaaactcaattaaaagcagaaaaaactctaattaaacagtcccaatcccatattatcattggactcttcctccacctttttttcctttttctcaacagctggggcagcattaactgcggtagcaccacctggaggggcagttggaacaggaccaccaccaccttcaacgaatactggaccaccactattacctggaacacaacggaggtaggagacacgggagagaaagaggactgaacttcaccgggggaatcaacggggagagcgggttgcaccagctttcgttggagatcgaagggggaatcggcggaggcctctatgtccccggaatggtgctt

SEQ ID NO: 42689 - DNA, 345 bp, Glycine max
  Clone ID: jC-gmro02910054d08d1
atctattgttttggggtcttgccttaccaaatcgtttttcttttattatttttttttttagaacacaaaaaaaaagagccccgaaatccccatccccgggaaattatacccttttgcggccaaagaaaccccggctccaaaaaaaaaattttccgcacaccggcggggcatacaccagccccccacagaaactgctgctgcgaggaccaagaaggggatgttcatgctccgtcttccccggcgcccccctcttctttttcccaccccgggggggggcatcaccaaggaccttgtccgggaccctattctcaagcccccccgtgggctccccatgggggtgaaaaa

SEQ ID NO: 42690 - DNA, 538 bp, Glycine max
  Clone ID: jC-gmro02910054d09d1
ggagatgatgaagactgcattacatcaagtcttaaaccaagagactctcataatctcattgactagagcagtctcctttatggcatataatcaaacacccatgataactaacaggttgaaattgaaacaaacataaccaaaccttattctacagggtgggttacaggtttaagcaaatattgggtaaaaacaagtttgaaaaatactcctccactttatcaagtcttataaatactgatgaattgcaccttttacagacatctaatgatgtttagttcggctccttgacctgttcctgcttttctgggaaacactagcactgcttctatgcacactggaggaacttgaccctccttggccaccacctttctttagtgctcttctgtaggagttccggctgctgttcccaagtgcagctttggcaacactatcagtgagtatttctcgtcccctttgaggcttgatagattgcttgttcaggtacacaagctttggaagaagaccacaaactactttgcgcagctggtcatcactgatg

SEQ ID NO: 42691 - DNA, 473 bp, Glycine max
  Clone ID: jC-gmro02910054d10d1
aaaataaaaatatatcacattcatgatatccctttttttaaaatcttattcctcgtttttcataatttattatttatacaacatcccagttcttcttcctctatagtctttagcaaaagagaatttacacgtcttacacgtcacactaaacgacaaaagcaggcttacagaatatagaaaatttagaaacactccgaagtccgaaccaaatccatcaccacctctattatccattccctgcttccgttcccatcgaccaatatctacaaccattacacaacctcgccacgtggcagtcttcagacgagggtcttgcatgtcgaagtctgcgggtcccacatcgctggcacgagatacctccttccattcgcaccatgcgcattgtaactcgccccggttgccttatccacgagaacccgacccggataacccgggtacgacccacttccgaaaacaccagtgcaagccgaaac

SEQ ID NO: 42692 - DNA, 559 bp, Glycine max
  Clone ID: jC-gmro02910054d11d1
aattcagcagaaaatccattataaattgggagttggaagggatcaataagaaattacaaaggacaaatcagttcacaaccaatattatggagaagaaacagccaacccttgcattcccaaccaacaaacaaatgaaggaaacggggctaaggaccaatgctttttttccctttcttatttcttctgaatagaagagagtagcagacgcacgcacgctccttgttgctaacgtcttttttccgcttgtcttgaatcaagtctatgcagaaagcctcgcactaagctcggctgccacggcatcgatgaattcctctgtgttcaaataatgctcccttgacagcttggatccatgaagaataagtgccaaatccttggtcatcttcccagcctctactactccaatgcaagctgcctctagcttttcagtgaaatccaagagtttagcattgtcatccagttttgccctgtgggctagccctcttgtccaggcaaagatggatgctatgctatttgtgctggtttcgcctcccttctgatgaaccctaaaatggcgggtaac

SEQ ID NO: 42693 - DNA, 528 bp, Glycine max
  Clone ID: jC-gmro02910054d12d1
aaaatccttacgcaaactaaattaactaaataaatcgttcatgtaaaatccttacgcgaactaaaaattaactaaattcatcaaaagtaatacacaatattcaaaatttaaataaatgaagtacaaaggtcgaaatctttctggccacaatactggttgttgggttggcttaacgattagccttggcaactctctcaatttcatcctttttcttgatagcataactattggatgaacctttggctgcattaataagttcatcggccaagcattcagcaattgtcttgatgtttctgaaagcagcttcccgagcacctgttgttagaagatatatagcctgattaacacgtcgaaggggtgagatatcaacagcctgtcttctcaccactccagcagaaccaattctagttgcatcttcacggggaccactattgatgacggcatcaacaatgacctgaattgggttcaggtcagtgagcaagtggatgatctccatggcatgcttgataattctgacagccatgagct

SEQ ID NO: 42694 - DNA, 492 bp, Glycine max
  Clone ID: jC-gmro02910054e04d1
ggctacagctcacccaacatatgggcggtggggatgaagatgaagaaagcacgtcaaaatgtcaaattacacgaagcaaattctacatttacggcaaaaaaaaaaaaggccacagataaaaaagcaaattcttttcttttttaatttcctttttttctctcttttggaactcgttgtctaccttatggatccacagcttatggatgaaaccttgcaaacgccagctgatggggtgagtggaacatttttgtagcatgccaccagttcctcatttgtgtgcaaatcgacttgcaatgtttcccaaactttcttctttgggtttaagagtccatcaggattaccttcatacccagggaatggaattctttctcctggttgagcagaactgggaggctcaaccaactcaaccttggtgtgatcaccatcggaagcagcaagaaccattgcttgagatttaatgccccccatggttactggctttagggggcaaag

SEQ ID NO: 42695 - DNA, 533 bp, Glycine max
  Clone ID: jC-gmro02910054e05d1
aagaaaaataatattcatcaatgattagaacgctgtacactgggaagaagaaacacatgagcccaaccatttaaaatttctttcccctttgcaacatttctcccagggaacaaacagaccaacaccaaccaagcataaggccccagctatcatcaatttccagctggataaataaataaacccaacatttttgtttgcaacaaaagttaaatttattaatagtagtaataatagtaacatattaaatactataatcactagccaatcaagacacacccctcttcgagtgagtgatgaaccttgcaatttgcatcaaccttttccaagtttcaaccccaattaaccgaaattggggatccaaccaggtgcttcccatcggaccattctacccttccaaaagcgttttctgtatgctgtggcgaacccgatgacgaaaacgtgacggtgaacgttttcttctcgttctccttgaaactcaacacttgcggttcaaccgagattttaacggacgcaatgtctgacgtcacggaagc

SEQ ID NO: 42696 - DNA, 579 bp, Glycine max
  Clone ID: jC-gmro02910054e07d1
gctagcaataagtttggtaggtgatatattgatattaataagccactctcattaaaggcaaacaaggcccaaggagtgatacaccaaaatacataaaaacataatatcatagagtgccaccaaaaggggctagtagcatttggtagctagtgcattaaattggcacaaggaaggaagcaataaaaatgtaggaaagcgacaattgaagttgaacaagttgaagctcaagggcacttgggtcctccttccttggtcttccagttgttgtagcaagggcacacagctttattaccataataccccgggggcacacacaggcatttcctgcagcacttctgacagaaaaacatgcagggcttgtggtattgggtctggctacatctcctcgagcattgtgatgggcattggtaactcttgacacttccacttccatatttgctcttgttgtcatacaagtggcctccttgttcattagcagccattaccactgtttgaagtatggaaatggcaaagagtgccaagatcatagcagcaaagaacttagccattgttgcaaacacacactatgatcttaaaacc

SEQ ID NO: 42697 - DNA, 535 bp, Glycine max
  Clone ID: jC-gmro02910054e11d1
attcaaaaccagttcctgatccattgattatgatttggtttttcaaagggattcaatccaaaaaatagtctgtgagaactatcagatcaatgtttatgtaccccgaaataatgagatgtgcaaatgtggctagtgcacaatcactaatttattgactacaacaaggatagttagggaagtttaacttaattttacacctttcagccgtacaagacttgattgtatacaaagaagactcaatatgatggatggaaacaatctcattaggaacggaacttgaggctcactgattcatagcttggaacatagagaacatctccatatgatgccattgtgagaggggaagaaatgagtttttgcgaaattgaagtgatatcctttgaggttacttcatccactgccttcaagaaatcctccacaggtttcctctcaccatatgtcaaaatttgtcttcctatatcttctgaaacaaccattcttgattccaaattcatcaaaattgcagatttggtagcctgtttggctcgattaagct

SEQ ID NO: 42698 - DNA, 393 bp, Glycine max
  Clone ID: jC-gmro02910054e12a1
cctcggggaattccaattccacattttcaagaaataaggaggcaaaaatgttcatatatgaattggaatgatttggtttcttattaggcctatcctgaagccaaaggaaatgagatcggaattcctcggggaattccaattccacattttcaagaaataaggaggcaaaaatgttcatatatgaattggaattatttgttttcttattaggcctatcctgaagccaaaggaaatgagatcggaattcctcggggaattccaattccacattttcaagaaataaggaggcaaaaatgttcatatatgaattggaattatttgttttcttattaggcctatcctgaagccataggaaatgagatcggaattcctcgggggtaccgagctcgaatt

SEQ ID NO: 42699 - DNA, 424 bp, Glycine max
  Clone ID: jC-gmro02910054f01d1
aagatacaactttttcatcttttattcttcgcaccagaacatattacactcaatcaaattgagattaaggattgaaactagcaccaagtaattaaagtaaaacgacaaaggatatctagccttacaaattacaaggcatagtttccttgacaatcaagggaaggaggagggcacacacaaacaacctctcatcctaaacccatctataaaaacattcacagcacatgcaacacggcaaaattatctacaaaaggatttagatttcaaaaaacacaatccttcttattcttctagcaatttgctagtagtttgcttaatcaaagcttgatgagcgactccaccggcctctcaagtagtcctccaacgagacgttttgctcaacgctgcacatggagagcgagtcgtcctccacatcaagcattgc

SEQ ID NO: 42700 - DNA, 437 bp, Glycine max
  Clone ID: jC-gmro02910054f04d1
ggggggaaatatgtcaagatactaaaatgagaaaaggtctttttaaccaaaggcaacagagaaatcattttttaagtccaatgattcatgggaaacaacatacattagcaatatcattcataataaagagtttttttcaagaggaagcaaacaagggcttggggtataacacatacccaactgagagtcttagggtattaacacaacagatcctgacgtttttcgattctccagggcttcgggggcttttgcagcctcagacaatgggtaagtttgattaacacgggccttcaacacaccagaagcaacgttgggaaacaccttttcagcagcctccaacagcttatcccgagggacaacatattgcattagactaggcctagtcaagaaaagggattttgcagccagggaagataatggaaccggatcaggggaac

SEQ ID NO: 42701 - DNA, 590 bp, Glycine max
  Clone ID: jC-gmro02910054f07d1
cggacaaacaacaaaacacaattatattaattctagtatcaacacagcgtagaataagcttattagtacaaaaggccaaacacacaagggaaaaaagattattatttatttgcaccaagtctttcccttccatgcaagcattccaactttcatttcccatcaccaagaatgaggtgaatgcacgttctacacaccaatgcatatgttcatccaacagttaaaatttcaaaacctctaaagttttatgtacaacattttaagcattttgttcaacctgaaagtttgatgactaaatggtattcaactattcactcactcccaaagtcttcataactcaagccttctgatatggagtccagcctattgttgtcttgttctcctctgtcaaggaagttctcattatccgtagctaggaagggtgacctagaataggtctccagtatatcagaactctgagaaaaatcagcagtcagatctgaaaggctaaaatttctgggaatctgccccagaaatccaaatgaagaaatgtctggatctaggactgtctcattcagagaatgtgagttggactcgacattagtgaatgacgt

SEQ ID NO: 42702 - DNA, 567 bp, Glycine max
  Clone ID: jC-gmro02910054f10d1
caagctcttcaatttccctctcttcttcaatccttgaccatttcatttttacaatgtttctctctccatcccattactatacaccctgcaaaatgccttattctttctattccctccctcgctctcaattaattaagcttcttcttcttccctcttaactccattcctctgaacagtaccactgcagagttggtgcttgttcgtccgagaagaaattgcaggcctcgtcggcgctgagaaaattgtgctcctccatcttcacgtactgcgtcgtcgtctggtactgtttctggaactggaaacagttgttcatcgacgaagaagaaggcgacgacaaaagcccgtgactttgcagaaccccacacgacgaaatcgccgcgttgttgttggggctgtggttgttgttctcctcgttcaagatcgcacttgagtcgctatcagaagacccatctttgaaatccacagggaacacagaaccccctcccacctcatcactcttgttgaaacactcgtaactcaactccttcgagtccgatccaggaatggcggattcacagagcgggttac

SEQ ID NO: 42703 - DNA, 518 bp, Glycine max
  Clone ID: jC-gmro02910054f11d1
catcgaacatgtcataataaattaacaaaccacaagtttccaagaggagtaccaaaatctgagcagctgtgtaaacaatatcaatctccatcaaagttattgaaagtttcccactaaagagaaaagatactgaacttctactttaagtacaacatttgactttaacacaattgaaatttgatatattgcaaatgatcttcctatagtttgcttttactgtacattgtgagggaagggtatgcttgtgagtgtaagttggccaaaggccatgcaaagtggcgtgacagtcatggtttagttcctcagaaaaacctgttatggccaagtgatgacataatccacatttttaaacaactggagctttatcatccaacatctcaactacaggagcgttctcatcattctcctcaaaatacattccatcaacagcactgttctgctgaaactcccaccctagatttctctccaacagctccttaaatttccttgtccattttaaaagatctccatcaacaacc

SEQ ID NO: 42704 - DNA, 496 bp, Glycine max
  Clone ID: jC-gmro02910054f12d1
acttcccagaatgcaccttgatttcagcaccaactgagttacaggacgaaatattctgcaggtgagtgcacactttcattcatacaatgggctgacaatccacacgtaaagtttcaattaacaccaaaaacaacggccaagtctttttctattatgtccttaaatatattaaatcaaacgaggccataatattttattatgaatgtctttctatacacaaacctccatgtcccttttaaacaatttacaataaccaaaatccagcagatactggttttataaacttttcaaccttctacttgaacaacgccctacataattagagaactttacctcttctttccacacaaacatctggcaggttgcagagcagaatatgtgaggatgatatcaacaccggcccttcggaggcacatcagtgactccatcataaccctttcttggcttatcatattgagagcaccggcagcctttattattgcatattcaccaaaaa

SEQ ID NO: 42705 - DNA, 290 bp, Glycine max
  Clone ID: jC-gmro02910054g01d1
aagggctgcaaaatacaatatattaattacagtttatggacaggctcaccttcaaaaggtgcaaaaccctatctttccaaaaatcaggcagggaataaagacgaaagcgacaaaacccaaagcaaaagaaaagtcgttagaacgctaccgtttctagaaccctctcagtggaccctcacactaattataattaatagttaattaactaattatatagtactaacaacaacctgcttttgacactcctcaccgtgacaggcggggaaagtagcaacacacgtggcattccc

SEQ ID NO: 42706 - DNA, 273 bp, Glycine max
  Clone ID: jC-gmro02910054g02d1
attacttaatctttcttacacacaacaagggaactgaatttacaaccttgcaatcgccttacttgctgcgcatacgctccttcacaaaaccctactggaccaaacacagcatcctggaggagcagccactcactctaaagtaccacaacggttctttactgacaggccccgtcacctgggatctatctgtgacccgcaccataaccttcatccaacggtccatcattataaactgtataagcgcctaaagcagtgcgccaaacacgcctatcc

SEQ ID NO: 42707 - DNA, 518 bp, Glycine max
  Clone ID: jC-gmro02910054g04d1
gaagaagaaaaaaattatgctaattcaattcaacctcgacaaagaaaaatgaaatagtgattttataaaaatgaaatagcaaactctacaacagatggcataaaaaaaccaactgaatgttgaacttgacatatctagccaggagcaggctgcattcagatcaaactaatggacattgatccattcacaaaatctgtcttttaaccagacgcattcttccttgcagcatataccctataagctgccagcccaactacgaccaccgcagctccaactgaaacagccataagagatcgattaataagcctgtggtactgcttgcggcttcttccagcttcagtttctggaatgcttaaatgaggatgatcagcagccgttacaattttacgaaaaagactgttgaaatctcctaacttcacactgatgggtataggagcctctactcccatatcttggctaaccctagttgactcctgtatagccattggaaatgaatccagatcatctttagctgcaac

SEQ ID NO: 42708 - DNA, 395 bp, Glycine max
  Clone ID: jC-gmro02910054g05d1
aaaaaaacaaaccgggtaatttaacaaaagaatatagatgtacatgattcatcaagtccttcccctcgatttaaactttgaagaatagaaagaaaaaacttacaccgaaaaggcctggatttcataaatttatacaggggttgtgtacccaagaactttccctatgatgatgtcctaatgatgggtatgatcatgtttataatgataattaaaatcagtatgtagaagactgttttaaaaatccaacaaaaaaaaggggacgggattactaatttactatgcacgatgcttatgatcccacaatgaaaaaaaccatgggtctgcaaacttgctttttatatatatataaatcaattcaattctcttatcttggtcttcagaaggtattatcccac

SEQ ID NO: 42709 - DNA, 544 bp, Glycine max
  Clone ID: jC-gmro02910054g08d1
catcaacatgaattgtctcattcattctactttcaataagatcagtcgcaacacatacaaatctttcatgattttagatgcacaaacagaccattatggacaaatatagatttgttcatgacacaaatctttcactatacagttaaaagcacaccactcggaatcatgtcattcgtaacactttattcaaatgtatgctgatatagatgcataccgtatatcctattataaaaagcaacaccactcgactatatagtagttaggtgacacattttccctcggaaacttggaactgaggaacgtgatgctcaaaactccctttctggaaacatgataggagctacgagagaccacaagtacagcagagcagttgcccaggaagtgatgattcgaacccacacagaaggccaccccacgtgaaccaacttcccgctcctccaacagatgtagaccaaccagtcagaagcattgcagaatacatgctagcaagagagaaaatcaagtggaagaaggcatatgaatatgtaactgggcttgctttctc

SEQ ID NO: 42710 - DNA, 527 bp, Glycine max
  Clone ID: jC-gmro02910054g11d1
gaatgaatgaaattatttctatgccatcgtttcaattattttgttcaatgggaacaagagaaatacaaactcaaatggacgaagtatgttctgttcagttagaacataacagaaaagaaaaaaagggtggaaaaataacagaacaataaatactcttaagagaaaaaaaaaaacatcagaggattatgaaaatcctctgaacaatatatgtgcaacccaagttgctcacatgtgggcccccaattatgaaaagtcatatgtatgatatcatggtgttgttagtggctgtacgtacatggcctgctacaatggtttctccagaagaaaacgtggtggttcacattttgcagtatagctaaatttagatgagcagtacttcctatgtaccccagttagtttcccattcccagccttctgatgaaaatcagccattaatgttgagcactctaatagccgatcttctgagtaattggagtgccattcacatgttttgttccattgtttgaaaccataaattgtgcattggg

SEQ ID NO: 42711 - DNA, 449 bp, Glycine max
  Clone ID: jC-gmro02910054h02d1
actgaatgtttggtcaaagtaaaggggcaaaaatacaggtttatttgttcttctaggaagatgaatcaaaaagtgaagagaaaaaattacagacaatttgttctaagagaacgcataggccaacagcagtcaagtccctattgctcaagaggaatccactcgagttcaagatctaattctccagattcaacatcctggagcttgagtgacatcatttgtttaaccttaccatcaacaatattgactgtgctatcctcaataagggcattgtcatctgattttaaccattttcctatctggatatcaccaaacattccagcatttccaaatgccatagcagatgttatcagagactgaagatcaatgtctgcttttcccattatatcatcagcagaaaatgtgtcatgggcaaatactttcaattttatctgtccataatgctcaggaac

SEQ ID NO: 42712 - DNA, 552 bp, Glycine max
  Clone ID: jC-gmro02910054h03d1
gtgtcttcacttttgactataggaaatagtgggaaaagtacagattgaaaaggataacacctattaccttggtatatctagaatacaacctaatttctcaacattttagttcagataagcatggggaaaaactttctgactacaaaatcgtgttttaagatatcctcagaagaatgactattttgtaatagttcctacaggactagtaatctctgttcttttttcatcaccatcaacaattcaagactttataatatttgaacttagctagtaatctctatgacactctattcaagatctagactcttcttcatactttcataaaccatataagtaatgcttgcagctggcacaactttgaggagattaggaatgagtcccttgtagaaacctctaaaaccttcatccttaagagttttccagaaaacatcagacattcccttgtaagcactagtactgttggcaggttgtgcctgcagtcttgtacgaataacctgcagcggatagacacatgtagctccaagagcacctgaaacagtcccacatccgagt

SEQ ID NO: 42713 - DNA, 581 bp, Glycine max
  Clone ID: jC-gmro02910054h04d1
aaaggttaagtcaattcataaactatcattatgttgtaacactggcaatttggaattcatctgattctcctcttgaacaatataggaaaaagaaagtagcacagacagtaacaaataggtcttgctactaaggtgcagataggaaattctgatgatcccaggaatgctaattaaatttaaataggaacaggtcgatcaagggaacaatgaaagcatgaagtacggtgaagttgctcatagcatactagagtaaatcgcatattccaattaccaataccaatatctaactctaactctatccctctggagccaattgccctgcagtaggcacaggagaaaatcttaacatgcgaagtgatcatttcatgacatttgcctcaaccccattcgacagtatgtttcttcgtttgagtggaataatagctactcattatcataaatctttctcccctttagctgggtcaataatccattctgaatacaagtggttcaggtgataattactcctcagagcagttttagaattcacataatcttttaaaaccaatcaattcatgcagtatcatccaattctatgaaat

SEQ ID NO: 42714 - DNA, 549 bp, Glycine max
  Clone ID: jC-gmro02910054h07d1
aattgaaaggtgttaaaacaccaacattccataaacaaaaaacctatttaattttcaacatctgtggaatgcaccattctacattgttcaatgcccgaagaaattatggtgaaagcaggcaattgggaagcatcaaccacatccctagtttaatcatcctcatgcaagaataggagtgaagctggaagagtcttgcagactagcagcatattttcgcgcccacaggtcatagtgaataatttcctcaagggaaggagaggataccaattcattttgatgcttctcacatgttagctccacaactttgaatatatccaaatagctaatcttttcatcaataaacatctctacagctttttcatttgctgcactaagaactcctgtcattgtgcctccagcacggccagcagaaaatgcaagattcatggatggatactttacattatctggagttttaaatgtaagtgaaccaagcttgcaaagatcaaggcgtggccaagtgacttcagaacaataaatcctgtcaggccatgataatgtatagaggat

SEQ ID NO: 42715 - DNA, 521 bp, Glycine max
  Clone ID: jC-gmro02910054h08d1
aattaagaattattttatttttacgagaaaaaaaaaactcagtatatacaagcaagaataaggggagggagagttggatcagctgggaacctaaattaaacttttttatctcaattgaaatagtcaacaaattctactaatatctgaaaaaatttggagaggatggtgagggttggaaaaaggggaaagaaaacctatgatgatataatacactagaggcagaaccaaagatgggatttccacatcaaacaggtcactgctgaccttgctgcaccctttaggtggtgatagaagaatagcctaagcaagaaatgctcttcagagagagagagagagagagagagctttacatgaaatagctcagagatctcatttttcttgatccttcttctccatagaggtcattccattggagtagctcattcatatttggtgactctgatgacacacttgcacacacctgctcatgtgcatatctaaaatcatccatctttaagggacgaatgtcaccgctgctacac

SEQ ID NO: 42716 - DNA, 524 bp, Glycine max
  Clone ID: jC-gmro02910054h09d1
atgaataacactgaaatggaccaccatggtttcacacttctccactatattttgagttccttctgaacacaacacaagctacaacatataggcttccatttgtcgccaatttgtagtttttgtacaagaacccatatgcaaaaatagttcatccttattctattctctcttaataatatgagtataatagaccatcctctatacaaaagtactagtaataaatatataggttgttgaatatccaagcgtcctccgctatattcattttggtttgtctttcggactctcttcttaagtccatacttaataactttcaaaccaacccaaacctctaattatctattgcctctgcgagtgatgttcttcttgacgtattatgttgctatttatctccttttatgccggcaaagccttaaaagtgtcactgaaggtgtcttgttctgcaaaaatatccagcagagacaacgcctcgggcacattcagctcaagacggaacttgggaccatcatagtggtgaaggattg

SEQ ID NO: 42717 - DNA, 654 bp, Glycine max
  Clone ID: jC-gmro02910054h10d1
aagaacaaaaagacctcagtaaaataactttatccgcaatacatgtgtctagtaatttacaacagcaattcaaacacagggattcacaaagtaatttatcatattgcatccctcattgctcctcttgcagcctcctgcttcatctcagcagccttaccactgccacggaagtacatatatacttgctgaataacccagatactgatcaatgtttcaatgcagaacaatccaaatgcaacaaagtagaaaattccaatcactgcatggtcacccaccacatctatggctgacagaatgcctgtcaaggattttcctttgaaaactatgggaggagcaactgcagctaagatacagaatcctaggtgaagcaggtaaaacaagaaaaaccatccaaaattcaaagcactgtcagtcctaaaagcacgatataatgggcgataccacaagacatatgctccaggaattcctgctatgaagtagataatagcaagaaaccatattttcactccttctcccttaatccaagctgaagtgacagctacaatattccatgtgaggcacaatgccattcctaacaatgaagtaaatgcaacatactgcaatctttgaagatggattggtatttcatagcaattcatgatggataatgggaaa

SEQ ID NO: 42718 - DNA, 530 bp, Glycine max
  Clone ID: jC-gmro02910054h11d1
aaacgaaaaatctgagtccaataactacacgttcattctaaaaacagaatttctaaccgaacaggcacaacccatcaacggatctaccctccccaaataaaacccccaaaacaacgcgttcagaaaaatataagataaaaaaactacaatacaataaatattttaaaaaatgcaaatgtcccagtacagtgaaaattattgaatgacccttctcgaagggtaaaaggtgaaataaaatcacatcaaagagcaacaacaccaaccatcaatgcgaaaaccaaccaaaagtgaaaacccaacccaagcctctccgcagcagcagcaccgttcttcttgtccccactcgcgggtgtggtcgcgttttcgccactcgctgctgacgatccgctgctccccgcaagcgcgacggggagagcggccttggcgtgaatgttgtcgtccttgaagccgtgcaccgcgggcacccccgccgcaacgggacccacctgccacacgtggctgacgttcttcgccgaatcggggatcttgac

SEQ ID NO: 42719 - DNA, 273 bp, Glycine max
  Clone ID: jC-gmro02910057b11a1
cctcggggaattccaattccacattttcaagaaatttggaggcaaaaatgttcatatatgaggggggattattagttttcttatcaggcctatcctgaagccaaaggaaatgagatcagaatccctcggggaattccaattccacattttaaaaatataaggaggcaaaaacgttcatatatgaataggaattatttgtttttttattaagactatcctggagccaaaggaaatgatatctgaatcccttggggaattccaatgccacatttc

SEQ ID NO: 42720 - DNA, 265 bp, Glycine max
  Clone ID: jC-gmro02910059a09a1
aactaatactaaaaaatggtggggagggtttaaaatcaagaatttataaaccccccctccgtatacaataacacattactacaaaccaaagagggaagaactattctcatacaattaaaaattacaccatgtatgaccggtcctcaaatcaaaacctactgtaattcgaaaaccataagctgacaaatatatactttaataacaaattttacaaaaaaacccttgaaacttagtaattgatctattaactaaaaataatggaaaa

SEQ ID NO: 42721 - DNA, 466 bp, Glycine max
  Clone ID: jC-gmro02910059a10a1
ccttacaaaagcatattaataatggttagagttccaaacatatattgaagctttttccaatatcaaaacgcagataaaattgatgaagatggtgattacattgccataaaagtggctcatcctaaattgttcaaaggtgacttagctacaacagctaacataattggcattacaaacacaatggactctcagggatttgtccgaaaagggtggcgctcattaccctgactgtctgctttggaaggaacactgtaaagcagatcgtgaattttggaatacatcagcatctgagaggggtcaccaccactactgccctgcgaagcgcgagaactctcctgcaatttgatcttttcataaaggtactgcttctcggcctcagcctcgtttaatcgttgtttcaagtagttgctagtaaattcttcctctgatttatcttgcttggcaagagcaatcatttgaagcctct

SEQ ID NO: 42722 - DNA, 435 bp, Glycine max
  Clone ID: jC-gmro02910059b09a1
aggtattccgatattcggacccatcaacttgttatgaaatcacattgatagcctctactcgggtcctagctcgtctaagagctagatttgcctcaattggttggctcttgccttccgccttattcaaattagcttctgctatttcaagagtttgctgggctttttggggatcaatggcactacccttttccgcattatttactaaaacagggatctcattattggttattctagcaaaaccgcccatcaaagccatcgttaaccattggtctttaagaagacgtattctcaaaatacctatatctacgggtgtggcaataggcgcatgatttggtaatactccaatttggccgctattagtagataaaatgatttccttcactttcgaatcccaaacaattcgattgggggtcagtacacaaagatttaaaggca

SEQ ID NO: 42723 - DNA, 413 bp, Glycine max
  Clone ID: jC-gmro02910059b10a1
ggatgacaaagtagtttcattgatatctaaacacctacttagaggttaaatattagattctcaaaaataaaagtaaaatcgagcccagcatgctatggctatatgacagcaaagacacgcagcataagggtgatttagtggacaacttatcggtccttttggccatttaccaatctattaaataaaacaacgggctactgccaaaccagtacataaatttttggggtccacattggaagcgcacgaagatgttacagaacaaaaaaaataatcatacttcggccataagaaatccaaaactatatatacacattaactcaacttggacaaaaaaatattttaacgaagttcagaaacgaaaggaaaatggccaaggtgtaaaattgaatttatttcggacacgaattacaaat

SEQ ID NO: 42724 - DNA, 156 bp, Glycine max
  Clone ID: jC-gmro02910059b11a1
ccactattaattcatgaacctcaatttttaaaaaatcaaaaaaaaaaactatgctaaaatcaaaagaaaagcagcaaaaaaaaaggacctcaaaaacaaaaccacaaatctatgaagaccaaaaacccaccctaaacaaatgacaaatccaaaata

SEQ ID NO: 42725 - DNA, 448 bp, Glycine max
  Clone ID: jC-gmro02910059c11a1
agcaaagaatacgatccttcaaatcttctcagcatatatattacttgaaaataaaaccaaaaaccatagtcatctctttaaagaacaacctccaacggctaaaagaaaaagaacaccacaatgataaattgacttaactagctaaattataggttcttaaaaaaattaagaccacataacttatccagccttcaaatacacatcaaaatgatatggcaaattgctagctcaacggcgactgcaaggtagcaaaacccatgaaagttgatacattctctaagcaaccagagtgctagcagttgatgattcgtacttccagactggtgggagcttcttagtcttcttgtaatagcgagcaagtcggtggattctgctctcaacaagaatcaacctgaacttggagtccttgtccttcctgttcctctcaagatgctttctaactgaaact

SEQ ID NO: 42726 - DNA, 373 bp, Glycine max
  Clone ID: jC-gmro02910059d09a1
cggaagctaaaacttttattgaaacccttttagggggacatatactttatatagctccccctttacattttacaagatgggtgaaccaacaaatccctttacaaaatttgcttgcagttgccaaaaatccaccacagccccaacttttaaaatatgtcaaaaatttgggattaaaacacttgaagctttttgcaaactaacagcatattggcgagcccattgggcatagggaaaaattttttcggggggcggggaggccactaaatcctttggagggccccgacaaggtagttccccaaccttgaatatatccagaaaactaatttttttttaaacaaacatttttacaggtttttcatttggtggactaaaa

SEQ ID NO: 42727 - DNA, 415 bp, Glycine max
  Clone ID: jC-gmro02910059d10a1
gctgaaataattgtttgtttgagtcaatatataccacattttaaacaaattagggtacttttgggcatgcacagcttttaacatcatgtggttacatttaaatctccagctatggacaatgaaattgtgaattgtattgatgtggaatctgcaaaccaatgtatccaaactccatgtgattgccagcacaaatatatttttttgtttaaagggattgctgttcttggcatgccaagaaccattggtgcatgtccttccccggtggtgcagccggatattatgagagcgaattatttcttgtcggaattcttatagaagcaaagctttgagtgaaaattgttgaacatcaatcagaccaccctccattagtcctgcaggtacaggtgatccctggaaacttgtaactgaacttttt

SEQ ID NO: 42728 - DNA, 464 bp, Glycine max
  Clone ID: jC-gmro02910059e09a1
cctacacaaggattcaataacttttcttattttagagttaacaaattcgtgctccctaatttactttcaagccatttacgtgtcatggcacaactaaaataactgattagttaaccaaattttatcaagtacactgcaacaacaatggaacagagctaacaaacaaaaaagacaaaattcatttgcaacacaaactttctactatccatttttcaatggctttcaaagttccaagccagcaaactattcatatcagtcactttcggcttcctcgcttatctttcaaatccgcgtccctctggatgtggtcaagaatcaaaagcctaggtccaggaggaatcctcacatctctgagagcactgtctgtgagtaaaggcagagtgttgtctgttaacaagcctttcttgaaattcttttcgtaactctgaaggccaagattggtcaacatgtgtcttgttttagca

SEQ ID NO: 42729 - DNA, 520 bp, Glycine max
  Clone ID: jC-gmro02910059e10a1
ggttgcaaaatatgattttctcagtatataattcttgttaaaactgatgtattattatacatgcaaatctgtacaaattcaatgtcactgcaaatggtaaaaccaatcaaactccagtaactgcacgaattttgcaacagaatttgaaggatacaggcaaacacaaagtcagatcttatgccttggtttgcaaagcaattgacatgttttgggtcgcaatgttcttcaagctgccaatggttcctccataacttttcttttcgtagatacttcagcatcactggtaacaggtgctttggttgggacatcaggaaggtccaacttttcttcaatttcttcattagctgagggaggaacttcaggaagatcttggactgtaagctggatttccaagtcctcaaattctgctaaaatctcctcctcgtcttctgctgataacttctcccccattatttcattaatttcatcttgataagctttagcttcagcagtgtcatccataagtttctgaacatcttca

SEQ ID NO: 42730 - DNA, 423 bp, Glycine max
  Clone ID: jC-gmro02910059e11a1
aaaggaggctttcttttattattataacatattgatttattgatgaagggacatacaaagacatcaactggctctcacaattctggggaaaaaggaaataagaaaggaaacactcgttacatcaattggaagccacaccacacactcaaagggattgaataacactccacacaaggcaagaaaactcttgtatataatataaaacaaggtctttgcagatcactgaatactgaagatcgaattggatcagttgtaatgaggattggccaaaaggtaggcctcaacggccttgaaaagagcatcagacttgactttgccaattttgaggtcgtctgggttgggctgaacatctcctttggtttggtatttgacagttagcttcccagcagaccctccgttggcgccagcagccaatttgcattc

SEQ ID NO: 42731 - DNA, 485 bp, Glycine max
  Clone ID: jC-gmro02910059f09a1
gaagaccccaaaatgtattagatttataaactgatgtgattcataattcctttaaattgctttatatgtaatacactttaacataggatgacaagttttacattccctccaacaattaaaagatttttttttaatatccaccatctgtaccaaaaataaaatgaataggacactgtagtcactgtctgaatgtgacaaaaaatttccttccactgcatacatgttcagtgcttccccttgtccttcacggcttcacttagtcacatacagtttcattttgaatttttgattcacttcatttgtggttcctaggatagatcaatgccaccatctatacaaagtatacgtatgtgaatttctagtgcttcttgattgatcacactgaacccttgaacaaaaagctgaattgaactgtacaaatttcctttttaaaagcccattggtcctaaacctggtgtaaccatgggcatgggcatgggcatggg

SEQ ID NO: 42732 - DNA, 389 bp, Glycine max
  Clone ID: jC-gmro02910059f10a1
aaaaaaaaacccccccttaaaggaatttttttttccccccccaaaaaacccaaaaattctgccaccggaaaagggggtttttttttaggggaacctcaaacaagaacccctccccccttttggggcccccccgggggaaaacggggacaaaacccgttttttggaaaacccccccgtgggtttttttggaccccttggcccggggggtctttttcccccggtttgggcactaaaaaaactgggaaggctttgggaaaacccaaacctttttttccccccctttttaggggaaggcccagggggcccgacccggaaacaaaaacccccccctgggattggaactcgtttttggggtggggccgggccccccctttttttttttggggggg

SEQ ID NO: 42733 - DNA, 331 bp, Glycine max
  Clone ID: jC-gmro02910059g08a1
gtcaactgcctccagtatattcaactctgattcactgggggctgagacatcggttatagcatcatcgtccaaaacaggtgcaggctatttttttttacactcacgcaggagtgctttcaagtattctcttcgatcttcagcacatgtattattgccgaaaaaaccacctgtggtgctctgattagcagctccaaggttgtgctcagccgaagccctgactagatcttcaacggtgtgaaccgttgtaaaccgcttaacaagatcattcctgttttggccaattctatgagcccttgcttgagcttggacatcaacctgtggataccagtca

SEQ ID NO: 42734 - DNA, 395 bp, Glycine max
  Clone ID: jC-gmro02910059g09a1
ggaagggggggaattaccaaatgtagttgcatttttttgctgccatataatgtatagaaataggaacaacttatattttacaagtcgattttgtaaaattgaattaaactcaaagttacatctaaaatgatattaaaatctatattagtgagtgttgttgggtctgtcgtgttacccgttattggactacgtgcaaatgttcaacaaacttcatgctggagatgttaatcccaaaattaaactccactgactatccttcaataaatttgattgtaaccaaaggtccataagattcacgaaaatgtcagcatctgaattattctcaaggagtgaggttcacacttctttggccagcatgccatatattatagcacgaattgaagttcttccacagt

SEQ ID NO: 42735 - DNA, 458 bp, Glycine max
  Clone ID: jC-gmro02910059h08a1
ctccttgaattggataaaaaaattattgattcttacagggtacaagtcagagcgtattttatagtacaaacataattctgtgacttgcgtgtatgattatgcaacatataattcggctttcccatcaatgaatagactcatgaactcttaaccatccacaggttctttttctatgagaagttgagcaagcttgtgaaggatatcaatgtgagttgagataatatgtgttgccctaaaatatgctctttttaccagttccctcacttccgaatccactacatccgcagttgccatggagtaatccttttgcgatgacatctgttgacccaagaatggatttccaccaggtccaccaatgggaacttgtccaattttttggctgaatccaaatctctcaaccatctgccttgccactcgtgaaacttgcatgaagtcgtttgatgctccggtggtgacat

SEQ ID NO: 42736 - DNA, 438 bp, Glycine max
  Clone ID: jC-gmro02910060a05d1
gaataaaataaacagtactataaataaaatacactggtgagattttccacagaatgtgtacatttttgtatcaacaatcatgactcaaggaacaaagacttgtacaagcactgccaaaaaaacttaaaccagattcaaatattggcagcaccaaaacttggtttgcacaaaacaagggtctatatttacagcatgctatctgtgagagcaggcaacctgcggaagaaattgatcggtgctcctggcgtcttaccccgaagcatagggtgcctcattaggtaaaatccagatagaataaacaacatctgtggtggtgtcacatacaaaactattgcagtcacaaggcaaaacaccatgaatatcgaagtggcacgtggatccctccaattataagagcatggattctctctccttgagttgctatctggtcaacaacac

SEQ ID NO: 42737 - DNA, 386 bp, Glycine max
  Clone ID: jC-gmro02910060a06d1
aacaacgaagtaactgtccctatagaacaataagaactggtagagaaaatttaaggtaatcacacatgaagtaactgggtgaaatactggaaaattaataagaagtggcactaagatataatttgccacatattaagggcgaaccaacattgaaccatttatttctgtgcatattttggccttcacattttactggaaagaggaagaaacttggtatgacgcccctgggcaaaaactttgccagtttttttcttcttgaactccacgcttataacggcaacagccttccctacacgcagagccctggcctcgatctcaatctcctcatcggcataggcagcatccaaaaacgaaacattaatctcaacagaaaccccagttttggg

SEQ ID NO: 42738 - DNA, 547 bp, Glycine max
  Clone ID: jC-gmro02910060a08d1
aagagcaatgattttatgcaaatatcatagatctaagtcctggagggtaagataaatgcgaactaaaaaccaattagcatacaccaagatacacaatgcttaaagtttgaactttgaaataaattttgggacactttctggcgtctattatgaaaggaagaacgttcaaatgcattgcataggcataactaaaccacatatgacattaaacaagaagctaagcagtgtctgttgtcggttgggtcaccccaaacttcaccaacagcttagtcaggttttctggggagcaaacttgatacttgacttttccagcaggtgacagaaaaacctctgcaagttcaagcttttccgaggtaagacttgtgctgtccatagttttacttagtaccttaagtgcaagttgaactgcttcttcccttgagatatcatccttgtagacctgtttcagaattgactgagctgcctggttgttggcaccaatagctgcagcttttcaaccaccataatttccactggggtcacttgtgtaaagttgaaagctcaaatc

SEQ ID NO: 42739 - DNA, 535 bp, Glycine max
  Clone ID: jC-gmro02910060a09d1
atattaagactatttaattagcactcggctgttgcaaattattcagcatatcaaaatttagataaagaaactcaaattccactcaatttcccatagcaaaggctgcaaacaaccaaatctactgttcggctatccgtaagatactggacaaagaagaaatgaaatgactgggagaagcttcaggatctaaccaccttccacttgaatgtgttcatgtaatgactgttggagcggatcgaccagtgaattcttccatcttcgaaagtttcaacgcaacttccacaagaggagcaagtgcttcgtttgaaagtctcccaatctttgatggatccttctcatattgctcaatgtataatcgaattgttgcaccttctgatccagttccagataggcggaaaatcaatcgtgatccatcctcaaacaaatatcggattccctgatgtgatgagatggaaccatccacaggatcattgtactcaaattcatcaccgtggacaacattcgaaacatctgaccttatcccttaacaatctga

SEQ ID NO: 42740 - DNA, 424 bp, Glycine max
  Clone ID: jC-gmro02910060a12d1
aaacaaaaaaaaacccccccttgaattttttcccgggggggcaaaaaatatttttcccaccctttttttgaccccgccttgttggcaccgcaaaaaaacaaaaaacttgggacctccccaaccaaattttaaaaaaaaaaacccccccccccttgggcccccaaaaataagggcaatcttttaatttattccccccttgctcaaccccatttgcccccaaggccatttttacccccctgggttggtttttgttcttggctaagttattgaacaaaaaaacttggcttttcctccttttaaacccttttgactcacaactttaatatggggattttgggggaaaaaactttggtaagctccttttaaaaaccccccaacacgggggcttcccgttgccacccaaccccatgggggggggaaaatt

SEQ ID NO: 42741 - DNA, 329 bp, Glycine max
  Clone ID: jC-gmro02910060b02d1
gaacaaagcagactcaccaggggggtccatttgaaattcatagaatataagtcgaatttccaatagccattactatataaatctgcacccgagaaccatcatggcaataaggaaaagcataaattcccctgcaggggggtttcttaggcaggaacccctaatcagccttcacaggtgcaggttatttacttgataaaatgataagtcagctatttatgagaaatatgtcgcgaaacagacagagatcatagtagaacaactaaagggtatcagtcaacatcattccctgaggcctcagatatcttaactacatcacctagacacaaccc

SEQ ID NO: 42742 - DNA, 393 bp, Glycine max
  Clone ID: jC-gmro02910060b03d1
gccttaaaactatttatatttttattttaatttaaacgccctgatttattttaaatagggtttcggtttatataatagaactttttttttaattttttttaagaacccctttatctcaatcccaccggaaattttctttgttcaaccccccccaattgccaaaaaaacacaacctttgaatcagcttttggtggccccaaaccccccccacacttgtcaaaaaatttaattggacaaaaaaaaaaatccccgtgtttaaaaacaagggacaacttttcattttacccaaaaaacaaaaaaagggggggaaaaaaaaaatccccgggggacccccaaaaggggtttgggggggaaaaccccccccccggggaaaaaaaaacctgggaaaaggcc

SEQ ID NO: 42743 - DNA, 455 bp, Glycine max
  unsure (1)..(455): unsure at all n locations
  Clone ID: jC-gmro02910060b05d1
aacaaaacttccttataaattaaatgcaaatttaagacatgcctcctcagcagcaaaggaaatggactaaaaccctatggctgcttgtgaatttgaaaatctcagacttttaccatcaaaacaaaaaacagtactcatcaaaaacaaacagcaacgaaaatgttaccgccgatcaagaacccagttttgaaggctacggctacatgaaatcggcggacacttcaaaatataactggtaaaacaaacacctaagactctgcaaagataaactactgtaaaggaacaagtttttttgaaaccacgttgatgatcacatgtgctagcaaaattgccaaaatgcaatcacttcttcttggcggcagcctttgtgaccttggctccggtggggtctttcttctcaacactctngatgactccaacagctacggtctgacgcatgtccctcacagcaaaac

SEQ ID NO: 42744 - DNA, 490 bp, Glycine max
  Clone ID: jC-gmro02910060b09d1
aacaagtaaccagtcgttgcacttgtaccattaatataaaatatgaacataggttctttctcaagcagacaacaaggactacagcaatcaatttcattggggaataaacatctgactgcatgatgaattttattggggagtacagacccgactgcacgatgaatctccagtaaaggactaacaacatgttttcatgattcatttgcacactcatctttagaaggacattatgctttacagtttacattggtaactgaagaaaacagtgagtcatcatgcttcacagagaacataatatctgataacataacacgactgctacaaaaaattcgctgcactgattatgctggagtcaaaccaaccacaccacatgctaatcttccaccagcatttccagttgtcaaactgagttcatgcccaccctttccaaggtcatcctcaagctcatggaccaccaaggctctttcaactactgaattggggccagaga

SEQ ID NO: 42745 - DNA, 445 bp, Glycine max
  Clone ID: jC-gmro02910060b10d1
ggggatggaggtcgaattataatttacataatttttacaagcggggaataataaataaagggcccgttaaaaatgcaaaaagccttgaagcttgagacattaaacggggaacaaagatgaaacttggaggggccggacccacaagtgaataaaacaagaagtcatttttttcaagttgaagctcaaggggaggttttaaagggtgggacagccccatatgaaccaatgaagaccttttcataaattaagccagccaaaccttctccaataaatgggcccacccaatagatccagtttgcagggaagttttcactgaccacagttgggcccaatgagcgagctgggtttattgaaccccccctgaatgggcctgcttctaaaatgttggcccccacaacgaacccaatagcaaggggggcaatgaaacccaaagaccccttttttg

SEQ ID NO: 42746 - DNA, 422 bp, Glycine max
  Clone ID: jC-gmro02910060c03d1
aagaaaatctattattactattattatttttcaccattccataaacaatccatctatttggaaagagtacattgtcactgtcttcttccccaagccactatttacacccaccccaaaacttacgtataattgctctagaaaccaaacctataatgttcctcatcttcctgtactttggttgaaaggaacatttgcttattttgctgcaccattctttttctctcaaactatttcacagatcacatgtcttattttttttctactttctcaacctttttttcacttctattggatttttcctatatagacaaacgctattaacaaggaacagagaagggaacacaattccagcaccggccttttacagcaaaaagctcgagtgtgttgtgacgggtgaaactgcacggagaaagttgcgtttt

SEQ ID NO: 42747 - DNA, 395 bp, Glycine max
  Clone ID: jC-gmro02910060c05d1
aatgagtaaaccaagatttttcaatggtattgtaattatttgatacattactcaatattatacacaagtttgcgaagtgaaaaacactggataatgagttcttacaaaaagtggcatatcaaatcaaattggtgggtacaattaaaatttatattcatcctgttattataccagccagtacatcacttttgcctcgcacataaattgtgtaaactagacgaagtgcatccagccagccatccaatgattcccaagagtcagcaaccaagtaaactgatccataacttgtatctatgcagaggcctgcaccaggtggtaaggtaagatcagcacatgctgatacagaaataatatctgctatatctactttgatagtcttcttatctccactcact

SEQ ID NO: 42748 - DNA, 495 bp, Glycine max
  Clone ID: jC-gmro02910060c06d1
gacagagaattcattacaaatcaataaaggtcagaatctaaagagcttcaaaacaattctcccagtaacaggaaatcaacaagggcattaattcatcaagaagcatacaaaatccgactatcgaagccttgtatttcctatagatgttccaaatgctcaattacaagttatgaaatgcaactttgaaataaacatttctagtctattaatctgcatccatttcttcaagagctgctttggcagctgcctttgctcttctagaagctcatccgggaccttctcatgttggcggtttgactcatcacacacccagctcatttctagctcaaaatctttgtcctttgcctcatcatgaactccatatataattttagccacttcaataaccccttgtcgacatgtcatatcagcaagctttaacttttcaatctctgttttagcagcctgcctgcccttcccaattgcagcaccgaaatatctattggaaacaccgga

SEQ ID NO: 42749 - DNA, 442 bp, Glycine max
  Clone ID: jC-gmro02910060c08d1
aaacaaaagagcaagggtttccttcatatgaggaaaaaccaatattaaggaatatccattcaaggttttacatctagtacataaaaattcaggggtggttttcaaagtaatcacgaaccctaacaccctgggggaatgtcaaatatcaattcgggggtggaaaaacctaattttttaacgggatttaaccgcccaaaattaaataaataaataaataaataaagggagaaaaaaaaacagagatgccccaccaaaaaattttaactcttataatggaaatcctgtccctatggaggggtccattttagcaaaactcaagcttaagtgacgatctctattatccccccaacctcccaaacctttaaaccctgctttataaccaggctgattcttaaaggggggaacttcccagtttaattcaaagatagaaactgggtcaggc

SEQ ID NO: 42750 - DNA, 585 bp, Glycine max
  Clone ID: jC-gmro02910060c10d1
attaagaacacttttcatttatataaacgaagatacaaatctagaggttctctactttcgttttgatggagtacgatagactttttaatatctcttgatctctcacaaatctatatgaagatgaaaatggtttttctcctccacacttgaacctacaaattcttcaattttatatgacttgaacttcttgtaaaggagttgcattgggattctgcatgatctgtattgttggcttaggtgaagaccttgatgatgacatgaatgatacaatgattggcttcagcttctcagtagttttgatgttaatcaaaaagagaacacgatacagaataatcatccctagcaagattccaagatcaaaccactttgagtaactcatgttcacttgccacatatctcttagaatctcttcaccactaatgtagccaccaccaacggtatttgtagcgaatcttagtccttcaactcattttgaacaatccttggtggcatatctatggaatgcacataaacataaggtatttccaaatggcctaagaagacattggtaacctaaagattcccccctatatcatgatccttgaa

SEQ ID NO: 42751 - DNA, 436 bp, Glycine max
  Clone ID: jC-gmro02910060c11a1
ccgagcttttgatcaggaagctccccttccagaggctggttcgtgatattgctcaggacttcaagactgatctgcgttggcagagccatgctgtgcttgcattgcaagaagctgctgaggcataccttgttggactctttgaggatactaatctgtgtgccattcacgctaagcgtgtaactattatgcccaaagatatccagctggcaagaaggattcgtggtgagcgtgcttgatgtggtggtggtggtggtggttgagaagatgatgatgggtggctgcggatggtgttttgttattcacgattcttttttatacaaagatagggtggggagggagtaagtattaattggtgatacgggcaaaatactgctaagtgttcatgactgtgtctttttcattaagaaaagcggcatgtaattgaattttggacata

SEQ ID NO: 42752 - DNA, 375 bp, Glycine max
  Clone ID: jC-gmro02910060c11d1
aaaccaacaactgggataaatttccccattaaaacaagggaaagcccaaaaaacattttttaaaccaaatttttggggccactgaatggtgtccaaagggggtgcacacatcccgtaaaaacataaacttttttaccgaccgacccttttgtccaaaaaaaaaatacctgccaattttttgaaaggaaaaaaacacaggcttggacacttaacagtttttgcccgtttcacaattaaaacctactccctaacaaccctttttttgaataaaaaaaaaatttggataaaaaaaaaccattcggagccccccattattatttttaaaacccccccccccccccccacattaaggccgctccccacaaattttttttg

SEQ ID NO: 42753 - DNA, 479 bp, Glycine max
  Clone ID: jC-gmro02910060c12d1
ctgataaaacctacttgataatgaaagccaaattagaagatgcagaacccaaactttccaataacgtttcatattgaagacaggatagaagagtctgcagtcagaagtttgtcgtatgcacaaaacctaaataattgtttgccatgtgctatggattaaaagctaataccacaagcataaaaggtgtcatgaatttaatcatcatcctgccctactgctcattggagtcgtctgaaacatcaaatccaggaggtataaaaataacatcatcccagttcgatgtagaattttccttcatttcttttattacatcctctagagtggcaacctggatatcgccttttctcatagtgggatttaatttgttctgctcacgggctgccgatttaagtgtattttccaagtcctcctttctgaagaaaagtggacgaaatctcttattttggctcttcaatatcagacttctggactggaaaact

SEQ ID NO: 42754 - DNA, 324 bp, Glycine max
  Clone ID: jC-gmro02910060d01d1
ggctgaaagcattttttattccaatttctaatcaaaatttcaatgtcacctactatcatatgtctaatgtccgtgattaatatagaacaatcacccaaaaataatgataacaagaaagtaatagatgaagaaaaaatgaaaaacctaggcaacaaacaaacaactaaaatgccggacttagcaaattggcatcaacccaccaaaagggaacatgctcttctaaaattaaatatattgtcctgaaaggctgaaacttggttcatggccatcttcacctttttttattttgttttcactgttcggacctggatattgtgagtggat

SEQ ID NO: 42755 - DNA, 493 bp, Glycine max
  Clone ID: jC-gmro02910060d03d1
aggctgaatttgataggaaacaccatatatgtgcacgaaagcatgtctagttaattgagctaatataaaaaacgttattaattactaattcactgcatatacattccaaaataaataagtaataactgattaagttgcagttgatatggtatttgtgtaatgatgcatatagagtggagtcagtagaagtttagaatattggtgggagtaaagttttggagccatggactattcaactgagcccaaaaggtatcttgggtccaatccgagagcatgggaagctgaaggtctggaagcttctccttcccaaagggcatttgtagtgatgtgccacaagtgcttttgttggtgtcttttaagaccaattggttggttattttttcttgtttaggcactaccatgtcttcagtttcagactctttcttaagaacatgttgcaacaatggcaagggcatgttttgctcttcctgtgggctgctaaaggacatggtgt

SEQ ID NO: 42756 - DNA, 485 bp, Glycine max
  Clone ID: jC-gmro02910060d04d1
acatacaatcaccatgtgacagagtgtatgtacctttcaattaccaaacatgtaccagacaatgtagactgcagcagagcctaaaatatgttaaatgatggtttgttggtagaatcaactgagaaagaaacatagcaacattgtatgttaaaaatgctctaaaatcctattacatcagagatgcactacggttacaatttagtcatacaaaagctgagtaacaacaattgcctactcccatgatactgataatgaaaatgggaaaagaaaagaaaaacaaagggaaatataccatcaacatcattgtttcattagctcacttataacccttctgattcatgatttatcttattcacaagccaatttggtgtcaaagctgctcaagcatattgcaaaagcttggaatgcagataaagggtaccgataatccatggtgaacatgttctttccaactttgccaaactgaagaatgatcttatcgtgct

SEQ ID NO: 42757 - DNA, 551 bp, Glycine max
  unsure (1)..(551): unsure at all n locations
  Clone ID: jC-gmro02910060d05d1
gacagagatttcaacacaaatcaataaaggtcagaatctagagaacttcaaaacaattctcccagtaacaggaaatcaacaagggcattaattcatcaagaagcatacaaaatccgactatcgaagccttgtatttcctatagatgttccaaatgctcaattacaagttatgaaatgcaactttgaaataaacatttctagtctattaatctgcatccatttcttcaagagctgctttggcagctgcctttgcttcttctagaagctcatccgggaccttctcatgttggcggtttgactcatcacacacccagctcatttctagctcaaaatctttgtcctttgcctcatcatgaactccatatataattttagccacttcaataaccccttgtcgacatgtcatatcagcaagctttaacttttcaatctctgttttagcagcctgcctgcccttcccaattgcagcaccgaaatatctataggaaacaccggaaggttcaaccatgtacaactgtggtccatccctgtcataacctnctagtatgaca

SEQ ID NO: 42758 - DNA, 474 bp, Glycine max
  Clone ID: jC-gmro02910060d06d1
gatgtaaacattacaatattacatctaatggccggctataagtttgacctcacaagcataaccctcctaatcagaaagggatcatatagttatcaacaaataaaaggggcttcaggacaggccaaaaaacacagttactagtagctttagtagcatagctttcaatggccattaactctaagaccatttagtgagttggtaaagccattcttctgattctccaatttggggaactcagtttctatggtcttggctattttggcatcatcagggtctggctctggtatgtctacatagaaggacccttgtctgattggtgaaattgactccacaatgatggattgttgcttgatgtgattggagagttgttgatggaaggcgtgattgaaggagaaacaatttccaatgtttcctaatgcatgatgtttggaagacttggaatcttcttttttgcaaagtgtgggagggatgcat

SEQ ID NO: 42759 - DNA, 489 bp, Glycine max
  Clone ID: jC-gmro02910060d08d1
aactcagctgggggtagcacaaaaaattctggttcttattacaagagcatgatctaccagcaaagttggaaatatgaataacaatagagcccacttattccaacacacatacaacaaccataccataaaggatcacacgtatgtagacagagaccacatggcatagcataactaatcaaaaaacatggcatagcataaataatcaaaccccaaaaaataaatgatacaagattcatccatgaacaagacaagattcttagctatttataaatgcacaatgcttcctgatctctccttctggccctgtcttcacattaattcttcccattttctcgatggaggttgcaaactcagcaaagaaattttcaactgacccttcaagcaattggatgatttgtgcctttgtaactgagttagtcaataatgcagcatctgactcaaatagaccccttttcttaataacgtgactatagtagctaagatcaaatg

SEQ ID NO: 42760 - DNA, 483 bp, Glycine max
  Clone ID: jC-gmro02910060d11d1
aaaaacttaacattacttgtacggattggggtgtttgccaagagtcaacactaccctaatttgaagaagaaaaaaattatgctaattcaattcaacctctacaaataaaaaatgaaaatgtgattttataaaaatgaaatagcaaactctacaacagatggcataaaaaaaccaactgaatgttgaacttgacatatctagccaggagcaggctgcattcagatcaaactaatggacattgatccattcacaaaatctgtcttttaaccagacgcattcttccttgcagcatataccctataagctgccagcccaactacgaccaccgcagctccaactgaaacagccataagagatcgattaataagcctgtggtactgcttgcggcttcttcccgcttcagtttctggaatgcttaaatgaggttgatcatcagccgttacaattttacgaaaaagactgttgaaatctccaacttcacac

SEQ ID NO: 42761 - DNA, 476 bp, Glycine max
  Clone ID: jC-gmro02910060e04d1
catcaaaatactgctctccgtgtcattaaacaagaccactgcaacttgttctacatgatctagattctacacataatatgtgtaactcattttccaattgataaatctaacaagtcatcttctgctaaaaattcgaagtgccaacagttaggtattaaagaccctatacaactaaaacctttattttttttctttttctttccctctctattgtcctcccattttcatcttcggttaaattgtgcagtcaacaagaaaattccaaagtctttgttgctgtagtaacatggctatgtaataatgcacacactataactctgttttcaaccgcccattgggtcccaagttgtcaagtgctgtattagaatcgtatccaattccatagaagctttggaactcatggtccaaaacattctgtggcaaaggagggaattgtgaggatgtactagacatgccagccaatgttccatggaaac

SEQ ID NO: 42762 - DNA, 536 bp, Glycine max
  Clone ID: jC-gmro02910060e05d1
aaaaagatacgtttttgaaataaaacgatttattacatctgttaagaataaatacaacagcataagttcgctttcgtcagaagcagaattgaacaaaatatcaaagctaactcctaaaactacagatttaactaacctatttgatctgggcctaaacagttcaaaggagaagaagaagcaatgcatttacaaactgcaagctacagcaactacggttggctcctctatcagggggaagcatttatcaagcattccaatcacatcataccatggaagccagcagaatccgagagcaccgctttaatttgctcagggaggacatcctggccttctctgcattgctcagctttgaacacatctaaagcaaagccattaaaacagctaataacagcctgctgtacatccaatccgaggttatccaaagccttcatggtagaaagcaaaagacctggtcggcgggtgcagaacatatgaatgttgacagttctcccttcccttactctaacctcaacctttgcagcttggtttttagggct

SEQ ID NO: 42763 - DNA, 456 bp, Glycine max
  Clone ID: jC-gmro02910060e11d1
cttagaatgtttgttatggaaacccagactggggcagtcgaccagtgaaagcaaaacgccaatttgaaaaataagtaatacatttttttttaatcacaatcagttacagaggtgtgctgttgaaataagttagctttaaaagaaacggttttctcagaaaaaagcagtatttgttctgtgactcggaagtattggtattgggcatgcttcaacttattcaaccttttttgttagacttgtcgtcagcacttttttgaggggaattggcagttttggactcatcgaactccaacaactgtttgacatcaccattccatacgcaatgagcagccaaaaatccaattacagaaggtgcaatatacaaaagagcaggctgtgcaggctgaaaccagttcatcacaacaattgtaaggaccaagccaacagtgtttcctacaaatgcactcttgaaatact

SEQ ID NO: 42764 - DNA, 545 bp, Glycine max
  unsure (1)..(545): unsure at all n locations
  Clone ID: jC-gmro02910060f02d1
tcgcgatctagaaccgcttacattatcccacctctgccatccttgtcttttaagcaaaggctaataccaaatgcaaatactatccccactgaccaaatcttctttctcatcattcatgaattttgcttcttcattcagtttttcacccaggaagttctcgcctcagtagtctctaagttcgatctatactgaagggtacgttcaaatcaaatgggttcattccagacacccattggaatgagaagttcaacattgctagagacttcatgtggattcctgttgcaggaactgcagataatatgggatgaagttggagaagataagtttgaaagggagaaagttctgttagatttggagcaagagtgccttgaagtttacagaagaaaagttgacagagcaaatatatctagagctcatctgcatcaggaattggccgaggctgaggctgaatttacccaccttcttttgtcccttggtgaacgatctctaccagttccgccagagaaaagggcangttcactaaaagagcagctagattcatcact

SEQ ID NO: 42765 - DNA, 347 bp, Glycine max
  Clone ID: jC-gmro02910060f03d1
aggaacagaatataacgttggatcctagtgatgaaagaattacaaagtaaaaaattgtttacgaacaattcgaaaaacagagaactggaaaacagagaggctgattaagaagtcaaagtcaaaagctgttttaggtactcagcacccaaattcttgaacacaagcacattttgcgaagttctgctgaagtctaattgttccctctgatcaaccttggtcttcttcttagaattggactttgttctcatagggtggtttctcttaagagccaaaacaggggaggaaccttcttcccatggcttacttggcatgtctttaagggactccctcaccactttctctgggaa

SEQ ID NO: 42766 - DNA, 471 bp, Glycine max
  Clone ID: jC-gmro02910060f04d1
catctccatcaatttccatttgatatttctctgaagagcctgagctccacatttgaagtacaactttttgtaagtcatgactgagaagtgtgtagaactccagagtgggacccagaccggtgccaacttcaccaaaatattctacttcaagtacagccttttgactagaatacaactccatcaccttagcagcagaatccaaaatgcgatttcgagagacacgaaccttttgacgctgcaatctcccaaccctgacctctctttcatttgttgatccatgaccatcagcaccctgctgctgctgaaggcgatacaatgcacgagataacccaaaggcagttgaataaaaatactgtcgccgggtctcaaaaggaaacaaaaaaggacacgctttagataactggtaacaccatgagggaagactcccactacataaggcaagggcatcttgtatttgcctagctaattttg

SEQ ID NO: 42767 - DNA, 353 bp, Glycine max
  Clone ID: jC-gmro02910060f05d1
atgaaaacttattttcattcataaaaaatagcaattgattaattcaactgtctcaaacaaaatattatctaagatttcagcactgcactcatctctattccaaagtttatacatcgggatattctttttctgctaccgttaaacaaaatggaaaataaaaaatggcaaaattaaggggacttgcagcctctctagtgtgcctaaaatgcccaacattttatcacaagactagaatacaaacttctcttcctccgcagtagtattgagtaatctatctccaatctccctaagagcagcagctgtggaatcatttatacccaacagatattgcaaacgagacaaattctcaagag

SEQ ID NO: 42768 - DNA, 482 bp, Glycine max
  Clone ID: jC-gmro02910060f08d1
gaaaaaatgcaaactaacataagctaaaaataaacaaaatattttacaagggtcaaaaaaaaaaaaaaaaaaaaacccgccccttacctgaactaaaattagaaaaatgaattgggaaggacaaaaaaagacatgctaacttagagggccaaaaaaacgtttttaagctcctagaaaagctgcccccccaatttacacatacacaagcggggttgattttctgagtccgattttgaagatccatattttagtaatgagtttgacaaaacaagtcacaaaggcccaaacaacaggtagctgaccatcgcagtgttcttaaagcattcgacaaatccacgatgatccaaaatttttattaaacaatccaagtcagccttcatgtagtgaaactgggatttgcactgtgcatttggagacaaagttctcccaggaagtccctttgagatacggaagaggaagcacttgtagctgcagcccatact

SEQ ID NO: 42769 - DNA, 530 bp, Glycine max
  Clone ID: jC-gmro02910060f10d1
agcggattgaaaatggcttggtttgtgttacgttgtaagtattgtttccgtgtgactcagaatatcatgatgaagttctaattttgcccaagaaatgagcaatttttcatacagtatgataaacaaaatttagacggtagattaaaagaacaaaacattcacctatctatgatacacaaactataccttcctaagtttaattaacagtacactcaacagatcaatcaatacaaataatcaacaaaagtagttggctttccaatcttcaaaaactccaaatcattctcaaagggtgtcagattcaaatccaaaaccaaaactctcttgttgtcagctttcttctttggcgatgaatcaaaactgctacccccaatactacaactcgtagcccgaagaatgggccacgtttcattcaaatccgccgctctgtgccttctcatgtgaccttccaaggcttgccctatagcaaactccaacccacaaatggaacactcatgagtcttaggctttgggggagaatcatgaagcaa

SEQ ID NO: 42770 - DNA, 452 bp, Glycine max
  unsure (1)..(452): unsure at all n locations
  Clone ID: jC-gmro02910060f11d1
ggaccaccatggtttcacacttctgcactatattttgagttccttctgaacacaacacaagctacaacatataggcttccatttgtcgccaatttgtagtttttgtacaagaacccatatgcaaaaataggtcatccttattctattctctcttaataatatgagtataatagaccatcctctatacaaaagtactagtaataaatatataggttgttgaatatccaagcgtcctccggtatattcattttggtttgtctttcggactctcttcttaagtccatacttaataactttcaaaccaacccaaacctctaattatctattgcctctgngagggatgttcttcttgttggattattttgctatttatctccttttatgccggcaaagccttaaaagtgtcactgaaggtgtcttgttctgcaaaaatatccagcagagacaacgcc

SEQ ID NO: 42771 - DNA, 492 bp, Glycine max
  Clone ID: jC-gmro02910060f12d1
acaagaataaaaaacaacatattcaagcgttggaaatataatgcaggcaatcagaagagagacatcttcaacatcaaagtagagcagaaagagaataaatttaatatgcaacacaaaacttccctaacgggaaaaggtaaggttgggaactttaaactactatgtatctggggatcaatcagccacactaatccaaaataaacacaacctcatcatgactgagagaaacattgtattctaaaagctcaatagataaagatgctgctccccttgaaagaagtccaagtctaaattatgtacagaattgtccccatgatcaaagaatttgtcctaaatgaacgaaattctgacaaaataatatcttactggattttgaaataccagtacgagtgacaaaacagtcatcaaaatcccagttaaaaccacaatgagcagctcaagctgcacaataaaactgtgccttaaataacctttccttgatcatctggactc

SEQ ID NO: 42772 - DNA, 494 bp, Glycine max
  Clone ID: jC-gmro02910060g03d1
gatgtggctactcaaaattaatataaggattgatggtttatagtagatgatgtgattcaaaaaaaaaaaaagattgccttaggtagcaaacgaagacaaatgggagatgatacaatgtgcatggaagggcttatatacttcataaaaagtagatgaacgagaccttattgaaatgatgattatcaacacacaaaaagtaaatattatatatgatgatgatcttaattaagaaaggagtttagatgcaacgccgatccttgcaagtggaacacagacaagactatgtgcccttggaacagtgaggccggctctctcttccatgctaactttggcgtcaccacccttcaatatctgtccttgtggacccagcacttgcaagtcgaagcactgaataagagatgcaagaagtgttgccattcccgaagtagccagattgactccagggcacattctccttcagacccaaatgggagaagttaaaatgttgtccccta

SEQ ID NO: 42773 - DNA, 279 bp, Glycine max
  Clone ID: jC-gmro02910060g04d1
cacattacagttacaaattcaactagtaagggataagacgactaaaatggcactcaaacgcaaaggttgtataaatcacaaatcataataaaacacactggaacaagcaaagcttgtcaaaaggtgcaatataattttatgccacaacttggaaaattgagagtttgggaccataactacccaagttgaccatcccacaaactaggatattttccatatgagtaactaacgcttcaggggtgctgctcccaccagagagcctactattttatataatca

SEQ ID NO: 42774 - DNA, 297 bp, Glycine max
  Clone ID: jC-gmro02910060g05d1
aattatatcttaataaaatcaatcataaatgctagtgaaatctatctcaaatcaccattagatttacaaataataactaaaaaacttaggcaataaaatcaacaattctacactttattttgagtcttcatataatcatatccttgggcttgcacaagtcgaactacaaccttattagataagaattgccttcacatgaactccttttgcctcttgtatcttttgaacttttcttttgataacaggtcaccacttggaatcgagtccttttttttcttgaactttgccctgcaatat

SEQ ID NO: 42775 - DNA, 505 bp, Glycine max
  Clone ID: jC-gmro02910060g09d1
aattaagcattgtttctgaaggatccaagagctttgattgcagaggctctaataatgtattgatggtagattgcacccaccgcagctccaacaaacggtccaacccagtaaatccattggtctgcccaggctttgtcgttgttgaagatcacagctggtccgaaactccttgcagggttaatgccggttccagtgacagggattgtagccaagtgaaccatgaagacggcaaacccaatgggaagtggtgctaacacaggaacatgagagtccctagcgttcctcttaggatcagtggcggagaaaacggtgtagacaagaacaaaggtaccaatgatctcagcacccaaagcggtacctttgttgtagccatcgctgacagtgttaaccccacctccgtacctgttgtagaacgatttctggaactccttggccaacccagcaccgcagattgcaccggcacactgtgctatcatgtacaacaacgccctcatcaaagacacct

SEQ ID NO: 42776 - DNA, 467 bp, Glycine max
  Clone ID: jC-gmro02910060g11d1
ggaaccataaaggagggggggctataaccttatcatttcagattattcctcatgtaaacatgccaaatctttcagcaacaagtacaacgcacaatgccatttgaatggatttgggtggtttaaacacaaaataacaaaatttatccagattacaaaagcattaaattggggcagtcatgccaaacagaacatgcacatatattccaatcttatagcatttatttaatatacaaacttcattttctattctaaaattagcaaatatgttttagaaattaccttaatatgagctgggcccagtccttaaacccagcattgatcaaattatcaacagggacactcctgggcctttcattacgtccaggcagtaaaataaccttgaatcccagattcaaaacatcttcatagagctttaaactgggttcaatggctgtagctacacccttttccacccaatcgttaaactt

SEQ ID NO: 42777 - DNA, 594 bp, Glycine max
  Clone ID: jC-gmro02910060g12d1
gaacactaaaattagaaagttgacatttaataaaccaaagcagcggaacgcagcaaagtcctgaaactcgctgcgcttaacaaaaatgtaatcaggggttccgacaaacacaacacattaaaacacagataaataaaagcaattttgccaccgtcgatcaagaacccagttctgggaacaacagttgcgagatgatggtggagacttcaaactttgtccgaaaaacaagctacctagaaaagaagacacaagagtacagaaaagaaaccaacatttattgtaaccaacatcccctgatgaaccagcccgcacgattcacttcttcttctgggcagccttggtgaccttggctccggtaggatccttcttctcaacgttcttgatgactcccacagcaacagtttgacgcatgtccctaacagcaaacctaccaagtggaggatactcggagaaaagttcaacaaccatgggtttggttggaatcatcttaacaaaaccagcatcacctgttcttaaaaacttgggctccttctcaagctctttgccggatcgcctgtcaatcttggtcatgagttcagcacacttgacagcaat

SEQ ID NO: 42778 - DNA, 539 bp, Glycine max
  Clone ID: jC-gmro02910060h07d1
aaaaaagtaaaaggttgtggcactcataaggggggaaaaaaatgatatatcataaggctaattcattctttccactagatacatttttaaatctaagcatatggtggctagtaaatcttctcccccaacatcttttcggcacacatattacaatccactgaatcgagaattatattacatgaatgtgaactaattttaagatatcatgataactaactagtaacaactttccatggtatgtatatataataatgttaatctatatatccctgacattgtgttgataaatttagcaagaatcaattttagaattgattccacctgcttttgatgggtttcctctctgaagacattcaacgggagggactgttttggtcttcaactccccatatgcttcccaacaaaatggaacattggaatttttagtttcttgggctgattctagccgtatggtatcaagggttatgccagtgcaaggtaagttgtcactacatgcaaaataaataggctgcttagtgtatgttcccttataatcacat

SEQ ID NO: 42779 - DNA, 430 bp, Glycine max
  Clone ID: jC-gmro02910060h08d1
aaaggaaaaaaaaatggtttgttcaatgcccacaatttatttacacacgatccttacacaaacttgggtacaatgaaatgaaatagcaattttatattgatgttattcaggtattggcaaggagacccttttttttcccccgaggacaatttacattgaacctttatttgctgggcgttttacaaatattataggcgaaagggggaaattaatttttgaagtaaaaaaaaaaaaaaaaagtaaatgcagaaggtagaaaaagagttcaaaaaaactaatttgttttttttattaacaagaattggaaaaacaccctttggctgatatttttcagggagaccaacatttttttggggggggcaaattcattggattttatcacttggcacccttgagaggggtaggaacagtttggcccacttttatgttc

SEQ ID NO: 42780 - DNA, 534 bp, Glycine max
  unsure (1)..(534): unsure at all n locations
  Clone ID: jC-gmro02910060h09d1
agaacagaatgaaattggcactgtgaagattaagcgcaaaggcttctcatccttttgttttcctttttgacagacaagtttggcaattgaaagatagttcctaacgccgtgataacagatcatacaaaaataataatagtagccaataatataatccaagtgaagccaaaactacaaaactcaaagggaggaagattggttctgaaccagagaagagagtactcggtgcaaatcctgccagattggagaggatatgatgaaaaaccaggaaacaacagctcccacagcccccacttcttgaaaggggtcctcaatgctgcaaaactaatatgtttttgtctttggagccttcttgggtacccttttagggatggagtttttcatgccaatgaaaaacaatacagccccgaaaagagccatattctgtgtaaatntgatgaacagttgagtaaattctttgtcctcactatcataaattgaaaaatcataatggatgggagtagcaatcagctggtgcaggagcagaagcaaagc

SEQ ID NO: 42781 - DNA, 494 bp, Glycine max
  Clone ID: jC-gmro02910060h12d1
cttctgccatctactttgtatatatgcgcgactcttcatattgctagtgtcccttcggagacaggggtctcatctaatgaatctggggatggagatttgggtttgttcataattctattaaatccataaccaagagaacttccacttgcttcacacagctcagtgagctcagccagatgtcgagatctgaattcatttatagtagctgcaatctccgacgtagggagtttagcctgagaaagcacagcagctgctagttgaagacttggttccaaggtctctgggacaacagcagtagctccagccttttctaaattcaatccatgatcaacgtcatgggcacgaacaaaagtcttcacatttgggaagtacttgcttaaagcccaaactgttctatatattgcaccaggcgtatcaagagttattgctgcagcacatgccctttcagcctcaaccttatgtaggacctttttactaccagcattttcaaagta

SEQ ID NO: 42782 - DNA, 471 bp, Glycine max
  Clone ID: jC-gmro02910061a04d1
ctacccttgatagttatgataaacgggcgggcccaacatgggagcattgactggagcagtttctggctgtgatcttgaaaagcaaatgattaaaattggaaaagaagggtgtacataaaaggcacaatgcaagacaaaaagacatgatcgaggaaccaagcaatgaatctctcccattttagagtggggcataccctttcttccaatgcagaaggggccgcgccgtctgctaccagcttgtccccattcccttagactatcatgccccatcctcttttgatctcttctctctaaatatgcctctacatttattaataataaaattaaaacctagcgttttcgaagccgtgcaagtcgctgactctattcaaagacttcttcatcattgccatcttagccagcttcttcgcggctctccaagccgaagtcggcgtaagcggttcgccgttctcgtccagcagcgccatgacc

SEQ ID NO: 42783 - DNA, 291 bp, Glycine max
  Clone ID: jC-gmro02910061a07d1
aacttacactaaaatgattagcaataactggtttggtcgtttattaaatggggtacaaatccaccaaagtgcacacataactgcggggaggggggggttacattatttagatgtctctttaaatttttgttgttctttttcttgtttccaaggtcttctaaagatagtgggcaactgctgcaactctcagttttcaatggtgggattggtctctaactttttgaagaattgatgaaaccttggagccgaactatctttcaaagcaggggaaacaggaatctctccgatcat

SEQ ID NO: 42784 - DNA, 455 bp, Glycine max
  Clone ID: jC-gmro02910061a08d1
gagcagtaattttattaatcgaaacccacacaatagcacagaacagcaaacctatgaatcagcttagtttggccatcaagccacaccaacattgtcaagaggttcaattgcacaagaaacaaagtccactggactaaaacaatgcagctatctattttacacatgatacatcacatggtaggtttgaatcacaatgatgaattagttccctggaggaccaccaaagaggtaattcaaggaagatccgccacctggggcagcatgaaccttggtagatggccgatcctgcacccaatacaaaacaacaattaagaacaattcctcggtaccataagaaaagctcattcctaaagcatcaaaccaattctttaatgtaaaagaaaggtggttacagatagctgtgctagccgttggtttagtactttctctccatgtaaaaattcctaacaattcac

SEQ ID NO: 42785 - DNA, 509 bp, Glycine max
  Clone ID: jC-gmro02910061a11d1
gagagattaaatggctacaaactttcactaacacatttggtattacattggttaccacaatctctattctaacaccacaacatcatttttattttattttttataacattggtatgagaagaaagaaaaattcattgcaatccagtgtgacaaacataagctcacacaagacccattttattcctacagcaatcttattagagagaaaccctttgtgcaagggcactgctcaaagagaataaagatggtgtggaagcctaggctcaacaacagtttccagtggtattttcttaggtgtagagagcccaaaaatctcatccatattcaaatcctcattcttgacattatcaggcagtctccagttaaatccatgcaacaaattggccaaacttgcttgaatgaccttaaggccaagagggtagccagggcacattcttcttcagcaccaaatggcaatagctcataggcatgccctttaacatcaatctccttattaagaaacctctctg

SEQ ID NO: 42786 - DNA, 506 bp, Glycine max
  unsure (1)..(506): unsure at all n locations
  Clone ID: jC-gmro02910061b01d1
gtaccaaatgacatgaaacttatcaccaaacttgtcatttttttgctgttctaaacagaattccaagacaatgagtaaagatccacaccaagacatcctctcaacaaaagacttcttattttatttacctatcaaacatgggagtagtaaaaacactagaccatatagatagataagatacggtctgatacaattcattctttagttaaagtcatctgtcttcctcacaggtcctctgggccattaatttccttgtctacaatggtaacaccgtcgggaacttccagctttacaccgggctttgatacgatgctgactttccccttgaggataacaccagctccaaaccatacatcaccagccacttttagactgtcaagctcaacaatactaggaattgacttgaagcggcccaagaagttgctaaccttcttaaattctggtcccagttcaatagaagggttttcaggattntcccttgctttgttccgaatgacaaatccgtc

SEQ ID NO: 42787 - DNA, 553 bp, Glycine max
  Clone ID: jC-gmro02910061b03d1
gagaaatggctggtctcaaagtcataatcaaattgccataataataataatgaaaatgaaaacaaccaagttaaaaaaaaactgtatcagcagtcaagactgtatccaagaccatatataacataattgataatccttaaggacatcaaacagaaaatcccctgaaaacgaggtctttgagttcacaaaaggataccctataataaaaacctatatatagtcctatactactgcattagctacaagataaaataaactccacataagctttaagcaggtttcttgctgtggactccatcaccaacatcacgatcacaattcttgtagctttatttacataaaaggggagataaagggtgttcagaagactcctgccatggaaggcaggtcgtcgaagctccaaaggttcatagggtttccggcggcgtcatgagttgcgtctccgccgagcaaagacgccaatgtagcatcagcccaggcttcatcaagaaaagaaggggtctcaaagaacttgagctgggattcatgtctgcaagctcttcggaagggtttt

SEQ ID NO: 42788 - DNA, 513 bp, Glycine max
  unsure (1)..(513): unsure at all n locations
  Clone ID: jC-gmro02910061b04d1
ataagcaaaataatgttcctacatcaagccagtgcttccaaatggatttttattatgagggtgagaaacaggattcacaggaaatgccccgtatcctgcatccccaaagggatttgctgggttcatcagcatatgctgctgcagtggctgatatggttggtaatgaaggaatggatttatatgctgttgagcaattgctgccatttgtacggttgacgtgggagggatgctacttgataaagcaaaaggatcttgcacttcaaatggatttggggctggcactacatatactggttgctgcgcagatctatatgctccttcatcatataagctgctaagggtgagagaattcaacccacccgccaactgtctctcattgactgaagaaatattggtacttggagtggagaccagggcaatctcccattcagttggatcaaaatctcttgcctgagcaccacttgaatctaaagcagtacttncagtttcagtggagactatgggctagggcag

SEQ ID NO: 42789 - DNA, 502 bp, Glycine max
  Clone ID: jC-gmro02910061b06d1
accttaaaatatatcaacttttctttgttccatcacttaaaatttagtgtatacaatatacaaattatatagactagatcttatcatttattattatttatacaaatttgtgaacttgccaaggaattaagaaaacaatctgaatagaaaaaaactggtgcacataacataaaacgagggaatcgttgatactatctttaatttatcttttggcgggttaagttgctcacattcatctgaaaagcacatttccacctacaaattccattttgagtaacatatataaacaccaacctaaattacctaatgtaacaggaagacaccgcatcttctgcttattccatatcttgcaaagcgtttcttatcatattactgagaatttatcactctgcagtttttcctaatctctccatcagtcccaggcttaatatttatattccccatcttgatcatagagttggcaaagtccccaagaattgtccactatcgttgctatagcttt

SEQ ID NO: 42790 - DNA, 378 bp, Glycine max
  Clone ID: jC-gmro02910061b08d1
agtggatgacgagtgtcaataagtgaagaaaccccattttttgtctgataacacaaacagttacaaattcaactagtaagggataagacgactaaaatggcactcaaacgcaaggttgtataaatcacaaatcataataaaacacactggaacaagcaaagcttgttaaaaggtgcaatagaatttatgccacaacttggaaaattgagagagtttgggaccataactacccaagttgaccatcccacaaactaggatattttccatgagtaactaaggcttaaggagtgctgctcccaccagaaagcctactattttctataatcattttagttggcccggcttttgaacacatcaagacccatcttagtaggatca

SEQ ID NO: 42791 - DNA, 400 bp, Glycine max
  Clone ID: jC-gmro02910061b09d1
gccacagccttgtgttgggaaaccaattgcttaatattaaccccaacccctgtacagaaaaaaaaccccttttttagaaaaccgaaattaagaaaaactaacattttggaagaggggccccattccactccccaaggggtttcaaaaggggatcaatgatcttcccttgggacaaagaagtgaacactttgtcacacttttcacccggggagataaccctttcaccagttagcaatggtggccccaactcctttttaacaaacttgtgcaaggggggaaaactgcgttccttgatcttggttggaattgcacattgggcatttttatatgcaacttttgcaccttccactttcttagggaaaaggggcttcaactctttcttaaaagttgcaatcttttg

SEQ ID NO: 42792 - DNA, 552 bp, Glycine max
  Clone ID: jC-gmro02910061b11d1
aatccacaaaatgaaacttgttatttgatattggcagtctacattgaacttggtcattattcttttcctaagagaaaattacgtttttccgggaaagctttggaaagtagcaccacaaccacaacctcaatctcaaaacccaaatgcagcttgacatgaatccatgccaaagaacttaaatctttttgagaaattccatgatgttggtattgaaagcacagcaaacaactcggaaaccttggaatccagaccctttggccagagcctcaaactctttctctgttctctctttcccacctggattatgtgccaacatgatcacatcgatgtgaaccacaccttttgtggccaagctagagtctggagccactggaagaatgcattctgccacaatcaccttcccattgtctggtagtgcctcgtagcagttcttcaaaaacttcaagcagtgctcatcactccaatcgtggcaaatccacttcataaaaatagcatcagctttcggaacactcgcaaacatatctccacctacatgctccactccaggataag

SEQ ID NO: 42793 - DNA, 590 bp, Glycine max
  Clone ID: jC-gmro02910061b12d1
aatagaaagttgacatttaataaaccaaaggaacacggcgcagcaaagtcctgaaactcgctgcgcttaacaaaaatgtaatcaggggttccgacaaacacaacacattaaaacacagataaataaaagcaattttgccaccgtcgatcaagaacccagttctgggaacaacagttgcgagatgatgggggagacttcaaactttgtccgaaaaacaagctacctagaaaagaagacacaagagtacagaaaagaaaccaacatttattgtaaccaacatcccctgatgaaccagcccgcacgattcacttcttcttctgggcagccttggtgaccttggctccggtaggatccttcttctcaacgttcttgatgactcccacagcaacagtttgacgcatgtccctaacagcaaacctaccaagtggaggatactcggagaaagtttcaacaaccatgggtttggttggaatcatcttaacaaaaccagcatcaccgttcttcaaaaacttgggctccttctcaagctctttgccggatcgcctgtcaatcttggtcatgagttcagcaaacttgacagcaatgggaga

SEQ ID NO: 42794 - DNA, 529 bp, Glycine max
  Clone ID: jC-gmro02910061c01d1
gtagaaatatcaaattgagttgtataaaagcttcaagccttcaactaagtaaaatacatgctagatgcatcaaactccaactattgtgttgtaagtgccataaaatgcgaaaaataatccagacaataatacaatagaatccaaggctttttgccagatgggtagggaagagccaaataactttaggtgaaatgtggctggcataacaaatgagagcattgcacataaggtactccccacaaatgaggcatatacaccaaattctggcacaaatgaagctaagactgccagtccaaccaccacaatcgctcggctgatgtacatgcaaatattttctagtcctgttgaatcattattgtttctgaggatgattttgagtttcccttcgaaaatctcattaattgggtgtaacatgattgggagtgtgaatgcaagccccacacataatcctacctgtactgcaagagatgaccaattcctagggagattgagggtcacaatgtctctagtttcttcaccaaaagccatg

SEQ ID NO: 42795 - DNA, 504 bp, Glycine max
  Clone ID: jC-gmro02910061c03d1
agagatacaaactacagtagttagatgccattggcacaacagttggactcctgtacctccttactttgcttacctagatcttctcaacgaacaaagcaaaacactaagcgagaccttatgttcacaatgtatttacaattgtcaccaggaaaataaaaggatacttaatgacaaacattttgcagtctacaaaagtataactagatactaatagcagttatcctggaggtagctacaaatatataactagcttaccttctttgaaaattattgttgcactgagaaaactgtgtttgaggatcaacgccagcgaaaccttgcaggctcgttttttccaacggtaggaatgaagaacttattgatggctgctgccccggcatggacttaacccctgtatcatggagaaacgaaaaatcactttgagaaaagcaggaagatcctaaatctggcaacattgagccaccatccccttcgtcatgaaagataacaggttcctggaaacat

SEQ ID NO: 42796 - DNA, 491 bp, Glycine max
  unsure (1)..(491): unsure at all n locations
  Clone ID: jC-gmro02910061c04d1
ggacaaaaaaaatgttataatagtgattgaacacgtaacacataggctggttacaaaaatgattgaaatttatgacttaccaaccaattaacctttgcacttgtctagattcccaagagatagaagcaacttgatttttgtacacagacattgtaatattacaactatatattatgaaactaaacacataacttgcgagcctcaagctagccctagtagtattaggtcttcattcttgagatcaatttgattctctcaacgtggctttggatccacaatctcagagaaaacagtcccagacatcaacttatcactctctttgtagctactactaagctcttcgctatcagtactcacactcaccacaccggtacttttgttaaaatccgaaacctggcccacactggttccagtactaaacaaatcatcactagcctnctcctctcttctctcatntaattcattatcaacaatattagtattttcacgct

SEQ ID NO: 42797 - DNA, 352 bp, Glycine max
  Clone ID: jC-gmro02910061c05d1
cgccccccaaaaaaagggggccccgcttttttaaacaggaaaaacccccgcccccgcgggggggcttttaaaaaaaaacggggtttttggaaaccccccccttaaaaaaaaaaaaccccccccctccccagcccccgggggggcgaccttctttcaccaaccgggagacaaaaaaacgggaagggccccccccccgcgatttgacgtaaagggggttacactgaggggcccccccaaggggggggaaccaaaaacacaaaaaggggggggaccaaaaaaccccaccccccggggggggttgaataataccccccccaattgacacccccggggacaaccaaagggggggggg

SEQ ID NO: 42798 - DNA, 537 bp, Glycine max
  Clone ID: jC-gmro02910061c06d1
gaacactaaaaatagaaagttgacatttaataaaccaaagcgacacaacgcagcaaagtcctgaaactcgctgcgcttaacaaaaatgtaatcaggggttccgacaaacacaacacattaaaacacagataaataaaagcaattttgccaccgtcgatcaagaacccagttctgggaacaacagttgcgagatgatggtggagacttcaaactttgtccgaaaaacaagctacctagaaaagaagacacaagagtacagaaaagaaaccaacatttattgtaaccaacatcccctgatgaaccagcccgcacgattcacttcttcttctgggcagccttggtgaccttggctccggtaggatcctttctctcaacgttcttgatgactcccacagcaacagtttgacgcatgtccctaacagcaaacctaccaagtggaggatactcggagaaagtttcaacaaccatgggtttggttggaatcatcttaacaaaaccagcatcaccgttcttaaaaacttgggctccttctcaagc

SEQ ID NO: 42799 - DNA, 412 bp, Glycine max
  Clone ID: jC-gmro02910061c07d1
aaaaaaaaaaaaaaaggggggggggggggaaatatttccccccaccggggggaaaaaaccccccaatttttttaaagttccccccggggacccatggggggggggttttttttttttttccaaaacccaaacccgaaagtttttggggggggggtctttttaaaaaaaaaaaaagggcccccaagggccaaaacggggggttttttggtgggggccaaaaaaaaaaaaagggggggccctctttaagggtccacaagcgaataatttttctcttctttagaaaaaaaagaggggggcccttttccccggggggtttggggggctttataaaacccccccccccggggggggaatcccccccccaaacctttttttttttttaaaaaaagggggggggttcccccggggtttt

SEQ ID NO: 42800 - DNA, 544 bp, Glycine max
  Clone ID: jC-gmro02910061d02d1
gaagttggcaaaaatatatattcttattctcaatagatgaaaaatgatctagtagcaccaaaacacagaacatgttttcccaaacaatgacaatggctatactacaatatatggttttgttgtatcatcaaatgaatacattccaatcagacccaactttcctcttttaagactatgtacacagataactcttctaattaaggcaaaccactcaatagcagtaagaaaataaaagcatgcacacaagtgcaattaactcttatcattgggacatcaacatggcctctccacagagtcttattagcattccaccccacattgtttgagcactggaccagtttgcttgggcaagaagggatcaatcctgacccaaatcaatgagaaaatagatgctagaaggattgaccacaacactacaatggtaggagtcctgttttgctttcccatgagacctttgaggaaagggtacaagtgaacaatgacccagaaggcaaagaacagcttcccaaacaaaggtccccatgaaccatatccattgttgatg

SEQ ID NO: 42801 - DNA, 548 bp, Glycine max
  unsure (1)..(548): unsure at all n locations
  Clone ID: jC-gmro02910061d03d1
caacacaaaccaaacttattttcaaaggtcattacagacccattacacatgacatttcttcttaaaatgtttgggaaaatccaacatcgaacatcacacagaaatcagctccagcttaaaaccccccacgaagacgcaacaccaagtgcagagttgactccttctggatgttgtagtcagcgagggtccttccatcctctagctgtttgccagcaaaaataagcctctgctggtccggtgggattccttccttgtcctggatcttcgccttcacattgtcaatggtgtcggagctctccacctcgagggtaatagtcttacccgtaagggtcttgacgaagatctgcataccaccacgaagacgcaacaccaagtggagagttgactccttctggatgttgtagtcagcaagggtacgtccgtcctcgagctgcttgccggcgaagatcagcctctgctggtctggggggataccctccttgtcctggatcttanccttgacgttgtcgatggtgtcggagctctcgacttctagggttatagtcttg

SEQ ID NO: 42802 - DNA, 447 bp, Glycine max
  Clone ID: jC-gmro02910061d05d1
ggaaaaaggcccggtttaaaattgaattgggggggaaaaccccccaatttgaagtttttccaatcaaaattcaaatcttgcaaaaaaaaaaaagtaaagggcttttttttttgggttcccttttttctctctttctggcttttaacgaaggcttaatcccaaaattaaaatctttggggcccttttttttttagaactcaaggaaaacaaactccaaatggaaaaaaaaaagccgggtcctccatttttttatccaactttttattctcagtttactcaacaggagggggcccaaactcggccaatttgggggtcttgggagcataaaacattttaagaaagggggggttttcacggggggaaaggttaaacacatgcttccaaaagccataaacccccgggggggggggaagcctctgtgggaaaaattgcgcaggggtctttttt

SEQ ID NO: 42803 - DNA, 500 bp, Glycine max
  Clone ID: jC-gmro02910061d06d1
ggcatcagaagaatgatattgtcaactattcgtaatccatcaaaaagatcgggctgattatatacttacattatgcagcaggggcacagtacaatttctctgaaacactgatcaatggggctatacaaagtcgtctttgacaaaacaatttaataaaatacacaataaacaaggctcaataacaacctttgcaccccctataacttggagatttgtttcagtcgatcaacataatttgtaaaatcagttccgaattgctaacaaccattcatctggacctcaccatttcctgccatgtcacctaactaatacaggtaatatggcagttaaattgcgatgacttgtctaaaaacagtgacataggaaactagctagatcaaaatggtaaccacaaagcacaaccaatttttcaaattaaatatgactgaaacatttcaaagtttaggacataatatataagcctggcctaaaaagcatagcaaaagttattcagccccaaa

SEQ ID NO: 42804 - DNA, 489 bp, Glycine max
  Clone ID: jC-gmro02910061d07d1
aggacaaaaatcaattacaaatttgggacggccagaaatcattagatatacaaaaacaaaaagaactggatcaactcctaacacaatcccaacacctgcacacaacaacccaaaaaccagaagaaacacaacaacaaaaaaagctatcacactgaagcatacagatttggaacaaaagaaaaccacttgaaaccacagctacatttgagaggcaaagaggggcaccttggaagccaatgccaagtcctcctagaaagcaagtaatacaaaatctctggccaagtgtagcagcaaatgcagatcatcccttcatgccaaaagcaataaacatgttcatagttatggtaacacactgacacaaactttctacacataagatcaggcaaactttgaacttccacccaataattcccatcttcacccaattcccacaacttgatgctccttgaaattccattggtcccaaccccaccaaccaagtacaatttt

SEQ ID NO: 42805 - DNA, 500 bp, Glycine max
  Clone ID: jC-gmro02910061d10d1
gaacatagaaacaaatgagatttataaatataaaaattgaaacaaactgaggaaggctagtaatttacttatttacagcaagtcatcaatcattctgctatcctagaaaataaacaacgtattaaataaaatggttaaatggttaatgctagtcaaactgcttcgagacatcactccagtgatttgtttcactgctcgatttctgattccaacccaagaaagcctcaagcattaccaggcgagttagtgaatgtaaaggcataatggaccttgaagcaatgcaacaactaacggtaaccaactactgctttttatccattcaggtgcttcaaacagggatcttctttaagcgagcagcaattggcatgcccaaaaatccaaccaacaagcaaaagaaccactgtgccagggtgagaggtgttgtgtttgcaaaggttcccaaatactcaactattatgatttggaagaaacagtagcactgatgacacccacgaaaacat

SEQ ID NO: 42806 - DNA, 441 bp, Glycine max
  Clone ID: jC-gmro02910061d12d1
attcccctcactttgtttggcaaccccacaaaatggaggggggaggggaaaaaaaattacatcatattttggggggggcagcaaattcaaaattacaattgaaatggaaccatgacagataggaacttacccaacttgggaacacaccccacatttattttactacagattcaaggggaagacaaagaaagaaagaaaatgcctatattttctgctatctttcttgagtacaacaaattgaatgggctgactctatatacataaaatgaaagcctatgcctttccaaggacaattgtaggagtaactctatggccttcttcatattccttgaggaggaaaataataccttgattcatcacatttggaggagattattcacagtaaccgcgactgaatttgtcctttgcaagtcctggaatatcatgtcatctggaatatga

SEQ ID NO: 42807 - DNA, 434 bp, Glycine max
  Clone ID: jC-gmro02910061e01d1
aaaacacgaagccttattcacagcacgggggggtttttcaaaaaaacaaagttacattcccttccctgtggcacaggtttgaccaaatacactgaattactaaaattgacataaaaggaacacttggaaaacaaaaagcaaaattccaaacgatttttttgggaagagtcaaaccccaataattcttatcaacaagaaattcgggtggtggacccataataccgattcctactcgcactagttttttaaaacaacaccaacttcgattgatcagtagctgtagttcgaaacatgggggctttttgaggcaccatcagcaagctgggagttacccttggagggtcccagagttgcctttgagttagccttggctcttaccaaaagggctttctgagcctctttcacattttttttttttccgccccatgccttaa

SEQ ID NO: 42808 - DNA, 323 bp, Glycine max
  Clone ID: jC-gmro02910061e05d1
gattgttaaaagaatgaacaaaaaaacaggcattgtgatgtttattgaacgtggcccaatatctacaaccattaacatttaaatgacttgatggaaaatacaaagcatgcctctgatatttcaagtgcatgaaaaatctttatactcaaacactataataacactggtactacacacttttcctttaaaaacagacagaaagaaaataacatgctctctatgtacatatattggataactaaaaggaaaacagcgacaccaaactataagtttaaacggtcattagaataaataataaaatttgcctatccaataagccttgc

SEQ ID NO: 42809 - DNA, 427 bp, Glycine max
  Clone ID: jC-gmro02910061e06d1
aaaaaaacatgttggaatttctgtaagagaaaacattaaaatcaaactacacaaaaaacaaaaaaactttgagctgtttgacatacaataatacatttccctatcttctcctatgatgtttgggtttacataacaaaacatcaaattccttatatttttaccatcaagttctcaaattaaatattgtcacgtgatttatttatttttaaaaaaaatccgccacatttttaacggggctgtttaaagttgaaaacattatctacatgttgtttaattcgggaactttaaggtaaaaatatacaaggaatttgaccaaagtttttaatctccctatctatagctatgattgtattatcaccaagaattgaagatgaatcatgcaaacactggttcatgtccatttttttattgtgaatgttttggagag

SEQ ID NO: 42810 - DNA, 393 bp, Glycine max
  Clone ID: jC-gmro02910061e11d1
cctattcaattttccaccaaaatacatccaatactgaccgagaatggtgttccaaaaattccaaaatctaatcccaacacagaattataaagtatcaattaaagcaagacccaaactcattcgaataacaaaactcgataagatgaccgctcaaaacctgatcttggagaaaaaccaccgtttcttcccggttttgaacctattcccgaggcgattcttggtttccttgagagcagcgaccttcttattcttggcgtggaaaacgttggggtcaaccggggcctttaagtcaacatcaagcgtaaatcgcgtgggcatgacgggctaggtgattgactagttttacaatcactttcacgcgcgaattcttggtcgatttcttagccgagtcct

SEQ ID NO: 42811 - DNA, 508 bp, Glycine max
  unsure (1)..(508): unsure at all n locations
  Clone ID: jC-gmro02910061f01d1
agtcatggataaatacacatattatgattcacagcattattggagagaataataataaaaatagcactaacgatctctgctgagctagcagtttcaataatttatgctccaaagtactgtatcatttcatcctcacacacgaaatcatctaaatggaacggactgccgagtgctccaaaatctaatgacatgctaaggggtgatccaaagaaggagtgatccataggtctatcaagctcattttgaaatgcatctttaccaaaatattgcaagtctcctccattaattccatcccctttcatatgtactccttgtaaagaaactgcatcattctctagcctaactgcttcattgtttgcagaatgtagctgctgcccatcctgaccaggctcatatcctgctgctggattataaagattataagtggtctcatgatgcatgtcagggttttgcaactcacgatagtgcattggttttccactcatatacatgctntctgaggaaacta

SEQ ID NO: 42812 - DNA, 454 bp, Glycine max
  Clone ID: jC-gmro02910061f04d1
ggtacaaaattctgataaaatttccattgcatcagaacggtaacattgcataaccaaaaaataaattgtgagtaaaaggagaaaaggaaaaaaaaaaacagtttaagtattgatgagatgacattagacctatgaatgaagtagtagtagtcatgaaacacgcaaattattcatccacacctagcaagacatccattgaagggagtgattaacttcacaacaatcttaagcttgaggcttctcagacttgagtggcttcacaacttcccaggtgaagtcagggtcatcccttccaaagtgtccataagcagctgtcttgaggaacctatggccacccctcttaaggtccaagttaatggtgatcattccaggtctgaagtcgaaattcttcttcacaatttgaagaatctccttgtcaggaatcttcccagttccataagtgtccacaaacact

SEQ ID NO: 42813 - DNA, 245 bp, Glycine max
  Clone ID: jC-gmro02910061f06d1
ccctctcttaaatctagcatggcgtgctcattaatgtaacattttatttacccactcgtaaacatagatatcaattaaaacatgtcctacatactcctccttataaactaaataaaaccttggaagtttattccccaaaaaagtaaaaacatgtatgttataagccaaatttgaacacaacaatccaaataggatgtttcactaaactaaattcactttttttttttctttgagggcagtaatgt

SEQ ID NO: 42814 - DNA, 272 bp, Glycine max
  Clone ID: jC-gmro02910061f07d1
gaaaagcagttctactattattttattgggacgggctatcacataagacccatcttcgaacgggattatttgcttagaaccgtacatcacaaaacccacagaggcctacaaactgttacagcaagcatgcacaaaaaacacagttgaggccgtgaacaacttatggggcctaaaccaactttgattggaaacaaagaacattgaacatggggggtacactacgaaacgggaaatgtaagaaaaccactcctcggtcggggcctggaatgcgc

SEQ ID NO: 42815 - DNA, 349 bp, Glycine max
  Clone ID: jC-gmro02910061f09d1
atggggaatataattcatttcttggggaaaaaatgacaaataggatgagtttgaagcgcattcttatccaccacattattgggctcagactaagcaaaccttaaataaaaggactcacgaaatatataactataaaatctcacaaaacaatctatgcaaacaaaatcacactgtccacttaatttctaaggctctaatttaaccactttttttgggtacttcttcatagctgcacttaagcctgaataaagcaattctagtaataacagcactttggctgtgaagatttgtatcttcttgatgatggatggcaaagaaatcttggaaaggacttttttctttccgaatt

SEQ ID NO: 42816 - DNA, 505 bp, Glycine max
  Clone ID: jC-gmro02910061f10d1
aaattaaaaagtttaataaataacaatgcaaataatttggctacagctcacccaacatatgggcagtaaaaatgaagatgaagaaagcacgtcaaaatgtcaaattacacgaagcaaattctacatttacggcaaaaaaaaaaaggcaacagataaaaaagcaaattcttttcttttttaatttcctttttttctctctttttgaactcgttgtctaccttatggatccacagcttatggatgaaaccttgcaaacgccagctgatgtggtgagtggaacatttttgtagcatgccaccagttcctcatttgtgtgcaaatcgacttgcaatggttcccaaactttcttctttgggtttaagagttcatcaggattaccttcatacccagggaatgtaattctttctcctggttgagcagaactgggaggctcaaccaactcaaccttggtgtgatcaccatcggaagcagcaagaaccattgcttgagaattaatgcccctcat

SEQ ID NO: 42817 - DNA, 507 bp, Glycine max
  Clone ID: jC-gmro02910061f11d1
aaaacaacttgatatgacaattaatcatttcatatttcacacattcataacaaacgtaggtgggatattagagtactattattaatgggacacaattgagttcaacacaaaccgaacttattttcaagggacattattacagacccattaaacatcaaagttcttcaaatgttttgggaacacatccaacattacacaacgagcttaaaaccccccacggagacggaggacaaggtgaagggttgattccttctggatgttgtagtcagcgagggtccttccatcctcgagctgcttgccagcaaaaatcagcctctgctggtccggtgggatgccttccttgtcctgaatcttggccttcacattgtcaatggtgtcagagctctccacctcgagggtaatagtcttacccgtaagagtcttcacgaaaatctgcataccaccacgaagacgcaacaccaagtggagagttgactccttctggatgttgtagtcagcaagggtgcg

SEQ ID NO: 42818 - DNA, 469 bp, Glycine max
  Clone ID: jC-gmro02910061g04d1
agcaagttgatttttaagataaatgttgatttgtatccgggcaggtaaatttctagcgtgacaagaaacacacaaagatctagaaaagacagtagaacatttgagaactccaccattcacgcaacctgttttaatgaaaggaatatctgtcatgaaaaatctacatgaagagaaaatgatcagatgatgcggcggcacagggtaatcccatcacccacggggagctggcaaatctcgatcctcgaatcttgagccagatacttgttgagctccatcacatggccgcgaagaggcttaatgtaatccatcaatggtgcatcgggtggtgcagccacagatccagcccatagggtgttatcgtatccgatcagtccttcaatcttcacaagctctagaaccctcttgtggtaggtcaagtaattgtccttatcagcatccacgaaaacgaaaaccaacgacccccttttat

SEQ ID NO: 42819 - DNA, 235 bp, Glycine max
  Clone ID: jC-gmro02910061g06d1
gatctgcaactagaacaacatatattggggcggtgtgtattataaaaacatacaatatatttcaattctgatgcatagcatataaaacgcagaaaaaagaagtgttatggttaacttgagtcggggagagggggggataataacatctaaattcacaatgtccactagtaattgggttaacttacatgtacaaaactacacccgcattatgagaatacccagcgcactataagca

SEQ ID NO: 42820 - DNA, 463 bp, Glycine max
  Clone ID: jC-gmro02910061g07d1
cttcttcctctctgatttatgatcctccacagcatcaccgttggggtctatatccacgtcatcttcagcatcagcacctttttgtttcttctttttggttttcttgcctgaaacttcagcaggtgcttctgtttccatctctgtatctttgttttcagcactttcaatagcagcctgcatgacatctatgttcttgcgaggggcaactcccttgtcataaaagtcaagtcgttcctcaacttgctcacggagtttctgcccaaaaacagtagtacccttttcagaaaagcagtcaatccgtgatgcaattgagcatttgtttgcaagataacgagccattctacccttatttttggcagatgcccgaccaataaaagaagagtggaatatcaaaccatatttgggagtgtttcctcttgtttttaatgccctgaacaaagccttctctgcaccaagaatttga

SEQ ID NO: 42821 - DNA, 313 bp, Glycine max
  Clone ID: jC-gmro02910061g09d1
aggtcaaaccttttttttgaaggttatggggatattgtattatgtatttccttaacatacccttagagccccttattttttatatttatttgttccaggggttttacaacttttggagatttcgattgcatgatcttattacttgggatctttgattggttggaatcccatgttgggaaagatggggtcattatcacatggtgtgggcttattgtcacaacctataaatgttgttccagcagcatgaacacattgttggacctcggcaagatgaacatttccacttttatctggctcacaaactttgtcaaca

SEQ ID NO: 42822 - DNA, 263 bp, Glycine max
  Clone ID: jC-gmro02910061g10d1
agaaacgtgcttttgcctaactaagcatatgataaataagcggagtcaggttaaaatacaaacagccaatataactgtgtcgtcattattttctgctgcaaatacagagtgttatttgtggatgccagtattatcaatcaacattgatgatgaatgcatcaattttcataaaaaagcaaaatctcacatctaagacattttattgaattttttccctgtcatttaacattgaaactactcagtctaattcatgcgttaccatg

SEQ ID NO: 42823 - DNA, 395 bp, Glycine max
  Clone ID: jC-gmro02910061g11d1
cccctcgggagaaagtgtttttttttttttactttcttaaccaattgggatgggtcacttattagccggggccattaaaaaaaaatccaccaatccggggactcccttggataccacctcctccggattcataaatattcttaaccatcaagattttgggccagggagataaatggaaataaacaacgggggattccatttttcacctctttgggggtcatttgacacctaaaatttcccattaaaaattaaaaacaattttacaaagcggttttggcttttgttcccactaccctctccaaaaattatatttttttttgagaaaaaggcctccactcccaattttttatgggaccctttttctttttttttttacgtggactggaacaccaacc

SEQ ID NO: 42824 - DNA, 585 bp, Glycine max
  Clone ID: jC-gmro02910061h01d1
attaaaataacatgatttcagtttctcaatcttcaacagtgtcatgaatacatgtcttagcagcaacaaaaatataaatgtacatatcatacctcttaacaagagcccaggcacacacagagcacaagtgagtgtttgaaatagtgtccaacatctaacatttttttcctcacaaaaaacccagataaatacatagaagcatgtatgcattgctttcaagtccactgttttttacgggaatccaagcataccttaagtcaattttggcgacctaggttctcttggctcctttattgggaacttgagacaaaacaaagcataaaataatttagtgaaatgggctatgaatcatatgtgcagaggtcatcaaatcccatatactcgtgattttcaatctttttgaccattgctacaatgccaactccacctagtgagactgcgctgacaagtattgtgaaggctagaacaaagatgattagagatgctctcccaagcacatcgatcagctttcttacaatatgctgccctacaattgctgaatagcagcaaccgcaataaagtacagagcataaggaactgggaaac

SEQ ID NO: 42825 - DNA, 560 bp, Glycine max
  unsure (1)..(560): unsure at all n locations
  Clone ID: jC-gmro02910061h02d1
aagccttgttatttataattttttttatatttgaattaaaatgaagattaatacaacccacatgagtttcaactaatgaaagataaaagtatccaaacacaaattgccaggggtatgaaatggttggagagacgtgcaattaacatttaacaatatgaaaataacactacattaccaaactaaaaccactgcagaaggcaatgtatgtgaacacacaacagagcttctggacgggaaaaagttccccagccacacaaatcttgttttaaaaaaagaaaatatttattataaaacgttaataacattcgttgtcaagtccatcatcacggaacccatcagcaacagatcatcaccgagttttctttactcttctgcagcactagcagcactaagatccacactgaggtcaataacctttccagttatcaatgtatacatgttgagaacgtcatccacagtcgactcanagtgagtagtagcatcataacttgttgatataaagcagttgtccaaagtggngttcgtgactgggtcatatctgtcatagatatcaaaaaata

SEQ ID NO: 42826 - DNA, 422 bp, Glycine max
  Clone ID: jC-gmro02910061h03d1
atccaacgaaatgggggatatgggcaagacaataatagtgtactgccaaaaacaagtgacatttgtttggattctcaggcaaaacggtaccacaaagggcggaaacccctatgctgaaaattatttgagggagggaaacaaacaatgccccgataataaaaagtgggactaattattaacttaaaaagcctaaaaaagaaaaaagaaaaaagaagaagatgattgattctagatagatctacagtttgcaaccgaacccaataatccgttgggcaattgaatcacaaaaaaaaagtgtaattaaattgaggaaacggaaacgtcaccgtttaagggtagtgttttgcaatcgaaaccacaaccacactgggggctcttgaggaaattctcgacgccaaaatcagcggaagcgattccgacag

SEQ ID NO: 42827 - DNA, 486 bp, Glycine max
  Clone ID: jC-gmro02910061h04d1
gcaaacacaagaaagattgtattctatttagcatgttagcgtaatgacaatatgctcgtacaagtaagaatttttactgcaccaaacattaacaaaccctagaagaacatcaaaacaaccagaactatacaacaatttaaaggagaaaaataaggcgcgcgcacacacaactttgccatcttaatctatgataatttgtcactatgatattccaccaccactaataatggaggggaaaagaatactatctaagaacaccaattagaagatgctacaagcattctcatagcacatactgttaaactggtatcacatcattcttggatgcatcttcacatcttaaaactataccctcaagactagttggaaaaatgcatttggtccattggcaaccagtagtgattggatctggcggaggaacaatcataagaacattctcattcctctgaacaattcccattacacttactgggcttccttctttga

SEQ ID NO: 42828 - DNA, 393 bp, Glycine max
  Clone ID: jC-gmro02910061h05d1
gggcgcacataaaaaaaaagggggattatttttttgttaaaatttatttaaaagccttcaataaattaaattaaacaatccttttttttaatatagccgcaatcttagtatagaattgaagttaaaaaaagtcccttaataggggaaaatacaattgcccaacaaataattctctaaccaatcaaattttatggcccacttgtccgtaagtctgaactggttttccaagacatgcttgcttttagaaaactttttggcctgaatcaaaccttttattttatacattttgaaggcctcttctattctgacattttgcttaaaccaaatgcaagtgatggaatactttgttcatatttgaaaaaattgtttggatcaaccttggcctttacctct

SEQ ID NO: 42829 - DNA, 513 bp, Glycine max
  Clone ID: jC-gmro02910061h07d1
acgtagaatggtgaagttccaggtcttgcacaacatacacagacacaccataatttattttatatacaatcttatggtgcccaagatgcagatgcatggactaattaaacaacaacgttagtctgataggcagtgtccatagataaattgggtacccataaaatggccttgcttccaaggaaatggcaaacagggttagttccaggatcaactcccatgagttcatgaagcatgtgatgattcattccagaagtatctgagtggcaaacagcaagtgcctgagttttggttccatcaccagccaccaatggaaccatgaaagctgttgtttcacggactttatggcagtaaaatactgcagttctgaaatttagcccatgacacatcactgctttgtctccaagattctgcactccttccacagtgtattgctcttgcttattgacaaaggaacttgaaagtacttgaatggtcttttccagctttgaaatggcaaaaccaattactgttccc

SEQ ID NO: 42830 - DNA, 524 bp, Glycine max
  Clone ID: jC-gmro02910061h09d1
cgattaactgaattgattttataaaatagtacactccttttttcttagaatgagttcggataaaactaatttgaattaggttcagatacaatctggttcaatccgaaccaattattttgcacactttcaagtgagtcaatatcttttccatgacatgatctgtggaaacgctcacataatcctattatttacacacacaacaagtctatgatgttccaggatagttacacaatataaacatatcaagagagcaaattgttacatttagacagaacctgtacaggaaggcaggtaatcacaactaggaatgcaccctgccattctcccttcaatcaatgcgcggcaacaccgaccgacttgcagcccaatttaggagcatcaatgtccacccacacctcgttcttgcgcttgacaatccggatcggagtattgtactgcgcaatcgagtaaccacgcccggtcttgggctcagcccaaggagacctactcaggctcgtggcgagcttttaagcctccttgacaat

SEQ ID NO: 42831 - DNA, 450 bp, Glycine max
  Clone ID: jC-gmro02910061h10d1
cgggcgactggctttatttcatcatctctgacggaaaactgtttagtggtacatacgggttcggtgcaaaactagtagcgctctaaaaaaataggccgctgtccgaggccttcttattgactattgtttaaaaaatgcaattatgaagattagcatgtttggctggcgctctgaatttcaagtagaaaagacaccctcacctggaagctgcggcggctatacataatcaggtcattcttgatttccctgagacggttgccctcttttacaggattctgaatgggatggcgtgttcctccagaagatgaatattttggaagatcctagtacacgtaaatgtcttgaaaattttatactttggttgggaagattagaccgtaactggttcacttactgggctagaagctcgtgcctaaaccgttggtgatttggataggccatcaagaacct

SEQ ID NO: 42832 - DNA, 510 bp, Glycine max
  Clone ID: jC-gmro02910061h11d1
accatagaaagtgaggacactggttaggattctcctctcacatattattactgctgtaaagtttttagaagtactcattcgtatcacacatccaatggaagagtagaatcaagtcactagttccaatatgggctaggttttttaaattaaaagaacaaaaatgtataagattcacaacacaatccttcttattcgttctggtttgactacaaattatgcattcaagggaatctcgaaaaaacctacacactccatgtacgagcaaagacccaattaaatcagaggagatcagaacgtatcacagaagagccggacctgaaggtgttatcttaagcctaagcgggagcttgtgttacatttcctattgtttttcgatcaaagatttcaatccagtatccatcaggatctttaataaatgctatacctttcattttcccatcatctggcttcttaacaaactcaactcccagattctgaaatctttcacatgccttatatgtgtcatcaaca

SEQ ID NO: 42833 - DNA, 412 bp, Glycine max
  Clone ID: jC-gmro02910061h12d1
gaaatggaatttttattgaactgctaataacacaaagcgtgaaggaaattgtaatatacatcagatcaggaacatcatgagttttgtaatagtaaatttggctgagcaaatccttgttccgtttattaagtctactctccacattatagtaattcacgaaattatctcaaccagatgtgcatgcaggtcgtcttggaagaagctgctgatgtggagttctctgtagttttggtcgcagtgtctccactgttgctgtagattgttgattcactccagcaccttgcttgcataatgcccagtctgccgaatcaaagaatgctctttcattatctttcgatatcaaagggcttttttttggggcaagcctaccgtactttccctcggatgttgtcttagcattcggggcagaaaa

SEQ ID NO: 42834 - DNA, 488 bp, Glycine max
  Clone ID: jC-gmro02910062a01d1
gaataaagattcatatactttatatatcatgtcgcatgagtcacattttgtggataaaaataacaggaacagatccaacatgatgaaattgaacttatccaccaagcttgagacagttaccagaaacatatgataaacgcatgtccaactagggctatttataacaaacagtaaatagaataaatttaaataacagtacaaggcagcaccaattccctggggtaaacttctaaaactaagcttttaccgatgtttcaattccaacattgtattgcacaaattcatgcttcacttcagcatcccaaagctcaggaaatgcctccttgatattatgaatactctctaatgcatgatccactccagtggtacgaacagatgtaccaatcgcaactgtgtggaggcccaagcgtttggctgtcaataaattgcggatgctgtcatcaaaaaacaatgctctttgagggtcaatatctgctaacttgaaagca

SEQ ID NO: 42835 - DNA, 447 bp, Glycine max
  Clone ID: jC-gmro02910062a02d1
acagatgattacgagcattacatagctattgacacgaatgacaatgtcatatttaacatttaaactacaccttttaaacaaggagctatagtggaaaaccaagatacttgtttgtcacctaggaccagaaagctccatggcttcaactacgagtgaagattcctctattaaatctgaatatctttgaggctcacaagaccgaaaccttggtgtttcaatcctctgtgaggcctcccatctctcagctaagccatccccttctaacatcttcaatacttctgacatcttggggcggtgcgaaggattgaattgtgtacacaagagtgcaacctgaaccatttcttctagttcaatcagatcgaagttgccctttagatctttgtctaccatttgactcaatcttccatcctggtggagcttcttaacccaatcaagcattacaccttt

SEQ ID NO: 42836 - DNA, 395 bp, Glycine max
  Clone ID: jC-gmro02910062a03d1
agagaaaaatcaatttagattctagcttcgcaatcaaattattactagtctgtacagagactaagtgtatgggaaaagtcctaaacacacgttttcccaatagcaagaattgattggttgcttctggagcattgaactcaagcttttcaatttcaacgggatatagaaacacaagctaagtcgaccaatctccctttttttccgttattgttgcttctcgtgtgaacacgtacactttgcatgacaatctgaaagtgtctgaacttgcttttgaaggtctttgatgtaatccacagccaagtccaacatatcagctgtgttagtttgcttgtccatgtttgggacaagatcctgaagtttcctcatacgctcactaattttagttcttttaaccc

SEQ ID NO: 42837 - DNA, 450 bp, Glycine max
  Clone ID: jC-gmro02910062a04d1
atggcagaaaatcctttattatagagatttgattatgtatggaaaataaaaaaagaaaagaaagcagcaaacagggctagctaggcatggatggagaatactaggaaggaagaggccttggcggaggagggagtagctgatggaggttgggaggagtctgattatggttgggcagcggtggagcaatgaaggggtgttcgaggagcctggaagcagaccagcggcgagagggatcgcgctgcaaacagcggaggatgaaatccttgaagtgaggtgaagcagaaggaggagcctctggaggctgagacatacaaatggcgcacattagactggcccaatcgccctgcctccctacagcgaaagggaaccttcccatgtagaactccagtatgctaaccccaaagctccatatgtcccccgcgtaagcgtcgtattgcccgtcgtttatgt

SEQ ID NO: 42838 - DNA, 374 bp, Glycine max
  Clone ID: jC-gmro02910062a05d1
gtgttattacaaagaggtggaggaagctgcgctagcttcccgtggagaaatggaggtgagatgagtgagcttcttagtcgagcttcttgtcgatgttgtcgtcgacgatgactccccaggaacccttcttgcagagccaggtgatcttcttgccctcgcgagccatctgagcgtacttggtgttgcgctcaatgttctgctggatgaagaggagtccgtgctcgttgattcggacgtagcggcatccagaagcgccgaaggtgaccgggtaggtgactccgttgatctcgacgtcgtcgctgagatcgtggatggcggcgtggatcttcatcatgtcctcgttgctgagcatgatggcctccttagattcgtca

SEQ ID NO: 42839 - DNA, 490 bp, Glycine max
  Clone ID: jC-gmro02910062a07d1
cttgttacaactattcataattgtctattcatacaaatggacagattttattttataaataaacgaaaataaaaaccttaaagcacataacatcaacaaacattccattaaaatttcagaataaatgtgccttataaccggctagcgttcttcttagtcaagcttcccatggcctttgctttctccctaagaacaaatttctgagtcttaccagttgatgtctttggcagatcagtaaacaccacagttcgaggggccataaaacgaggcaaacgattctgacaaaattggattatctcatctgatgtggcactgcatccctccttgagcttcacaaatgcacaaggggtctctccccaataatcataaggtttcccaacaacaagtgcctcaaaaactgctggatgactaaaaatgactccttccaaccaaattggctaatattttcttcaccagagatgatgatgtccttcgagcgatccttaagctc

SEQ ID NO: 42840 - DNA, 398 bp, Glycine max
  Clone ID: jC-gmro02910062a09d1
aattatgccaaccattataccatagcgttaaaaatggaaaaccagtgtaatgtatacaggtaccccactaaaaaagtacaaagatagagattatagtcatcatttctcaagcattaaacacttttttcgcaacacgcagatcccgtgacttttcatactcacaagattattacactgcaatcaaagcattccagtccaggtcgatgcaaaaacttgtacagaagccaatgaaatatgcgcgataacaagacattaagcaaagattagagaccctgttcaatgagataatcaccaagcctttcaactaccatgttgcattgacctggagtcattggttcatcataaatgccaatgatcaaggccgcaccggtcttctttacagtaacaccaccaggacc

SEQ ID NO: 42841 - DNA, 285 bp, Glycine max
  Clone ID: jC-gmro02910062a10d1
gggttggggggcaatttaggcattgcatatgggtgggggcttatgcccaaacaaaaaaacaaatgtgttcccgtttgacaattggcctgtaaagaacctaacatgcaaaattttttcattcctacctacaaagttttcagcaagggggagggtgagagcaaaaccctcccccccaaaattcaaaattcttaaattttaaaaaaatggaaacaatgcttgaactttaaaagaattttattcaaccaagcttgagttccacttaagcaactctattgaggagtcctt

SEQ ID NO: 42842 - DNA, 449 bp, Glycine max
  Clone ID: jC-gmro02910062a11d1
cttatgaattaaatgcaagtggaagacatgccttcttatcatcaaaggaaacggacaaacaccctatggctgtttgtgaattcgaaaatctcagactgttaccatcaaaacaaaaaacagtactcatcaaaaacatacagcaacgaaaatgttaccgccgatcaagaacccagtttagaaggctacggctacatgaaatcggtcggcacttcaaaatatatactggtaaaacaaacacctaagactctgcaaagataaactactggaaaggaacaagtttttttgcaaccacgttgctgatcacatgtgctagcaaaattgccaaaatgcaatcacttcttcttggcggcggcctatgtgaccttggctccgggggggtctttcttctcaacactcttgatgacttcaacaactacggtttgacccatgtccctcacagcaaaacgacc

SEQ ID NO: 42843 - DNA, 433 bp, Glycine max
  Clone ID: jC-gmro02910062a12d1
gggggcaaaatgggattgtgaacaaccttaaattcaaagggagactttttgcgggggaaggtgggaaaaaaaaaaaacaaactttgtgtttatagactttctgagggtagcattttctttaaaaaaaaagagggaatccccattcacaaagggaagggatgggggtgacatttttgtgccccatttttgggcccaactgtttatgaaactccattttccataaacttgcttggcccgtttgaaaaaaggcttgaaacaagctcttggcattaaagggttgatctggggtccccaaaattacaactttccctccacttgtacccacggggggataataaacgggaacaattgccccggaaagttgtctgatttggccaaatggcccccttttttaccataaacaggaccaaagacgtgttcaaaaacttttttt

SEQ ID NO: 42844 - DNA, 306 bp, Glycine max
  Clone ID: jC-gmro02910062b02d1
ggccaaaaaccccaaatttattttttaataaaggaaaagcaaaatgcccccccattccccaaacaaaaaatgttttttgaacccaaatgggttttttttcccaaaaacccacgggggggttttttttttacccctcccccccccttgaacaaaaatttttcggaaattaaaaaaaaaaaaagctaaactttttttcccccaaattgggaagggcttcccccaaaatttcaaaaaaggggaaattaaacaatcatgccggtttaaaaaaccggtttgggtttccccccactttccgggggtaatccc

SEQ ID NO: 42845 - DNA, 472 bp, Glycine max
  Clone ID: jC-gmro02910062b03d1
ccacacaaaagtaaaggagatttcaaagcaaatgacttttcagtctcaggttacaatcaacgacaatcacacgaaacacaatagaacaacataacacacttgtgcccaactcacgcctagtcgtggctgatgcactttattcagcttttaacatatgaaattgatggaattaagggtcaattaagccccataatacatcaatttttatttcttagatagcattagtagagtaaaacatgagcttaatttgatgatttagttgtgcccctgagtaaggtaagcatcaatttttttgctaaccacaacagccagttgcaacaaggtatgagcgtcaggaatgtggtcctcttgtttctcgtattccattgcccaaagcactacgctgccctttccttttggagtaacttgcaaattagacttgaagctcttgtagagtcccagcacgtcaccctctatgaccttcattggcatt

SEQ ID NO: 42846 - DNA, 493 bp, Glycine max
  Clone ID: jC-gmro02910062b04d1
aaccaacaaagtaaactcatttggaaatgaacattgttcaagaacaattagatcaaagctcaatgcaacaccaaggatgccacaaaaccctcttattttgaaacctatcctatattaagcctctacaggagcaagagctcgcagctctcattgtaccttaatccactgttggctgaaacccaaccataataataatataaagcacaaacttcaaaggaacgaatgatttttgctcaagcatcatcaagagcaaggacaccagggagttgctttccctcaagaagctctaagctggcaccaccaccagtggagatgtggctcatcttgtctgcaagtccaaccttctccacagcggcaacggagtcacctcctccaatgatggttgtcactcccttcccactcagctctgccagtttcttggctatagcctctgttcctgtggcaaacttatcaaactcaaaaacacccattggtccattccaaataatggtct

SEQ ID NO: 42847 - DNA, 455 bp, Glycine max
  Clone ID: jC-gmro02910062b05d1
aaacacaaaaaggtatggtcctatcccaatagaaatgggatcaaatgcaaagatgcaatgtacaccaccacatatgaggaatagagccaagtctgtactggaaattaaattactttgatacaacagaatcaatagctctttccaacaatacaaattatctcaagttcttacaagggaatgttaagaaacaaaagcaagccatgcatatactcactgttttgtgagtatttatctctctctctcttcctactcaatgtacaaaatgcttagtgccttgtgaacctctcaaggacttcaaagtagtcgggaaatgtcttcctggtgcaaccaggatccttgatggttactggaacatccccacaagcagcaagagagaatgccatggccattctgtggtcatcatatgtgtctatagctgtgacattcaatttttaggtggagtaatcacacagtaa

SEQ ID NO: 42848 - DNA, 303 bp, Glycine max
  Clone ID: jC-gmro02910062b06d1
aaaaagccaatacaagagaaaccattatgttaagactatataattagcactcggctgttgcaaattattcagcatatcaaaatttagataaagaaactcaaattccactcaatttcccatagcaaaggctgcaaacaaccaaatctactgttcggctatccgtaagatactggacaaagaagaaatgaaatgactgggagaagcttcaggatctaaccaccttccacttgaatgtgttcatgtaatgactgttggagcggatcgaccagtgaattcttccatcttcgaaagtttcaacgcaac

SEQ ID NO: 42849 - DNA, 430 bp, Glycine max
  Clone ID: jC-gmro02910062b08d1
gggataaagacaaaagctatcgtctcccaaaattttaaaccgctcaggtagactacaatggggagaagaatcgtaagttcggaatttttaaccccaaaagcgccatgcaagataaggtcaatagtacagactcaaattaagcactacaagtatccacgttgaatatctcccagcattttcgatatcaaagtcaaacaatcatcaggagctgcgattgatcacgagcttccatgagagatggttaatgatgcaccaaaaagtcaagccgcatatgtcgacaagatatttttctttagagttaactcgtcggccttggcaggactaatggacttgtcaagtatgcgctgtaggcgctggatttcgttcttagcataatcagaacctttttccaagtaattcttggcagctttcaagtaaatctttccgtgcc

SEQ ID NO: 42850 - DNA, 500 bp, Glycine max
  Clone ID: jC-gmro02910062b10d1
aaatctaacagaaattaaatctaaagtagcattgttcacaagagaaaataaattcgactaagttcaaagtaaaataattcatgaaacaaatttaaagcttgtcttcaaactcggagagaggagtcatctgttccttcaagcccttcctcttgcgaatgtcagtgacaagctgtgcagcttgtgatccagcctccaatgggtcagaagacatcatgtcccagtgatcaaacacacattgtgggaaggcctggcctgatgttgcagccctcaatgtgctcgagaaaccaaaggactcgatgacagggaggtatgccttgatgttgtatagtggggtacctggcctctgcatttcctcgaacacgtgtccacgcttctggttaagaacactgtagattccaccaagagcttgttcaggagcctgtatttcaaccaggtagacaggctcaagaagcctgggtttggcagtaatctgggaagcatagaagactctcctggcagta

SEQ ID NO: 42851 - DNA, 468 bp, Glycine max
  Clone ID: jC-gmro02910062b11d1
ggaaaaatagaaagaagctttatttttattttttgaaataccaaatgtcaaaaacaacctaggatttcaaagggcgaaatcctagattccaacttaaaagccttatttcgaaacaaaaccctaattaacaccgatatagttcaatggcaaacaaaacaaggtgtccacaccacacacaattttccccaaagattctgagtctcacacacatgaatctattttaaaacactgaggttttcattgaaccctttaacaaacacctaatcttaagaaatactatgtctcaccccccattataaaatttattttgaaccaaaaaggctttcatagaaacccttcaaaaagggaaaaaccggatctttagggggcagactttctttgccaatgggatggtccaaaaaatcttggctccaattggggagtctaggaaatatcccacttgtgaaaaaccccaaccctgtaattttt

SEQ ID NO: 42852 - DNA, 442 bp, Glycine max
  Clone ID: jC-gmro02910062c02d1
ggaaaaaatgcgatatacgaatccatttttttattggcgtcaaatattacagccgcacattgccgaataaataaagaatttccccgcccataacacaaaattcaataaggggtttcctattgataatctaccctataaaaaataaataaattaattccttgaataaaaaaaaaaaaaaactaaaacctttttcctccgggggtgcctatttgggtggttggttaatacgtagtatggggggctgggccccaaaaaggaggggttagatgtagtaattaaacgatggggggggagctatcccttcattaaacgaaatacatccacgggagcatgggctcatattcaactaagggtgttcttggggggcaagaaaatagggtcccacccctactaccattttgtttgggccaagaacggggccttgtttggaaaaaataagttt

SEQ ID NO: 42853 - DNA, 493 bp, Glycine max
  Clone ID: jC-gmro02910062c05d1
gattgcgaaaggtgtcacaaatattttttatctccaattgcaaatatatgcactgtaatacaacgatgttaactatcaaagaaatacacttgttaacatattcacaccgtaccaatttatttttactcaaaaacataacaaaaaaccaaaactgtagccgatgaagagaaattaaattaaagctaactttattgtcatcctcaaaaaaataagaaaaaaactgaattcatgaaacacaatcaaagagcgatgatgatgactcgcaagctcctgactagaataatctcgtggagtatctaatagaaaaaagtggcggcaactgaaagcagggtggcaaatactccaacaactccaagagatgcagcaccagagttctgtgggggaggagtgacagcaccggctggagaagggctataaggagtggtggggggggccccggcggaaggtggggtggcggtgctgctgccggtgacgttgatggcaagcttttgac

SEQ ID NO: 42854 - DNA, 410 bp, Glycine max
  Clone ID: jC-gmro02910062c06d1
actagtaaatggacttcattttccatttattgtgcatttaaaggcaaatcagttacacaaaccgtgccaaacactcttagtctcttatattgttccaaatgcttgatacacatccgtgggagtgcttcaaagggaagaagcctcacaagcttattgtgtattcattagcagctaaaaattcctcatcttattacattagatcactctacaaggtaggagggatccatatgtagccgtgtgtttgaacatagccagctttttcaagtaactgatctgcttctgcaggacctctgcttcctggtttgtaggggagtggcttgaattccccttcatcaattctgtgcagaagtggggtgaagatctgccaggatgccttcaactcatctctgcgaacaaaatgttgctgatca

SEQ ID NO: 42855 - DNA, 478 bp, Glycine max
  Clone ID: jC-gmro02910062c08d1
aacgaataaacaaagttcaatggggcttcaagtacagtacattttttgaccaaatgaaacataactaagggaagaagataagcctgagagcttttttttttttaacaaacaaaaaaatcttgcttcatactatcctatatttacattattcaaacccatttttgtttacttgcaaagtaatctattagtggattaattagtactaccattttgatttacgcaaattaccaccctaaatcagagaggacaatccccagcctcatctttccttaatttgggtacctcaaaccatcattgaaatagcgaaaggccacaatctcaaacaaccattagtggagatagtggtgacaaaggaggcccactaaagatagttcccataacataagtgtcccaaaagcctttccaacatgatggggtcaaagggcaaaccgctttgggagaacacttttcttttttcacaagcttattactattatta

SEQ ID NO: 42856 - DNA, 552 bp, Glycine max
  Clone ID: jC-gmro02910062c10d1
aaaatatacttaacataaaatagaagtcatatattatgggtgttctgctagactataacatatctatctaaaactagaattctcatcatcgtttgtttgactcaaatacaaatgacctggcatttgacttaagcacgtacagaaatgcactgagatctagtagggataattcttaaaatacattatttttggaatctcaaaagtagatgctatttatttaggatgtaaaagcacacacatagtacatcacaactttttagtaagaacttgataagctggtagtgagtggcgccaagtttgagtcgcccattactaatgggtacagagaggaatggaaatgggttcagtgatgtgagactcatacttccaaagcttgaattctcctatcacaaaatgatagtaacccccccaacagggctatgtgcttgttccttattcccttttcaacatatggatatggcctcaggttcactagtgagttattcactgactccttttacagaaatcgcatggatctttgaatcctagtcttcgtattctttaaggaccttg

SEQ ID NO: 42857 - DNA, 474 bp, Glycine max
  Clone ID: jC-gmro02910062c12d1
gggagcacaaaaaattctgggttttattacaagagcatgatctaccagcaaagttggaaatatgaataacaatagagcccacttattccaacacacattcaacaaccataccataaaggatcacacgtatgtagacagagaccacatggcatagcataactaatcaaaaaacatggcatagcataaataatcaaaccccaaaaaataaatgatacaagattcatccatgaacaagacaagatttttagctatttataaatgcacaaggcttcctgatctctccttctgtccctggcttcacattaattcttcccattttctcgatggagggtgcaaactcagcaaagaaatttttaactgacccttcaagcaattggatgatttgtgcctttgtaactgagttagtcaataatgcagcatctgactcaaatagaccccttctcttaataacgtgactatagtagctaagaacaa

SEQ ID NO: 42858 - DNA, 448 bp, Glycine max
  Clone ID: jC-gmro02910062d01d1
ccacattataagcaaatgaaatggccggaatatcgggcaaatccaaataatgctgcattgtcacatagtctacataacctgggaaactaacagcaatcaaaatttgttcgccatttggaattggaatttgaatacaaatacagggcatcaataatataaccctatgtacacagccaatatctgactgaaatttgatacagaatagtatcaatttgtatcataataaaatggcacagagaaatttatgtgaaggtaaaggggaagtgtatcagctggtgttttaattcttcgcctttcatttacttaatcattggctccttcctgcacgttcacatttcctttatctgcttaagcactgctgaccttgttcttacgcccaaaggtccaatggggtttagccggagtacgcctcaatgccttcactccgaatgggttgttcttgcttttg

SEQ ID NO: 42859 - DNA, 482 bp, Glycine max
  Clone ID: jC-gmro02910062d02d1
gatgtctgaaataaataattccatctgaattaattttcaatgccaaggcaaatgttttattttacatcaacagggagaccaatatatgtggaattaaatctcaccactgctaaatactcataaagtatatgatccctatgaaatggtacaatacaagaacaagtttctaacggggactcaaaaatcagttttgacgaaacttgggccacactgtaattactcctggtctcatctcctcaaaacggtacctgttttcattgaggaaacttctgacagctgcaggaagagccgccagtcctcgactgtgattaccgatgcctgttatgacatgtaaagctaacggtctaagccgtaatggtgcttgtgtatccaatttttccctgtccatgaaattgaaagatccaagagtagaatgtccaagcccattttccttcactccatttgaagtggctgaactctttgagaagccttggcattcaatt

SEQ ID NO: 42860 - DNA, 423 bp, Glycine max
  Clone ID: jC-gmro02910062d03d1
gcataaaaaaactctgatatcttttgtggtgttctgtttacattttaagtttgaaccacacaagccgcagtaaatatctgtttaggtgtgcgaattgcgattacattcaaacatggtaatagcatacttaaatataatacaaaagacacgagaacaaaaaaattttcgacgccgcaagctttggctttacctcaaacagtctctaaagtagcatccaaaaaaccaaccagaatgaccatctttcgcagcatgcaaactagagatggtatttctcaaacctcatctttggctatcttaactttcttgttagcagaatccttctgctcaataatctctgggatggtgtcttgcattatctttggggaagaaaaatcaaaattcgaagcagacacacctttgaattcttgattatcttttagaaac

SEQ ID NO: 42861 - DNA, 519 bp, Glycine max
  Clone ID: jC-gmro02910062d07d1
gccaccgcacccaccacgaactctggcaagttaccacctccaaatagagcatccgatggtccacttatcacagacaccaccatctgtggtatgacaattgcaagattgagcactcccagagacaaaccttggcctgcccctgaggtgctggagaatattgatgctagagcaaagggtatgctgtaagtaatcgcgagtgggattccgaggagagagaagagagccaacgcgccggctttgacggcggcgggaggaggcaggggttcctggtgggcgttggggagtagggtgtattgtcgagaatgttgggccatcttagtaaccaaaaccgtcatggccaaacaaaccgcgagcaagaagttaacaatcccccacagccttttgacgccctcaaccccacgcgccagcactttcactcccaacgacgtcgcaccaagcacaacagagttcaacatcagccccaacgcacccgcacggacacccctatcgtacgccttcctttccctactgtcccttcgt

SEQ ID NO: 42862 - DNA, 308 bp, Glycine max
  Clone ID: jC-gmro02910062d09d1
cggggaaaaaaccccccccagagggggtttccttacaaaaggggttgcccataaaaaggtggttgggcttttgcaaggaggccccccaccccctgtttctattaaagggtaagtccaaagcttctattttttttaacaaaacatttttttcgggggcctgttttaaaaaaccttttttttttttcaataaacaccccaattggtgaaaaaaaaaaaagggggaatttcttgtccgggggggcggaaaaaaaggatttttcccctttatcggcctttctttggggggtggtgggggagaaattttccaa

SEQ ID NO: 42863 - DNA, 528 bp, Glycine max
  Clone ID: jC-gmro02910062d12d1
ccagaaaccctcattcagaatgtaatccagaatgtaaaattttacattcagcaatgactaatccggaatgtaaattacattctagatccgggtgcaagaaccaagtctggaggtgcaggaagcaattgctgaaaggagatagctttcccaaatcccaatttcccttacgaccttggggggttttcgctgtctctggcctaagggaagcgacttggggaactgccctcaatttattattagttaaacatgcatgagttgtgttattgatcacaacaaaattttaattaaaaattcgaactaaaatgtaagacttttaaacataaacgcacaaccattgtatagtggggaaaaaacaaaacgcttgacttgaagcggacaatttttcccatttacattgtatcactatcgtctaaataaatgactccatgaagcacatttgcagcagcacaaaatgcacagccgctgccttttattaattcatagatgccaatatacacagcactgcattactaaccatgacgttcaaac

SEQ ID NO: 42864 - DNA, 453 bp, Glycine max
  Clone ID: jC-gmro02910062e02d1
aacaaataaatatttaatcatttgcattaaacaattaatacgtaacttaagttcatacaccaataggaatatacaccataaataacactttcaaggcactcaacaagaaattcacaaagacgcatgtcccaacttatataattcatgtcaatctttatttatttcgctttcttgtctgagtgttccttttccattttttcaaagaggcttccatcataaacagctcgaatagtctctttgtgcagtaaaccatccttgtctttgccaagaacatataggatcttccactccgtgtagctagcaagccatccagcgtaatccttaggaactctatttgccacaagcatccccatcaattcatcagatgttaaagaatttgggtgtgttcgagcatgcttgctgaaaatttcttcaaattttgaaagaacaaaccttccttcactatcgtagaca

SEQ ID NO: 42865 - DNA, 451 bp, Glycine max
  Clone ID: jC-gmro02910062e04d1
atgatgcagcagaatattgatatattatatatgctgtgcatagtaatttgaaggaataaccattcccaatgatatctaaaatctagattacagtattatggatacggaagacactaaaattacgctgaaccatctttaagttatttaacttttcaactccaaacacagctcatgcacctacaggttcagtggctttcttcagccatgcattttcaacttcatccaaatatggcgccagaatattcctacatgtggcgtgataggagttcagccaatttatctcctcgggacttagaaggttcaggtcaatcaacttcgtctgatatggtgcccaggtaatgtgttcaaaagataagtaacctctatcaccaaaattgaaagttgtatcagcctccttgacaataagcacattctccaatcttatcccaaactctccatcctcatagtaacc

SEQ ID NO: 42866 - DNA, 495 bp, Glycine max
  Clone ID: jC-gmro02910062e05d1
gtgtgtacaagacttttactagagtaactagctacatcttaaaagagtacaataaaatgtttgaatcgataacacttgccaccccagaaacaatttaccaacagaacttcgcaaataacaatacccttcctcattctaggcgaagttgactgctgattgtacatgctcaacatcagtggccattagcaacgccattagcaatcacaccgttctcagcgtgagtcaaactgctttctttagttttctttgaatagaatctccgatacatggagtcaacttcagtgagatagaatgtgcccggagataaaaggctactgtccttgcttgtcacaaattccttcgcaccatatctatgctccattaacttcaagttttcaacaaactcctccgggggaaactcatgtcttgacttcaattttccatcgacattcatcactctagccatgtttgacaagctaaacggatgttgactgtctcgtaattgcaaagaaaaca

SEQ ID NO: 42867 - DNA, 388 bp, Glycine max
  Clone ID: jC-gmro02910062e07d1
caaacaaagtagagtttattataaaagcaatgtgcagcagcatccaaaatcgcggtttgtatgtacagaaaattaatataatatcatcacttccacttcttgaacatacccttgccaaacttcccatgcttaaatttcccatgcttgccgaactttccatgcttgaacttgccatgatgtttgaatttcccatggggcatgtgtccatatcctccatatgcaccatatccatggtggccatgggaaacatggtgagccccatacgcagctgctgccgcagcagcaccaccagcaagcaatgcccccataccgccgtgcccaggcgcatgagatccatgtggggcagatgatccaggataaccatgtggagggtaaccagcaggggggt

SEQ ID NO: 42868 - DNA, 547 bp, Glycine max
  Clone ID: jC-gmro02910062e12d1
gcagtccaaaattcattgtggaaattgcattaagtcaaatgttaattggcacagtctatatatgtggtttttcacatgcacacatacatattcacaatcaaatacaaaaagagcagggaccagaaaactacaatacaaacaattattgttggcccttgtataacaatgatatatatttttttggagcataattgaatgaaccgtgtgtggcaatcacatcaaatctgttgattttcatttagatgccttgtggccctgtcctttgatctgactagcggctggagacatcacacgcaagcggagagcaatttcggtgaatgatggcctgactgctggattgggtgcccaacactgctccattagtgttttccagtcaagatcacaataactggggattgttggccttaatgtgttatatacaatgcctcctatgaatgcaccataatgcatattagcatatggctcatcaccagtaagaatcttccataagacaatgccaaaagagaacacattcaccttttctgagaccttattgctactaccattt

SEQ ID NO: 42869 - DNA, 240 bp, Glycine max
  Clone ID: jC-gmro02910062f01d1
gggagccaagagattcaagattgtagaatcaccgtgtgtgctgaggcgaccttatactcagagcaccaatccaacgcttccggggcaatgagcaatagaacaccacttcaaagatccctcagtagacccaatgactggaaaggctgcacccgacctattttgcccaaaaagtcgttccacatcacaaacaagaacggcaatcttgactgcttggactctagagagttaccaaatagcttt

SEQ ID NO: 42870 - DNA, 500 bp, Glycine max
  Clone ID: jC-gmro02910062f03d1
aatcacatatttatggtgtcaatctaaagtaaagagataagtagttgacattggcaaatgtagagaaagaatgtaattgttacgaaatcagagaacaaaagttttcagcttcgtactactgtcatctacactatttgtattctcccttcccatgtcaactttttctaacaatggatttagcatatcagtatatcactatagcctgtatgtttctagatcatgaaaactatcaaccaattgaacaatatagctctacagatccatcataattctcgccaattacttatcatggatggcaaagtgggaagtgatcacttggttaaccaagaatagcagtacaaatcatgtttgaacaaatagaaggcaaataacctgaaattcgttttccagagcatatgaagacgcatatcagatgccaccagtaaatatatcggtgagaagtgtccgctgctagtaacagagtatagtacaacattgattacgatctggcccaagaaata

SEQ ID NO: 42871 - DNA, 436 bp, Glycine max
  Clone ID: jC-gmro02910062f04d1
ggaacaaatttggttcccccatctttttctttagatgaattaaatgggtcaaatcaaaaagttttttaaataataaatagcaggtgggaatacaaaacatgtggaacaccctcaagacaaaaattgtttacaatcggttgccaataaaatacattaataattgaatttaaataaaatttgtcatccccatcgaactacaatttcaacagaatttttgaaactttgccctttgggggctgacgatgcctattttatcagcatgacttttttccattaaggggggtttacaaataaaacagggaaatttcaagggtttgatttggggggaaaaacttggcatgctggcttgtatgccttcttggttgaagcctgttaatactttttttcagcagtatcattttcatttaaactagtctgaacgaaaaacctttttccc

SEQ ID NO: 42872 - DNA, 445 bp, Glycine max
  Clone ID: jC-gmro02910062f06d1
cgaagcaattaactaaaacccaaatacttcagaattctctcctacaaaatctcatttcaccccatccctagcaacagggggtctagcttagctgtttgttgagcaggtgcataagttgttgtaaattcctagaatttgccttcgatttctacttgttagaaaaatccctaccaacaccaataacaaaacaccaaagcaagaaaaaaatatacaatcttccgcaaatgtttctatctttctttctttctttttatgaaacgaaaccaaacgagagagaaagcactaaattatttcctctccagtatccacttgctcgctccaacaaacaccgattcaagcaatcacaaaaccattcatgaaacaagaaccattccacataaaaacacatacaacaaatttatcttcttcctccatttttataatagtttcagtgagtaaaagcata

SEQ ID NO: 42873 - DNA, 494 bp, Glycine max
  Clone ID: jC-gmro02910062f07d1
cctctctatttcccaaatatacaacctagttgtagtaaagtatatgatacactaaaaaaaataaaactagaattgccaggactcgtagtagcaatgatagtaaaagcatctagttgtcaaaatgggagttagatatggcaatggcacttgagaaacaaccacccgaagacaaaacttcaattttcacacggccccatccaaatgcttctcagctgacggggctccttctttatttttaccctactcttcatcggcctcgttaccattgacgagcactgcaccatcagtagaatcggcatccactacaactgcctcctcttggcttccttctccattttgttcctctgtatagtgctcttctccattttgttcagtcaactcatggttagagtccccgttctcaagaggctgatccccttcttctatctgcatgtttctgaaagcttcaacaagggtgatatgtgatttatcagcctgtttcacatactcagatg

SEQ ID NO: 42874 - DNA, 427 bp, Glycine max
  Clone ID: jC-gmro02910062f08d1
agaagggaaaaatagtttgaatcccatccaacaaaaatcatgcgattaaaatccaattaaaaaagcataaagtaaaataagtttttaaaacaggtttttggaggaaagcaactacatttagtccacttcctcaatcttggggccagcaccacttccaccagaagggggagcagcatactcatcctctggtggaccagcaccacccacgtttggaccagcaccaccttggtacatcttggcaatgattggattgcagatgctttccaattccttcattttgtcctcaaactcatctgcttttgcaagctggttgctgtctaaccactggattgcttgctcaattgcatcctcaatcttcttcttgtcagccgggtcaagtttctcaccaatcttgtcatccttcacggtgttcctcatgttgtatgca

SEQ ID NO: 42875 - DNA, 513 bp, Glycine max
  Clone ID: jC-gmro02910062f09d1
aaaaatcaatgaattaccttctttattctctatttctttcatctcatgaacttttttattttgcaatagggaattacaacttcatttagccgatggggtgaaaggttttaaagaaaaacttcaaattgtccgctgtggattgaattgaaaatccccgttcaacccacaagcattgagtacagggttcttagttctcacgatggttgaaagtcagcagcacatactggcaattgtatttccttactcatgaatcttgctttcatcaaccattagaaatagaactcccgttacagctaacaaaaagctaagcctatcaatttttaaggtccatagtttgttaagaagctagtaaagctccatgtactttgggtctacaggtatcacaacttaagattaagattgtcctgcgattccttgatctccaagtctccaactggctcaccattcggtgtcaaaccccgaatcttaacatcatagtaaacttcttcgacttttcttaagtcatacttaatg

SEQ ID NO: 42876 - DNA, 504 bp, Glycine max
  Clone ID: jC-gmro02910062f10d1
acaactctacaactgattttatggctatgtccatcttcaacctcaaatacagtgtgcacaagctttgttgatatattaacaaatacaaacaaaactatggactttcaatatctgaagaaccggttgcattgatctttgatggcaattcatttatggcagttaaccatagcaccgaattggatcattgcagcctttagaagcagattgcttgaaaccagatcggccacctttctcaaggtactgctgatggtactcctctgccctgtagaacttcttggcaggaaggatctcagtaacaatcttactgttcaactgcttctgctgttgctccaatgactccttggccgccttctcttgatccggtgtgtagtagtatattccagatctgtactgtgttcccacatcattcccctgtctattcagagtggtgggatcatgtctagcccagaacacgtcaagcagagtcttatagctacaaatttttggatcatattgaacccttac

SEQ ID NO: 42877 - DNA, 466 bp, Glycine max
  Clone ID: jC-gmro02910062f11d1
aaaggatatgaaatatatcattagtgactttcaatcagggaaaaagataatcacaaagcataatgtcatctctgaaaatttgagcgcaactaattttccttctaaagatggatgtggtgatcaagtaggtattcagaaaggctttccctatccacccaggatttacttgacataaaatcaacaaatcgattttatattggtggatacctgacctctaatatacccaacaaaatcagatgaccttttaatttctcaatggaaaaatatcatatccctcttaaacatacatactgttgcatggtcataataagccagcttcaaagagattcctccgtctcaaagtctcatcaacaagcttgaaagtcttcttcacaagcttttgatcaagggcagccgcctgatagatcttgaacacgcgatctacacagtcaggagcagtgctctggaaatacaattcctcaaactt

SEQ ID NO: 42878 - DNA, 570 bp, Glycine max
  unsure (1)..(570): unsure at all n locations
  Clone ID: jC-gmro02910062g02d1
aaagacanagcgatatttgatagtgagaatgatctataaacatcgaacataatatccaattgttcaaacttcaaagcttaaacataaatagtcaatttagaggaaatgaaattgctgaatgccccataaatgaagaccttcaactggagcttgaatcatcagtttttgctgctgcagatgcataactaacactactatccctgttacttttgcactgactggattgctcatagcgaagaaatttgatttttatctttgttgagcagttccttagcatatgaagaaaaacactaattggatggcgtccacagattgtattgtcatactccaacagatattgcttgaatgaatctggatctcctgtttctatgatatccatgcccatcttgtctaaggcctcaatagattcgtatataggcccatgtttcttgtcatagtgcatgtaattgaatcgagatccccagtgacaaaagtctgatgaaatagagaaaaaagtattggaatcatcaacatatttggcaagaatctgcccatacatagctttattttagcactaacagaccaactaaa

SEQ ID NO: 42879 - DNA, 530 bp, Glycine max
  Clone ID: jC-gmro02910062g03d1
agcataaagaaacttataagtattatttaagagaaaacatccttcacatggaaggccatgtattgatatttgcacgcaaagctacggcaaacaaatggaattctattacattatgaattacaagttccttgcatggcatacatcaaggaaaactgggaagttgttgtatgtggattgatttgccacagccttatatagacaaaccaaatgcttaatatcaacacaaacacgtgtacagaaaagaaaccactcttcaagaaaacagaaaataagaaaaactaacatattggaagaggtgccccattccactccccaaggcattccaaaagtggatcaatgatcttcccttggcacaaagcagtgaacactttgtcacactcttcacccggtgagataaccctttcaccagttagcaatgctgtccccaactcctctctcacaaacttgtacaaggggtaagacctgcattccttgatcttgtttggaattgcacattggtcattctcatatgcaactcttgcacctttcac

SEQ ID NO: 42880 - DNA, 489 bp, Glycine max
  Clone ID: jC-gmro02910062g04d1
cacgagataattattttttaccatatatatatagagagagagagggcgaatttcactgatcacaggatgatgctctctttaagtagggaagcagatcttatcagtacacataggtaggttgaaattctagctctagcaatctagctagagaaggtagtacttgcacaacacacagcacatgataatttattttatacacaatctcattctcatggtgctcaagatgcatggactaattaagcaacaatgttggtctgataggcagtgtccacagataaattgggtacccataaaatggccttgcttccaaggaaatggcaaacagggttagttccaggatcaactcccataagttgatgaagcatttgatgattcattccagaagtatttgagtggcaaatagcaagtgcctgagttttggttccatcaccagccaccaatggaaccatgaaagctgttgtttcacggacttcatggcagtaaaatact

SEQ ID NO: 42881 - DNA, 551 bp, Glycine max
  Clone ID: jC-gmro02910062g05d1
cgattaacgctcttttcttttatgtaggtaatccataaataatgtacggtgaacaagtaaataagaaacccagtaaccaaactgggatggaaatcccgagtaagaacgaggcaacccaacaaactaacttaaacgagattagatggcaactgaatgttgtccaatacagtttctaaagtggctgcaacatcccgcaggtaaaaactaaaacagaagcattctaacacatacatatgtccaaaaatcaattacaagccaattttcttaaaggaagaaaacacagtcacggacactcggcagtatttgcctatatcccaattaatgctactaccagcagaaaacctaccctccctaacaaccccatctattgaataaaaaaaggaatctgaaaaacaaaaacaccaaccgcagccaccaatcatcttcatctttccaaccaccaacttaagcacgctcaccacgaatccttcttgccagctgaatatccttgggcataatggttacacgcttggcgtgaatggcacacagtgtagtgtcctcaaagagccaac

SEQ ID NO: 42882 - DNA, 312 bp, Glycine max
  Clone ID: jC-gmro02910062g06d1
caaccccaaaaaaaaaaaataatcttcattaggtgcccctgaaaaaacttaaacacggggactttatttttggctacctcaccttccaaaatatataacaaataaaaaacactaaaatcgctccaacaaatcctcccctcaaaaaattaccgatgcgcattttttaaccaccacacatatcttggggccccccccaccccggggccaccataacattaaataaactgtaacaaaaaaaaataaccatacaaagttgaaacacatcttatcccccccatattaaaatgaaaactttataaaaaatatgaaaaa

SEQ ID NO: 42883 - DNA, 554 bp, Glycine max
  Clone ID: jC-gmro02910062g08d1
cctattagagcaataatacatcgatgcaaggaccaaataacagcattacaacattcacgggcaaaaccacaaacaaaactaacagaaattaaatctaaagtagcattgttcacaagagaaaataaattcgactaagttcaaagtaaaataattcatgaaacaaatttaaagcttgtcttcaaactcggagagaggagtcatctgttccttcaagcccttcctcttgcgaatgtcagtggaaagctgtgcagcttgtgatccagcctccaatgggtcagaagacatcatgtcccagtgatcaaacacacattgtgggaaggcctggcctgatgttgcagccctcaatgtgctcgagaaaccaaaggactcgatgacagggaggtatgccttgatgttgtatagtggggtacctggcctctgcatttcctcgaacacgtgtccacgcttctggttaagaacactgtagattccaccaagagcttgttcaggagcctgtattttaaccaggtagacaggctcaagaagcctgggtttggcagtaatctgagaagcat

SEQ ID NO: 42884 - DNA, 468 bp, Glycine max
  Clone ID: jC-gmro02910062g11d1
agaacggaaaaatatgatattattttcttgaaataaacgttgtaaggtgtccaaacgagggtcatcccactaaagtgaagtgtgatcaacccttggtttttaccagcacgactcaaattgatgtgaaatttctttctaatctggatagatatattggcattgcattagttattggtaatttacaagggggtaccctaaaataaactccccatctactgaatgcctcataatttacgacgatgggctaccaatggatgggatccactcatttccttgattgaagttctgcactgaatacgttcacacgtgttcagcagggatcttgctactacagggcactctttgatacagatcagagctagtaccttcgatctaaaactcacaataatgaagagttttgtgagcaaagccaccgcttcttggcatacaaccttggggggtcacaaggacctcctcgaactaaatgat

SEQ ID NO: 42885 - DNA, 554 bp, Glycine max
  Clone ID: jC-gmro02910062g12d1
ggataaaatgaatattattatgtttatttgacttgctcaaccaagcgcgaatacaagcttctccatcttataattaactggcattaaaatacatggtgcaagtgtcatgaaatatccaaagccataaaacattgtataaatatgcatggccaactactttttattatttataaatcttaaacacttttatttttctcttccaatgtttttctatagacaacacaaaatagcactgatcaaatacaacttgtggttgttacagatcaatgataattcatgtgcaggtagactggtgttgaagattgcgtagttggtcctccaatgaagatactcactgttttcccagtggccttgttcttgaaaccatgtgctcagatttctgatctgaatgtggcaaatatttcccatcaaatgtcaataccacacgaaccttcccatctacttctttaattttatcaaccgagcagtaaaaatctattgctgacatgaacccatcaacaaactcctcattgaatatttctttgagctcttcccaaaatgcataacagcttcat

SEQ ID NO: 42886 - DNA, 424 bp, Glycine max
  Clone ID: jC-gmro02910062h01d1
aaaataagaagtggtatcaattatttaaacctcaaatcaaacaagtggacgaaggcaaagaaaagaaagaaattaacatacatggattataaaatagagcacgaggcacattagtttatatttcatcatcccagagatcagtgacttggggcttggtgggtccgctgatcaaacggctctgatatatttcatctattttgtgatgatcttcttctgtcaatgcccagtcaaagatctgcagattctggttcatcctctccttatcgtagctctttggcacaaatgtcacaccttgttcgtacaaccatctcagactcacctgggctatggatttcccatgagcctctgcaatctttttcagcacatcattctccatcacttcatttgggcccttgctcgcacctttcctcagtggagagaacgc

SEQ ID NO: 42887 - DNA, 451 bp, Glycine max
  Clone ID: jC-gmro02910062h04d1
aataaaaataaatatttattttatttttacgagaaaaaaaacttgatatatacaagcaagaataaggggagggagagttggatcagtagggaacctaaattaaacttttttttatctcaagtgaaattgtcaacaaattctactaatatgtgaaaaaatttggagaggatggtgagggttggaaaaaggggaaagaaaacctatgatgatataatacaatagagagaggcagaaccaatgatgggatttccacatcaatagttggtgatataagaatagcctaagcaagaaatgctatacagagagagagctttacatgaaatagctcagagatctcatttttcttgatcctccttctccatagaggtcattccattggagtagctcattcatatttgttgactctgatgacacgcttgcacacacctgctcatgtgcatatctaaaatca

SEQ ID NO: 42888 - DNA, 409 bp, Glycine max
  Clone ID: jC-gmro02910062h05d1
gacaaatagaaaatgggattacaacattgtcaaatagaagccagaataaagagatttaacttgttatcaagagctcataaatgtctctaaaatggaaattttggtacattcaaaatccgcctaagacgtggtcacgcctatctagctagtgtagcaggaaatgccaactgaaaacgtacattgccgtaaattctacaaaaggccaactacaatacaacgtacgctgggggcggggaaggccttcaattctactggcaaacgaatcatcaattcaagaattaggcaccacgagccattttcatccttggcattgccttcttcatttgacgagcacgctcttttgcttctttctttcgaatagcctctgcactgagctttgcctcagcctcctccaccatctttttcctct

SEQ ID NO: 42889 - DNA, 494 bp, Glycine max
  Clone ID: jC-gmro02910062h07d1
gacgttcgggtataacaaacaacctttatacattcgtttacaacccaacccaccagtccttgagttgggcactttaaagaattagattatatagcctcagaaaaaaaaggctcgcgttacatagtaatacagacaacaatttaacttacaatttttcccctcaaaaatggatatacaatttaacctacgacatagttttagaggggtatagcagaaacaattggtctaaacttgctttttgaaattctagaacagaacatgaacagtaataacactgaagataataaaaagagcctaaaatatgttcttatttcttgcattccaagctcaagcacctccaacttctttccatatctatttcttctttccatcaaatacccatctagatactcatctatcgataccaacttatccggcttcaaaatagacgcgtttgaatcaccaagtttattgtaggtagcaaggtcggtgggattgaacattttgaaacaatc

SEQ ID NO: 42890 - DNA, 448 bp, Glycine max
  Clone ID: jC-gmro02910062h09d1
ctgggtacaagtatgcataattgtctattcatacaaatggacagattttattttataaataaacgaaaataaaaaccttaaagcacataacatcaacaaacattccattaaaatttcagaataaatgtgccttataaccggctagcgttctttttagtcaagcttcccatggcctttgctttctccctaagaacaaatttctgagtcttaccagatgatgtctttggcagatcattaaacaccacagttcgaggggccataaaacgaagcaaacgattctgacaaaattggattatcttatctgaagtggcactgcatccctccttgagcttaacaaatgcacaaaggtgtttttccccaataattattaggttttccaacaacagttgcctcaaaaactgttggatgactaaaaatgactcctttcaactcaattgagctaatattt

SEQ ID NO: 42891 - DNA, 536 bp, Glycine max
  Clone ID: jC-gmro02910062h10d1
aaatagttattgtataataaaagtaaatctaaaattcttacatcatcatatgaatgataatgttgaaataaatatatgtatttgaactgtctaaatgaagaatatattaaaaatctaaagaattactgcatggcaagcttgcggctagtagctggacctacaaaatctggtcaatgccaaagcttcatgcagaaccccgctggcacaactgatgttctcttgctggacaaacattccgagaaggtgtccacaagttgctctgcaagagatgcaggatcttcaagaaatgtatcaatgtatattttcacaatcctaacttcttgaggggtggctcttaagctgtaccaagtcagaaatttctgcctgaagttcttttctatgtgaccttcacactctaaccacctaatcaccttcacataatactcaaaatcacgatccgaaaagccatttgcaacacgggcctcctcttgcctttctccacttttcttcttggatgtgcttacatcttggggaccctcccttttcccggatacatt

SEQ ID NO: 42892 - DNA, 521 bp, Glycine max
  Clone ID: jC-gmro02910062h11d1
aaaaagtaaaaaatttatttgagaagttggggatgcatacaatattaatatatcctaatgcacaccaattctacaactggccttgtaaacatacaaacaaatactattatgtttaacatgtataaccaccacatgcacactgaaattataagtattagatgttgacccaactttaccaaataaaaatactattaataattaaactccaattttagtggcgagtggacgagccttgcacatggcttccaatggaattaaccttgacaaggtaatccaattattctcggtcatatcaagcttttcctcacttactcgtttccagtcaaaacattgaatcaataatcccaaagtaaagctgacactttgcatagccatgggttctcctgggcaagcccttcttcccattccaaatgctaccaactttttctcctctccttccacatcaaacctctcaggtttaaagcatgtggcatcattccacaaatgaagatctttttgcatgccccaaccattaatgatca

SEQ ID NO: 42893 - DNA, 477 bp, Glycine max
  Clone ID: jC-gmro02910063a06d1
actgaagacgagtaatatgaaacaattttaaccatatcattgtctgttacaccttataagaaacggtttacactttccaatatagtgttcgtacaaagtaattcatatatgatatagaccacatcacagaagctatgcacagaccaggatttagggtagaggggaaagaccaaagagttacaagaatgaccaagacttaccacctctcacttattatctagaattgtagccacatttctctatagagccataaccaagtgcagcaaactgaagaaacaacttttacgatgtgattatcagaagcaacactcctctagcacacaacaacagcaaagcgctgcgatgcagcctcggaggaacgaaaagcacccaggctcctcatggtggtgatggtgatccacgtgctggtagtggtagtgcggcggcggaggcggcggtggatgccctttatcgaagtaaccctgataggagtcgtac

SEQ ID NO: 42894 - DNA, 445 bp, Glycine max
  Clone ID: jC-gmro02910063c12d1
aaacacgaataatttccttgtgtttatattgacaagccttacaagacaaacaagtctcctcaagaaaacaaaatacacaacacattttatttcttacatcattttacgatatcatccagctactacaaacaaactcttactactaacacatcttaatgactgtacataataataataatgataatgtagagcagaaggatgcacatgcactgcacagaatcaattattaataaattcaaagcgcatgagaagctttacagtgttgtatttatcccccttttggctatgcagtggaattgctcgaatgccacttctaagctcccagataggtaggcatgcttgtccaccaaagtcatctttctcagacatgtcatactcatgaacttctatgcgaagcaacgccaactccggaacagtgagagggaactcgaatacctcattccat

SEQ ID NO: 42895 - DNA, 460 bp, Glycine max
  Clone ID: jC-gmro02910063d11d1
atgggaagatcatgattagggcatttattttcttaataagcaagagaaaatggacaaaatagaagcacataatactgaacactttatccttattacatgagtcatatgtcaaacaggaaacaacaatccccaaaatagaacacacccatatccttagcaattaaacaacaccacacaagaagaactacacataacttacaaacttttgctccattcaaaactgatcaaccaattgcaccacctcttccaccacagacgtcaacaaagacttcctagcattcaccacattgcacttgccacgaatttcaccttgatttccagtgagcacatccaattgactcaactttatagtagcatccacaaacttctcaaagaacaacgtttggttcaacgcaaatgcattgaccaaccccttagtcctttatcattgagcaagtcctggtcagaggtgaacacccct

SEQ ID NO: 42896 - DNA, 528 bp, Glycine max
  unsure (1)..(528): unsure at all n locations
  Clone ID: jC-gmro02910063d12d1
gctggaaaaactttattattttgcatcacattcttatgtaacagtgtatctgagtacagcacaaaccattcaccattatggctatgataatctttccttagcaaacctattataaaacaagggtgaacatatgtgaattgtggaaggcttgtacaatatagtccttgagaagcaaggtcaacctgtattcttcatccctgcagcaatcccatttatggtgataagcaaagcatctctgatcttacggttgtcatcatcacgtcttaacctcttgagtatctccacctgcaacatgttcaagggattaaggaagggaagtctattctcaattagcctcctcaagctcctattattctgctgaagtttctcgtgcccactaataaccatgacaaactnttcagctgtcatgagctcacttcttagttcatggccaagctcttgcctctcctttgacacaaggacttcatcatagtgcttggctataggaatgtcagctttccccaaaaccatctcaataggtctatggta

SEQ ID NO: 42897 - DNA, 491 bp, Glycine max
  Clone ID: jC-gmro02910063e10d1
agttcttattgtattaaaaactacttactaccaacgaaacatcaaaatttcacaaatcaaacactgcctcaaagaaatgtacaaacatgcaaccagccaatgcatgaccaaaaatgtttgcctaaaaattgttggaatataaaatgcaaagatgtaaatataataaagctactttcagaaaaataattagaacagttttccttcaagaacaagggcattgaagattaaatgcagataccctcttcaaatgcacactaacacaaccctcccttttgtaagcactggggagtagatgcctcctagattcagttatactttaatcctcattttgactttcatccttgataagcttgatcatgtcatcaattcgaaggatagtaatggcagcttcagttgcaaactgaataatttttactttgctcattgcaggctcaataactccagcctccaagttggttctgattttcccttcagaaggtccaaacccatac

SEQ ID NO: 42898 - DNA, 533 bp, Glycine max
  Clone ID: jC-gmro02910063e12d1
gcatgtaataattttatcatagcatatagcatagcaggggcattggatacattgtacttttgaggaccacatgcaccaactcagtcttactacatgattctctttatttagaaaacaaagttttaccaattaaacaaacttatcagctaggctttgcatcttagacaaactgattaaggtactcatccacagtgatgtatttcacatcaggatatagagctgaagcttccactccaaaagaagactcaatttcaaagttagtatgatccccctttacataagaagagtggttaattgacaggatcacattcacgggtggtgcggactcttcaatttgcttcaggagttgttcttctggaacatagattctttcaagagttttaccaatctttccctcccagagagtaacaagctcattaaacgacaaggtattagctggtggtctaatgtagagaattttgtcaaggttcttggatcatccacagaattgattgttaagttccaatatccttttcttgtaaaaacagctttgg

SEQ ID NO: 42899 - DNA, 402 bp, Glycine max
  Clone ID: jC-gmro02910063f09d1
cggttcataacaatttatataaaagtattcttagtaccgggaattgggtctgttaattaacccccatgaccaaataaagtctcacgtttcttcaaacataacatcctcaaaacattctatcgccaaaacacaatattggtccctaattgacaactgctcttttagcgatacttgatgaaaccaatttccttggcattgctacggaagcactgcctgcagcacataaggccatactttctgatcagctcatgtggatttccacacacacggcaagtgcgagaaccaggaccggagttttttgggtgagagttccaaacgtgggactgttccattgctacgccccagaagagagttcgatccaaaaacccattctctgaatcttctatccgaattcctagctta

SEQ ID NO: 42900 - DNA, 394 bp, Glycine max
  Clone ID: jC-gmro02910063f10d1
agggaacttggattcatctatattgcatcatccctcaaaaatagtacttgtaaaactggcattgaagttgttcatgaacagtataaaaatcgtcaaagaaaaattacagggacgtcatatatctacacaacgcaggagggttgatagacttgttgcagcacaaagtaggagatgatatttgtgcaagtgaacagaaattaatagacttcgacattccattgctctgatttcttcaattgcctcttgtactcagtccaatcaatgccatctttggcagccaatgacaccataatgtcatcaatacccttttccattccttttagtccacacatgtacacaaaagtgttatccttcttcagtaattcccacagctcttctgcatattgagccattc

SEQ ID NO: 42901 - DNA, 453 bp, Glycine max
  Clone ID: jC-gmro02910063f11d1
ggaaaccaccggaagcgccaaaaaatctaatttagtcaattgaacaggatatatgattgttataaatccttaaatactatctttgattcctacctataaaaaaaaaccactagaagctactatgagagttagcaattaagatcttcttcatttactagaagccaccaataggaaaaagaaagacacaacactcttgtggggttcaccaggtgcttctagttactggagaggcaccgaattcgagatttaggaatgggtacaagcttgaccattgccctgacaaaatactaatggggtatatttagtgtgtgtgtcttagtttaaccggttcaacaactgttacacacgtttcgagaaattaaccgtgaccgtagaaatttgatggattcacgtttggcggaaattgaacagtttaacaaacacactatttgtccaagggaatctaccaaaatg

SEQ ID NO: 42902 - DNA, 446 bp, Glycine max
  Clone ID: jC-gmro02910063g10d1
acgaacttacaacgatttggaacgcgatatttacgtcatgatgcacagagcaatgtacaatatataacaccagctactttatcgccaagaaacccacagctgaaagtaacaaccatcgctaaagaaaatgtcgcataacgcatgcccccatcctacccaagatgggaaccacggaacgaccgaaatatggcagaatatacaagaccattatatggtgactgaatcaaggggcagacacttaattacgtccacagactagcttacgcttgcgaaactgatattacaggagtaacctcaccattcactcaaaatatctatgcaacacctagtccaaagagctgatttcggaactcggcaggcctcttacggagcactccagtcaagtcgtgcatcacggagtaggttgacacacaatctttccataaagagaggccaactccacccca

SEQ ID NO: 42903 - DNA, 549 bp, Glycine max
  Clone ID: jC-gmro02910063g11d1
agaaaacatactttataaaaacagactttgtaacttaccatagttcaattattttgtggacatcatcatgctaagatgttcactcatgacaacacatacaacaaataaaatcgccaacttctttcaagtaacatagtactgtttacactaaacatgcaaatactactacagcaacttgaatacacattattatccatattttaaacaagattattacacatgaaacagtcacggccattggtctaacatttatagaaagaggtcataggagcaaattgaacgaaaccagcttcagttaacatcaactcgaggaacctcaaactttagatttggaatcatagtttcaaatgcttcccatgaaccaggtcatgtcttaggagctaatagaatgaagccagtttaagttaacctcgactcgaggaacctctaacttcagatttggaagcatagctacgaatgcttcccatgaagcagctgtctcttcatcacataccaccaccttcaaattctcaagattggttactgagtattgcaattcacaccttgcac

SEQ ID NO: 42904 - DNA, 448 bp, Glycine max
  Clone ID: jC-gmro02910063h05d1
aaagaaaaggattagcagttatgtttggttaaaatttcaatatctttcaactgattttacaaaaaaaatatacatcaaagtacaaatctttgcaacacatgtttggttctcattggggcataagttgcccttgggggctctcttgttcatcttctaacatccgattatgagaaccatagggaagattcaccacattgtcaccactaacataaactactcgaaaaatatcatacttcatctcaggggagaatcgttcaagatatggcatcatccactttctatggtctgagttgagaatccatgagtaacaaaattgtagggactgccacacatgaatgcataccactcttggtaagcattggcctttcatgcaaaggcccgcagttatgccttctgttttgggaaaacgagacctaaatattgctaggactgcatagcacaggtcatt

SEQ ID NO: 42905 - DNA, 416 bp, Glycine max
  Clone ID: jC-gmro02910063h11d1
gcaaaacaaacttcacttttttttgttcattccacgtactgtagccttcctgatgaagtatttgtacttactttgctcgtgtttctcattcattggcaatcttaaatattatattaattgtcaaaggaaggtaaatcaacacttgcgagaaccacatttctaagttaaagcgacttaaaatttcaacaaatattgttattccaaccttaccggtgaagggaaattgacttactttcgttgctgtatatcaccaacattgttctgttgcccaagcatctgtgcatgttgcatgtttgttgtatttggctgatgccccataagttgttgttgctgttgtgaaggtaagcttggctgatgagtgacttgctgtttgtgctgatgcctgataacttgtgaatgctgctgtggcatggact

SEQ ID NO: 42906 - DNA, 526 bp, Glycine max
  Clone ID: jC-gmro02910063h12d1
gccttacttagctatttcttatcattatcctcagctatggcaacaatttcagtgttggtttgccccagcaagctgcttatggatcgagctttcaccattccaagcttcatcctcctctttgggacaatcacttgctttttctcatcattgttttcagcatcatttcccaaagggtactcttcatgagtgacacgacttgtagtactagactttgttgtttgtttttcgaataaattctcggattgaggcacaatattgatattgttctttggtgcaacacttgttgtgccaatggacttgtttctcacacttgtcatgcttctcaaccttcctttccctaagtgatgctcgcaaagagagtaacccaccaaggtttgttggcaacacctccatcctctcccatttacacgactgcaccttgaaccttccattagtgcaccaccccttaccctcttcttaccaacgttttcttgttcgggttttgtgctcttgttgccacctcttcctcgtctctcttacctcttct

SEQ ID NO: 42907 - DNA, 280 bp, Glycine max
  Clone ID: jC-gmro02910064a03d1
ccgcctgactagtcgtgggcgcccgtctctatcacgataggctgcgttgctttacataaaacctataagcttctcaccgtctcactacgaatcaatgcgggcatatacatatgcataacggtattgataacgacatgggttgcacattaaggtgtcaaggggaataaagatgctggagacgccccagaactgacctcacaagggggagcagccccggctagcaaggtgcacccgggctttgggcttgtgaactactgggcttatacacatattcctctta

SEQ ID NO: 42908 - DNA, 401 bp, Glycine max
  Clone ID: jC-gmro02910064a11d1
attcaaaaagttgatttttagttattgccaagcagaaaccaaaaacgcagaaaacttcctgctgcctttgtgtcattggtgtacaagttatttaacattaacttcctcccagatatgctgagaaggggaaaaaatgtatagcatctgtgagtcctgaaaattaggacagtattatgcatacaacagaatcttttaaaccaaagcctaacataataaatgagttaaaatcagcattctttggtgtgcaatatcttcctgctgctttgtggcggaaaatagggaaaattttgtttctgcaagaactaaccaggacatgaaaattttccagaacattcaagcagatgcagccaaaggcacagatctgtagcatgctctctttgcagcacgaacaatatcttcaa

SEQ ID NO: 42909 - DNA, 519 bp, Glycine max
  Clone ID: jC-gmro02910064b03a1
ctcgagccgattcggctcgagctgctctccattgtgctgttgctggtggctccgaatcctcacttgagattgtcaagctcttgcttgatgctggggctgatgctgagtgccttgatgcgagtggcaacaagccggttaatctgattgctcctgcctttgattctttgtccaaatcgcgaaggaaggctttggagatgttcctcaggggtggtggggaaagagatgaactcatgagccaggagatggagctacagatgttttctgttccagagaaaaaagaaggaagtgataataagaaagaataccctgttgatatatcgctgcctgacatcaacaacggtgtatatggaacagatgagtttaggatgtacaacttcaaggtgaagccttgctcaagggcttactcccatgactggactgagtgtccattcgttcatccaggggagaatgcgaggaggagagacccacggaaatacccttacagctgtgttccttgccctgagtttcgcacagggacct

SEQ ID NO: 42910 - DNA, 560 bp, Glycine max
  Clone ID: jC-gmro02910064b06d1
ggtcaattacaaacagttgttacttgaacatctcttttaattctttttagagagttcaaaattgaggcagattcatcgtacgaatggtgcagcctacattgcttaaacaatgttaagcagctgtcaaaaaaagaagaagcaatgttaagtaatacaagtgcatttaatcttatattttttgtctcttatttggtgtgcatttagaccaaacatgaaccagaccattcctattgactgtatagacctcattgcgctcttcatcacagaagagagcatctcctggaaagccgtcgctcgcttttattttggcaagacacttgccagttaaaatgttgctgacattaatggaacctgctgcataaaagaaacataaaccatcagtaatgtaccttgaaagatagacactccttatcaaaagattgatatgtgatcacagacacattttaaactactatttatttcatatcatttgctatcatgttttacattttaacatatcaagtaaaaatgttaaacatttagctaaatcaactcttagtaggtcttatgatcaaacttca

SEQ ID NO: 42911 - DNA, 468 bp, Glycine max
  Clone ID: jC-gmro02910064b09d1
atgttgtacataacagaataatcaaagttttattgaaatgaatacatcataaaactcatgaaagcagttacaaaaaagctgctaaccgatgtagcaaaaagttttattaaaatactaatataacaatataagatgactacttagaaagcttctaatcaatgtattatgcgtataatgaaggtattaaactagaaatgggaaggatggagtcgaattgcaagtccttctactggttctagcatggggtcatacttaaacttctcatcaggaatcaccaaatcccacttgaaccgtttcacgatattatgcatgaacacaagtgtctctagtctagcaaactcttgccccaaacacattcgggggccaccaccaaatggaacatatgataatggtgtaggccctgctcctttaaaccttgaagcatcaaaagtttcgggattcgagaagagtgctggatccttgtgtgat

SEQ ID NO: 42912 - DNA, 317 bp, Glycine max
  Clone ID: jC-gmro02910064b10d1
ctgaaagccaacattcaagggatcttacgtttcccaaccaaaaaaagcgaggggcagttacacattctatcaccacaatcacatttagttttggatttaatgtaacttgttaaaaaagtccaaaactcttcttattacacaaatttttaaataatgacaaggtttaccacaaagtcagcctcatgaccattatgcacgtgattgcttctttcttctgggctttggacaaaaacgatgccttcattttgtaacatttgatctcaaacacaacaagccgatttttgtgcactctgtccagcccctcctgactggtcttg

SEQ ID NO: 42913 - DNA, 311 bp, Glycine max
  Clone ID: jC-gmro02910064b11d1
gtgggcggtatgttttttttggttgttgtataacctgttatatcatctttgttttttttccttgtgaagaaaaaaaggatacatgcttggggccccccttcctttaggggggctgccggttctcccaagaaaaaagaaacaatgacctggggattatcgcagccccccccccccgggggggagaaagacccccgagttgggggggaggaccacaccttccccccgtggaaactgcactgcacgcgggggggaaaaatgctcaagagacccccggtggtccttctagctcccaacatctttaaagccccacc

SEQ ID NO: 42914 - DNA, 357 bp, Glycine max
  unsure (1)..(357): unsure at all n locations
  Clone ID: jC-gmro02910064c03d1
ggaaggggaacacgcaaccggctttgctttttttatagggaaaggttaacccaaattacattggttcgttcccctttcaaaaaaaacaacaaaaaaaagcttttttattctaaagacaaaggccaccctgcgtttttccaattattcgccctttttgacatcccaaaanttggctggcatcatacttcccaccttggttttaaggccaaaagccacgaatctaatgaagggttgggggagaaaaagactcaccctaaagaaatttttatgttagcagaggaaattttccaaaaaaagacttcccggatggaaaactggccaacacagggcaattaaaaagacccttaaggttggggg

SEQ ID NO: 42915 - DNA, 251 bp, Glycine max
  Clone ID: jC-gmro02910064c04d1
agaaaagaaaacacatatcaacgtttattacacaatccattcagaaaaacaaaaaagaacaccctgagcaaaaggacccaatacaattatatctcctgagccaattccactacttcttccaccacagacgccatagaagatcttttcttattgcaacaaagcacttatcacgaatctcccctttccaatacgatccgttatcacatgtagctggctcacctttacaaaagcatcggaaaattttttaaaaa

SEQ ID NO: 42916 - DNA, 474 bp, Glycine max
  Clone ID: jC-gmro02910064c05d1
aaaataaaagatcaataaacttgttattcgattctttcacacaggcacaccaaggaaacagttgcattgcattctagtagctcattattccgagtcatgacccgcatctacctattacactaggcacaaaccaacctacaaaatgctaaaaggttgtttcttgtcttgaccaaagatggagactttttgaaacctcacatagtaaggctcaatatcatcccccacagccatgactttggttccatcagcatcttcaaaagtccccacaggagcacacagcgcaccaggcacactggggcagaacttgaagctgtagatctcataagcatgatccccttcaagcctctcaatcttgaacttgctagtgatatcattagggtcaccactggtgcttacaaaccagaaccctgaccctaccttggtgagccttcacactgttggctgtgtacacactgtcaccacagggaaatcaat

SEQ ID NO: 42917 - DNA, 499 bp, Glycine max
  Clone ID: jC-gmro02910064c07d1
cataaaatgcttcatcaatacaaattatcattttaagcggggccagataatgtttgtcacaaaaagtgtcaaacacatatgatccccatttatccttgcaattaagcaagttacgtttgcgcttaggctaccagaaatcccgagtgtacttatataatgatacaaacatagacataaacacgggtgaaacataatgaacactccatccaacattcaaggtaccacaaccaatgtaacatggaattcggatttcagaatgtagatccattccatccgaagttggaacccttggtgtcatagaatttcaagaagaaccgcgacttcggcactgacaatttggtttccagaattgaagcaattgcagcactaagttccttgtttacactagggttaagaccaccaatggaaaccaattctccataagctgctggctgcttattcccaccaaaagctatgggtactgatcctttaatacaatcataacataggctttgggttg

SEQ ID NO: 42918 - DNA, 196 bp, Glycine max
  Clone ID: jC-gmro02910064c09d1
aggcaaaacccaacagaactgtgtcctaatgaggtgcgagaaacagtacaataagtcatctcctgtatgtctcgcggaaacgtacctttggctgaataaaaatttctttccctggtaacaataaagccatgggtgtgcatatgccgacagctttttttcttcacatgccatcctttggaaggccacatcatgtgat

SEQ ID NO: 42919 - DNA, 427 bp, Glycine max
  Clone ID: jC-gmro02910064c10d1
gtcaaatagcatggaattcaaaagctagatttgaactctattattctccaagctctgtatggatgttcgctgtgcacagatacaaaaagtacaaggtaaaattttatacacaattctactagaggattcttctttcatgtacccccaaatatgcccgattgaattagacaataagcacgttcatagaagctttcaacttgcaggctcgaatttgcaaatacagtcgtatatgtcccctttaaccaatttttcagtcaatctctggtttctcaccattgcaagctttaaagcatcacgcttaaaccgagcatttaagttagtatgaagtgctctccccatcccttgcaaaattatcaaatcagcatcttttgcagaagcactagctcaaactgacctgtcttaagtctatacatggactaccacaccc

SEQ ID NO: 42920 - DNA, 320 bp, Glycine max
  Clone ID: jC-gmro02910064c11d1
gggacatacctaggcatcaatttaaaataaatttgcctaattaacctagtttttgagggacattaaggaaaatacttctgtttcccgagtcaaaaatgcgaaaactgaaaattgatgaactctaaaacgggttatactggattggacgtgaagctaactaagccaacccagggcagtcctgctggtttaaaaaaaaaccctaccaccggtgaagaagatttcttcattcactgcgacattgagaaagaaaagcagagctacaggggccaacccagagtgcaaagggaggaacttgtgcctggtgaaaaagggccaccctt

SEQ ID NO: 42921 - DNA, 352 bp, Glycine max
  Clone ID: jC-gmro02910064c12d1
aaggacggtcaaatatctactataacaatcaataacaggggcattagcaagtattcaagccaagtacatcagcgagtatataaaaatccaaaaactcgatccccctccacaagagaaaacatcaaaagtgcaaaaaagagctaatgctcctccaacaagtaacaccactggtttcagaaaccgatttattcagacctctcattttttgctcgagcaagacactaaatcgcagctaaacataaacatacggtaataatgcgaagacaagctactttgaagtaacaccttaaagagactccttggcaacgaatacaagaagatcaatgacccgtgagctgtatacccactcgtt

SEQ ID NO: 42922 - DNA, 553 bp, Glycine max
  unsure (1)..(553): unsure at all n locations
  Clone ID: jC-gmro02910064d01d1
gttgaaattatttttataagggctgttataaagctttgtgtaaacttaaaaacgacattaagttctcaaaatctaaaactctgtatggctaagtaatcacaagctggaaaaaataggtacataactaactacatatacacacattaaaagctgatggaaactaagattgaaaaataaaaatgaaagagataattgagaaggtcactttcattagcaaaaggatccccatgccacacggaaccagagattaatattcaccgtcctaacgacaacggcaccgtcccacctttctctttcaaaattccccaccaaaaatgattctctgactacttagcctgtcacaacataggggataagccataaggcccctccctcatcaaaaacccaccaattttcttaccaattactgccatccgatgaatgtcaatctcacctaacttacctcactaatattggcctcgatcttcatttaaatcaattnggtaactaatcatatgatgagagtcataagaccaagtttttttttctgactagaacacatgccttttttata

SEQ ID NO: 42923 - DNA, 452 bp, Glycine max
  Clone ID: jC-gmro02910064d02d1
ccggttggcttttcggtggaggccctttttttttgaatttagcaaattatccttgaagcggccagcataaatgacggggtaagggtataacatcagatttcctacattgtggccacactttacactcaacagcataagactgtgcagcacctactcataattgtcttaaattctacgcatatggaagactttttatgttggaaagattgcgctcagctcactggattatgttacttcaatattgcctttgaagacaggcgagtatgatttccatttgagctctagaccgtgaaccagatgagggaggactgtaaaccctttgtggaattcatgtgctgggcgacaaagataactcccatcaccactctgagacgatcttctctcatgctgaggaacagagcaccctggtgtctgggtcgaacaaagccaatgtctccatgatacgtgacaag

SEQ ID NO: 42924 - DNA, 452 bp, Glycine max
  Clone ID: jC-gmro02910064d04d1
caaaataacattttccataactaattagtgaatccaataataataacggcgaacataataaaatagcactgctcttctaatgtttaactgacgcataaaagataatatattaagcataatgttctttaatatccaaagggaggaatgcgacctaaaagcacaacactattgtatcttcacaccacaaaacacattattggaaattgcctaaaagtgacaccaaaactggttatttttcattataaaggtaagtctggccattgaagtatgtaaattcttctttcactttaatattccccactggattctttccatccaccatagctctcttcaggtgcatcataaccctggtcctgatttctctcagcagcgaaagtgagagccaccttaatctcaccacattattcttcgtgcttaacaaccttgaaagcagtttttggaatgctaccggc

SEQ ID NO: 42925 - DNA, 447 bp, Glycine max
  Clone ID: jC-gmro02910064d06d1
ccaacaagggggtttaataagtttaaatttccaaagtcattgggaaaacaaccaaaaattgttacaacatacaatcaagggcggaaagggggctctttttttttttgggaaacttttcaaccaaagtaaaatttgacagggaatcactttattttgaactggcttaaaaaaatacccagggaaacgaatgatcattgctgctggagggcactcacaggtgattgaactaaccttgaggcaaattgccaatggatcaaaactgccctttcaaaaaaacaaattacaggggtttgaattgcaggcatagccccgatttcgttgcaatccttgatgttggggaagttgcaaacaaatgtggctgatgtggctgcaattgttgtaacggaatttccaaaaccttgttgttgtggccccaattgcgtatgtggacagttttttaaaaccttg

SEQ ID NO: 42926 - DNA, 417 bp, Glycine max
  Clone ID: jC-gmro02910064d07d1
aaaataagaaccagaatttgcactaaaatccaacaaacaaaatttccacattgtctgcataattatgatgacaaccttaacccgcaaaacaaaaaaaccaaagataaggatattcagttctgatgagcataaaaaacaaaattctaatacgaaaaaataaatcatgaagtttactgtgaaacacccaaccacttagaaaagttgtcgaattctgtataatcagaatctgacaccatagtgtgataccatgctttcccagcagccttgatggcagacgcttcctccttagagacaggcttcctgttcttgtcgagcttctacttcttgaccttaacccgctgtgcctcagcgagaagggccatcctcttagcagtcttggcattaggattcagcttcagcattgagtggagattctta

SEQ ID NO: 42927 - DNA, 336 bp, Glycine max
  Clone ID: jC-gmro02910064d10d1
aagcaaactttccgggttaaattacttgaaccaaatttttggtggcaaccaaaaaccttaccccgcgctactttattgcttaaagccacagaaacacccgggtgcccgttgtggattttagaaacaacaggatgaaaccgggggggggttcctttttggcgaaaaaattggcacaattgtaccgcctccgttttcacataactttttttatttcccttcccttccctgcgtgttttcccctacggggggcgggagcttttctttccttttggaaaaaaaaacttccctgaattttttgtccctgacaccaaataaaaaaaaaaacttagggggggg

SEQ ID NO: 42928 - DNA, 404 bp, Glycine max
  Clone ID: jC-gmro02910064e04d1
ccttgctcctgcttcctactatatcggtttttcactttttctttaggttgattctttgaactgttgttggccatggatggcctaagtcgcttttggggttgcttgcttgaaagcaacagtgggagctattctgcagctcctcctctgatgctcctgaacaagttctccagcaaaccagccaagtttctcgaagttactctgctccccaattctctttcctccaaacagtactgactctacattctcctgcttcaacatctcttctgctattcctactagcatcttcacattgccgggacttgaatctgtatccacattgggtccacatcgccccatacttgacccatttgcctgaatgcggacataattggtgctgcggcactgaccaaaggccatggcgatgg

SEQ ID NO: 42929 - DNA, 509 bp, Glycine max
  Clone ID: jC-gmro02910064e06d1
gcttccagagattcaaaattgacatccttttgcagtgagacaaactattggtctttctcatatgctccattccacatttcaagtaatctattttcatggaagccagccaagccaccaacttataatatcatatacaacatcccatcccctccaggttttgataaaccaagtccaataatatttaatacttataaatatttagtgcccgtgtattaaagttgagtagaattgattgtgataaaattaactttgaactgttttgtaattgagatgtgtacccaaattgagggcagagcttacagcaaaccaaaatttgagtacaattctctatggtaatctctgataagcttagtaccaatgctatttgtggtaaacattcacatcccttcttctatcagtctcaaaagctagggtagaatgtcagatattatctcaacagtggcaccaactaggtagaataacatcgaaattgattaaaatcagggggattaaacatgaaaagagataca

SEQ ID NO: 42930 - DNA, 413 bp, Glycine max
  Clone ID: jC-gmro02910064e07d1
agacttaaaaaagcacactgcatattcatcaaagcatcatcaaagcacactgcatcctaacagcacacgtacgtagaaaggggaagttccaggtcttgcacaacatacacaacacaccataatttattttatatacaatcttatggtgcccaagatgcagatgcatggactaattaaacaacaacgttagtctgataggcagtgtccatagataaattgggtacccataaaatggccttgcttccaaggaaatggcaaacagggttagtttcaggatcaactcccatgagttcatgaagcatgtgatgattcattccaaaagtatctgagtggaaaacagcaagtgcctgagttttggttccatcaccagccaccaatggaaccataaaagctgttgtttcacggactttatg

SEQ ID NO: 42931 - DNA, 422 bp, Glycine max
  Clone ID: jC-gmro02910064e09d1
aaatgcaaacaatttaaaattaaaggaaaaaaaatctaattttttcttgtcaattgataacataatccacttcttatcaaataatcggatttcccaagacattctaaatactagtactatcttccacgtttctaattgccaccccatctattgatcaaactaaaaacatagacaaacagctgaattaccaaaggtgtaggatacaaagctccccttatatgattgttttcagaggagtgtgaaattaacaagcatgcttgaagaccttgaagagcaaatcttctccatattattgaaacaggacagattaatgcaccaaagagcgattgccctcctgattgccaaaatcagggagctcagaactataggaaaacttcatccatctctttttcttaactaatttgagacaaggctgcttcaca

SEQ ID NO: 42932 - DNA, 356 bp, Glycine max
  Clone ID: jC-gmro02910064f01d1
cgcgttgctatccgctcgcgctccttttctttctctgtttttaacgtcaaagaataacacttggttctccgccacctgaccttacaaactgaaccttgggagcaaagctatggaatttactaaaaaaatatccacattaccccttgtgccctttatcacataaacttattaaccccactacgatcttatgactatcatcggaccgtatccaaaccgcaaataatatattgggttgtcggggcggtgatcatcgatgcgccctgataattgatccacaccctgtgatacacaattggtggtagagtactctcgggccagatgggtaaactggatggcctcacctacaaaggggacgg

SEQ ID NO: 42933 - DNA, 409 bp, Glycine max
  Clone ID: jC-gmro02910064f02d1
accccttgactattcggtcgacaccccttacctttatgactactataaattttgccagaacaatgcacctgatatagggggagagaacagtaaacttctagcttttgaggttcaaacatgggatgggaatactaccttcatatgcaattttacagatcttaccagctcgtaccacacaataatagacacaaattctggttggaattatccaagaggggctgcaggagaaacctgatccaacataatgtataaaatggggggacactaccacaacaataacgctaactatcagatgccttggctcctacggcagggacttccatccacccgtcgcgttacaggccgtatcttgaggtgagcgcagcttagattcactggaatgttgagcaccagtatcccaccatttcgt

SEQ ID NO: 42934 - DNA, 329 bp, Glycine max
  Clone ID: jC-gmro02910064f03d1
ggatattcatataactgagattcaggtgccctgggaggggtacaaatacaacataaacttcaccaaacaggacaaggaaaaaaaaatgaaaaataacacagtattaccatacaaaatgtgagaattgatgccagaacggacttcaaatgtattaacttattcaatgatttatctcatcttcctgcaactttttcacgttgttttacctacacgggggattaataaaccccacaccaattacagtgggggctgtatatatatctcccaggggttacagataatgataattttttatggcatgacctgaaaagggagcagtcgctaaatga

SEQ ID NO: 42935 - DNA, 181 bp, Glycine max
  Clone ID: jC-gmro02910064f04d1
aaattatggcatggggaaaataatgaaactggaaatcaaacaaccaaatccttcatttaaatttttgggctttaaaagaaaggacgcaccggttgatgaggctttcctattttgcttgcccacctttttcttgtatggtggttcaccctccaaatagtaccattttgtccttttttatgca

SEQ ID NO: 42936 - DNA, 261 bp, Glycine max
  Clone ID: jC-gmro02910064f05d1
atcgaagggggaacatttatctccctttttcggtccaatttccattcagcccttttagggatcaagagttttgtcttcctgtacattaaccaaaattattgcctaaaaaccttgatttaaaaaaaacagggaaaaaaaccgggtcttagttttttcccccatctctacttggggtggtccattcttcggagataatatttaccaatcaaccctgtttatttcaatacccctcacccgagcgttcctaaacccattatttac

SEQ ID NO: 42937 - DNA, 483 bp, Glycine max
  Clone ID: jC-gmro02910064f07d1
ggagggaaaatgtctgatatcagaatcaataaagcccgagtgcatgtgctagtatataagaatccaaaaaactccatcccctacacagaagaggcaacagaaaagagcttaatgctcgtaacagggtaacaacactggttccggaaaccgatttattcatacttctcaatttttgcacgagcaagacactaaatcgcatcttgaccagcacataatgttagaaccaccttaattaaaaagacttcttggcaacgattacaagcaggtcaatgacacgtgaactgtatccccactcgttgtcataccaagagacaagcttcacaaaatttttattcaatgcagattcagtctttgcatcaaaaatacttgatctgttatcaccaacaaagtcggtggagaccacattatctttagtgtaaccaagaattcccttcaacttgccctctgattcctccttgatagcatttgtaatttcatcatatg

SEQ ID NO: 42938 - DNA, 393 bp, Glycine max
  Clone ID: jC-gmro02910064f10d1
gactgaaaatgcattcttattaaacacatggatggggggtgggctaacccaacggctaatttacattgtgtactggaccacctatatctataaagcctgattttcacatttcaaaaggaacagatcttcgcatattgagcataagggacattaaacgaactacatgatgctgatcttttcttatactgatgtgtagcactcacgctagaatctttcaaagctttggcatatctctccaaattaatctttatacattcctacaggatctcacaaggaaccttgttctctggggctgaatttaatttgtgcttaccacgacaccactatccgaattattcctatcaactttctacacacttcgtcatactagtagaaaacagggtgagttctaca

SEQ ID NO: 42939 - DNA, 274 bp, Glycine max
  Clone ID: jC-gmro02910064g03d1
ctggagatgatttggttacacagattcctcgtaagggggggattaccacaactagaacagttttatgtttcccagcctaagaatttgaaaatggttatgtgcttaaccaccaacactgacttgcaatgattgagatacataattaacccgtccaacaaacccatgttgactaaagacaacacccatatggacccaagaaaaaactatcccatcactaaagcttcggacaaataatattgtgaaaaccaacccctcatttgaggcgttcaatctt

SEQ ID NO: 42940 - DNA, 460 bp, Glycine max
  Clone ID: jC-gmro02910064g06d1
caaacagaaattagaattgtatcaattaagtaacactaaccgggaatcatcgtgagatctacgttaatctaggttttccctactccagccccatacatgaatggttttaaaatgccaagaaacatccaccgcaaatgttaaattaaatacaacagcattaataatataactcatttttgcctacgacgtatgtcatttttcagtctttgaagcacacgccacaacatgagatttgaattgctccagcttggccaaaacctcattttttggtctgtagatcaaatcactcatgcgccatatttgcaccgttccccctcctccattactttcacagtcatcagacacactaacaatcgtccatggatcatatgcattccaatggaagtcaacacctttatccctatgacctggatgttgaaaaaacaaccctggaggagaacttattgattttccagatcgc

SEQ ID NO: 42941 - DNA, 513 bp, Glycine max
  Clone ID: jC-gmro02910064g08d1
gagatcaggtccaatgctatgacacagtaatggatccaaataacttacaacaacacattcatgcctattataatattactctacaacaccacaacacaatctaacaacttttaattaattaattaaaccagagatggtgaacaacaacaacaacaagaagaaaatgatgattataccgagaagaggttcttcttcttcttcttcttcttcttcatcagaggcacagcgcggtggccggcaggtcgtcgtcgttgtcgtcgtcggcatcggatggtgggaggtttagatcgaagggcagcggttgccggaaggaggagatgaggacgcattcctggccgtcgtcgacgactgaggaagaagagtcgcaatcgctgtggcaatcgtcttcgtcgtccttgagagggatgatagggttaacaaccacaacatggggcttaccgcgagaggaggaggagggaaccctaggcccgctgaaagactccacgtagctgcttatgccgctgctcgtgggcc

SEQ ID NO: 42942 - DNA, 468 bp, Glycine max
  Clone ID: jC-gmro02910064g12d1
acagaaagaaaaatttccagtcatggaccttatacaacatcatgagtctaatgtcattgacattactctgacactagagaacattggccttacaagatacgactcgaattgaaaggtgatatccagtacaaaatacaataaaacacttcacaacaaagcaaaaaagttcccccagatcaggcatgcaaaggacactttacatatcagacacaaaagatccaaaaacaattttaaaattaaacttaatgcaagttaacacctcgtcccgatcattcttcagtgtcatcttcagagagtagggtcccggtggagtaatcgaaggcaatgtttgggtgtgagaaatcagaaaattgccattggcaacaggacaggatacttcatgacagagatcaattctttcagtatggacaggcaccccaacgtatgaaactccaattacagcttcttcaccataaatagctttactag

SEQ ID NO: 42943 - DNA, 473 bp, Glycine max
  Clone ID: jC-gmro02910064h01d1
cgggttggctatccggtcgcgcaccatggcttgtgttatgttctctttccggactggattcatgcacattatatactggtataacattaacccagtggtcgactccacataaactgctacctgtgcgtccacaagcacaagtgtggagggactgacaaacatcgggtgtattacggtttctccagaccctatcctgtctgctgatgaacctagatcaaactccaacaatcttcatgaatctccggctgaaagtgcaagttctcaggaaacttggcctactgctgatgcagctgcagcaaagaacatggagaatggaaaagcggaggttaattgccttgagcagaaagtgattcatcgaggttgtagatcagacaaatgtactctgaggcatgtgctagagaaagtgtttgtatgatgtgtggaaaaatgcatcatctacctgacgaatatctataagagctgaagaatggact

SEQ ID NO: 42944 - DNA, 379 bp, Glycine max
  Clone ID: jC-gmro02910064h04d1
gccttgatacttcatgccatattttcacatcattacatagactgtgcaattccaaaagcaagatttaacttaacaagattaccactaagtaaaacccctcaatatcctactacccaccctttaacattgttttgtaatttataatgaaaagcacaataaaatatggatcacccactgtgaatactccaaatcaaaagcaaaatgaactcttgactttgacaaaatcatgattgcagctcaagggtcgaagtcctcttggtcatcttcaaactcctcctggttctggtaaccttccatggacgtcacaattgttgttgccaaagttacctatgttgctggaccaattttctgagttaacttctttggttgagccaccata

SEQ ID NO: 42945 - DNA, 509 bp, Glycine max
  Clone ID: jC-gmro02910064h05d1
aatcataacaatgaatatattgaatcactataattagagcagcatcaactaaccaatagttagatctatgatacgacccagcagagccgaaattactatgacaaataaagggctaacaagaagcccataaaacatctttaaaacatttaaagaaaaaaaaaagagtaacaatgctatgcagtcaggaaaaaaatataaccagaaacttagtcaagatttctggcaaaaaaaatacttctgactagttagcattttcacaacaaaaataatgcttaaaaattacatataactgtagctgctctcagatttgaggtgaagaagcactcagcccaagccatggcatggactcagctgccttgttagaaggcccatttgctacttgatatggtgctttcgaagcaattctgtagaaacaacacaaggaaacaatattatcaactgggcaaaaacatctaaaattaaaacttaagaaaaaaaaatataggggtctaatattaattgcacttttg

SEQ ID NO: 42946 - DNA, 511 bp, Glycine max
  Clone ID: jC-gmro02910064h06d1
cacatcatatcttcaagtttgagattatttagtgctaaatttttccaacaattgtcagaagaacagcgataaatcaattcttactctgatagcttccattcaaattaaagttcatttcaattttactccctctgatgaaacataaagcaagccaagtaataaactaacttttgacaagggttttacacatccggtgtctctacttctgcaaatggtgctaagtttcatggctacaaggtatatgaaatataacatgaaagttgcataaacttacaaccaacagctaagaacaaatcctagaaccataaatataagccatttctgcatagatacctggtatgaagaagaagaagaagcaccgttgcacaaattaaatccataccacgtatctctggggatatatgtgttgtaatagaaagtaacaggcctgccgttataaccatttattttcacactttcaggcttccagccatctaatccagatctatataggtacacataacatatctga

SEQ ID NO: 42947 - DNA, 529 bp, Glycine max
  Clone ID: jC-gmro02910064h07d1
agcaaaaaaaaccataacttaaacttttctatcaaaaaaaaagaaaaatacattacttaattttcaaattaaaaacaaataattctcgagactgctaaattttcttagcagaacagaagtgctttttttaaaaaattgaactttaatttcctatagaggtaactcttcttccttccttattctgatgttctcttttctcacttcacaatggtccacgccacgtcattctcgaagatccagtggcacacctaaatccgacctggacccgaccctaacgagatgaatgctccatgggtcgggctccaatcggaggtgtgcaagtgacagatggcaacaccacggctaatcttgacctttgttttcgggtcgagaagatccgcttcgtagacccgaaccttaggaaccgcgtggcagtagtaaagcagataagggaacaggctctggtggcacgacacggattgggtgactttaccaccgttgtatccccctaacgggccccaccaccacactcttttttgacccgttcacg

SEQ ID NO: 42948 - DNA, 506 bp, Glycine max
  Clone ID: jC-gmro02910064h10d1
aatcacaacccaacatgtatagactgtcacgacattgacattaaactcattataatatacaccaaaacaacaagtgtataaaatacacagcaactatttaacatactaatggtatctgacatgactgcatacacaggaatgcttataaagcacaagggcacgcctctcaattcgcaggaaattttcacaacggtagagataaaaaaaataaaatcagacgatattctcaaaatacaagtaaaggcaaaccattcgaacatccatcagcctttgtacatatcatttctttagtacgttgtataagtaggcagcaattcccaaaattataatcaacaaaacaatatcaatacagaagtttcgactggatcgaagctggttcacagtgtctttaagtctaacatttgtattcttaaggtcagaggatgccttgtccaccttagtgtcaatctcgtccataagtggaacttgtctatccagttcctcattcatataatgtgccatatttt

SEQ ID NO: 42949 - DNA, 543 bp, Glycine max
  Clone ID: jC-gmro02910065a01d1
gtcaatctgcattttccatttctattattttttaacaaacacatttgtattacactgggtgaatcacgctactttgtacattgcagggaacaaaaattgaacccctttgcatttgttttatgtcatgacctctagtgcctctcttgtttgtccaagtagattgaaaactgttgctgctatgtgagatggtgtaagaccagctgcactcaattggtcaaccggtgatccatggtcaatgtaacaatcaggaagaacaattggcctccactttaatttcccatcaagaaggccatcaagggccatgaactgaacaacatgagatccgaatcctcctattgacccttctttcacagtgatcaaaacctcgtgcgattgggcaaggctgcgaataagggaacggtccaatggcttgcagaaacgtgcatccgccactgttgcgcgcaagccatgatgttccaacaaggaagcagcagccaaacagctttgaacagctgattcatagcccaacaaggccactctttcttcttcaattagtatcctacc

SEQ ID NO: 42950 - DNA, 396 bp, Glycine max
  Clone ID: jC-gmro02910065a05d1
gaaaagctctaaatgaaagtagcatttattcatggagagcgggctcgaatcacaaaggtaaagcctttgagaacaagtgtgatatgtatgcaagttgaacaataatatgcccaaacttcatggtcctatctacatattaatatataatacgatgaaggggcaggtttgtgtagagcaccgagagaccattgcaaaacgtattgtaggggacaagagggcaaatatccagttttatatcccaggcctacttatgggtccagcttgtaacagtggactcatacttgactttgtcgtgcgtgatcctatgaacatatgcgcggaccaaagggccatcgggagttggatccgtgggcaaggaacacttagccagtcacaccgatgatattgagagagcag

SEQ ID NO: 42951 - DNA, 445 bp, Glycine max
  Clone ID: jC-gmro02910065b05d1
aaagaaaatattgcttttgagcaagcattaattgtccaaaacaagtaatacacaagcatatatcatcatacacaacacaaataactctgattttgtgcgccagatgacagaactcatcactcatcagcccacaaaaggaccatcaacatggtcatcactgcagtagagacctggacgacgtttgaaacctcccctgttcagcttctcccttgccttcaaaacaatctcttgatttgtgacagcaccatcactctcctcaatcacagcctgtattgcattgctaaaagctccataagcactggcagaggtacctgctggacttgcgtcagcagaagtttggtctgtgtgacaaccactcatcagaattccgccgtctggaaggctcggattggctgaacttgttccaacatatgccttatatatgctttcaacctttgtctccatg

SEQ ID NO: 42952 - DNA, 471 bp, Glycine max
  Clone ID: jC-gmro02910065b07d1
ggaactcgatcaaagaattccatcaattattattaatacaataatgaatgattaaatataacttatacaaactcaaccaactagatcggcctaatgatgaaagttttggatggttcatacaagattttaggttcacaccttattctcgccgttaaaaaaaacaaaaaaattcgtacaaattctaaataggaatgatgataacacattggtacttttctagttgggcctggtgcaatcaaacctaatttcaccttgatttccagttttaacaccaacccttcccaacttagtaacagcatcaacaaaagctttctgaaaagctccttcatttgatgcaaataagttgactgtggcctttgaccttgcatctgtaaacagcacctgatcagaagtgaagagacccttaccttgctgcagattcttgaagtattggttgtcaaacttttgaggcgggacagggtccatgtttat

SEQ ID NO: 42953 - DNA, 435 bp, Glycine max
  Clone ID: jC-gmro02910065b08d1
gtggacggggaacaaatcttgcctaaatgatacagaatcaaaacccgggtcccgcatgtacaaccatgccttttttttaattaaaaatcaatttggcaccaaaaaagtaaataactttccccaaaggggccaaaacccgcccccaatttttaaaacaggaataatcatcccggggtttgcccttggcatttgaaacactagcaaggggaccaccttgcaaattaattctttcaggggggctaaaagcgaccccccaaacctgggctgaaagaatgtttattgggtggccaaatgcccttatgttaaaaacccatagccttacaaattttttatttgaacctgtagcaaggggtgccccatttggggtcaagtccacacccaggacccaatttgggtgacctggcatgggcccaaataaaggttttccctcaaaaa

SEQ ID NO: 42954 - DNA, 491 bp, Glycine max
  Clone ID: jC-gmro02910065c01d1
aggtagaagtaaaactgagctttaagaagaaaactgttattaaaacccacgagggaaggtcgtaaacaatatacatcagcacatatcttaacagaaagaaaagacggtactgaataaaaaaaaaaaacaatgctatcagttgtaccaaggaaagaccatgtttggataaagcatcagttacttggttggcctctctgaataatacgtgattccaagaaagaacagatttgactagtcgggcggactcaggtgggtgtctaagcagccatcctttatcatcttaatgactaaaagagggagattctaccatcagatgattgattcctcttgaaccagccaggttgagaccaaaccaataatactgacttccatccttgtgcaaaccaatttttaactaatgtataaatactatgttacactgaaaacttataagaaaaataaacttggaagtcaatatatatcaatactacaaaaatttattacacttaaag

SEQ ID NO: 42955 - DNA, 461 bp, Glycine max
  Clone ID: jC-gmro02910065c04d1
accaataaagatgtcgtgctaaagcacagtgagattcagggagaacactgactgtatttatatattaaacaatggaagcgccatcacaccttgttatcagagaaagtgaaagtgtctgagagtgtgtgtgtgacttatggagtccaattcagagttcgacgtgattatcatcggagctggcgttatgggcagctccaccgtctaccacgccaccaaacgcggccttaaaacccttctcctggaacagttcgacttcctccaccactgtggctcctcccacggcgaatcccgcaccatccgcctcacctatccccaccactactactaccctttagtcatggactcttaccgcctctggcaagaggcgcaggcccaagtcggctaccagatctacttcaaggcccatcacatggacatggcccatcacaacgagcccgccatgcgcgccctcatcgactact

SEQ ID NO: 42956 - DNA, 302 bp, Glycine max
  Clone ID: jC-gmro02910065c05d1
aataaaagagatgctgtttttaatataagaaccagaatttgcactgggatccaacaaacaaaatttccacattgtctgcataaatattaagaccaccttaagccctataacaaaaaaacctaagataaggatatttagttctggtgagcatgagagatataatagttatactagaaaataaagaatgcggacatcattgtaaacacgaaactctttataaaagttaacgaagtctgtgtaagcagaatatgacaccataccgtgagaccatgctgttgccaccatcattgatggcagacgct

SEQ ID NO: 42957 - DNA, 515 bp, Glycine max
  Clone ID: jC-gmro02910065c07d1
acttcaaactcttgtttattttgtcttatgttgggttaggttcccacatccactgtgtgggacctctaaagcacattccatttcgagaaacataacaaccatcacctaaattatctaatataacttggaagacgcccgagcttatgcttattccatgtcttgcaaagcctatttcatattgctaagaatttatcactctgcagtttttcctaatctccccatcagtcccagtcttaatatttatattccccatcttgatcatagaattggcaaagtccccaaagaagagtccactatcgttgctataactttgaactaaaggtttagtggttgaattagcttcatcactagaaaatagaatctggtcagaactgagaagcccctttccactgagcaagttctcgaaatagtgattgtcaaatagatccgatgagttccgatcaaggactgtagtaacgtttccatcttcattttgaggacacaaactttgcaggtcagagagcatgtcagtgtct

SEQ ID NO: 42958 - DNA, 585 bp, Glycine max
  Clone ID: jC-gmro02910065c08d1
gttaaaatatcaaagcataaatatagacacacgcttttcatatgcaagggcagtatgaactacgtatcccgagctgattacttgctcacaccacaaataaaatggagatctctaaacgttaagaaaattcttgagagcaataatttaatctagatatataggttgtaataaaaatatttctgatacatgtaatgaaatttaattgcacttgaaatccggaccataccaaggagtggaagatgaaatccccttaaacatgtaaattaccatgagcagcagccactacttgatgcatcagacagtgggggtttctgcttgaagatgttctttttcacaccagatgagccctcagccaagaggcttggtgtctccaaaatcttcatcacaagctcatcaaaacactgtgtaacattgactctggtttttgcactgcattcagtatacagacaaccatattccctagcaaagtctattccttcctttttgctgacaaccctttcactttccttatcaactttgttttcaacaagcatcttgatgcaatcttgatttgttgagtataagtcaatttctttagcccatata

SEQ ID NO: 42959 - DNA, 456 bp, Glycine max
  Clone ID: jC-gmro02910065d01d1
aaaggggaagggggaagttttctaccaattccacatggttcaaaaaacaattaagatctcccccctccccaaaaaacattgtttggtgggggcccttttacgggaaatgggcctttatatagcttttttattgggaaccttcaatcacatgatttcctaggggatataaaactcttcctaattcattcatattgggctaacccaacccttttttgattcgggtgccccacttcctttatcaagttccccaaattttttgttaacaaaataaccttggtttctgatttccccttttttcccagggagcacaccaatttttcccattttaatcatgggagccgaaaagcttttaaagaaagctttttggccactactgaatttgttgacaatgctgatgggttcagcccccgggtgtgagaacaacttttgtttccttttaaacaaaccctttttaac

SEQ ID NO: 42960 - DNA, 382 bp, Glycine max
  Clone ID: jC-gmro02910065d02d1
atgaaaaaattttcacttatatgaaaactatcgccaccgtgattgcacagtgttaactaatttttttaaacaacggaaatgttcctatgatagagacaacaatcaatctcgggggaagaactaaaggccttatgaaaagagagtattgaaaatatgtgtcttatgaaatcacactgccatttataaaagcattgttgatgctcacatcattctaacaccccacgtccctataaatgctatgacccaggttttggacaacatagacaacatacgagactttataccatggtccagcttatccggcccaaaaatcggattcgttgcctacttatacatcaacagaggtcttgctagcggggcacatatataaatgaccaaccca

SEQ ID NO: 42961 - DNA, 549 bp, Glycine max
  Clone ID: jC-gmro02910065d04d1
aaaattataactagaaaattgtttatatagtcaatcaaggagtatacaattttttttaattcaatgcaaaaatttgctcaaaattgtactacaacgcacaagttgcttgacatctcagtctatcctcaatttttcatggcttcatatgattcatttatccgtcgcattaattcactcattggcagtgatatgatctcatcttcttctaaactttttggatgattttccttccttgagacccaagtacttgtctatatcctctccatcataatcttcttcgcccctccgtttcttcttccctccagtctccttcattttcatgacggctaatcttttggcctcaccaacacgctcttccaaaagcagaacttcctcttcttgtgcaggatactctggtagcttcttgcctataagcttctctatttgaatgtaccactccagttcatactgatttacaagggaaatggcgaccccagagcgccctgcacgagcagtccttcccacgcgatgtatataatctttggagtttgtgggaatgtcatagttaat

SEQ ID NO: 42962 - DNA, 398 bp, Glycine max
  Clone ID: jC-gmro02910065d05d1
ctgcattccgttgtatccattttttttcgcggggcctggaccctatggaaccatcacggggggttaacattaatgcgtccaacgcgcgcacccagaaaaagcaaggatatacttgcttttggcctttaaccgttattgactccccagcttaaacaaagggggggagtgtgctgatactttgacctatggtgaatgaacagatggactcaattggatggccggggattcacctgccacgtttcaatcccgaagaacaagaggccttcactgtaagtccccatcaagaaggccatcatgggccatgaactgaacaacatgagatgcgaatccttctaatgacccttgttgcacagtgatcaaaacctcgtgcgattgggcaaggctgctaataatggaac

SEQ ID NO: 42963 - DNA, 574 bp, Glycine max
  Clone ID: jC-gmro02910065d09d1
acaccatcaatctcttgctttatgtgtattcaaatgagattaagcaacaaggtacatagttttggaatagcttacaaggcaaaccaggcttattttaaaacagattacatattgtttaaaaataaaaaatacagacagcaggttcacacaactaacacataattaaatattagatactttcataacaactaggagatagacgtggtttaataagaatctcaagtggagtggctttagtgttggttgctctaaagacttcagtcatatcaagaggctcagttgatggatttaagatttcaaaggaatgcaaaaaactagcaagtgtcaaacgaactgtttgaaggcctaagtttattccaggacaaatcctcctaccaccttcaaatggtaatagctgaaaatgttgacccttcatgtctatatctttatcagacggaaggaacctttctgggttaaactctaatggatttgaccaaacgttttgatctgtgtggatttttggaaagaattgtaattagacgagtttcctttttgacagtgtagccacctatagtgcaattctttttaaactcac

SEQ ID NO: 42964 - DNA, 511 bp, Glycine max
  Clone ID: jC-gmro02910065e02d1
catgtaacacttctcttcaaataaccaagtataataacagtgtgggcaatatgaacatacaacaaaacctccatgcacggggataatggaagattggaataacattggcaccaactggctgtgttgaccgcagccattattagtcgctggaagcaaccaatatcttcccagaacaaatcaggatgcttttttcttcaacaaaaacataaatagcacgcctgagaatttgcacaaactccgtgtccatggtctaaacttttggtaattgatatatactagcctgtttgggatacgatcaccaggctcacacctgaagcagatcaagaaagttcaaatccggcatttgaactgatggcatatagaagctttgctctcaaagtgcctggacgtttgtatgttggaagcttaagagtattgtaccaggttgaagctgatggaagtccatctacatcttggcctgcaattgctgcccaaagaggaacatcacatgcaaccttgtggatggtaaaag

SEQ ID NO: 42965 - DNA, 569 bp, Glycine max
  Clone ID: jC-gmro02910065e07d1
atcctccgtgcaacaatactaatcttcatattatatttatgtcgcaattttggagtcacaacagctagttgtttcaagggaaaaagaacaattaggaagggacctatcccaataactaaatttcatcaactctctaatacaagttcaaaattaatcccaaaagtaggaggatttagtagggtaccaaagatttcagacgctaaattacaatctgaatcaaaaccagagcgttttaaagtatataatccctcccttttaatcatctcatggagttgactaacatagatacatagtaaaatgagaaaatgtgcctctcataccagaatttcttctacacaacattatgtatcattaacgagccacatctggcactgattcattgctttgtcaccatgaagctcaccattttccttaatggacccattttgttgaagaagttcctccttgatgggactactctgcttcatctcctcaacttttgcagcttcctcaagtgctacaatcaagtttgagaggcacttgtgaggatcatccagtggggacttaggcataaggttttcagcaacatc

SEQ ID NO: 42966 - DNA, 555 bp, Glycine max
  Clone ID: jC-gmro02910065e08d1
atcaaaaaggactattatttccaaaagaaaaagttaataccaacggaaaggatcatccttgtatatctcagttctaaagcatcaaataaaggaaaaaatactagaaaagaaaggtacattttaaaagcaccgatataatctgatacatatacttctctactgtacagaaataactcaacatatttatttgtttaataatacttttagaagcagcttaaaaagcagttggcaacaaaacattacttgagtatccttccagttctgccttctatacaaaggtgtgacctttttttccagaacaaaaggacaagaggctcttgagcaggtaaggagtggtaaccaagtgtcatggccacagcaacatttcacttatcagcattgattccaaatatcctgaccttgtgcatgtgggggaactttgcaacaaccagcacaatcactgcaacagtgttgaataagaacattggattctgatagtctgttgtgtgtgaggctatcaagtacagcaccaaaggaacaactgtgagaaacttcctgttccgagtaagctgtttt

SEQ ID NO: 42967 - DNA, 418 bp, Glycine max
  Clone ID: jC-gmro02910065e09d1
aaaaatcaaaagcgttggaattgctttaaacaaaacagaaacattctcccaacgacgatacaaaccggcccaaaatcttgctttgtaagggaaccttcggactttttcttctgcctgacctattgaaacaaaatgaaatcaccaatgaaggattttggcctaaaccatgactggatttaaaaaaataattccttccatggggcgaagacatgagaaatttttattatcattttgccaacttgagcatcgagtctgatctggtggtgttttcctggcaaaattacaaagacatttggctcaccctggtcctttgagcccacaccctttcaagaaatgcccaccagagggtcattcacctttatttggcggaccttaaccacagagagaggttcaattgggtgcaggccaacttttttag

SEQ ID NO: 42968 - DNA, 517 bp, Glycine max
  unsure (1)..(517): unsure at all n locations
  Clone ID: jC-gmro02910065f05d1
aaataaaaaactaaacataaattaactcagctgtgggtagcacaagaaattctgcttcttattacaagatctaccagcaaagttggaaattataagaataacaatggaacccacttattccatcgcacatacaacaaccataccatacgggatcactcatatgtagacagacaccacatggcatagcataactaataaaaaaacatggcatagcataaataaccaaacccaaaaaataaatgatacaagattcatccatgaacaagacaagattcttagctatttacaaatgcacaatgcttcctgatctctccttctgtccctgtctttacattaattcttcccattttctccatggaggttgcaaactcagcaaagaaattttcaactgacccttcaagcaattcaatgatttgagcctttgtaactgagttngtcaacaatgcagcatctgacttanatagaccccttctcttaatcacatgactatagtagctaagatcaaatgtcttgcgac

SEQ ID NO: 42969 - DNA, 437 bp, Glycine max
  Clone ID: jC-gmro02910065f07d1
caaagcaaatgacttttcagtctcaggttacagtcaacgagcaatcacacgaaacacaatagaacaacataacacacttgggcccaactcacgcctagtcggggctgatgcactttattcagcttttaacatatgaaattgatggaattaagggtcaattaagccccataatacatcaatttttatttcttagatagcattagtagagtaaaacatgagcttaatttgatgatttagttgcgcccctgagtaagggaagcatcaatttttttgctaaccacaacagccagttgcaacaaggtatgagcgtcaggaatgtggccctcttgtttctcgtattccattgcccaaagcactacgctgccctttccttttggagtaacttgcaaattaaacttgaagcttttggagagtcccagcacgtcaccctctatgac

SEQ ID NO: 42970 - DNA, 498 bp, Glycine max
  unsure (1)..(498): unsure at all n locations
  Clone ID: jC-gmro02910065f08d1
gaaggaggataattttccttaaagataaaatcatcaagcagtaattttaaaactcgtcttgctaattgtagatagggcttccggaaattatactatgaaagagcccataagaaaaggaaatgtaaatcagtaaatacatacggatgatggtcatttgaaatcaagctgggggatgattttatcacaccatctgttctgttatgaaaaactattctaatttcttgcgattaaacgattttgatctaatgatgagaatgatattgcctccttgtttccccatcatcaacaactgacagacacctgcagcatacaacaaaaccatatgtatatatggacatcacagacatcttgggagaaatgatgtcatatgaaacactactatactacacaagtttgacattattctcgcttatcttcctcaagatcttctccgaaggcgtgatcaatggccttccgatcaagctnggctgccacatccccacttatcttcgctacact

SEQ ID NO: 42971 - DNA, 376 bp, Glycine max
  Clone ID: jC-gmro02910065f12d1
aaaggggtacaccttatgcgcatcacacttatgaggatgagcggcgggctaaattagctctttggaacgctgtcattttttacaccaccattgtcactaaaatcacatgtgagcggaccatgctatctcgggcatattatttgctggcaggggtagaaaggacggcagaaatgtcctacacataacgccagagcgaagggtattttacgtgcgaaccacaatgctcaccactggcgcgcagtgggataaatgatgccgaaaactttgcaaggcaaagaagtgggtttctaacgaagttgatgccgtaggcgacgaaatgctgcttattagcacttatgcactcttgggcactctggggatgccaaagtggagttga

SEQ ID NO: 42972 - DNA, 502 bp, Glycine max
  Clone ID: jC-gmro02910065g01d1
aaaagatagatcattcaatcactttcaagaatttatgtatgcggactttagaaatgcttccttttctaatttagattactgtcacaacatttatagcgaaacacaaattttcaagctaccttttggtccaagtaccacttcactaccaccaccgtcctaacctactaacccacccaatacaaataacttacaaaaaacataacaggaacataaagaaggtaaaaaattaaaaaattgacaatgaaatgatatcatgataaatgaaaaagaaaaaagcgcctatttattattatcacttttcatcggtagcttctgtaggctggggtatacatacagctctctgcaaacttcactaaatctttaggttgaggaaggcgagtggccaagccaagttcataagccttagcagcaacattggcagctatgtgtgctgaaatctttctgatgttggtgaatggtgggtatatgagtcccttatcaaagttctcttggctcacttgtg

SEQ ID NO: 42973 - DNA, 449 bp, Glycine max
  Clone ID: jC-gmro02910065g03d1
acaattcatgctattaacttcagacttggaacaacagttaacaccaaaagtaattgatgttaaagcatccttggacaattaaagtattagtatgatactatttctactgtattacaagataatccgcatcactacggaaagcatcaccagcagtaggatgtaagttcttgggagaaatattttttcgcatttgagcatgagtttctgcttcatgctgaaacatcttcaccaattcttgcagctcaagttttcttacttcaacctgttcctcaacaacggggatttttatacccaaggcaaaccatgcctactgatatcaccactactcccagaacgactaggatggccgtgaaaacaccaaatgcataaggtgtctgttctgccccaggtatcccatcaacgttgagcccaaataacccattaatgatggagaggacaacgcgcacacc

SEQ ID NO: 42974 - DNA, 489 bp, Glycine max
  Clone ID: jC-gmro02910065g05d1
gaatgactattttattgttatcttacaaagcatctacatcaactacaactgctacatctgaagttgggggaattcccgcgggcttcttctctcttttgttcgtttttttttttgttgttggtggctggattttcaattttgattaaatgaacaattttgaagggacttaattaatttcatgcacttaataataatcttaagcagtgacagatgtctgcacaactagctttccagggtatgcaacttctgattttatatcagcctcccatagttcaggctcagacctccctaaggttgggaatgctttccaaggcataatctgctcctttacatctttgtgatgtaccaacccccacagggtgacgccccacacctattccagcttgtatgttgcgggtactgtccttaaagaacaaaggtctttggggggtaagggtggctatcttgaaggccaacacaatggcattttctgatggcttgcaaacaatt

SEQ ID NO: 42975 - DNA, 442 bp, Glycine max
  Clone ID: jC-gmro02910065g07d1
acactatcatctaaaaaaattaacatatatgatatatttattttatttttacaataactgtcataccaattataatttccaattggttaacagtacaaaaaaattttacaccgataatacattgaaatcaaaactcttaactatattgtcaataacacctcaattttctatccaaaatggactggagattacacctatgacataagatttgtaaattacatggtattctcatcatgaattttctaagtcttttgcaacatgttgtgacccttgagcagatccgttagctcttgtccccttgaaggattttaaactaatcagccgagcaaaggcactctttgatctggtcattattggacctccatgtatctccgtcagatcatcggataacgatcttacaagatcgtcgaagcgtcgcttgaaggttgggaaccttgacatg

SEQ ID NO: 42976 - DNA, 508 bp, Glycine max
  Clone ID: jC-gmro02910065g11d1
aaaagtgaataaaagattgttgaattaacaaattcggcaaatgtacactgtactcatccccatacaggacgctgtaacttaaacacgaaaaaacgcagtgctaaattagaaatttcacaccgccacgagcggtgaaaatccaaaaggagataacggcgacaacggcggaacgttgaaaatgtccttgacgtcactgtcccagaacccggtccacatagacggcgttaacggcatctccctaaaacaactcacatcctgttccggtatcttttccttcttcaccaccggctttacttcctccaccaccaccttctcttcctcgcggcggcgctttctctcgacgttgccttcggcggcggcgacggagacggtctccgccacggcgctaacttcgagggggaagttgaggatggccttggagccgcggagtctgaaagcggctcggtcgtaggccttggcggcttcgacggcggtgtcgaaggtttcgagccaaaccctaaaaccgcgc

SEQ ID NO: 42977 - DNA, 528 bp, Glycine max
  unsure (1)..(528): unsure at all n locations
  Clone ID: jC-gmro02910065g12d1
gataaaaatttattgttgaaatgttgcaaagataatataattaaggtaaatttgtaatattttatcacatgttagtaaataaatcctaccctcttttattgtttatagttttacataaaaaaatatacatcaagaggaataaagggccttagaaggtttggtagaaaggccaaacccaaatgggaagaggggatcatagtgaggatctccaacattcattggcagttgatcaacagttttgaaccatgtccttggaagctttccagtgaaaccatagccgccatataaaacatcagccacaccttggccttcgctacctgggagccatgcagcaacaagtgcatctattaaaccaacatatggttcaataactacaggacgaccagaaataatgataaccacgcattttattgctccacagacatttgntatgatcttaggaccaggttctgggattgtcaagttcatgctgtcaccatacatttcagcataagggtgctcccctactataactatggcataggaaaa

SEQ ID NO: 42978 - DNA, 505 bp, Glycine max
  Clone ID: jC-gmro02910065h01d1
agcacaagaaattctgtttcttattgcaagagcatgatctaccaacgaagttgaaggtaagaattacaatggatcccacttattccaacacacatactacaaccataccatatgggatcactcatatgcagccagacaccacatggcatagcataactattcaaaaaacatggcatcggataaataaccaaacccaaaaaataaatgatacaagattcatccatgaacaagacaagattcttagctattaacaaatgcacaatgctttctgatctctccctctgtccctgtcttcaccttaattcttcccattttctctatggaggttgcaaactcagcaaagaatttttcaactgacccttcaagcaattcaatgatttgagcctttgtaactgaattagtcaacaatgcagcatctgactcaaatagaccccttctcttaataacgtgactatagtagctaagatcaaatgtcttgcgacttccaaggtccatctcaattttg

SEQ ID NO: 42979 - DNA, 592 bp, Glycine max
  Clone ID: jC-gmro02910065h05d1
aaataaaaaagctggcagctaaaatcttgatcgaatagttcacagtttacacacatggaccccttttatgggtctcatttatgaaatcacaagtcattgccttacatttatacaaatatacgtcaattcaaaagaaacccatgaaccgaaggcaacttctggttgactacttgactaaaaacaatcccccccaatacatgcacactgctaaagagcccgggcagtgagattaatcgagttagaaggcaaagcatatctccatagaaaggctaaaaaacactaaaattacatattgatgacattcatcaggcaaatcaattgaaaagccaaggtcttgtattctaatataagtcaaatttctcaagaaagagagcgcagtattaaatcatacagaaaaaatactcagctaacagggagaaatgcacaagaaaacaacaaatgaaataattattcccgggagagcgagaattgtggagagtatagaagaagacgaccagttcaggaaactaacaatcacagagacataaatggatgtccgatttcaattgctgcaatgcaattacaagctctttgtacccccattataaaaata

SEQ ID NO: 42980 - DNA, 534 bp, Glycine max
  Clone ID: jC-gmro02910065h06d1
gactaaaattcatgtttacattcttatacatgcgaatcagggatgtggcgagtttacaattgagcctgatttcttgtccaccgttggtgatgctgctcatcttgatcatggacttgacgaaggccctttcaaattccttttgcgaatcaacaaagttggaaaccaaagctttagtggtgggatgagtgagcagagcttgatcagaggagaataagctcttttcttggaggagtagcttgttataagcattgtcaaacaaggtggaactagaatccaatgagcttcctgcatttttaacctttgtgtgagaggggcatattgccttggaggcttcttgctaatgaaggggtcagagatgggtcaatctctagtttttggctgaaccttatggattctgttttggaaagattaacaatgagccaaccctcaggtgggaccttctgagagggctacataatcttccaaggaaaggccctctttgggagaagcttttttgcaattgggaaatgttgaatgtgggagccgcaattgtct

SEQ ID NO: 42981 - DNA, 466 bp, Glycine max
  Clone ID: jC-gmro02910065h10d1
agacacttgtgcatttaaaataagtttccaaccatacagaagtccccaaaaaatcacatgaaaagattacacaagggaggatgggagaatgttgaaaaataaatacttgtagacaatacactgacctcaagataatcattcatccagtacatatggggcatgaatttaatagtgaccaacaaacttatagttgacaatcaggtcacatgcattatactaaacaacacccctggtcggtttgcatgccaccagtccaagaggtcatttgcaacaaaactttgatcctgctgatagagatcgggtcaaaccttagagaaagccttctcctgtgcaggcagcacctgacttgttattgtgagtgacacctttactattagaagcacttgcatagatatcatcaaatccatcatctttggcattatgccattcagcccaaccatcactgttacgggcagatgacccttta

SEQ ID NO: 42982 - DNA, 76 bp, Glycine max
  Clone ID: jC-gmro02910066a10d1
cttaaattatttttgtctttgttttttttaatttttctatctttaatttctttcattcatattctttcccattttc

SEQ ID NO: 42983 - DNA, 256 bp, Glycine max
  Clone ID: jC-gmro02910066a11d1
gggaaggggaaaaatttattcaaggaaactgggatttatccaaaattggttttgttgtatgcaaaaccacacccagttctacatttggccttggggacattcgcccaatgttattaatttcaaccggcatagccctaccccccgtaattttgagttttaaatccttcccccattattccaaataaaattttgttattaactttcaactttgtgggggagagggccggctttacacattccctccattggaattaac

SEQ ID NO: 42984 - DNA, 374 bp, Glycine max
  Clone ID: jC-gmro02910066a12d1
catcccctaacagtattttgttgaatccagaacctttaggaaagagaactagtgaagaatttttaccaaagaaaggagagttagatccttggatcagaaaaagcttgggcattaacacttaaaaaaatgctaaaaaaaaataattaggggcggcgggaaacatatgggcatactcatatttccggggaaaaattcacataaagggtggtataaaacatttttaagcgggggctgtttgttttctgcttggccttctaaatggggggcttaagctgttttttttctgtgagaatttttagaaggttaaacaaaagggggatgtggttgtggttcctccgaaaattttctgttctccattttttgaattttttttt

SEQ ID NO: 42985 - DNA, 554 bp, Glycine max
  Clone ID: jC-gmro02910066b10d1
attatgtaaagggaaagattcttcaatactaatggtacactcacaaaaatcgtaggaaaataacagcaatgttgctactacttcattgagagtatacaaatataaccttcaaactacaaaaccaaccaaacaaaagttaatcaaataactggggaactattgagtaatcccttgagaaaatgtacatggctaagtggccagtaaatgtgtttgtacataacccccccaccccctcaaagaaaaaactatgcattataagtagccatttaaacaagtattaaccccagacctgcctgtcccccaccttgttatttctaagcaatattcaggaaccctattttccacctttgctatagctgtcctttaaggtgacagtcctattaaaaacaagtttttttgatgtcgagtcctggtcgaccacaaaatagcctaatctttcaaattggaaattgtccccaacttttgcattctgtatggaagacacaccatatgcattgggaattatcactttggattttgggtttaaatcgccaagcccgttgtcaagttcagcg

SEQ ID NO: 42986 - DNA, 494 bp, Glycine max
  Clone ID: jC-gmro02910066b11d1
aatgaaaacttttattatgtaaattgtcgaaataaaactctaattctaaccagaaaacaacacgaagaacacctaagaaactgtatccgagtttcttccttaaaaaagaaacaaaagaaaaatgtcgatcctcattgttcctcagtcagtaaagccagcaataacagcatgtggttcacaggccttggcagatgggctgggctcaatagctgggctgggctcaacaggctgggaaagaagctcctgaggcaagtccttgatgcccttaagataaaatgtggagaatagtttaaaggggaacacaatttgatgcagcttgacctgaccataagccccttcaaagatgccagatccaccagtcacagcaagataagtgtcctcataggtcaggtatgaaccctgcactgaaatgtgaccgcagtccccaaagtagaagctgtagattgcctcatacctatctccctttttctcggctttgttttggatcaagacac

SEQ ID NO: 42987 - DNA, 428 bp, Glycine max
  Clone ID: jC-gmro02910066b12d1
aaaaaaaacttttgtggccttacttaaaaacttgtttttgaggggcattggcttatttgaaaaagaaatcaaaaaatatgtgtcaattacctcagaattattgcttgtcccctttaattgctgtcaacagggaaacgaacgttgacaaaaagagaaaagactgaatgctgaacattagacggcttgtttcacaatcttcacactccaaggatgcttcatgttccccacatgaagcacatgctgtactaaggcaagttttctgttgccaagtccgtgcactatactcaaatcttgacaaacatctactttgaaactaaccagcgcttctgatttttctatcaggcgaactctctcaaaacccatcaagagtttctggggcgcactgggcactggaggaggggtcgagaacaaaaacactgtacgagcac

SEQ ID NO: 42988 - DNA, 580 bp, Glycine max
  Clone ID: jC-gmro02910066c09d1
ccacagaaaaagtaattaatgtttaccaaaccacatatattcgataattcatccttttgaggaagcttgtataaaaccaaagatagggtatgcagttcctatactcctggctgaaaagagataacttataaggcaaaaactaaaaataaataaataaataataaccatagcaatggatacaaaattaagccacaagccacatgaagtaggttgtccaaaaagtgactgcaactgaggccaaaacatatgtccatagcatgataacagaacattcaccttcaccagctccaaacaactgcgcgatggtgcctatagccattgcaggtggaagtgcatattgaaggagaagcacaaactgatacaagggatctggttgcaccaaacccaattgtgttgctcctttaataactagaatacccaaaattggcaggaaaatatatcgaactactataattcctataactgtccaaatagaagtatttgctcccttcaagcctttaaggaggttcgctcccattataagggttataattggaacggcggcttcaccaaccatggtaacagagtcttgaatcacatg

SEQ ID NO: 42989 - DNA, 529 bp, Glycine max
  Clone ID: jC-gmro02910066c11d1
gaaaggtaaatttttatttatttatatcaaaatgcatactaagcatgggattatacatgcatcttcattggtcgatagagaggacttgtccaacttaatgcaaagactcaatcgacagaaccatgacagtttttaaaaccacaaagtacagacaagacaacaaagggtaataaggcgacactgacatcgaaacacttttatcattttgcagatacagacgactatttctacaatacacaacagagttacagtgtaagaatacacagcaccttcaccattagtttttgtgtgtaaacgtggagcaatcgttatatcaacttagcgattaagatcattctatatttttaccattgttttctcttgtaacttgttcacgtagacacacataaattcagtggtgaagattatagtgtattaatgcaccatatgatttgttagtatattgtgcaataagccatttcagatgtatcgtgcaaagttgtggctaaagctaaagacggactactaggttacacctcttgttagatgt

SEQ ID NO: 42990 - DNA, 472 bp, Glycine max
  Clone ID: jC-gmro02910066c12d1
acataatccataattattatatatccttccttgtgcaatggacaaactagcaagttaacaaaatccggaggcatggataaccttcataacacaaatatattagtgagttaaatacaaacataccaaagttaacacacaattaaagttctctaaacatttttctaaagcaaatttaaacccatacagctaaataccgaccacaaattccctttctggagtttcacacttttcgtataacgattacaaggcccttaaatcttgaagctcattagtttatccatgtttcagattggtggagatgcccaaccaaattactttctgtgatgggcatgcatgcacattactctttggatgtttggataagcttcccgtgcaagataacacttccacgtcattgctggatgcaccttttatctcagcagaatccatcagctaccagcttgaattctttctgaatgaccaaatgcttaaa

SEQ ID NO: 42991 - DNA, 447 bp, Glycine max
  unsure (1)..(447): unsure at all n locations
  Clone ID: jC-gmro02910066d08a1
ctctcccagaccccgcacgcgaaccgggtccagtggaacacctccagttcggcctgcgactcctggttcggcgtccaatgcgactcgaaccgctccttcgtgacttccctccacctccccgccgccggcctcgtgggccccatccctcccaacaccatctcccgcctcacgcgcctccgcgtnctcagcctccgctccaacgcgctcgtgggccccatccccttcgacttcgccaacctcacctccctccgcaacctctacctccagaacaaccacctctcgggcgagttccccacaaccctaactcgcctgactcgcttgactcgcctcgaactctcctccaacaatttcacaggaccaatccctttcttcctcaacaacctcactcgcttaaccggcctcttcctaaaaaacaattccttctcgggtagcctccccagcattacg

SEQ ID NO: 42992 - DNA, 565 bp, Glycine max
  Clone ID: jC-gmro02910066d09d1
atccaaattcaggtttttactataaaatccaacataaacaagaggattgattgacaggtcacctgatcacgaacagttcaaactaaactctaatatagttctagttgcatgtatgtctcaagtccaaataaagatggcaaaaggaaatgaaaaagatagtttgcctaagagataacaatatcacaacttcattttgatttatccagcaaaaagttgacattaattgactccaaggagaaagatctccacctcacagaaatacagcctcagacttccttcttgattgagcctttcaattcaccaccggaaggtatcttgaactgaagatttgttattgtagttctcaacagaccatctccaactattaacctcagcatcttcacaaaatcatcccgcgatatatgcttcgacctgaattgttcataatatattttgattacatccatacccttgggaggaacctgatttctgatagcatcaagaagcaaaggaaaaggcatccaaggggattttggaactttggggtgctagcaaccatactaggagcttttccattatctacagt

SEQ ID NO: 42993 - DNA, 487 bp, Glycine max
  Clone ID: jC-gmro02910066d10d1
atctaaactgggcttttactccacaaatttaaacaaatcatgagttacattacatagtggtccaatgttacagtgtaggaagctaacattcaaacaacctttcaaataacaaggtaaaagccctacaccacaaaaataattatggtaatggcctatctatgtgctgaacccgagaatgtcagcataagttgtgatcaacgaaaataaaagcatctgcttacaacatttttaaggttacaacaatatttttctccgaaatactttgtttcctaaaggtgcaggctactatccttgcttggccaaaacagtgttagtggcagaaaagttagcaccagcgtattctgcagtggcacactcttcagactttcttgtcgaggttgtatggtgctgcactcatcaccctttctttgcgtttttctaaaaatcgagccaaggatgctttccgggcctgaggtacagctgatgtcaacatagtagttgcactgac

SEQ ID NO: 42994 - DNA, 527 bp, Glycine max
  Clone ID: jC-gmro02910066d11d1
aaagcctagaaaataaacttcatttttttggaggaagaatagaaatgacattatgagcccaaccaaaccaatggtacaatattttattctaaggcaagattttatgtaccatgctaacattaacattcccaaccacacaacatgttacataacattgtctcaaaagattggaccagctgcgagaatctcttctgtcacggtgttgttgcccttgccaatcttgtagttggtgaaggtttgaaaattgttcttgaacaatccaaccaacttgaatagtgtctccttgtagccctttttgatcgaccaagtgttcacagggtctagaatttctgaagggacaccctccacttcggtggggatctcaagcccaaaaattggaggcttcttggactctgcattcagcaaacttcctgagtgaatagcatcaatgatctttcttgtgcattgtagattaatgcgacttccatagccatagatgccagcagaccaaccagtgttgacaaaccatccggtagcccatgcttctg

SEQ ID NO: 42995 - DNA, 517 bp, Glycine max
  Clone ID: jC-gmro02910066d12d1
aaacttaaaaatgtgcatgtgcaatatgtattcataccattggctagcttaaaaatatagctcatgcgtttattcagcaccatattctacaatttaagcattaccataattgtgaggacgaaattcaaagacaaaaacaatttcattaaactagttcatctagcaaggatttgctgtctaaattatcaaccttggacttgattgacaagatgttcttggccaaatcagaagacttcagctcaagctcgcttaaatgctctctgatctcttcaatagttgttttgatatcattcaccttttgttctttatgagccaaacttttcagatttgattacagctctttgttcaatgtttccatttcacgatcagagttagcctttggcatctccgccatgcagtgctcatcaatgagttcaatggtttcagcaattgcatcaactttgttgcgcagccaggccacgcgaagctgaacatattctacatacctcagaatagccatcaattccatgattttaga

SEQ ID NO: 42996 - DNA, 379 bp, Glycine max
  Clone ID: jC-gmro02910066e06a1
gctcggaattcggctcgaggctaaaaacacggtcgccaacaacaaagtcactgccaatctcacttccgtcatcgacgaggccggtactactgatggatgcagccgaacggtcggaaattttctttacacggttgcgacgaagtaccctgcaaatgccttgccgcatcgcccaacattactacagtacattgtctcgttaaaggtgaaaacaactgcccagttagatgcagcattatcatttcttgctaccacaggctccgagaatcttgatttggaccggtttgaagaagcttgtggtgttggtgttgaggtttcagaagaagatatcaaacaagctgttagtgaagttgttgaggagaacaaggctacaattttgagc

SEQ ID NO: 42997 - DNA, 563 bp, Glycine max
  unsure (1)..(563): unsure at all n locations
  Clone ID: jC-gmro02910066e09d1
aatgcaaaccaaacaacaaaattggcgcgtttatagatccaagctgggtttcaattacaattatatatctaattacaacaaaaacaacggtgtttcaggaggctgatttacctcttggttgacacactaattgttttcactactcttaaaatttcccataatttgttgataatttttctgacaattacaaatttcacacacccccgttgattaaaatacctatctacaagtactattttaattacaatcacaagaaatcagtaaagcaccacgcaacaccctgcattttcttcccctttcttttgtcaaaaacaaaattccacaacatcgggtgtccacacacagttcccattttaggttctcctcaaatcaaccaccaccacgctcacattgtaggaactctgtctaaccaacgccaatttggtcagcaaaatggaggcgtttgagcaagccttgtcggagcagttcaccgtcatcttcctcctttgagacnaaggcggccatggccgcttttgcgcgttcagacacatccgcaccactttgcatgcgatgtcgttttgcac

SEQ ID NO: 42998 - DNA, 562 bp, Glycine max
  Clone ID: jC-gmro02910066e10d1
gacggaatgaaatgatattatcaactatttaaaagagagccaaaattggagaaaaatgcacattaattagtttttaagcatactaatcaaagacaatgctccccgaaggttcttggccttaataccaatatactccttcacagtcaaggaacgaaaacgaggcaaggaatcaagaaccaaaggagaaaccacatgatccacagggggaccatagaaataagccactgagtatctttcccttgcactattcaccatgacacgatgcaatgcacatctaaaccttgagttggacaagatgtgaagaatgtcaccagtgtgaacaacaaggctgctagggtgagggtgcacagggacccaccctgcccctttcttgaagatttggaggccattggtttggctttggtggaggattgcgagaagggaagtgtcactgtgaggggctagccccatggcttggtttggctcacgacaacgagggttgaagtttagctgaacagcttcacagaggttgttggttgaaccattaatccaccttttttgcttctcagaaatgccccccaat

SEQ ID NO: 42999 - DNA, 464 bp, Glycine max
  Clone ID: jC-gmro02910066e11d1
gggtacaaaagtttgataaaatttccattgcatggaaacggtaacattgcataaccaaaaaataaattgtgagtaaaaggcgaaaaggtaataataaaacaggttacgtcttgatgagaagacattagacctatgaatgaagaagtgtttgttatgaaacacccaaattattcatcctcacctagcaggacatccattgaggggagggattgacttcacaacaatcttaaacttgaggctactgaaacttgaggggcttgacaacttcccaggtgaagacagggtcatcccttccaaagggtccgtaagcagctgtcttgaggaacctatggccacccttcttaagggccaagttaatggggatcatcccaagtctgaagagcgagttcttcttcacaattagaagaatttccttgtgaggaatctttccagttccattagtggccacaaacactgacaagggc

SEQ ID NO: 43000 - DNA, 429 bp, Glycine max
  Clone ID: jC-gmro02910066e12d1
aatgacaaatacaaatacattcagccactccaaaaacatgacttaagcgtacacaactgattaaagaatctggtttcttcaatttaacatttatttaaaaccagagacagtacttaagcatccatatggtccttagatagagagactgaggggaattcctctgaaaagcaatccctactcactagaaggatagagcaaagggtaacgcattttaactggcccatgacggcttatcaagggcatatgtctggtgatcactataaacgcttttgcaatctcttcaagcttctttccaacacctattaaatgcctcttatggaccggcatcagaagtccagaagtcaccaccatctttttgccccatgtagaactcatcagatgcgtgccctgacgagatgtctataactggcaggtcaatgagggtcttct

SEQ ID NO: 43001 - DNA, 479 bp, Glycine max
  Clone ID: jC-gmro02910066f09d1
gaagtataggattaggaagttttaacataaacgatcagatacaacagaaacacagcataatcactggaacctaattctaattatattgggccacaacacaaataccattttatttatttacaatttccatttttctcttcaattcaaagggctataacaatttttcccccttttgcttgcaaggtctttgtgtcaaataacatcagtgtgtgactctcagataaggcttatgaagcctcaacttgctttggattggattggattccgcaaaccatattagctgggacagctatgtcaatcattttaggatatgacaggttaagatttcccatgatgttcttgaaagggacctcatcctttgatatgcgaggattggaatgcagcttctctccaacagtgctcacagtgaatcctttgtagtcatgagcttgatagattaacgtactcttgggcagtgttaaaatttgtgaatggattga

SEQ ID NO: 43002 - DNA, 540 bp, Glycine max
  Clone ID: jC-gmro02910066f10d1
aatgttatatgtatcatttgtccataaaaaaaagtatatttttcttacatttgaattggcaattctggttgtatagtgattgatgaagtaaagctattacttttgaaatgaagagatgagccatggctgttgcggatgccaacagaaatcaaggctcgtggtgatggaagagccgacagaggcgtgaatctttgtaggagatggtacaaacgcgacaacaaaaggaccaatttgtaaattttaaaactagttaattgtaaataaatctaacacatcaattacttgtcaatcacaattttgaaccggtgattaaaaataaaggtgcactatatgatggtgatatagtggtgcaccacctattgtatggttcacccgatcattcactatataaggaaaaccaatgaagacaaaactaaaaagaacaccacaagtttcagcgcatttttagctattcatagattagatttgatggctgacttacagaaataacttccctcattacaccttcttgaaccacagacacaagatgctctccttttg

SEQ ID NO: 43003 - DNA, 531 bp, Glycine max
  unsure (1)..(531): unsure at all n locations
  Clone ID: jC-gmro02910066f11d1
agtaaggaaatttaaatctttatacactttatgtcaatatgctcaatttacaaattttgaagaagttgcaaagttgtcagtggatgccagcaagttgatccacaagctcatttagcaagtgatcaaatatttctgactcaaaatccgcacttatgctacctaaatcaccttgtttattggtccatatatgtatcttatttgattcagccaattcatcttcaactattctgcaaacttcaacccaaatatctatatactcctggccattcatctcttttttctttgacccttcatgtttgttgttgtcaattgcctcaaccttactctcatcatcaatcatcaagttaccatcagatctcacaggaaggtgctgatcattgtcaagctttggtgacaattttcttcttgcactcaaaccaactgttgcacaagcttcacgctcaaaatcaaggacagaaactgggcttgaatcttctgacttggtttcaacttctatcttggtttctttctgacacaatgtnttcttctttt

SEQ ID NO: 43004 - DNA, 560 bp, Glycine max
  Clone ID: jC-gmro02910066g05a1
cctcggggaattccaattccacattttcaagaaataaggaggcaaaaatgttcatatatgaattggaattatttgttttcttattaggcctatcctgaagccaaaggaaatgagatcggaattcctcggggaattccaattccacattttcaagaaataaggaggcaaaaatgttcatatatgaattggaattatttgttttcttattaggcctatcctgaagccaaaggaaatgagatcggaattcctcggggaattccaattccacattttcaagaaataaggaggcaaaaatgttcatatatgaattggaattatttgttttcttattaggcctatcctgaagccaaaggaaatgagatcggaattcctcggggaattccaattccacattttcaagaaataaggaggcaaaaatgttcatatatgaattggaattatttgttttcttattaggcctatcctgaagccaaaggaaatgagatcggaattcctcggggaattccaattccacattttcaagaaataaggaggcaaaaatgctcatatatgaattggga

SEQ ID NO: 43005 - DNA, 553 bp, Glycine max
  Clone ID: jC-gmro02910066g09d1
gagttcaatcatccacttgatatttcattaatatcaaatgctaggtctagtatccaattggcacttgccaattgtccgtgtctttttagtcacatatattcacataagccaacaaggtactgtactatccctgtatgtggtgcattagtcatatttgtctagagtgttttacagttcaattgaatcaagattgggaaccacaacaacccttttgctaatctcgccaagattgcaacactgtttctgtgcagtgttcacagccataacatcttgaacacatcgacaatttgaacctggagacacgtcgagcagagtttctcctaattttagtttgattgctccactcttgtacaccagcattttgcccatatatccccttggcaactcttccaaggcattctttgactttgtggcctctcccgatactgttgatgtaccaattttctccttccccttattactctgcttgtccataggcagaggagtaggaatcaagatctcgagttctgcagcagaattaacagtattctcatcatacttcacactagtagca

SEQ ID NO: 43006 - DNA, 411 bp, Glycine max
  Clone ID: jC-gmro02910066g10d1
gaaaaaaaggggtgttttaccaatttcatttataaaatcttaatacaagatcgaaatgggtccttcacaaatcacaattttttactaaaacagaataaccgggcaaaccaatccttctttaaatattcaaccatcctgccaatacaagggtaaaattttaaactttttaattgggcttacatttcactggttaaaaagtaccgtttgctttttgccatacagaccacagaagaaatttttccccattcatcttaaactgggggggccttaatcgaagaccccaaatttttttaccagggtttttggcctaaacactgaaagtaaaaattgcttttttttttatgtcaattagcccatgggatatttttgggtccaccttcttgcaggtgactcgcacttgttcctggctgt

SEQ ID NO: 43007 - DNA, 498 bp, Glycine max
  Clone ID: jC-gmro02910066g12d1
atacaagaatgccagaacgatggtattcattttcataactgatacatacgcttcgcatatcatacacaaatcgggagggatatggcaccgcaacatcaaacgaatatcattatatacaagagatgtcaaccataatcaacaatatagtgagtgtttggtttgccctttacggctccagacatccattcacgtgttccaaattggcaaacgttaaagtaactatacagctggattggaaaaaaggtgggttaccatgaaccctagctttttccaaagacagaaagtattccctccacgttacgaatacttcaacagaatgtgattcatgaggcgtcaactgaaacagccaaagcattcagttgaacgtgttgtttaccctcattgtctgggtgaacaatgacagtagcatgcgcctcggaataagattgattggctccttcttgtgaaactgatatggagcacactttatctgctgtgcagctttggtcatcttggact

SEQ ID NO: 43008 - DNA, 481 bp, Glycine max
  Clone ID: jC-gmro02910066h09d1
gcctgttctaatcagtgaaatagtcaaatgtgattgaagcaaaagctcgggctttcacttgcagttttccacggtctgcttatctagggaaaaataaaaacaaaaaaacactacaactgaaaaagatataactttccggaatataacttccgctcactctttatgcgttttgcaaacttcctagagttcatcatgtacaccctcttccttggtgacttctccagcttccgcctttgattcagcatcggagtcattgccagcttcatcagcatcttcctcttcctcatcagcatcagagtcaactgggacatcctttgattcctcctcttccctcttcttgtcggccttctcaaatgctgccttcatagcatccttgtgcttgccccatgtttcttcaaccagctgcttagcatactcaggatcatcagtaattaagacattgtcaaacaaagtaccagatttcacctgccacaattcaatc

SEQ ID NO: 43009 - DNA, 379 bp, Glycine max; identical to SEQ ID NO: 42996
  Clone ID: jC-gmro02910066h10a1

SEQ ID NO: 43010 - DNA, 507 bp, Glycine max
  Clone ID: jC-gmro02910066h12d1
aaagcgttcaaaactcgaatttcgaagtcaaaacaccaaatacctatgtcctcaaaatagtattccagaaaatgaagcaaaaataagatgataaccgcagaaattagcggtaacggcggagagacagggtgttgtttctctttcaggttgccctgcgagatggacgtgctttgtggtacagatgtcctctgccacgtaaacccctgttgcttttcccagcagaggtgagcccacgcagctttctgtgcttgtgcactggattggcgagccaattgattctgggatcatttctaatagcagcatgagccacatccaccagaatcacctgaaagtatttataagtggagtcctcattcacccagtaagaattgaggaccctaagtccacccagcttacgtccagctcgctcctagcaactgacctcttgctacgctgaaatttcagttggggaacaccctggtttgtgggctttccataaacaatacctttgggaactgggcttttttg

SEQ ID NO: 43011 - DNA, 556 bp, Glycine max
  Clone ID: jC-gmro02910067a02d1
aacaataacaaaactcaaattatatagaaaaagatatgattaaagcgttcaaaactcgaatttcgaagtcaaaacaccaaatacctatgtcctcaaaatagtattccagaaaatgaagcaaaaataagatgataacagcagaaattagcggtaacggcggagagacagggtgttgtttctcttccaggttgccctgcgagatggacgtgctttgtggtacagatgtcctctgccacgtaaacccctgttgcttttcccagcagaggtgagcccacgcagctctctgtgcttgtgcactggattggcgagccaattgattctgggatcatttctaatagcagcatgagccacatccaccagaatcacctcaaagtatttataagtagagtcctcattcacccagtaagaattgaggaccctaagtccacccagcttccgtccagctcgctcctcagcaactgacctcttgctacgctgaaatttcagttgggtaacacccttgtttgtgggcttcccataacaatacctttgggactggctttttcggcacccctct

SEQ ID NO: 43012 - DNA, 458 bp, Glycine max
  Clone ID: jC-gmro02910067a05d1
ggacttaaaaaagcacactggatattcatcaaagcatcatcaaagcacactggatcctaacagcacacgtacgtagaaaggggaagttccaggtcttgcccaacatacacaacacaccataatttattttatatacaatcttatggggcccaagatgcagatgcctggactaattaaacaacaccgttagtctgataggcagggtccataaataaattgggtacccataaaatggccttgcttccaaggaaatggcaaacagggttagttccaggatcaactcccatgagttcatgaagcatgtgatgattcattccagaagtatctgagtggcaaacagcaagtgcctgagttttggttccatcaccagccaccaatggaaccatgaaagctgttgtttcacggactttatggcagtaaaatactgcagttctgaaatttagcccatgacacatcac

SEQ ID NO: 43013 - DNA, 521 bp, Glycine max
  Clone ID: jC-gmro02910067a06d1
gtgacaataatctgctggttcatcccaaatcaagaaacaccagaattcattatcaaaatactaaactatttgaaaacaaagtgttcaactgaattgtcaaaattgatcatgccagtacccaatctctagttataactgaacatcaattaacacgtaacacttacagcaaaatatctcattctaggaagctattagaaaataccgatagcaaaagaaccttaaaatcaggacaggatgtttgaaaactcatttcttttttcccgcctttgcagcatcagatgccttggtcttcttaactccacgaatcttcttagctctattctttctctccttcatttgcttccttgatttctctactttgggatcaagtccattcctgataagcctgtatttaggctcatacttcttagcattcttaactgaatcatagatccaaccaaacccagtggacttgccatcaccaaaatgagttcggaactttgagacaaatacagtgttggtgtctttcacgggatacattc

SEQ ID NO: 43014 - DNA, 386 bp, Glycine max
  Clone ID: jC-gmro02910067a09d1
cacggttaaacatagcattatatagctccgttgaatgcaaggttgcaaaaacattgagtttaaaacataactattttgcacaacttgaagcctatcatcccctaatcagaatgtcgtttacgaattgaaaacaagctatattaattggcaatttttttaaaagcaaatgaatgatagtattgattcctgcggctaatattacaaaagacaattcaagaacattcaaccctcccatgaaaggcaacaataagcagagaaaaacaaaacgaaatatctgaagaacagccgctataatatttgcggacggggaggtgaaggatgagtgagggttgattagtcaaagtcaaggaattccattcttttcctcatagtccccttcagatctg

SEQ ID NO: 43015 - DNA, 612 bp, Glycine max
  unsure (1)..(612): unsure at all n locations
  Clone ID: jC-gmro02910067b01a1
ctcagacaagattggtctaagctttgttttgaacttcatttacaattttactgactagtgacaagcaatcacaaatgaacttatttcacatgtttaagactggtttgaatgtgtaaaattgggaattcagcattgcttgatttctcctcttacacctgattctgttttctttttcacatgcatcattgcgactgtttagatagctttggtttgtgacaaaagtgattccttgtagttttcttttttatattctttggtcgagatgaagctgtacaaactaaattttgtcttgcaagttgcaagcctgttctaagatcaaaattggaagaggtatatcaagaggggggagaagaaagttaggaaatggatcttcactcttcatagaatagcatgatatgcccaacaaagtagatgctcatgccaataccaagtgttcaagcattgattgaagaaaaacaataaacttctaagtacatacttgcaggcttcatgcaactggcaataccctgtattactgtatatttaagccctcatggctcangaagttaaagtaagttcatccactgatttattgggtattatcatcacgttttgagtagtggcaagtgatct

SEQ ID NO: 43016 - DNA, 415 bp, Glycine max
  Clone ID: jC-gmro02910067b01d1
aataaaattggaagaaggaaaaaagaatctaattacaaatttttatagtttaaggacataattaaaaattaaatgaaagatcatcaaggagctactaatgtattattatcctataaaataataatataatttgttggtgtgataaaaacaggaaaggataattatttaatgggatgctcaagcttgtcccccatcaaagataagacaaagtttaaaaacaagttcaatcccttctgctaggctgctagctatcatgtccacagaaattcatatactattatgtcaatagagattgtaaagtaatcattacaatttcacatgctatttgctacggcctacgggaaagctcgggcaagcaaacttgcttggtgagtaatgctgactcgcataagttgtccattacttcacttgacaa

SEQ ID NO: 43017 - DNA, 568 bp, Glycine max
  Clone ID: jC-gmro02910067b06d1
ccaagatacgaactttataagcaaaattttaaaatgtttatacatggggcaaacttcaatattcttgaactcgtcgacaatatgctaactaaaagtcaggcgattattgatataagtctcgccaaagggtaacagttacaatttccaagttacataaaccacttgctaaacatacccaacaagaacttgaaggtaaaagacgtccgaaaggcgcattgtaatccaaataaattttaaaaaaagaaattgtaaactcattccgcttgtatgcagaaccatatttattttcaaccaatcatcaacttgttttcttccaagaaggtgtaagtaggaacctccagattgtatggtgctggccccttcctaattctgcctgaaatatcataatgtgatccatggcaagggcaaaaccatcccccaaagtcaccagcatttggcaatggaatgcaacccaaatgggtgcaaaccccaatcacaatgagccattctgggtccttgactttatcagcatccagctggggatcgcgaagagatccaacatcaacactgtttgccagcttgatatcat

SEQ ID NO: 43018 - DNA, 413 bp, Glycine max
  Clone ID: jC-gmro02910067b07d1
cactgtacaagctttccatccatttataatatgcctaacatatgttgtgtatcaaacacattgagaaacttgctcaatcttgctagactcagttcaagttaaccatgatcaattcaatcaaaatatacatggaactcgaacctatccgatgaaaattccttcctggacaagatagcaatgtaggaagggtggcataaaaagcaacgttgtgcaagggaaagaaatataaaaagtgaaagacagaaagacaagaatttttggtaaaccatgctttattttccaaaatttggcaacaggccattatccatcagaaggatcttcaccttaaaacccattccctttttcttaatcaaccaaatatttactttgggattttgatgattggccagattttgtgggttcctacatttttt

SEQ ID NO: 43019 - DNA, 575 bp, Glycine max
  Clone ID: jC-gmro02910067b08d1
gattattaataaataattttattttttaagcatgggaagatgaattccattttttttcttcactggtatgaaaaaacatttgtgaaaaatcaaataccttaaataagtaaacggtggtgccccactataacaggtcagtccaaaatcaagtgtcgcataaaaatccaaagcaagttcaagtttaagattactatgccccggcacgttacttctcacttgttggaagtgatgatgatggcaaaagaggaacttcatgatcatggaccgtttgatttcttttgataccatccatctttgtgcagtttccaaatgctttcggtttcccacagtacgtccaacttacgacacaaagaagccgtttagtttaaccacttctctttgcgatgtttcgttcacaacgttcatgcctctaaacggccacccagtttcatttcaatttgtgaaaccactaacccaaaccaccccatacccattattacattacattaaatatgttcaaattaaaaatgaaaaataaaaataaaggtaaaaggacttgcattacatataaagtctcctaatgggttacaaaagct

SEQ ID NO: 43020 - DNA, 456 bp, Glycine max
  Clone ID: jC-gmro02910067b11d1
atcacaacagttacatcgataatgatatcctttattgtgcattaatttatcttgttgagttcaagagcttatggtgttgaacctgcgaatcacttggcatcgtaaaggctttttcatttcgagcgagagctttaggcattctgaaagatccacgggttgcactggaatccatatgaaatggtgaagaagttgtgcaagccatagatgaactgtggctaagcctaatgtttttcctgggcacaccctacgtcctgcaccaaatggtgcaagtcttatgtccgaccccatgatcgacacatcttctttcatgaatctttcgggcttaaaggcccacgggtcctcccaaatggatgagtcatgtgatatagcccacatgttaaccattgcagttgtgccagctggcacgatgaccttgtccacgtggacatcatggattgcgaggcgagcccaggaaag

SEQ ID NO: 43021 - DNA, 425 bp, Glycine max
  Clone ID: jC-gmro02910067c02d1
caaacgatcatatttcgtaccatttagcatttactcaaagaaactgtgaagtgcgttacttgatgttatctataatacaaccaaacagaatgccgcattcaatgtcccaaaaagatgcatctgctggatgccttaaaataatgggcttctcatagctaaacatattacatcaaaattgcagttatatttcagctaaagatttttggaaagacaaatgtgaggtgtggaaaacaaaacaagcattccataaaaccagagaaagaaactcactcctccgttgcccttcctttcggtttacagagctatctatttaagaattgaggaacaaaattggcgatgaagttgcaagcttccttcctagacgttttgtccgcctataactcccacattttccctgtttttatttaagggccataaagttttat

SEQ ID NO: 43022 - DNA, 540 bp, Glycine max
  Clone ID: jC-gmro02910067c03d1
gataattatatatcagctccacaaattgataacaaacagtagtgacattaatgggacaatagagttcaacacaaaccaaacttattttcaaaggtcattacagacccattacacatcacatttcttcttaaaatgtttgggaaaatccaacatcgaacatcacacagaaatcagctccagcttaaaaccccccacgaagacgcaacaccaagtgcagagttgactccttctggatgttgtagtcagcgagggtccttccatcctctagctgtttgccagcaaaaataagcctctgctggtccggtgggattccttccttgtcctggatcttcgccttcacattgtcaatggtgtcggagctctccacctcgagggtaatagtcttacccgtaagggtcttgacgaagatctgcataccaccacgaagacgcaacaccaagtggagagttgactccttctggatgttgaagtcagcaagggtacgtccgtcctcaagctgtttgccggcgaagatcagcctctgctggtctggggggatac

SEQ ID NO: 43023 - DNA, 501 bp, Glycine max
  Clone ID: jC-gmro02910067c07d1
aaaacaatcaatcattttttatatagcactcaaacatgcaaatcgaaaccaaataaaccatataaagattacgttccgcttagtgtacgtattgtctcaataaatcaaccacagctcagcactgagcaatgcaaaaacgttaattgggtaagttgtaagtagcaaggattctttaaatgaaggttgctagccaaataatatccagtgttgcctttaaataacatacatctagtctagaataactaaagatactaaccgatactacaactaaactggcctaaccaataactaaagataacaatgctattaccaactggataattaccacaaaacgatgaacagctacctcatacacagcttaaattcattagccataggaagaaaaaattaaatgctctgaagaagagtaaactgatgagcagaagagaagcacccagttaaggaataaacaggggggacaaatacccacttctaggttttccgacgcttttttcactcttc

SEQ ID NO: 43024 - DNA, 498 bp, Glycine max
  unsure (1)..(498): unsure at all n locations
  Clone ID: jC-gmro02910067c11d1
ggataagttaattcgttaaataaaatcaagttgaggaaagaaaattttagaattacatgtagaaagctaactacatcctccacctcaaaaacacagactcctcgggaaaaactcggcctggcaagcaagtagaaagggaaacctacaacggaatactatcaaatccttttagcgtcttacaggcagtaactcactccagctttataccgtccatctcattgatcaccccttcaagcttgacaatctgacgcaaaaagtaatccccataacgtttggcaggcttagactccataacatgaattgtgtcatcatcaatatagaaatctaaatcggcattggatgtaattttcccatcactatcaacagcatgtgtcttgtgcttgtatgtcatcaagatagtccttaaggtgggttcatccacttccatgtaacttgcaagttntgtgagggagattgntgaatacactttcaagaaggtgcggacacctgatagcaact

SEQ ID NO: 43025 - DNA, 499 bp, Glycine max
  unsure (1)..(499): unsure at all n locations
  Clone ID: jC-gmro02910067c12d1
cagcaaaaaaccaaaaactggtctagttgccatattattcaaaaacaacttttacgttttccaattctacattataatggtgacatctttgaagattttggaccaaaacctaagctctgtatagagaacagaaatggaagctccgtcccgttctactaacaaaactggaagtagaattgttagttgatactatagaaagcttgaatcctaagttctggaagcagtaaagatgctccaacaaatccgcaacctaagttctataacgtagtatttgtgctaaaaataaatccataacccaggagaccacccgttgaaaaaaaattaagcagcatcttcttgcttctgagcaaaagcaagccccttctctatgctggccatgagttctggcttaagagattccaaagccttctgctcatagtcagtcaacccttggaggtcagatggaattaatgcctcaactgctctcctaccaagcttcacccttgaagcanagaatgga

SEQ ID NO: 43026 - DNA, 373 bp, Glycine max
  Clone ID: jC-gmro02910067d04d1
gggggggtgaaccaaattaaaattcaaaagtaacttataatgggccttacagaggaaagacagaaaattggccaagaagtccccgaaatcaatggagttgggtaaaacaaactattcaagtttttaaatgggtactatgggtcaaggccttcacaaaaattaaaacaattaaaggaaaaatctcttttccatgattggaatccatcataattttccccaatgaaaaacaagaaaaagaaaagtttcacttgaattaatacctaaccaatctcacattggcttgaatatttggccggtttttccattaaggggagggtggtatgaaaaagttctgttctgatccataaaaagacaaactttaaatcctcccaaa

SEQ ID NO: 43027 - DNA, 538 bp, Glycine max
  Clone ID: jC-gmro02910067d06d1
agtattcaatggttgacttctttacattaactgttccaaatatgtttacagccttaaaattctaatgatagcttcaattttttccaaaaatgattgaataagattaagttaaggttcaacatctaactttatgcgcatggcccgaatccatatttcattctacaacttaggaaactcaagatattttcctaatcaatcaacattgtttccccatttgtagtctgaattgtggccttggtgctctgtaggcttaagtgtttcttcatttcctgagacctgacaaactcctcaattcttgcttttagctcatcgtcgggaatcaacatatccgcggtaagatgagaacggttgaatggatcagtactatcactaagaagatgcctctgaatgacaggacgatcaaccgtgatccttgaagaaggcaagataactggatccttcatcaatgtgtattgaattggatcaaggaattcatctggtatctcccctagagtggcttcagtatccatggcctctgaagcagcaactttagcctttg

SEQ ID NO: 43028 - DNA, 456 bp, Glycine max
  Clone ID: jC-gmro02910067d07d1
ataaaacttcgttataaattaaatgcaacttaaaacatccctcagcagcaaaggaaatggactaaaaccctatagctgcttgtgaaattcgaaatatctcagactcttcttaccatcaaaacaaaaaacagttctcatcaaaaacaaacagcaatgaaaattgaccaccgccgatcaagaacctagttttgaaagttacggctacatgaaatcggcagaaacttaaaaatataacttaaacaaaacacctaagactctgcaaggataaaactactataaaggagtaaccacgatgatgatcacatgtgctagcaaaattgcccaaatgcaatcacttcttcttggcagcggccttggggaccttggctccggtggggtcttttttttcaacacttttgaagacttcgacagccaccagtttgaggcatgtccctcacagcaaaacgaccaggggga

SEQ ID NO: 43029 - DNA, 505 bp, Glycine max
  Clone ID: jC-gmro02910067d08d1
atgatatgcatttgtctattatttaaaaggtcaactgaagaatcccaacgtaatctccacattttggcatagcagtcaagcccttataagttacaattcaaacttctctacctcttcaaccataataattaaacttaaccaagcctccaatgcaaaatgaaccaatatttcataccttcattcaaattcatctcctttttccttgcagtgattctccagtttcaggccttttctgtcactatttacaaacatttgatgaacatccatgtttaagttctctcttctattatttacaatctctggccaagtttttggtttaagggtgttattgttatttacgaaagcccttgtttttgctggaatcaaactatcaccccgctcatttccttcattccacttttaaactcagcaatcgtttcaccagatttatttatgcaatcaggaaaacccaaaatgcccctgggggaaatccttcccttttcaaaggaactttgatgcaaaagtt

SEQ ID NO: 43030 - DNA, 511 bp, Glycine max
  Clone ID: jC-gmro02910067d09d1
gagaagtaaagagagaagttgattacgaatacaacatgattcaaaaaacaataaagatctcacacgtccacaataaaacatagctagctgggggcccttatacaataaaacatagcttgctgggggcacttatacggataatgggcctatatatagcttctttattgggaaccttcaatcacatgatttcctagggtatataaaactcttcctaattcattcatattgagctaaccagacccttttttgattcggatgccacactacctatatcaagttccgcagatttcttgttaacaaagttacattgttttctgatttctcctttcttcccagttagcacaccaatatttcccattttaatcatggaagccgaaaagctcttaaagaaagctatttggtcactactgaatttgttgacaatgctgatggtatcagcaccaggtgttgagaaacactcttgatcactttgaaacaaccctttttaacctgaagattggagtagtagttt

SEQ ID NO: 43031 - DNA, 494 bp, Glycine max
  Clone ID: jC-gmro02910067d10d1
gagataaacttcgaatttcattaattaggttaattaattaaactaaacaaagctaccatatctccaccccttcataatagtaataacaagaaagtaactatgttacagaaattacagaaagaaaaaaaaaaaaaaagagatactagttccatatccattttcccttcccaaatttacataagatcatcctagctagcttcccctgctagattcattaacccacgagaggggcaaaaagggaaaaagtaaaaagaaaattttcagagaatatgagatgagatagattctctgaaaatttttttttctcttctttctttatcacatgactttccacgactcgagagtggggaagctggagaaggtgtcaaaatctaaccctgcggaggcgaaggaagcgtcaaggaggggttgggcgaaggggagcgggccgggcccataaaggccggtggcaggcccagagttaacagaggagggccccaccacctgctggtgat

SEQ ID NO: 43032 - DNA, 437 bp, Glycine max
  Clone ID: jC-gmro02910067d11d1
aacaaggggaccttccaacaattcatgtatcaagttcgaattataatttacataattattgcaagcgggggataatagataaagtagagtttaaaatgcaagaagccaagaggctcatgacatgaaacggggaacagagatgaaacttgaaggaacacacaagtgaagttgaagctcaagggtaggtttcaaaggctgggacaggggcataggaaccaatgaagacgtttccataaatcaagccagccaaaccttctccaattaatgggccaacccagtagatccagttagcagccaagtttccactgaccacagctgggcccaatgagcgagctgggttcattgaaccgccgctgaatgggcctgctgctaagatgttggcccccacaacgaacccaatagcaatgggtgcaatgatacccaatgacccctttttt

SEQ ID NO: 43033 - DNA, 337 bp, Glycine max
  Clone ID: jC-gmro02910067d12d1
gggataaggcccgctataaaaaaacaggggaatccctttatcatttgatgacaattggttttaatgctaaaaaagcctgatttgaatttatttttgaactattaggggtaccaggcattgaaaatgcattttggaaggaaactttgctttataacattcttaacatatggcatcccgaagagggggacctttggggcttggacatgcccactcgttttaatgggggccacaaataaaatgttggccaggactccgatcaaaaagatgccgacaaaaattcagtccaacaatatgttatgaaggggcctcaaaactttaaagttgggcaaaccattta

SEQ ID NO: 43034 - DNA, 506 bp, Glycine max
  Clone ID: jC-gmro02910067e05d1
agctgaaattatttcattcatgtaatgtgaagcattagtttggacctcaattaatcctttgcaaaagattcaaagggttaccgttcagtagtctaatcaagacagctatatccgaatttacgaaaacatatcaagaagatgtatcctgaaattgatcgtttactagctaaaaacaaaaagaaacaaacaggctaccaaccactcactttctgcctggctccaaattcatcttttgaagattcaacagcagatcatctgaattcaggtaaaccttgtttgccgcgtttgatatggtatgtgcaatctctcgagcagcttctatcttcctcaatgtgataaaagctggattgttggccatagcctgtccaattagttgggcactttttgcttctccctgtgctctgattacagcacttctcttgttttgctcagctttttgtacaacaaatttagccctttcagcttcttgtgcagctacctgctttgcttcaattgcagaaggaact

SEQ ID NO: 43035 - DNA, 307 bp, Glycine max
  Clone ID: jC-gmro02910067e07d1
aattaagcattgctcctgaaggatccaagagctttgattgcagaacctctaagaatgtattgatggtagattgcagccaccgcagctccaacaaacggtccaacccagtaaatccattggtcgtcccaggctttgtcgttgttgaagatcacagctggtccgaaactccttgcagggttaatgccggtttcagtgacagggaattgtgcccagtgaactcatgaagacggcaaacccaatgggaaggggggctaacacaggaccatgaaagtccttaccgttcctctaagaaccagggggggaaaaa

SEQ ID NO: 43036 - DNA, 523 bp, Glycine max
  Clone ID: jC-gmro02910067e08d1
aattaagcattgctcctgaaggatccaagagctttgattgcagaacctctaagaatgtattgatggtagattgcagccaccgcagctccaacaaacggtccaacccagtaaatccattggtcgtcccaggctttgtcgttgttgaagatcacagctggtccgaaactccttgcagggttaatgccggttccagtgacagggattgtagccaagtgaaccatgaagacggcaaacccaatgggaagtggtgctaacacaggaacatgagagtccctagcgttcctcttaggatcagtggcggagaaaacggtgtagacaagaacaaaggtaccaatgatctcagcacccaaagcggtacctttgttgtagccatcgctgacagtgttaaccccacctccgtacctgttgtagaacgatttctggaaccctttggccaacccaacaccgcagattgcaccggcacactgtgctatcatgtacaacaacgccctcaccaaagacacctttgcttccaagaacaacc

SEQ ID NO: 43037 - DNA, 520 bp, Glycine max
  Clone ID: jC-gmro02910067e09d1
gtaaactaaaccttttgtaacaaacatgtaacaagtttaatggtcagtacttcagtaatcctttcactgataaataacctggaaacggaacaatagaatgacacatacaaattacaaaatactcgcatgttatttagaatgtccagcaatacttatataaaaggacatggacacgcatttgaatgacaaatgaaacattggacaaccctcccccacaaaaagaaaaaaaaatgacgaatgaaatgaaaacgtaggtgaaaactagcaggaattcaagtaattattagtaattaacaagcagcaatggaatgcctcctgtggcttaaaagacaccaatagcagaaggatacaaaggcttgggctggtaagaaagaaagttgggaacatacgtagtggttcgtttcttatgaggatccatggaatctatggctggttgaatcaaatacgcatatttgctttttgtccaccaatccttgattccgatgcgcactttttggtccttagcaactgttttgcaata

SEQ ID NO: 43038 - DNA, 544 bp, Glycine max
  Clone ID: jC-gmro02910067f01d1
gataatagaaacacttttattaagacttcaaatcacggcattcaagataatacaatacgctacacttttagaaagccttatatctatatctatacactacaaagctttgccaagataaaagtacactgcaggcaaatttttcatacacgtttagcatagttcattctcccccaattattctttgtcacagctttatattatccctggattgcaacaccaagaggagcagcatccataggtataatcttctcaatttctacacccttgttgttgttctggttttcataggctgaaatgtgcactccaagtgctgctctaccagaaggatcaaggttgttagaccaagcagcatcccactcaacagctttggctgtgctacatgcaacacttgctcctccaggaacggtgagcctagctgagttctgagggaagaacctctcaaagatcattctgtagtaatatgcttccttggttgttggggtgttgcgagggtagatgttaccagcattaagcatcattttgtcagtcacatgttttgcagcat

SEQ ID NO: 43039 - DNA, 490 bp, Glycine max
  Clone ID: jC-gmro02910067f05d1
ctaattggggcttattacttacacgttgatgtacagtttttaattactaacttaggccgttatttacacaacgaattaagtttacaatacaaaaaaaaggctaaagaaaatgaaaaatagaaaatggaaacaatttttggagggtagttccattacccattatgccacagtacttgatctaatcactaaagagtacaccaattttcacctaccctcccaaagagtctccttaaggatcggtttaaaaacatcttttggtgaataatagtctacaccacccatcatgctggtacttccggatgaattctggtaatttgtatctgatcctttgatttcaatgccagtcatgaagctgctcacattctcaaatttccagtcagataggtatccgggctttgaagttacagtgcttacttcaatatctcctgaaagcattgccaccacacgtgacattgatgggcgtaatgttggtgatgtctgagtgcacaaa

SEQ ID NO: 43040 - DNA, 447 bp, Glycine max
  Clone ID: jC-gmro02910067f08d1
aaacaaaaacccaggggggcaaatccatttgggaatatccccggggaaaaaagaggaatcttccaataaaggggcttttgaagaaaacccgaattccaataggccgtaccctaattttaatggcaaaggacccgaaaccctaaacttaagctttttcccctttgattttgcgagcgagttgaatgcccttgggcataagggaaactcgcttaacgggaatagcgcaaaggttagggtcctcaaagagcccaacgagaaaagcctccggggtttcctgaaaagccaaaacggggtttttttgaaagcggaaatcggttttgaaatcctgagcgatttctttgacaagcctttggaaggggagttttcggatcaaaagttcggggcttttttgggcctttaaaatctccctcaaaaccccccttcctggcctgaaagggtggggttttt

SEQ ID NO: 43041 - DNA, 420 bp, Glycine max
  Clone ID: jC-gmro02910067f11d1
caactattattttgaaagcataggacacgacagatagtacacaatataaagccagaacaaacattggagatattatatatatatatatatatatatatatataatcggacaatttttcattttggaagtccaaatatacagaaaaataaaaaacataaaagcatttcaataagaatatatcaactatgctccctgctttatttgtttgtctgcactcttttcttaatagattttttcttcttctcttattcacaccaatgaacaatgagaatttttctccctttgcactaggcaatctataaacaacttgtgtgttggccaattattccttggcagtgctgtttctttgccctgatgatgccattagcacagcaacagccactataaacataaacaacatactccctagcagtatatatg

SEQ ID NO: 43042 - DNA, 450 bp, Glycine max
  Clone ID: jC-gmro02910067f12d1
aactcctagagtataaatatttgttgggggctcgtatcataaataatgtttctcccatataggaaaaatgttatacactacttcaaagttcaaacacattacacttaaaggagaaaagacgtgtgtttgtgtgtaaggagattcattaaaatagatagcagatgattagatttagttaggagggattctttttaacatataaagaaaacaaactgcaaagaatgatgaaaaacaacactgaatgaatgtatatgcatgagtatatcaacatatattggcaacattttgggttctggcatgaacataaaatgtcatatcgtaaatgagtagataaaggatcaagattccattttatgttgcaattccacagtgctagccaaattacatggcattatccgtgagtaataaaattgctgaaattaagggagttgggttgaggtagattagaaa

SEQ ID NO: 43043 - DNA, 434 bp, Glycine max
  Clone ID: jC-gmro02910067g02d1
ccgagctgtaaattggcattgaatctaattggcaaagtgaattgttctatcatgtaattgagttctatcagttacatctgaatccaaaaaaaagagaagggaatttgacaaagaaatgaaaattagggtacaaaattaacagaaggtaaatgctaaagtggagttcctgctgactgactaatgtgatcagatgcctcggaaaccttaatggtacaattctgctacaacccctctctttacttctaaccttttccagttttttttcaaccccccaaacctcttgtttttttccattttctttttggcttggccattgccattacttcccatatacagatacaagaatgactacaatgtctgtgttcatgatggatttttttttactgtcagaaacttgtatacctcctcggctcaatatatcacaacacgaagca

SEQ ID NO: 43044 - DNA, 511 bp, Glycine max
  Clone ID: jC-gmro02910067g04d1
gaaagctataaatatttttcatttttcttttattatccaagctttccagcatccaatataattaacctacaagtcatatgttgcggtacataaccgaataaataattgccagcctgaatcgaatgcctcataaattatcaatcatggcaatgcaatagaatatctttggacgaagcgcatcaaatttgcaacgaggcagcactggtaaaccataattctgaaccagaagaagccttccacaagattttttatactccagcgcagctgcgtccataggaatttgaaagaattacattgctccgatcattcagaccgtactgcagttcaatcccttgattatattgcgatgccacatcgcactattaggatcaaatctcaattcccacgtaggccagtaatgcaaatcttgcttcaatgttaggactcgtggcttcccattgaggtgaattgtctttacacgaacaaactcgccatgttctagttcctttgtcacattaacgaaagaatctat

SEQ ID NO: 43045 - DNA, 508 bp, Glycine max
  Clone ID: jC-gmro02910067g06d1
ggagaataaggatttttttttttaaaactaaaacaaataaagatatgaatattaagtttatcttggaagttataattattacacgcagacacggttgcctagctcatacaaagatactcccctaattgagaatatttatttcctcaatggataaataaacaaaacggcaccacgtttgatgaaaaagctcccaggattccaccacatacaatgcccacatataccgatcactgactagttacatcaaatgaaagaatcaatacaggtccaaagctatataactcctcgttcttattaatgtgattttagagcatatcattcctcatcatccagccacgagaacgagaaagggtggaacttgtacccatcgccctcataaaacttgttttgaaactccacccagtgaagacgtaacgcatgcaaaaaggcactgtgagtttccatgacaagtaacactccgacggtagcaaaaatgaagacatgagacccactataagatataacatta

SEQ ID NO: 43046 - DNA, 420 bp, Glycine max
  Clone ID: jC-gmro02910067g08d1
gccccagcaaaccttgatctattggggggcatttcttatagtaccctacgctctcaaacaaatcattttagttcatggggatacctataataaagggcattatgtcaaaaaccgattacaaatacgaaaagaatatccctcaaattatcctagggcacaaaccataccctaaatatcaaacccccggaaaacagggactaaacttctactcgttccatattggatgacatatccgattttgtttctcagtacccacggctttaaaaccgctggtacttgtgacctggtttatcgctctctggaaccaatttttgtcatcttgttgactataattccataaaattgcgccccctttctattatgcccctttcaccttgtcctgaaaggactgtacttcaattccaaattcctgttgttagg

SEQ ID NO: 43047 - DNA, 550 bp, Glycine max
  Clone ID: jC-gmro02910067g09d1
gcaactaaaagactttttcattcttattaccaaagtagtagcaattgtcaacagatcgatctacatctttgtttcacctctaagtccaatgggacctctttagaataaaagaataataaaataactatttaccctctaagtctaatagggcctctttagaataaaagaatataaaaaaatcaaataattatttacaaaatataaccattggataaaagaatttcataatattatttagtagagctataaagtcttgtttctttcttgagaaaatttttgaaccactgtgcagagagcttctcatatctcttcaaattatttttgtaatccacaaaaatcattccaaaacgtgatgtatagcctgaagaccactcaaaattgtcgaacaaagaccacacataatatcccttcacatttacgccattcttaattgcagattgaagataaaagagatgacgataatgataatcaattctgaaggtatccataagagattcttcaagtgataatgttggttcattatactcatttataccattttcagtgatgt

SEQ ID NO: 43048 - DNA, 438 bp, Glycine max
  Clone ID: jC-gmro02910067g11d1
cttctaaacacatcattttctacaaacattcttaattatacaacaggaaggatatgcttccaccatacctttgactatgataataactcttccccctttcggcagagcggcgtaaagctctttctaacaaaccattctttcacctgttattaccaacagaacaccttcacaaacacattctgtattaagcatatagagctatcttttttataagatatccatgatggataaaaacccaaaatttctacacccaaaacctgaaagtctaatccataggctgctgttttggtacaaccaagggacttgtgacagtgtgcttcccatcataccaaactatggagcctctctttacactagaacctccaggagatagctcaacacccctaatctgtaccctacaagaaagttcaactgctgtcccaccctcctgaaattgaa

SEQ ID NO: 43049 - DNA, 353 bp, Glycine max
  Clone ID: jC-gmro02910067h02d1
ctaaaccaatttttttttttttacttgcattccttactgaaagaatccatggtgggaaacaagaatatagtaagcttgcgagatgcatacacaaggcgggttcacaggctcacacacttattgttgaatatgtgacagccaaaagctttgaaagggcaccaatatgaaatgcccgatgaggagacccctctataaaatacctagtggggcctggccgacggatttgaaaggaacccagggcttagacatcccggggaggagggaaccttatccagattgtgccaaccgaacccatcaatttggaacaggatgaccatgaacgatgcaatgctgttgcttgaacgacacatacc

SEQ ID NO: 43050 - DNA, 457 bp, Glycine max
  Clone ID: jC-gmro02910067h04d1
aaaacaaattttgtatgttggtatgctatcatcactgtcatatacaatccttgaaagcaaaaatagtgtaagttcatgaatagtttttacaagggggcatctgaagttaacaaacatttcatccaaaatgtgtgagccagaagcaatgaatgatcaccaaaatgtcatgccctctgatgaagcgccactataatatacagaattggccttggcagacggattaaaaagcaacttaatgcttaaaaatcctggggatgaaggaacattatccagctcatgtcaactcaagctttttctttggaagatgatgatagtaaatgatttaatgttgctgcttgaatgacagcacttggacttggttctctcacacgggaagaagtggctcctctaaggccaaaattcttctccacattgcttcttttttgtcgtgaagaacaagaaaggaatcttactaacc

SEQ ID NO: 43051 - DNA, 455 bp, Glycine max
  Clone ID: jC-gmro02910067h05d1
aatgcaaacactttcctgataatgttgtactagagacctcactatttgtttaacagaacacaaataataatttacacttaacaatactaatacatgacttacccgtacaaatctgagtccaagaaatacataaataatgaacaataggcaaagtcttcaacggagagacaaataacacaacgaaccaacgggattagttttcttaagagaaactaactaataactaccgtcctgacgtggagaacgatggtgcacagcctggtgaccttgacggctggcggcatgagtagaacggaatttaggctccacaggtttctcattggcagcttgaatgcgctccaaattctccaaaacttccttcattgatggccgctgtttgggctcagatgcaagacatttcaaagaaagcttggctatacgaaatgcagctttggatggaaattttccttccaatc

SEQ ID NO: 43052 - DNA, 479 bp, Glycine max
  Clone ID: jC-gmro02910067h06d1
aatccataaaaataaatcaatgaccattaatttaggaaacatatgataaatgttacaactgaatatggaaagacacccccctacaacataaaaaagcttctttcttcgtataaaaggtctccaaatatgtctagtggccccaagctctgcgagaaaatcacattgcagtagcacatattgtccttgataattaataataaattcctacttcttcataaaaatgcaataaataaggcatgggctacgttggctacattggctaccaaaaccaagggggaaattaccatgtatataaataaaatcaaccattgaactatatataagtgcccctataggcagaaacactcttctcaatgcaattcaataccatacaagtttaacttgccacgggctttgcaatgactttcttaacggcttcagcataagtcctgtgctgataggtgagagttgattcaagcaggtcccaaagtgaggtttta

SEQ ID NO: 43053 - DNA, 507 bp, Glycine max
  Clone ID: jC-gmro02910067h07d1
ccaaccattcaattaatttaataggcatcaacttgaaataaccaaattagtattgcccagcacaaaaacataatcctatatagcacaaactgtttctttgtagagaatacaaaatgctgcaaagtttacaacatcaaacacagaaaagacatccaaagctgttgaaaaatacaagagatgactctcctctgaaatattgagaagttcactttgttttttaaacttctcaacaacactgtttcactgtctggcttgtatcactcactgtatataagtcggaaagcggacaagaaagaggatgacctctgccttttgccttttcactccttgctgctccggcccttccatcttatataatctacctattttgatctaacctactgaactgcaaaatccacaagggaatgaaaagatttgccatcaaattttagaaggaaaaacgtcaagaccctctcctaactgcacatttgtatggctacaccattttaccccaccaagcagaaaacc

SEQ ID NO: 43054 - DNA, 357 bp, Glycine max
  Clone ID: jC-gmro02910067h08d1
ggccgcccggaattaaaaaaaaaagggggaaaacacaaaaaaaggtcaaaaaacccaaaaaaaaaccctaaaaaagaaacgggggggggaaaaccccaaaaaaaaaacgttaaggggaaaaaaaaccccgggaaaaaaattttggccccaaaaaaaaaaaaaccccccctttttaaaaaggggggacccaccccccctggccctaaataaaaaaaaaagagggggccaagggaaaccccccggggtcaaaaaaagggcgacccctttaaaaagagcaagccccccccggggggggggggaacaccggggggggggggggggaaattttttttggggggggggggggttttccccccc

SEQ ID NO: 43055 - DNA, 563 bp, Glycine max
  unsure (1)..(563): unsure at all n locations
  Clone ID: jC-gmro02910067h09d1
ataaaagcatgatcccattccaaaggatctttataagagtgtcttgtatcaagtgctcagtaaataaaacagcacaagcattattaacgtgtccgttttacatggctacagccataatgcacaagaaatgacttaaaatgaagcaaggtcttgtggtgagtctcgcatccttcttctgtttacagccacatacaagtttaagctctttaaataaatgaaaggatggagcattttaaatccttgtcagactggtgtgttgcttaaaatttcatccatgtagtctccacttcggattggagtgaatcttggaggacatgattcgctacaacaacttttgaggcattccaccacacagtctggatgagggtctaagaagaatgccatcgaatagcgttcttttccagttcgtttaacccggtgcattgttgaccggtataaacaattagtccacctctccatcaagtctccgatgttcacaataaaggcccnctccatgtaaggcacatccttccagacccgtggttcctttaacttgtcccgacagatctgtagtcctgggactc

SEQ ID NO: 43056 - DNA, 405 bp, Glycine max
  Clone ID: jC-gmro02910067h10d1
aaagggtgcatgacccaaattgggtcacttgaaaaaaattgatattcccctcactttttttgccaaccccacaaaatggggggggggggggaaagaaaattccctttttttttggggggggcagcaaattcaaaattaccattgaaatggaaccctgacagataggaacttccccaacttgggaaccccccccacattttttttactcccgattccgggggaagaccaagaaagaaagaaaacgcccatattttcggctatctttcttgggaacaacaaaatgaaggggccgactctttttccataaaagggaagcctttgcctttccaaggacaattggaggaagaactctatggccctcttcatattccttgaggaggaaaataaaaccttgattcatcacat

SEQ ID NO: 43057 - DNA, 465 bp, Glycine max
  Clone ID: jC-gmro02910067h11d1
acagtgaatcaatttttcaaattccaagtcagcatttacataaagaaaggcaatataacaaatgttatagaatattctatagcagaagaggacttcatataactataacctgtcataagatccaatctcatatcagaaaaagtcaaatcacgaccttttagagactcttgtgactcaattttggatgaaacgaaaccccctattcttattagttaacctgcacacttacacagatgggaaatatttgttgaggttgaaaggcaatgaataaaactcttcacttcttgtgtcagactggaaggaacggttcttgtcccaccaatgctttcctttatgtttacgaatagcagcttccttcttatgtagtgtgctgtccaagaaagatgccacacaacccgcaacaaaggcttttgattggaacgggacattgattatatcattgaaccatcttgctttggtgtgaac

SEQ ID NO: 43058 - DNA, 393 bp, Glycine max
  Clone ID: jC-gmro02910067h12d1
ggtgtggtcaagaaacacccccccccccataaaaatttttaaaaaacatgccaaatccaaagtttttgggggaaaccagtggggaaggacacccttccaattaatttaccattgcccaaaattgcgagggaaaaaaaagagtctgaaaaagggtttttccccatttcccccccccagctgtctgtggatttcccaaatttaagattttttaacattgggggaggggccaaataccttttgggttttccaaaaaaaaaaatcccctgtgttgattaggccagaaggctttccaggcacagtcttgaatgggatctgggcaacaaattttttctttccgggggaaccttttgatattggggggtgggcctttgttgtcaccaaattacccttttg

SEQ ID NO: 43059 - DNA, 494 bp, Glycine max
  Clone ID: jC-gmro02910068a02d1
aaaagttacagtttttttttaattattattaaattctaaaggaaataagatcgaataggaggtccattgaactgttttcatatttgtcttcaaagcaaataacacgcaatgttctgaaatccataatcccacatcacatagtaaaacataagaacagatcagaaataccacaatcacatacacaactccgattatctatctattatgcctaacacatagtcaggcagataaggcttgccacttgagactccaatcgctcagaaaccatgaatcttgatatgatccttcttcacgataccagcctgtactaggaaagtagaaacattcttcctctgatcaccttgaagttgaataacctgtcctagatctgggtcctgaacaactgttccattgcaacagaactctttcttaacgtctttaagtatcttgttatagctgaattcttttttcaatccctgaacggttgtcaggcttttcctaccatttcgctggtg

SEQ ID NO: 43060 - DNA, 493 bp, Glycine max
  Clone ID: jC-gmro02910068a03d1
agaataataattatatttatacacaatttttatgacatttattatggcgcgacgaggataaaaaaaaaatattacatctcatttagttgagagcttaaactaataataataattagttaaagaggtgaaagaagtttctagagtgatgcagggcaggccatgagcatgagtgactgggaattgagactacagagttgatccaaagaatgcattgcatgcagctcaaactcaaaattaaaatcaaaatattactaataattgttataattagacctagttgaagaacattcaagtgttaagtgtgatcctctttctaggttaagcatttctgttattataggaatctatcaaccactaaccaatccgatattcccacaagagtatatggtgtgattctatccgattggttaaggtcgcttaacaaccaaaggattgaaggggtacacaaacaagcatatatatatgtgagtggctaaaccaaacggagtaacat

SEQ ID NO: 43061 - DNA, 545 bp, Glycine max
  Clone ID: jC-gmro02910068b02d1
catcaacatgaattgtctcattcattctactttcaatgggatcagtcacaacacatacaaatctttcatgattttagatgcacaaacagaccattatggacaaatatagatttgttcatgacacaaatctttcactatacagttaaaagcacaccactcggaatcatgtcattcgtaacactttattcaaatgtatgctgatatagatgcataccgtatatcctattataaaaagcaacaccactcgactatatagtagttaggtgacacattttccctcggaaacttggaactgaggaacgtgatgctcagaactccctttctggaaacatgataggagctacgagagaccacaagtacagcagagcagttgcccaggaagtgatgattcgaacccacacagaaggccaccccacgtgaaccaacttaccggtcctccaacagatgtagaccaaccagtcagaagcattgcagaatacatgctagcaagagagaaattcaagtggagaaggcatatgaatatgtaactggctttgttttttctt

SEQ ID NO: 43062 - DNA, 512 bp, Glycine max
  Clone ID: jC-gmro02910068c01d1
gttaaaatgtgcattgggatgcgcaacggtaacctgatcataaaaatcgccaatatcaggacattatcatttttgtaatcatacatctaatacaattcatgaatcaatctataaactagaacttaatgtatgaaaactaagaccacaaaaaattatgcatattgtatcttcaggagcctcgagccatgtatgaacttcctcaaacttcccctttaaacttggcttcatacaactctggttgcatgaagacagctgaaattaacctgcgtgcaaaccatctcatgtgcattgcacgttgagcaccacttgccgcttccactgtatcaaaccgcaaatacacaaaacctgaactttttttgtcaacaaaaatatgcttcacccggccatatttagaacactcttcctctacatcctctttaatgtctatatcaaaatcaggttccgtctcagtgctcgggtcgaacatattctttaaaaagtaacagtcgctggggtttcctacaggttctact

SEQ ID NO: 43063 - DNA, 449 bp, Glycine max
  Clone ID: jC-gmro02910068c02d1
ggcaccaaaaaacgaatcgattgttatcttgaactgttgaggcaattggtacacaagaagtaatcaccaacccgaaatgtatgggaaatatgtacaacaggagctgggaatcactaaccatcacaagaaaatgatggatatatctatcaacgaacactactaatcaaaaaagttccaacaagaaagtttgaaaaaacgaaactagagaataatatgttgcaacttcaagccgaagacacaagcaaagctaaccgaaaaacaccgtcccgatgaataaactcagtccagagtaaaatgactctaataaccctgctctgctgcctatggctctgtggatgaaaaaaaaaatcaaaatctcaattcgtttacctcatggacataaatgtgcgaacccgattttccctgtctgttctcttcgcgctcggaggtctcttcagcttgatcagttc

SEQ ID NO: 43064 - DNA, 447 bp, Glycine max
  Clone ID: jC-gmro02910068c03d1
gatgtccaactttagcaatattttagagttatagctgggggagtacacattcaataataccgcgcaagaaattatccttatttttggggcacctaagaagatcttttgctagggggaaaaaaatcatatataagctatacaagaagaaatgaatcattgcattacagatgtgaaatcagtgatgctaacagagcctgagggagagagaaaaacttaattacgaacgcccaggtttcctgaaaatacttacaatcatacagttgctgagcggacagggaagaggaagatatcttcaggttggctggtaaataacacaactggtgcgaactacaccattgctaaactttgcggaggatagcagaattgcaggtatcttcgatatggttatcaatgtcagctgctactacttgtgtaactatacatgcgtcttaaaaacaccatacacca

SEQ ID NO: 43065 - DNA, 442 bp, Glycine max
  Clone ID: jC-gmro02910068c04d1
gggaggcaaagaagagatgtatagtgtatttgattccacatggcaaatataatttttcacatttagggagaacttaatagttatagcatccacatcctagacgcaatttcttatttctcaactgttttttcaaacacgtataatggtgatcaaaatagaggtttccttccatttagcatccccaacaattgatcaataactttgctcccatcatcacgcaagccagaatgcatgaactcattagttatccatggcctaatccctgctatttgagaagctgtttccatggccagcttaaaattcacgtacaagtcttcatagtacacagctgccgcaacaagtaccttgttgatattcagaacctgaacatcatatagtggaggccagtccttcttctctgccaatatatgagctgcctctttgaaaggcttcaatgcatgaa

SEQ ID NO: 43066 - DNA, 525 bp, Glycine max
  Clone ID: jC-gmro02910068d01d1
attaaagctaaatatcattaaacacctttcaaagtcgtaagacataactgtcctagctctgtgaatcagaactcaaattattggcaaggtctttatcataccaagactaatgttccaactatcaacttatatatcacaccaaaaaccgcgcatccaaatctcaatgctcaaactcgtgtggatctccaggttttttccacttgaaaactttagtagggttcaacgggggtacggaagttagctccggcgtacactgcttcagcaccaagctcctcctcaattctcaagagctggttatatttagcaagacgctcagacctgcatggagctccagtcttaatttgacccgtagccaaaccaacagaaaggtcagcaatgaaggtatcctcagtctctccacttctgtgactggccatgacaccccatccagcttttttggacatcctgacagcttcaatactctcagtcacagaaccaatttggttgaccttgaggaagagagcattgcatgctttagtatcaatt

SEQ ID NO: 43067 - DNA, 559 bp, Glycine max
  unsure (1)..(559): unsure at all n locations
  Clone ID: jC-gmro02910068d02d1
ataatgaatctctgaattctgcaattgatcaacagaaaggcattgtggattaatacaaactatcaagtgcactccggctggacattattctcccttctgtattactttctagtttctcccaggtccttccaaaaagagaaaaaataaaatacccttgtgggtatttctccttaaatttacatagacacaaagacacgcagacacaataatagggccatccaaccagacgcccacaccttttgtaattggtagccaactcactacttcaaccatttagcagccgccagccttcgtgcttttacaaagccataacaaccaaccatatgtagaaacttaattatttataggcaatcatctaggtggtggcgaatgggagatcnaaggtggacgccttatctcggtccacatcatccttcacctgatctacgaggattcccctatcttgtcagaaattttctttatggaagtacgacttggtggatgtgctgtgagagaaatccaatgctagctgacgaagctcatgggtgagggctgatggcccacacaaaaataccccaac

SEQ ID NO: 43068 - DNA, 493 bp, Glycine max
  Clone ID: jC-gmro02910068d04d1
gtcaagttcaagtaaacttctcattgatataataataagcgaagacatatcaaatcattattcttgcacatgcaataagcagatcgcatttcacattatccaaggaacacatctagttgtagcactcgaagcacactaatataatggaaatggctggctagctagttttacttggggcaaccaggccattggacatccgggggagaaagtgttttaagaaccggattcctctcgaagaaattggttggcctgagctcgaatgcagtgctcaataatggcattatggggaagtcttcctgtgctggaacatgatgaattcccacaacgtgccacagcacaatgtccttgttgttaatgtctctattctttttggtccaaacggctaaagtatcatctccatggctgtgatcaacgtagagtccaccagcccacttctcagtcctattggatggagtgacccacacattgaaattggtaaaagcgccacgtattt

SEQ ID NO: 43069 - DNA, 518 bp, Glycine max
  Clone ID: jC-gmro02910068e02d1
aaaaatcattgtaaaactatcagttgaaaaatattcccaggagaagaaaactaatatctgtgtgatccacaaattcgtacaaggtaccattaaataccaaattaattccagaaaataccacaatcaacagccagtagcctagtaacttcttccccagtatgtccactttgttgcaggctttcctgatgcaaagcacttggtgccttctgggagttctggctgatcaaagggactgcaaagagtcttagctgctcccatctcaccctttgtcctcgctttgacatcagcctcaacctcctcctcgtcacaccaaggagctaagatcatttttctttggttcaaagcttgcacaaattcatcccaagtgtgtatgatctgaatgcattcatctcgtttttgttttgcaacatcaaacaggttcttgtgaatagtatcgagcaacttttttatttccacaaccaaatcaacactagcaatgtctatctttgcaccattataacgtcgaacagcgcgaacct

SEQ ID NO: 43070 - DNA, 477 bp, Glycine max
  Clone ID: jC-gmro02910068e03d1
cataaaataaattaatgacaataatttagaacacatggcttaaggtcaaacagaatgatagaatgatacaacttacagctgacctggaaagacaacaaagcaatgaatcgagagatccttaaaaacacagaaaaaagtcttccctaggtaatatataaagtgtctcaacatgtttagcagcgcatggtctctacattaaaattacatagagcacagattgcccttgtataaattcctacttctccatgtgggggctatattgcctacaggctaacgaaaccaatgggaggaaaatttacgattttatataaaatcaaccagtataatatggcagaacacttgggcaagacaagaacacccttctaaaggtagcacatcaccatcactgtaaaaagcttaacttgcaacgggttttgcaatgactttcttaacggcttcagcatatgtcctgtgctgatatgtcagagtggactcaag

SEQ ID NO: 43071 - DNA, 492 bp, Glycine max
  Clone ID: jC-gmro02910068e04d1
aaacaattatacaagccaaacagccctgtataagaatatggataaaatttctaagagaagaaaatgatgaatacctgtgcaataatgcagtgattaaaatatctcttgtccattcgagacttgtcattatcaaatattacctcattacataacaaagactgttcaaaaggaaacataaaacaactattttgacaaattggaaaggagatctaattattcatcaaactcgtgcatgtgatctaaaaggtagttggcagccagctcctcatttttgttacaagcgaagtacacctccaatacagttgcacgatcaaatcccattgcttcgagacgttcaattgcttgccgttcctcaggggtgactgtcactgcttgcggcatggcactagctagctgtcccagtatatatccctcacccccttaacgggttcattaattaggcgaaggaagtcaacttgatgctcttgaatcaatcgcataagatgaggattt

SEQ ID NO: 43072 - DNA, 389 bp, Glycine max
  Clone ID: jC-gmro02910068f01d1
atgtaaccttatttacttgattaagtaccagtcacaccgtatgggaatgatgattatgaatacatacaaagcaactgcgatggcaagacactactattgtatatgatgattatcttaattcagaaaggagtttagatgcaacgccgatccttgcaagtggaacacaaacaacactatgtgcccttggaactgtgaggccagctctctcttccatgctaacttgagcattatcacctttcaatatttctccttgagggcccaccacttgccggacaaagcattgtatgagagatgcaagaagtgttgccatttctgtagtaggcatattgtcaccagggcacattcttcttccagacccaaatgggaagagttagaaatgctggccccta

SEQ ID NO: 43073 - DNA, 467 bp, Glycine max
  Clone ID: jC-gmro02910068f02d1
attccttaaaaatcaattagcaaatgaattggcatggagatggtcaatggacttggcacaattccaacacacaatattgaatttaacacgatgacctattggtcaatcataaggacactgggagtgtaatgtatgctctttctacaaacccagggtggggcaaatcatggtttagacgctatcatgataagaggaagaagacgagaaggaggatgagatcttttcaagaacttgttacgcctctttcattggagggctttgctggggaatgctaaagacacaactataccctagctagaagtatggcaacaagggctggtacctaccctacatgtcaggccgtataaccatatcaaccatgcgcaaggcccgggtcttatgctgcagcaaaagcccgggaccctggcccatatgatccaaaaccacaatctgtcctgtttgctactcaagaaacattaccccaaaag

SEQ ID NO: 43074 - DNA, 461 bp, Glycine max
  Clone ID: jC-gmro02910068f03d1
ggtcttgcataaaacaaatatctcattcaattggaacttgggatccaagtctaatcaacagctagacactagcagaaacacaaagtaaatggtcttgcatccatctatgcagtgtccatgttcagttttaagtaaacattatcactagagtttcacaaagctaatgaagatgcaaatttttcttacacttgtttgccaaatgacaaggcacaagctaaaggggtaacattaggggggagaaaaaatgaattttaataaaattttaagccaaaaatattatacataacaacagtggccaacatgtaccaaatcttcgctagccaccaccttaaacttgcccttagggcataacacagtcattgcaaaacagcataacaattggcagttctaggcttctagtcagctgtataaattatgagaacatccggaggaagttgtttgcatatgccataggtttgaca

SEQ ID NO: 43075 - DNA, 493 bp, Glycine max
  Clone ID: jC-gmro02910068g02d1
agaggataacaggaaatgtcttgcgactttgaaaatgggggtactacaaaccatctaagaagcctcagtctcaggccaaatacacaaataaatatatacatgacaaacaggcagaaaggaacatgaagccagttgacagtagaatagacctacctaatggtgacaaacttgttggtgccatgttttgcccaataagtcctcaaatcaatcggattagaaaagatataaccctcagctgcaaggtactctaacactttcttaaatgctcctatactcattttactgccagctatcctagcaccacgccgtttggtactcataggcaaaggatacactgacatccctgtcgtgcaacatgcagactggcaaccggcagagccccatttataacactgatggtgcactgcaacgcatgaacaaacaggaactggaatactaaaaatatccatattaatgtcgtctattacaatatcagtagatttttttggaaccc

SEQ ID NO: 43076 - DNA, 382 bp, Glycine max
  Clone ID: jC-gmro02910068g03d1
gaaacaaatcttttatcataaaataaggtaagacatcaaggggtgttgacacgaaattgaccaaaaatacggcttactcaacttcaaaaagtatccaaaattttggacctagaaaataaacagcacatgtaaataaaatgattgactgaacgcaaaataagagagttttagttgcgcaacgatgacatggaatctgccatgaactttcactcatcatcttcatcattatcagcagcagagttgatagccgccacacgagcaatcaacttagccttcctgtcctgataagtgagtttacttagattgtaccttttgtgttccttcgggggctgcttctcagatttcttgagagaaggatcagcacggatggcaatatgaacct

SEQ ID NO: 43077 - DNA, 428 bp, Glycine max
  Clone ID: jC-gmro02910068h01d1
ataaaatatttatatcattcaaatgtttgaattggtgcaggaaaattaatttccttatctaatgacttggtatctctgcaatctcatacaaggattctgtcacatataagaccttggtaatttccaacttgtaaatgtaccagaacagaacatttcatactgcagtgcatggtatatatacacaatgccactcgtgccctctaaaaggaacataaaatgaaagctatccatggatgatgaacaactttaattaattacccaatcagcacttcaaccccgcgagctttttgttgatcatctctctcggggcaaagctatccacaattgtttgtgtctcgatggctgaaacttctttgatggactcgagaattgacattggtttgctaattgcaacttggtattttaattacacaaggctctaatttata

SEQ ID NO: 43078 - DNA, 430 bp, Glycine max
  Clone ID: jC-gmro02910068h02d1
aaagaacccaccacactatatggtggatcttttaacaactccacactatattagttatcagaaaaggcaatgaatactccataccgataacataatatatataaaatggaaaaacttataccatatttaaacaacaaattactctctacattaccaaatacaaatggaaagaacaagaacaaaaacaagagtttgattgtaagaaaaaaaaaatgaacagtttattactgcacacccataacccctcgctagtcggtgctatatattatattgcacaaggcaataaaacatgaacaaaaatcataattctctgaggggataggattcctaatttaacttcctaattttggagcatcacaagtactatatataaactatttgcaggcctttaagcacaagtaaactggttcaccaatattagctccttgac

SEQ ID NO: 43079 - DNA, 430 bp, Glycine max
  Clone ID: jC-gmro02910068h03d1
ggaaagggagaacacgggttattatatgaaaaccgagagcatccaaatacaatagggcagaagttcaggcaataattacccatagacatgcataaagtctatgttattcagaagtccaacatagataaggaaaccacaaactctttttaattaaatagagatactggtgggaattcctttgaaagtaaacccttcctcacttgaacgatggagcaaagtgtatgggagctgaactggcccagcccggtttctcagacttggatcactgcgccttgaagtgatttttccttcaattccaggcaggttgcttccaaaccttttgaaagcttctaaggccttcttatcagtagaccaatttggagtctccctctctccaaggtatagtctatcagaagcatgccttgacaatatctctatcactgaaagatca

SEQ ID NO: 43080 - DNA, 440 bp, Glycine max
  Clone ID: jC-gmro02910068h04d1
aagagaaatacatcaaagttaccatattattatttcacagggtgtgctaattcttagaaacaaggttaccattttttatctaaatcgggcaccagcagaaagaccctacactacagtggaacatggtacagaaatccaaaagttgcatcgaaacaaccatgaaggaaaataatgaagctattcccagattccgacctacatgaagccattgtcagtggcacagcccctaaacatgccattgcaattgaaaccataagccacttccccagcgttggacacagggatgagaccagccatcctttcatcgagacggtgcttgatcacaaaatccacggcttcttgaagcttcaagcctttgtataccatcagagatgccacctcacgcgccagcgcgccaagtatgatggcctcgtcttcacccgtgcacgatacgccgcaca

SEQ ID NO: 43081 - DNA, 461 bp, Glycine max
  Clone ID: jC-gmro02910069a08d1
ggaagatatgccttttaagcaagcaatcatttgttatggatttgataacagttcaaataaaatgtacagtgtccccccccccctcccggatatatctaactagtagtgagaaaacaaacaacggttgtgatcacaggtgttgctgcatgtgcaaactcaatcagtagtacatttataacaacgcaataataagaggaaaaaggaaggaaactttttctttcttcctttcctttatgcttttctctgcctcattttttttaaaggattctttggtttttttccaattgggtttaatctcttttggttgtagtagtgtgtttgatattaacacatgacacccctgcggcatttaagaacaccagctccagatgtgatggtcccaaccaaagaagatgatttagcccccaaacttgaggctctggcatagcttgctgcagctactgctcctgatgaagtaaaaa

SEQ ID NO: 43082 - DNA, 386 bp, Glycine max
  Clone ID: jC-gmro02910069a09d1
attggttaacagatttataattttttttttgggtttctgtttgataaagtactacatcgttattctatacttgaattgaaatttggtttttacagcatggtttgctttacgattgaataattattgatattacccacgatcgagagtaataattaaccttaatcgtcatcctttatctccgaccccacgccatgcagccattgatctctgttctctctttcgtaactctatcttctgcacagggtttcattttctaccttcaagcagcctctgttggcaagtggcaacctttttttacaacttttacctcaatgagctgtgttcaacacaaccgtgcaacatattaaacaaaaatttctgaaagcggtttccaattttcccatgtt

SEQ ID NO: 43083 - DNA, 606 bp, Glycine max
  Clone ID: jC-gmro02910069a11d1
ccggcggcccgccccccttttttatttattttattttatttatattttatttttattctcttttctatatttctattcttttacctcaatttgggtttgcttgatttttttattcacttctccatatctttcaatattcacaaaatttctataaacttcacatttttgcgtagctcacatcttttctcacacaaaccccaaaaaaaaggcaccccacccaaaaaaaaaaaacccacatgcaaaaaaaaaacaacacaaaaaaagatagccccaaaaaaccaaaaaaaaaaaacaaacccccaagggggggccaaacaaaacaaaaagaaacgacgcccaccaaaaaaaaaaacccccgccaaaaaaaaaaaaacccccccgccaaaagactctctcgaaagagaaaacccccaaggaaacaaaaaaaaaaaattctcttcaggggggggcaaaacaaaacctaactgggggagaacaaaaaacacttcaaaaacccccccaggggaacccaaaccacccgtgggggaacacccccctgcaaaagcacacgcaaaaaaaaaaagaaggggccacacccccaagaccccccacaaaaaagaagaaggc

SEQ ID NO: 43084 - DNA, 465 bp, Glycine max
  Clone ID: jC-gmro02910069b10d1
aaaagaaaacacatatcaacgtttattacacaatccattcagaaaaacaaaaaagaacaccctgagcaaaaggacccaatacaattatatctcctgagccaattccactacttcttccaccacagacgccatagaagatcttctcttatttgcaacaaagcacttatcacgaatctcccctttcccaatacgatccgttatcacatctagctggctcaccttcacaaaagcatcggaaaatttcttaaaaaacagtttctggtctgaagcgaactggttcacgatttccttggttttggggctgcccgcgatgtcctggtcagaagtgaacactccttggcggttcaagaggttgatgtaatacatgttgtcgaacttcacgggggttctcacgtccaaattaacggtgttgggggactcggcattgggacacgtagctatcaaattgttgttggaagtttgggt

SEQ ID NO: 43085 - DNA, 511 bp, Glycine max
  Clone ID: jC-gmro02910069b11d1
gataataatttaactttaaagagaacttcatgatcatcaaccatccaaggatttaagacgaaaggaacaagtacaaccctcgaaagtgaattaggaagaaaacacaaggaaggaaaaccatacacagaagaagattccagagaaattcaataatacacaatttttttttttttattttcatttccccccctctagtagtcagtggtgggaagctgctcgtgggtgtggctgataaagacaacctcgtaaacaaggccagcgattccaccaccgatgagaggcccggcccagtagatccagtggttggtccaggtccagctcacgacagcaggcccaaatgtcacagcggggttcatggccgctccagagaaggccccacccaacaaaatgttagcgccgacaatgaaaccaatggcgatgggagcaataattcccaaattacccttcttggggtcaatggcagttgcgtaaaccgtgtacaccagaccgaaggtcatcacgatctccaaca

SEQ ID NO: 43086 - DNA, 492 bp, Glycine max
  Clone ID: jC-gmro02910069c08d1
actccaatgaacatgacaatttcatatattattattatacttggcaatcagcatttctttgttcaagactgataataaccattaaattattgtcattgtaacaatcggaaaacgagggaaaggaatagaagaaaacaatgaacaacccttgccagttagttgcaccaaccaacaaggcaccaaccatagtaccaatcaaaaggtaaaaagagagagagaccaaatcctactaagaaaagcataactgttcctttccatccaaagggagaaaacatgcaggttttgctcatggcttccacagaatggttgtgtctgcaatcatggaagtaaccacgtatgggtccatgttggaagctggccttctgtcctcaaaatatcccttccctgctttctctgtgtctctcccaaccctaacagaagctccacggtttgcaactccccatagaaggtgttgatgtcagcggtttcgtggcgtcctgtcaaacgacgttc

SEQ ID NO: 43087 - DNA, 478 bp, Glycine max
  Clone ID: jC-gmro02910069c11d1
atgcccaaaaaaagaggacgttcttttttatgggatagattgatcacaattacatcacacgcatggccatcttccaacttaaaagtagaggaaacctggccccttaggcaacaacacacgcgcaccaccataatcatactcataatattacattacattacataatttacatacaaaatagaaggtttaataataaaaaaagaaagaaaaataaggagaaaagaaaacagatgacgatatatcataaaataaaaccagaaacttgcttggtttgggtcttttaatttacccaacttgattgaccacgaatcgttgtaatccaattaattaactggatttgaagggaatggctctgattacaacttggtggtaaagagccgcaagagctgcaccaacgaaaggtccaacccagaagatccagtgatcatcccaaccaaggtcttttgtgaagatgatggcagcaccgagacttcgtgca

SEQ ID NO: 43088 - DNA, 407 bp, Glycine max
  Clone ID: jC-gmro02910069c12d1
gaacgttctatgttcttgggatcataataattccgtgagcgacaaccctttgtcacttacaaaaaacatgcaccaagattaaacttatgacaacgctcaactatcatgtaatgaagtattaaacttcaatctcaaggcttcaggggattcacttaggacaacttacaaaaataatagaaaaaataaccgacacttgtttcaagtaaaacccggaatttttcctgggattggagctaacacattattgctaaaatttttctcgtcataaaaagagggacgcaccactctacccccaaagaaccgaccatcaaagacgacaagcgctctatttgtttctttagatctctcaaactgcacaaagattcttactgctttatgaacggggaaaaatggctctgttatttcaa

SEQ ID NO: 43089 - DNA, 476 bp, Glycine max
  Clone ID: jC-gmro02910069d07d1
aagcggtcataaaaattgtcagaactataacgagaaccaaaagatttctttacatttgagggcaaaattcatagatgtgcccagaggccagagaattaacaattaaatgtacttaaataaagtcagtattctccaaaagatgcaggtgaagttctttatctcataactgcaaaaaggttaggaaaaaacaactagttctcagcatcatccccgagctccccgtcttcaagttcctcatgccccccagttttcctggaaccatcccagtggtccctcttgtgtcttctatgccggttttcattgtctgattcaggagagtttgcatgcttccgagacttcttgcgttcactgccatgccttcgtgattttttagattcttccttctcttccttttcagaatccacatcatctatactgctctgatgccttttccgaaggtgcctttctttatacttttcttttttcttctcctcttt

SEQ ID NO: 43090 - DNA, 165 bp, Glycine max
  Clone ID: jC-gmro02910069d08d1
gggccaaaaatggtgtgatttttttttcccaagcctttgacaaaagggaaaaacaaatcaatccgcccccgggtttaacatgcaaatgccctttgaaaaaccaaaaaatggggcccccctaaattccccttgggttcaaaacaaaaggggggccctcaccctttt

SEQ ID NO: 43091 - DNA, 402 bp, Glycine max
  Clone ID: jC-gmro02910069d09d1
gagaacccaattgggggtaggcgtttcaaaaaaatcaaagtccaatttccccaacaacggtggttttcattcaaaacacacccaaacccccccgaaaataacagaagggtttaatctcctttacttaaaaaaaacctaaaggtttaaaccaacacaaactcctcaaaactcgtcaaaacttctttagaacaggaactcaaaatgccagacccaaaatttcttccagcccatatcaaaatatggggatcacttcttaaatttctttggggcttgccccggctgggatgctggaacaactgtttcactgggggcaggggaatctttttttccaagaccttgggccaaacggtcctccctccgagcaattttttttttttcgctggccttgttcttgggacgttt

SEQ ID NO: 43092 - DNA, 330 bp, Glycine max
  Clone ID: jC-gmro02910069d10d1
cccccctcctgggtttcaggaatgtttaaaaaactgggggccacatattttacaagaggaaagtggaccaaaaacaaggacagctaacaacaattacataagtcttttattttctaacaagacatcatggttcaagaattattttttaaattaaaagaaaccagaaacttttacaccggggaattaggaggctcccattactaattccacaatacccaaggaaattcatatgccatataaacaatctcacaaatgaagcaactacttggcaacaaaaatgagttggctctaaaatttaatttagactggaacccccttaataacaaagag

SEQ ID NO: 43093 - DNA, 536 bp, Glycine max
  Clone ID: jC-gmro02910069d12d1
ggtgggaagacagttcataaaaacgaaatatgggatacactagtgaatagtgacttcccacgttttgccaaattgtcaatctggttacatgaagaatgttgctgaattataattcaattcatgccaatttcccttccagttggaaacaaaattctggcattttcctccctttgcttgggtttctataaccagtggccaactaaaacaccacttgaccaagggaaaaatgctaccggggtctacacagggttgatatcagtttaaataatacaaggtatcgttatcatcatcactgcattaaatactgttacaatgaacatctgatcataatgtcaacagcagactcttatttctcctacttatcctcctttatcttccattttgctctaggaagaattctcattataaagttgtgaacaatagtatgtgtatgagtcatgcgcaaggttctgttcctgagagcggaaatacatgaagggtgtataatacaaaaaatttgacaccctagatgtataaatatcagcatatttctcaat

SEQ ID NO: 43094 - DNA, 437 bp, Glycine max
  Clone ID: jC-gmro02910069e08d1
aaaaaccaattatgcatataataaatataaacagaaactgactcaaaaatccctgtgagaaaagatgcttagactatcgtcctcctaactcgaggcacctaattcttggccacaacatgaaaatcgaataaaaggaaaaaccaaaccaagcagaacctacaaagttccaataccatccgccaattgcataaaaagtctggcttccaaggtgacctaacggagaaacttataacatactcaacttacaaatccattcattaaactagatatatctattaaaaacccaaagcttcaaataccaaataagtcaaccaaactttactgaaatatggcacaggactgggtgcatgaagaacttgatcaccatccagctcgacttgacccaactttagaagcacttccgatgaacgatggctggcccagattcatcatattca

SEQ ID NO: 43095 - DNA, 503 bp, Glycine max
  Clone ID: jC-gmro02910069e09d1
gaacttgaaaagttgttttgtattattgtatgtattagaatattgttccttgtgaacaacaacactccatggccctgcctcggcaaaaaatgtaattttttttaaaaaaaatccctcaaatataaatatacatggtattacaattggaatgtctgaaaaatggaaataatagaacaagaccttgagcccaagcgatgaatagaaactccaaaaaccattggtactaaattaatatagtaccaaatttagctggttcccagctcaacaaagaatcaagtttcatctcaagatcctacagaacattaatgactctctctatattctgagattgatcatcacccaaagccaaattaaatatctgcatgtagtcatcaacaaaatgaacatcaagaccttctttcacattaggtgctagctcatcaaaatctctcctgttagctgaagggaatataatagtcttaacttcactccttcttgcagctatggtttttctctttaacccc

SEQ ID NO: 43096 - DNA, 328 bp, Glycine max
  Clone ID: jC-gmro02910069e10d1
attaggggggatatcataaacattttcactctcagggataacagcactacacgcatacattgacatcttgccatcgatagcagcactcacatgcatacataacatagtaattaacaccatgaacatgcccttctacccaactctaacctacttgcacagtacttattgaaataaaaaataaaaaaacaaactaacaaacaagagtgacatcggaagattaaaaaacaaagcgtcttaatcctcgcatccccatgaacctggtgtggtcttgatcggttcattgaaccaaataaccaacccatttaaagaaaaacaccttaattatttt

SEQ ID NO: 43097 - DNA, 396 bp, Glycine max
  Clone ID: jC-gmro02910069e11d1
acccaacttgtgattcatgttctattttataaaatataatggtttgaaacattcacgattgattcaaggggaatacgccgaattttattttaatgctgaatatatctgtgcagtacattaaggactcccctctcattttagacagcaagtatcaatatgaatcaccactcatccacaatacataataatttattaaagatcgagaaatcgtaaaacatgtccatatgaatcaccaatcatacatgatacataatttaatattaaaaattcaggtgctttctcttagaagtccttatcttcaggcttgagccacctctactgtttcagaacccttgtttatttcaacaccgtttacacctttgtcttgattggacccacagggtttagcttgggccc

SEQ ID NO: 43098 - DNA, 394 bp, Glycine max
  Clone ID: jC-gmro02910069f07d1
ggaagcaagaaacaataacattacaaacaataaaattgagttaacaagaataaaaggtatacacgattgtacgtctaagcatttaccattttatgtccaagctgacctgatattgatgagacatattggtgaatcgaaatctaaacatctaagctgatacaattacagatgaaaagaactacactagtataatacaatttgttgatcgtttatctttgagcctgatcagcagtgtggttgcttgttgtagatgatgatcctgttctaccattcaatattccattgtccgttggggggcaggttccccacttaccctctgactcgttcggttctatcactttgacagatccatccgtcaacccaaccgcaaactggttgggttctagaggatgag

SEQ ID NO: 43099 - DNA, 359 bp, Glycine max
  Clone ID: jC-gmro02910069f08d1
gacacgtcccaagagtttcaccaattttcatttcctctaagagagtacaaattactgtaacttatgggtttgaaccatcttattcaagttcaagttgggcaggtctagtaaagacaacaaagctttcgacccaattattgcagtttcacaagacgaaaaggagagaatttctgagtagaaagattgtgttcactaaaaacttgttattgcttataaatgagttggaagaaaaatatttggttcaacgattgacagttgacaatccaatgaagacccctattttaactttttgctgaagtcggggagctcaagaacatgaattctggggataggaacagcttcctttttttctttctggg

SEQ ID NO: 43100 - DNA, 467 bp, Glycine max
  Clone ID: jC-gmro02910069f10d1
gcagtaaaggttttagcatttcattggaaaaggaaatacaccggaggctgttctcatcaattaaaccccccacacactgttagaaaaggattgtcaataatatacgccatttccagacaccacacaaataaaaacataccatttatatatccacaaatggactatctctctccccctattgccaaaggtggggcaaccaaccccaaacaaagagaaaccacaggagacctatctctagctaatccaaccctcaaatccggccctcaatgtacattcccttcatctaccatcatattttggcgaacttaaaattgcatttatgtgtgaagagtgactcatgtaatgctcattactttgcttccaaaaacttatcatgggaatgtttctattctatatatgtagtattgtgaatgcttatcgattcattgtttttaaattaattaggatatcttttgtatcgacaatct

SEQ ID NO: 43101 - DNA, 341 bp, Glycine max
  Clone ID: jC-gmro02910069f11d1
ctgaaaaaccaattcaaaagattccgatgttaaagacaccttgaaataacttttccttacaattcaggttccttatcaacagaaacaggaaacagcatttcaatgaatcatcttattactttaacaggaaagttgaatacagcaaaagtccctactcactagtccctcttaactctaagtggcaattactatccttgtccatttctttgagaaatgtaacaaatgtttccaaagcatcatcaggatcctcatttctcatcagttgctctgctactactgcaggggtgacttctaatttctccaatagtccatcaatttcttcaaagagtggatgatctcct

SEQ ID NO: 43102 - DNA, 349 bp, Glycine max
  Clone ID: jC-gmro02910069g08d1
gccagataaaacaatgtgatttgttcaaacactttcgggatattacgtgaaaacacaccaactaaaagtccttacagtattcaaattcccgaactaaaaattttgacatgagctataagcaggccttggccaaaattgcaaaaactaaagcttcaacaattccaagctaactgcccctatgggtgcaccttgtttaaatcggatgactggccttataagatatttgccccaggattgtctgatttgctcaaaggaaacttggggtttttatcctatttaaaaaccccgtgcttttgtgagtgcagactatattacaggccctgactctggacattgacaaaaaagggga

SEQ ID NO: 43103 - DNA, 454 bp, Glycine max
  Clone ID: jC-gmro02910069g10d1
aaatcatgaaataaaaatgattggctttgtatagtataaagaatggtagaataattgaattggctttgtagagcatatatagttaaaacatgaaagaatcaatctatctatttcaacaaaaatacatgactgaagaaaatcaattcctgtctctcatgttttgtgtcctcattctgctactacccgatgatccaccctgacccttttgtcccatacgtctacgagaccttgtcttcaactcaatcatttgctcctgaaacctactttcccatctctcatgttcactactaacactcacacttccccatctctcatgatgatcactactaacagtactcatctctgtgcttcccaaacccaattcactgtcatactcttctcgaagccttggattggacaaggtcttgtaagctgtgtttagctgaacaaacatcctcggtgattcctctttcat

SEQ ID NO: 43104 - DNA, 485 bp, Glycine max
  Clone ID: jC-gmro02910069g11d1
ggcctggggggaagaattttttttattaacctatacattgatgggtgcatgtcaccatgtgcaaaattccatgcttaaactgaggaaagttatacaatgtcaatttttaattaaaacgtacggggcaggatttcttttagagggggctaattatacatatactatcttatcttaggattgggcaatggtagtcattaaactaagttagagattcccacacatgtaaaaatttcattggctcagaacattccaacccccactcttttcttctcgaatcaacagtgtgtaggactgcatccatcgcaagataagtttgcaacgatgagactttctccacatttgaaactattgccctgtcataatcattagatcaatattaacataaatgagacacattgatggactgacccgaacaacactcatcatttgaactcaaatgagaaaacagcagaatatacagaggaaaacgagttatagattcaggc

SEQ ID NO: 43105 - DNA, 374 bp, Glycine max
  Clone ID: jC-gmro02910069h07d1
gactcaaaaaatcacgggaaaaggagggacactttttaaaaattccctgattacacaccaattaaaagtctttaaaatattcaaaatcccgaaccaagaacaatgacatttccaatatacgggccttaactaaaaatacaaaaggcaaagcctcaaaaaatcaaaacctacaccccaaaaggatcgaccttgtttaaaggaaatacctctctcaaaaaaaaatttgacaaaggaatgtctaaaatgctcataacaaaaatgagctttatatcctattaaaaaacaccaagcttttgtgaggccaaactacggccattaacaagattcaagtaattgacactaaagggtacacgagacctatacagaactccatt

SEQ ID NO: 43106 - DNA, 404 bp, Glycine max
  Clone ID: jC-gmro02910069h08d1
aatgtaaaaggaataattcttatttattaaatgaacaataatattgtgtaacaatttcattattgaattggagaagcatcacagttctttcattataattacaaacatcattacaagcttagccaaatatgagcaagatatttaatgactcccattccagcagccagtttacaaaatcaagcctacccaaaaatgagggacgagtgggctttgttcaaattcttctttgaacagttgtgtcatgcatgtaacaaatcttgcttggtataaggactggcgagcccttattccttaaaaagaaatggttttgtcaaggggggatgggccgtttgaatgcaaaattaatttgccaaaccttaactgaagcagtcccaggggcctcagtagctttatggaataaaaac

SEQ ID NO: 43107 - DNA, 400 bp, Glycine max
  Clone ID: jC-gmro02910069h09d1
gggggggaaaaaaaaacccatcccggggggttttttttttcccccccccccgccaattaaaaaaaaaaaaatggggccacgcgcgggttttttggaacccccttttttccttttgggccagggtcccttttttttccccctttttttccccccttgtccaaaaaaaaacctgggtggggggacctctttggccctaaaaacctttaagtaattgccccttggaccccccccccaatttccccccccctaaaaaatcccccggggcccaccctttcccgggggggaaaatttttttcctcacactccgaaaaggggtcccgttgttaaaaccttttttacctttttaggggacccacgggggaccccttttttggaccttttcaattcccttttggggggg

SEQ ID NO: 43108 - DNA, 487 bp, Glycine max
  Clone ID: jC-gmro02910069h10d1
aaaatccccaaccaatctgtagatacagaagggcaaaaacaaaactattttttatgccctttcaagtacacatgcaaatattaaactatttcaatttcttaaccattttttagccccacagacatacacaaatgcaaaataaaaacttatatacccattaagattctacaacttctcggggattggcttgctctctttttttttttaacttccattcactttcttacaatctggtctgatttctccttgagttccagtcaaagggctgatgttacccatgttgatcattgactgagcaaatgcttcaaaaaaggctgattggttgttggcaaaattgttaacaatggagattgtggaaaagccattcttaaaaaaaagttcttgatctgtttgaaaaagaccttggttgatgaaaaaattggtgaaatatttgttgtcaaaagtgtcaggggttgaaggatcaaaattgttcaatgtagacccattt

SEQ ID NO: 43109 - DNA, 366 bp, Glycine max
  Clone ID: jC-gmro02910069h11d1
ggacatgacaatttcatatattattatacttcacaatcagcattacttttgtttgagactgaaaataaccatattacattattattattattattggaacaatcggaaaacgagggaaaggaatagaaaacaatgaacaacccttggcagttggttgcaccaaccaaagtagccacaaatcgaaatcctagaaaaatcaaaaggtaaaaaataaaaaggaccaaaccctacttagaaaagcataactgttccttgttccttgttccttgttccttgttccatccaaagggagacaacatgcaagttttgctcatggcttccacagaatggttgtgtctgcaatcatggaagtaaccacatatgggt

SEQ ID NO: 43110 - DNA, 456 bp, Glycine max
  Clone ID: jC-gmro02910070a04d1
atagctaattagctaaatatccattgaacactggcatcaattcaaaattaaaaagggggaaaaaaacctatccaaaaaaggcattagatactcttctaacaagaaacgcatcatttttaattttaatcaacctcctccattttgctgcccttagcattaacctcggcctcctccagggggggctttttagcattagcttcacctgcatcctcgtcaatgcttagtccaagctttaacattttgtggatcctgttcccaaaagtgttgggctcgttaaggttgaaaccaaaagtgagaaaagcattctctaacagcaacacaacaagggccttcacggatttgtcatttttgtttggattagcacgctttctgagctccctcatgattgggttttcacggttgatctccatggtctttttgcttgacatgtaccctgccatgctggtgttccttaaa

SEQ ID NO: 43111 - DNA, 508 bp, Glycine max
  Clone ID: jC-gmro02910070a10d1
ggtgggatattagagtactattattaatgggacacaattgagttcaacacaaaccgaacttattttcaagggacattattacagacccattaaacatcaaagttcttcaaatgttttgggaacacatccaacattacacaacgagcttaaaaccccccacggagacggaggacaaggtgaagggttgattccttctggatgttgtagacagcgagggtccttccatcctcgagctgcttgccagcaaaaatcagcctctgctggtccggtgggatgccttccttgtcctgaatcttggccttcacattgtcaatggtgtcagagctctccacctcgagggtaatagtcttacccgtaagagtcttcacgaaaatctgcataccaccacgaagacgcaacaccaagtggagagttgactccttctggaagttgtagtcaagaagggtgcgtccctcctcgagctgcttcccgcgaagaacagcctcggtggtctgggggaaaccccctt

SEQ ID NO: 43112 - DNA, 492 bp, Glycine max
  Clone ID: jC-gmro02910070b02d1
aaggtatacaaagggtcaaacacattattatataaactattaacagcagcataacctcgtggcttgtttgctatagtcaagtctagtgatgatatataggatctatttaacatataatccttaaacacctattctttttttttattcttttcatcagatcatatcacttatgattggtgttctacctaacattttccatccatgccacgttccttttggttgtaaaataagtaccatctctactttaaccatctataattcataacctgggaacctagagttgtcgggtgcaagctgatcaaaccagaggcatgctgtcccagctagatcttggaaaagtgaatagccattggcagcatccagaaattttgtcttttcataccagaaggaagcgattgattctgctctcttttcgaatataccctttttatagagtttgtaagggaaaggaaggattagtatttccgaaacctcatttgcaagtccaccttt

SEQ ID NO: 43113 - DNA, 525 bp, Glycine max
  Clone ID: jC-gmro02910070b03d1
agaaaaaaatagactagtatacattgaaaatgctaacaactgtcaccgactgaatcccccggcaaccctcgttgccatttacacgcattcaattcaagtaattaattatgaatatggacaaataccaaaataaaaagaagctaaaaggaaaaagtaaaaacaaaaaccaaaggcaagaagaagaaaacaaattaataagaccattaacacagtacacacctctgtgctgttgttgtatggtggtgtacattattacatggatcaaacggtccacttccagatcttgaaccgaacatcgacgtcacatttggcgttagaagtggacgccgtcgccggtttcttaccggagggaagactgactctgattccgtcgcaggagactctgattccgacttttggggttttcaaatttcccatcttggccttcactttggtttccaaattcactttgagtggcaacccgttcttgctcttcatgctggactttaagcgtgaggcttcgtcgctttgaagcgcctggccgga

SEQ ID NO: 43114 - DNA, 295 bp, Glycine max
  Clone ID: jC-gmro02910070b06d1
tatgagcggcggcggcgctcgactttttttttttttgtctacacacaacatatcactcttaaatgtatttatgtgtactacctaccgttcaacatgggaactgatccactataacaaggcaacctgtggaacagttatcttctccttataaagcaaaccgtttacttattagcgtttcatcgcacaaacaggatgatgtctttggatgatttatacatgcaacctttgcttgctaaatgtccaacagggcctgccatgcctgggaattgcgaggagtccagtgctttatcaaaaa

SEQ ID NO: 43115 - DNA, 508 bp, Glycine max
  Clone ID: jC-gmro02910070b10d1
aaaacacaatctcatcaaaatttattcactcagaataaaaatgggctttcaacattttccggaaacgtaggacaggtatagaattttgtggtacagcttaaagatcacaacacaattggtaaagccatttaacacagagaaacaaatgcatgaacaaatatcaagaaacaggaaagctccctcccaaattacatattcaaccctatacaagatatcctatgttacagaatgtgcattcaatatatatatttaaatgaataaaactatggttaaattctaaaccccaaaccaggccacctctttgccccctccttcttcgtccgctttgagccaggatcaataaggttttccagagattttgcttttctgtcccgtgtcttgcctgcttctttcagaagctctgccagacgacgctttttatctttaaaatcaggatttgctatcccaagcttttcctccctcagcttgagaacatattcttaagatttaatcgcttcttccactcttc

SEQ ID NO: 43116 - DNA, 514 bp, Glycine max
  Clone ID: jC-gmro02910070b11d1
aaggcaaattacctttttttattttattcaaattgtatgactgaatagggattgatatgatatcattatgccggatacttattaacctaatatctaaataccctatcaagggaatgaaccagttagtatgcttgtctgaggacaaactcaaatgaagagctttaaatgtcttgaacatgtttagtcaaaaagccatttcgacattaaaattaaagggcctgcttggccttagctaagtacttaatgttgcctcatttggcccattataaaaaggataatttgcgtatcctataacaagatcttggtttgcaaaaagagctcctgatatacttggcaattaggtgcattgagcttaagccttaaaaccacagttggattgtcacatgaaaagaccaccatttagatccatatcagtatggcctttaactacagcttccatttctgagtccctagtaaaagctacactacacatgaatggtccctcataaccctgtcttcatttatgcttaaaatg

SEQ ID NO: 43117 - DNA, 292 bp, Glycine max
  Clone ID: jC-gmro02910070c03d1
ggttgggttctttttaaaaaaaacaacggactttttgctcgctgaaattgtaggtgaagttcttttcttttttggggcccccggctgtattgtgggtttcatatttgccaccccgcaagagcacggcaaatctttctcctcctggggaaaattttttgcacttttctttgcaaaaaacgggttctttaactttgtggcccttttgggttcgggactcttagaggggggggccaaaatatttttgcgcccccttttctccaaaggggaaagggtttgggttaccctctccttc

SEQ ID NO: 43118 - DNA, 441 bp, Glycine max
  Clone ID: jC-gmro02910070c09d1
aggggaaaaccactaaaattttattcctctagcgattgaacttaataattaaaatgccaatttttactcaaatgaataaaatgaaatgtttatcctataaaattttatggacccttgatcttgaaaagaatcagtcaaaagtaaacctgtcatgggttaaatttccaattcaaaaaaaatttgggtcccccattttttgaagggttcaaacttcaattctttaaaattggagtccatcatgctttttaactcaaaaaatgacccccgaagagttttgtaataaggaaatgttattttctgcgtgaaccaccactattgaatttaacccgggggggtttctcaaactaaactttaaaacattttttaggggacattttgcccccaaggccctataatttaaaaaattttaaatcgcaccaaaccatcgcaaaccaaaacttt

SEQ ID NO: 43119 - DNA, 502 bp, Glycine max
  Clone ID: jC-gmro02910070c10d1
aagacaaaagtaaacaataaatacaaatatgaagaaaaatcgatacaaggtatcctctgaaaaccatgtcccaggaactcactgtctatcctatgaaagaattttatatcaaaaccagactctaagctactgggagtgtcctaaatacactccatataagtgaacaaatatacaaacagaaagtgtttaagttttaacaaccaaactcatataagtagaattcagaagccaaaaatccagtatctatgaggccactttcccttacacctgctgtcctctagaaccatacccatttgttccattgacaccatgtgctgtcttgttctctgagttcctcctcttcaacacaacaatccatgtgtaggcctccaaaagcacagcaatgccacccaaagctgcaatgatgccaatgtaagcatgcttccagtcattgtagcgatcccctacggaagtctccaatgcatcaaaccctttaaagaccgtgatgatactgatgattatg

SEQ ID NO: 43120 - DNA, 519 bp, Glycine max
  Clone ID: jC-gmro02910070d02d1
gcaaggctgattaggaggaaacatttttaacattaaacagggtctttttagagattatatacaaactgtacattgtattgagagcaatgttctttgatatcgtgtaccgatacatatttattagactgtccaatgagaaagctattattttatatgtgccaatctttaaaaatatgctattgggaagttagatccccataagtgatctctccactgtaagtaacatatagaaacccatctttatccttcttctcatcatatatggaatacataattgctcctgtaggtggaaggacctctgtcacaaagataaagattgccttttctgcacttatattaatccttttgcggataacattgtcaaactgtccaactgtatgattatcatggacaaggttctttttcttgtcaatactctggatatcacttttttttgtctttttcctctattccgagatacggtctgggtattcttctcttaatttctagaagccttatcttttttcttttaaaaccttc

SEQ ID NO: 43121 - DNA, 529 bp, Glycine max
  Clone ID: jC-gmro02910070d03d1
gagaagataaaaatgaatatcgtcattaataataaaaaaaagcgtcattaggtgtatgatacatagatagggtaagtaagcaaaaaaagagtagcaggcagagcttgtaatgtatgaaggaattcaatccaaagcattgggcccagcacaagccttcaaaacggggctccaaatccactgcactagaaacttccgtccattcctaccgttaagattaaaggttctcccttcaccatctttcataacggaaccaatataaccgccgccaccacccgttccgtacaacccctcgcacaaatctccgatctcggttggcgcggtggggtcctcgccggcgtaccacgcgttcaccagcgggttcgacgagagctccgacagctcgtgcccgatcacgctcaccatgccgttcactccgacgtcgccgttcggcggcgtgaggtggccggagccgtcgccgcccatgttgccgggaacagcgaagggataagcgcaaccttggacactgttttctgagttcccacccagcgta

SEQ ID NO: 43122 - DNA, 481 bp, Glycine max
  Clone ID: jC-gmro02910070d11d1
acgattccatttgaaaatgttacaataggggtcatgtggaacaaagcaattattgtcttacactatgaaacacgaaatccggatagattggcttgtaaatcaatggatatcactatgatcagaaactcaaaaactctcccgtagatatggcgcactagctgtgacagttcgcaccttttttctatccggacaaaaatcgtccaccatctcctgcgctacttaatagagctggcttgatatcgccataactgagaatagttttttgcagcaattcctctgagcaagaagcttgcactgtgaaatcattgcaacagcttatgacgcattgttggatctcgacgcctaatgtggacaaggtgtttactgcagccatcaacaagcctgtgtcccctgcacaatagatctccacccttgtattgacattttttctcttcacatcaaactttggagaaggtctactttgatttcggccggctttaca

SEQ ID NO: 43123 - DNA, 468 bp, Glycine max
  Clone ID: jC-gmro02910070f03d1
caagaacaaaacgcatggaaatatattcaatcaaaaatcaaacaaacaagatgtaagcaacacagcacgcacgcacaagagggtgcaagagttccaattatagctaaaagtattagctaatttaagcaatcatacaaacccaagttacacaaaagagaatacttctagcaagcattctgctattacaacattcgctagaaaagataagcttctttctccaagaaccgccagactcgcatgaaatcaccagacaagaccaaaatttttcaaatgtctcatgctttgctggcaatgttgttagaaagccagtccaaaccctcatagagaccctctccagaagttgcacaagtgctctggatataccattggcgttgacggagtgaatgaagtccaagcttgtcagttatttctgcagcatttattgcattaggaagatcttgcttgttggtaaaaacaagcaaaacagca

SEQ ID NO: 43124 - DNA, 381 bp, Glycine max
  Clone ID: jC-gmro02910070f09d1
gtatcaaataaataaattatttaacaggaaacctgaaaaaaaataacaacgtggaagcagttgtccaaaaataatttgttaaatattttacaacgatcaggaccattacaaaatttaatccactatcccttaaaagaaaaaatgaatttctagattgcgtcttttgctttttttttcttcattttttttgacgtgtaacactatcaaactaaactgaataacattatccatccataaagaaattttcactctgaccatcgattttgctttatttttttttcgttttcatatccatttgttattatcggtattatcccacaggtatccaaaaaaagtctttggcggcatccaaccctggaaaaaacttttgttaaaggaaaa

SEQ ID NO: 43125 - DNA, 489 bp, Glycine max
  Clone ID: jC-gmro02910070f11d1
ctctcaaatgaattcttcaacattataataagaattcgcacaaagattgctgccaaatcagtgaacaatgtcaatgcatgcttcacataatccaggtcaccaaagtgagccctttcaataatttcttgagtgtctactataacgtagcccacaaacaccaaatgcccaaagtacagctcaaacttgaagagtgcaattgagcccccaaagagagaggaagcaaagtgcaaccacataagaatggacagcccagaagaaagcaaaccaccaaggtagaggtactccctacgccttgcaactaaagctgccgcagagaagcaagcaaaagccaaagaagttgccacaaatgcactaacaataaggctaggatcaatggcaatagccaaatcattcagaggtccaatggaagcgccctgaaacaaggccgaagccatcaacagagacaaccctttttgctcttcacagggggtgtagatagcaaccaaacca

SEQ ID NO: 43126 - DNA, 248 bp, Glycine max
  Clone ID: jC-gmro02910070g02d1
cttattctattttttttttcgttgtttctaattttttctggaaaggcccactccccattgttttctaacccaaaggggtttatttctaaatgcgtgctgtggctttctagaaagagctcatatacccctcttgcccagttccctgggcgatatctaccagggcctttcgggaaaactccgggggggtttttggatttcgaagggggcatttatcaacataaccttttctagttccccaaaggggcgtt

SEQ ID NO: 43127 - DNA, 508 bp, Glycine max
  Clone ID: jC-gmro02910070g08d1
acgtaatggttgatttcttaatatgtaagcataattaaaaaacataatcctcacaccaaatgctgaaactcccacctaaactatagagaatgacagattagcattatgctatggagacaagatgataaaggctaaataattcacactatacaagcaatgccatataatattcatcatcggagaagtcggaagaatgtaaatcccaaaaagtcaaaagcactatgttgacagtagaggcaatggcaatctgctagcaacaattttattaagtgaggagacaaataccacagttgaagccaggatgtgggaagacttatttaccacagttgaagccaccacaaacggaaagaacaataatgagaatcaaggcaattatgatacccagaacaattagctttatcttcaagttttggaaccacatctttctcctaaacttggttccctgctgcctgaaaatctgagcccgagagcgaaagttctctgttttattcaacaaaagctcaatttt

SEQ ID NO: 43128 - DNA, 509 bp, Glycine max
  Clone ID: jC-gmro02910070g09d1
ggggacaaaattctgataaaatttccattgcatcaacacagtaacattgcataaccaaacaataaattgtgagtatagggagaaaaaaaaaaacgaacagtttaggtatttatgagatggcattatacattgaatggagtaatattattagtaatcattaaacacgcaaattattcatccacacccagcaagacatccactgaagggagtgattaacttaacaacactcttaagcttgaggctaatctgacttgagtggcttcacaacttcccaggtgaagtctgcattatcccttccaaagcgtccataagcagctgtattgaggaacctatgaccacccctttttaaggtccaagttaatggtgatcattccatgtctgaaatcaaaattctcctttacaatttgcagaatttccttgaaaagaaaattcccaagttcataagtgtccaaaatcactgacaagggctcaaggacaccaatggtaaaagaaaattgaacaatgcactt

SEQ ID NO: 43129 - DNA, 456 bp, Glycine max
  Clone ID: jC-gmro02910070h08d1
aatcatagaaaaacacaacgtcatatttcacatttaagaagcatgagaagatccatatatctataaagactcacatatataataattacatagagcacataaaagaagaaaagtaaagcattaagcaaccaagatcattgttcccaactagtgttgtgcagcatagtggttaataagcgagagagcattgctagtaacctgagcaacattgagcatcctagccctaatagagtccttgatcttcccattcagcgccttcccggagaatccatcgccgcaagtgctctcatcggtcaaagcagaactgacccatgtctccacgttgctaatgtgccacgtgaagtcctcacccttaaccttacatagcttgagctccttcagcgaccggctgaggcggtcaacgctgtcgctgatttcctcggcgcagtccttgagtgcagcgtgctctctgggttt

SEQ ID NO: 43130 - DNA, 519 bp, Glycine max
  Clone ID: jC-gmro02910071a02d1
aagagggaaagtgaaggataccaaacacaattacaattggcaaatacaatgtcccagtgtgaaggttattgaagtatacaaaataattcagacgtgtcaggtactagtaatactacaaccccacaatctaagtattttaagagaagctcacagcagtgaatcattttacctataaacaacgtgcaatgacttgttatatttaattatgagtttcattccataaataatgaaagggttctatttccattgcttagggactcttttaatcttgaagagtttatacattggtgcagtgtcaaagaaaagtattcttccatcccttgatgtggattcatgtttccatgccggtccaataaaccatgatgcagcaacgccaccagccaaccctcctaaatgtccccagttgtgaatcccagtggataatagcccaataaccatattgagggcaataacttgcgctatgtgctgtaaaatttttttaccacctcccacaaggtgtttgtggctcaatacaaatac

SEQ ID NO: 43131 - DNA, 386 bp, Glycine max
  Clone ID: jC-gmro02910071a03d1
aggaagcgaattgaacagcaatatctaagaatggggaaacaaatggagaaagaaaaatagtaaataggtgtttattgcattttcattaaccgacctaagagtagattactagttacaagacactttctggacattgtttaatcaggagtccaagccaaaatggcattcaaaatacgccctttccaccccagccaaacccacttgccatcctgaggcaccacaaaatgtttttgatattccttcttcaccatttctttttcatcactcaccaatagtggatcaaattggacttgcttgaacccaactatctggttcctaacctgccactgcttataggtctcaggtttttcaaccctttgagtccctttacacgctataacattgat

SEQ ID NO: 43132 - DNA, 468 bp, Glycine max
  Clone ID: jC-gmro02910071a04d1
aaacttgaagagtttcggaaaatttttgaactaacaacacctggctcctacagatttcataattgttcgtttgtcttcccttaagaagaaactaatccaaacgagaacagccttctaaatgctaagcacagttgaattcctggtttccaggtattacacgttctctaagtaaaacgtcagtgaccattggtgaccaaaccattttcactagttttctttgcatagaatctcctatacatggagtcaacttcagtgagatagaatgtgcctggagataaaaggctggggtccttgcttgttacaaactccttgccaccatacctatgttccattagcttcatgggttcaacaaatttctctggtggaaactcatgtcttgacttcaatttgccagcaacattcatcattttatcaatgtttgacaggctaaatggatgttgaccttcacgtaatagcaaagagaacatt

SEQ ID NO: 43133 - DNA, 561 bp, Glycine max
  Clone ID: jC-gmro02910071a05d1
aatatatataaacttatataaagtatttgttgttattattatgataatggttttaatctacaaaatttcaacctctatacaaaggagacccttcctgaatcactttagagaccttggattgccggaaagccttcatcggacttgggaagaaccaccctctccctttcgtccgcggtctcaattctccgtcgccggaaaccaccgataccgccgtcactgccaccgaccttgaccgcaccatcatcggatttatgccaccatcgccgtctcgttcctccgccaatatctttttcgcctcccactcttgctccggcgcgccgccttctccgccggcgtgactactgctcttctgcgacttgaacattgaccagaacgacctcgccgaccggcttccgttcattgccggcgagtccctcgtgctgtcgagatccgaaaccctatctccgccgccagagaaccgcgaccgtgacctgagaaacggaatcgccatggagcgcgagcggcggagcccaagctcttgctcgatgagggtgtggacacggtcgacggaaccgacccatt

SEQ ID NO: 43134 - DNA, 532 bp, Glycine max
  unsure (1)..(532): unsure at all n locations
  Clone ID: jC-gmro02910071a08d1
aataaaactataaatatattcacataagtatgaatgttgagtttctacaggcaagtaaaataatttataggactaatgaaatattcaacactaccctcaatggcaaagctacagtccaagtccaatttaacgaatatataatataaataaaaaagagatagcgaagaaaaaaggattagaaagtatcgttttcctctgacttctgagaaacttctgggaatcggtcccaaacggttaaacgacgcacgtgacgtctccgcgtgccggtttcggattccctacagcactacgtatctaatctaaaatgtttcattcgattagccgtcgccgcgtgtcagttgcacaccctttgatttgtcctgtgacacggactcaaccacggcgtttcctgattctcgcgatggttctggcaatccaacggctcagatttcacgtctgcagaacccacgtgatgcaggcgcagcagggtatnttcctcttctctnctcctcctccttcgcaatcttgaccacttccacttncttctcctccc

SEQ ID NO: 43135 - DNA, 583 bp, Glycine max
  Clone ID: jC-gmro02910071a09d1
agcacataaaactcatattttatgaaattattggaaataggttgtcacacttggtttattttaacatttctggttgatcgcaacacagactttttctccaaaagcaactcaagggttagtaaacactcaacatcatacattgaaaatacataaatatatgcataaacaaagtgactaattagtagtgggaggaatgagatttgtggtttccttgatcttggatatgaagaggctttgaaattctgaatccacgtgaagagatgcttgttgcacagatggtgacaaggcgctccaaattgatgcccttccacccaactcttcaaataaaggctttgtagttgtcacgatagagtaactctcaattccttcttccccagcaatttgtgcaaccacaaagaattgtggcacaacaagcaaatgaccagcctcaacttgagtctctaatgcacactttccactaaagtccacaatttcaatcttgccactttctctagcaatgtaaatcaactgaaccgtagggttgattgggtatgatggtgccttaataacccccggttaagtttcactcttatcacactaaccc

SEQ ID NO: 43136 - DNA, 468 bp, Glycine max
  Clone ID: jC-gmro02910071a12d1
gcagagagattttatgtttcattgctctcttatttgtacaattaatcaacatggagctacacaggaaatggggtcactaacaagaaacccccatgattatgatgttttaagttgccttttaagactcaaattttgtgttgagcctgcaggttaacgtaaatgaataacctaatatacatggtgtcttgaaaaggagaaatgcttcaaatcgttgcttgacgcagtcgtttgtgaagcaaggcatgtgtgttgttccatagcttttgagcttccgattcgtcatttgctaggctcgagcatttacactcattgcaatctgcaaagtattttccacttatcccttctgttttggggctcagtgctacataacacgtaattgatgcaccctgtgatgtcgttttgagtaactttgatgcaataaaaaatagggaatccgttattaagcccttatgagctctaataattcct

SEQ ID NO: 43137 - DNA, 294 bp, Glycine max
  Clone ID: jC-gmro02910071b01d1
ctgaaatcttagtccataagtcaatacccaaattaagccgaatacgttcatattgatgaattttcaagtgtcatctcacggccaagagaaatcaccttgaaatttgagcaccaggacactggaaaaaataaatacatgggggaaggagctcattccgctgttaaagttccttcattgacaacatgttggactcgggaagcgaacaaaattctccatccgactctgtgcacaacacattcttatgtcaacgccgtcaagttctgatcccaccatcgctaggtaacgcaaaaactc

SEQ ID NO: 43138 - DNA, 469 bp, Glycine max
  Clone ID: jC-gmro02910071b02d1
ggtatccaatattatttttgggggaacaggggtaagtaaaaatttcaatttatgtcaccaatgtcatgtaataaaatacaactgatgtacttggaggggaaaacactgttttacaaaaaataattaacacaactgaagcactacattaaaccatatacacactcttaacaattactgaattactgagcacgctcactttataaacaattaatgaagatgggtgaatgcgttatccatgttccttccatctacttggggcactctctattaatgctgtaagctgaaagccaaattgatcaagactgcgacaatgcttccaaacaaagccactgttttagaggcaccaacatgcctacagaacttatcgtgaacatggcaaattttattccaacccaccacatggtttgttccctttaaacccaaatttgctacacccccaactgtgcctgttgctgaggctattatcccc

SEQ ID NO: 43139 - DNA, 437 bp, Glycine max
  Clone ID: jC-gmro02910071b03d1
acatactcattggacatactctttataataaaacaagggggactactccacaaaaactgttcgtatcctaaaaatatcgagggtgacagttgggccaacgaaaataaaagaggcactatgcatatcaaatgtgcaaaaaatcggcctaaacaaccacttaggatccgcacccactcgcttattaggggcaaaaacacgcgattattttcttgtgagacagtggaactactacgtggaactggagcatgatgactagccaccagacataggagcaatgaatactttaccatctgctaaaatttaaacggctacaaactgcgagcgtcgtcaggagatgacgccagcatgctatggcatttgtgacatctacagacagatctgcttaaattagctcaggttactgcattctccaatttgcgtaaactatgagctgttac

SEQ ID NO: 43140 - DNA, 262 bp, Glycine max
  Clone ID: jC-gmro02910071b04d1
cgtagaatctacacattctgtcgaattcgagggcctaacaattttaactagctacctgatcctatcggcaacatgaaatttgatttttctcatcgcacccctaacaattggatgctatgactgatttggataaacactcttgattgtatcaagggattcagaaatcagaccttaaaggcaagctattgttttaaccatgcgcctaaattctacctccaaaccattttctatgcttatactgggattgataaaagcctccaat

SEQ ID NO: 43141 - DNA, 501 bp, Glycine max
  Clone ID: jC-gmro02910071b05d1
catcacaatcaatcaaagttgatatattagatttaattgccatatattggtgcacctgtattagtgacttacaatgggcgattcacgaagtgtaattcataagaatctcttggaagaggtgacaaaacttgctagagtgctaccatttggaatttataaacttcgttgttttacttaaggcctagaaaccaatacataaaaagggacgagaaaccaataatccaattctatcctatcccaagcctataaaatacacatacacgtgtccttcaatatttttgcggccttgcgttttaaataatacttttcccctgaatagactggaaagccatacgactggcacgtgttgcagcaacatgtgaaaccatctaaacaacatctccttggctgatcaaccctctagattatcataagttggacagactttgagatgttggattcagcatcctcggacagatcaaccataaggggcacaacaccccaatgaaagtcagagccatg

SEQ ID NO: 43142 - DNA, 441 bp, Glycine max
  Clone ID: jC-gmro02910071b06d1
actaggttaataattgaggaacaaactattatccgagggggcggattaaattaaccaatgttactcatcacagactccaatcactatctgaacgatccaaatgatactgatatctcagaaaggaaaggaaggattaaaggggatcggatagcaaatgatatacataacaccgtaatatccccgctacaaagcagagataggagaaaagccaccgcgacttcccgggaaaggacccattctgaggcacctactcggagatcaaggcagaggggaacctgttactatttaagagagtaacccacgggtggacacgaccacaggattggcggtcctgccggagctggatccgaccttggttatcttcttggagaagttcatccaatggacgacctggccgaacactacgtgcttttgtcgagccactccgtttttcacctgcag

SEQ ID NO: 43143 - DNA, 510 bp, Glycine max
  Clone ID: jC-gmro02910071b07d1
ccttatcgatggaaatttgaatcatctctgtgatgtatcccaaaagggacaatttaaagagaaacatcattccctagactcaattttttttaaaattaaaacgcacaatttcttcggccgcaaaaaaaaaaaaaaacctatactttttcaagttttcatccattaccctattactgaaaggcaaaaaactgaccctaataataaccccatcaccatcatcatcacattacagatttctgggctttcctccgctcataatcagcatcatcaggggggaactcatagcgacaaacgggacaagtgttccttatccccaaccacggcacaatgcactccccatggtaacgatgcgaacacggcaacaccttcaccccttccccagacaccaaacttatttttacagaccgcgcagacgaccaccacgttgtggttgtatgccacgtcagcttcgggaacaaccaccgacggaagactcctcactatggaggcggaggccggaggtttcccatt

SEQ ID NO: 43144 - DNA, 435 bp, Glycine max
  Clone ID: jC-gmro02910071b09d1
aaaaacaatcattgaaacttggcaataaagatcagactattgctgaatcatgctcagcattaatacaagtgcagagctattctccgtaaaacaattctgtacaaaaataacactcgccttcaaatggcagcactcatgggaatgcgatatatatattatgtatatatgaatttttatctctataaattaacaaaatcagattagtgggtgaccccttgttcttttgacaaattttaacttggctgattgttggcgcattatattatagaattggggtcactatatgcccagagcatctatgaatgcgcttccctttgcttctactttactatgctactactataaccaccaccatcttaccagttacatggctaacgttccagtaggtgtcatcttgaaccctgggtggatgagtaccatagctttttatggcat

SEQ ID NO: 43145 - DNA, 504 bp, Glycine max
  Clone ID: jC-gmro02910071b12d1
gaacacagtcaacggaaatagtcttgaatataaaacaaacaagtatatagcataggcaaatctacaagagagatctttgataaacaaacaagcatagcataaatccacatggcagatctttgattcagattttttgagattaacaaaatcattcaaatgcccattggttttcccgacgaacttcctcttcctcctcaggggtgaagtcattcttaatgttaaaggtcttgcgaatttcctctggagtcttccccttgatcatgtcggctacagtttgacatgtaaggtccagcaggctcttgatgttcaagtagttagcagccaggatgagatcgaagagcgtggcctggtcgaccttgacgaattcagcgtcccaggccttgagatcgtcctcggagggtttgtcttcgggattcgcggcctcgacgtgcttcttgcagtactcgataacctttcgcaggatcttgctcgtcacgtttcggagaaggatgccgttgtcggcgc

SEQ ID NO: 43146 - DNA, 362 bp, Glycine max
  Clone ID: jC-gmro02910071c01d1
ctcaaatcataatccaaaagtcaatacccaaattaagtgtaataagttcatattgatgaatattcaagtgtcatctcacggccaatagaaatcagtttgaaatttgagcaccaggaaaatggaaaaaataaataaatggggtaagcagctcattccgttgctaaagttctttcattgacgccatgttggacttgggaagtgaacaaaatttttcatccgaatgtgtacacaacacattataatgacaatcatgtagaggttagttcccatcatcactagtttaagttaaaataatagatacaaattgtgatgagacgctgaaccatacataaacagcatatttacatatattagcccgaacc

SEQ ID NO: 43147 - DNA, 452 bp, Glycine max
  Clone ID: jC-gmro02910071c02d1
ggcattcaatattatttttgtgggaacatatataattaaaaatttcaatttatgtcacgaatgttatgtagtaaaatacaactgaggtacttggaggggaaaacactgatttacaaaaaataatcaacacaactgaagcaatacattaaaccatctacacactcttaacaattactgaattactgagcacgctaactttataaacaataaatgaagatgtgtgaatgcctgatccatgttccttccatctacttggggactcggctatgaatgctgtaagctgaaagcccaatgagcaagactgtgacaatgcttccaaacaaagccactggtatggaggcaccaacatgcctacagaacttatcgtaaacatggcaaattttatttcaacccaccacatgggtgtttcccttctaacccaaatatgctacacccccaactgtggctgttgc

SEQ ID NO: 43148 - DNA, 237 bp, Glycine max
  Clone ID: jC-gmro02910071c04d1
agaggataaatattttgttgtatttgattgtagaactatttgaattgtatacatgtacaaattgacgaggcaaaatttttcaatcctcagcggatccctaaaatttggatgctctgcaggatttggatagaaaatcatgactctctaatcttattgagtcataatgttcaaaaggcaggctcttgttttaaccatgcgcctaaaaacttcctccaaaccattttctatgctttcaat

SEQ ID NO: 43149 - DNA, 422 bp, Glycine max
  Clone ID: jC-gmro02910071c06d1
aaacaacattaacctatgatatcagtctcaataaaccaccttaatcatccaatatgaccaaaatttaaccataaattccaaaatttaatctcaacaccagcattttaaagtatcaattaaagcaagatccaaaagcattcgaataacaaaactcgataagattaccgctcaaaacctgagcttggtgaaaaaccaccggttcttcccggttttgaaccttttctcgaggcgcttcttggtcttcttgagagcagggacctttttatcctttgcgttgagaacgtcggggttaaccgcgttcttcaagtccacgtcaagcgtgtagcgcgtgggcatgaggtgctggtatttgacgagcttaacgaacgccttcacgcgcgaatttttcgccgtttttttcgccgagtccttcttgatcacct

SEQ ID NO: 43150 - DNA, 477 bp, Glycine max
  Clone ID: jC-gmro02910071c11d1
ccccctctgggtaacatttatttatgtgaacaattctaaaagttcgaattatttggaaacattacaacaaataaaaactcaaccttaccctttctttcccgaacatccaaattacaactcccgaattattcgcaaacaaatttattaacaacagtcaatctaaactaccccgtgcaaattccccgcaataaaattgcaatgtgtgtgtgtgttttgtgttcacctccaaaacatgcactgtttgcgactttctacgtacaactaaagccttaacttaaagaacagaacaatcggtacgaattttcccatttctcgcagtcttaactccaacacgacccaatttggtcatagcagccacaaagttggagttgaaaacgttgctactagaagcgaaggaattaactgtgtttctggaccttgggtccgagaagaggatttggtccgaggtaaagaggcccttttcttgttgaaggtttt

SEQ ID NO: 43151 - DNA, 452 bp, Glycine max
  Clone ID: jC-gmro02910071c12d1
gaacacagtcaacggaaatagtcttgaatataaaacaaacaagtatatagcataggcaaatctacaagagagatctttgataaacaaacaagcatagcataaatccacatggcagatctttgattcagattttttgagattaacaaaatcattcaaatgcccattggttttcccgacgaacttcctcttcctcctcaggggtgaagtcattcttaatgttaaaggtcttgcgaatttcctctggagtcttccccttgatcatgtcggctacagtttgacatgtaaggtccagcaggctcttgatgttcaagtagttagcagccaggatgagatcgaagagcgtggcctggtcgaccttgacgaattcagcgtcccaggccttgagatcgtcctcggagggtttgactttgggattcgcggactcgacgtgcttcttgcagtactcgataacc

SEQ ID NO: 43152 - DNA, 457 bp, Glycine max
  Clone ID: jC-gmro02910071d02d1
aatggaacacggatttattatgagatatatatatgaaaagtcacatgcatgtttggcatgaatggtccacttgagataatagtaacggtatttacacaattgcaatgataaaaaagagaaatcaattggaatgagtttgtcatactaagttcccccattgcagtaatggatgccattgctgtgaacattttggtacttgttgtgcagacaatttaggccccataccctaattgttcggtcatcactggctgaggctaacatgtgggggtttgctggattccacctcacacaattaacagatcctgaatgaccagccaatgcttctattagctcccctgagcttctgtgccatatgtaaacctgtgaatcctcacttccactaacaataaaagcttgctttaggccaccaaagcaagacctgattataaaccgggcgcgtttatgacctttgtacttg

SEQ ID NO: 43153 - DNA, 547 bp, Glycine max
  Clone ID: jC-gmro02910071d03d1
agtaaaacagttttataaaagattaatcttccaaatgaaagaggggtacatttgagtcaaaacaactatttaaattgtagccaaaattaggaacaaaactaaaagctcagcgtttcccgcctccaccgccaagtttgggacctttgggcatagcacccttagaaacattgcctttccctcctgctttttgcgacttggaagcaacttctgctttcttagccttcttctcatcctttgttttcttgagcctctccttaatttcacgaagagcagcttccctagctgcatctcgaacttctggcttatcagctctctttttctggattacttccaagggcgcaccaacaatggacctagagtaaggctttttggcagcacgtattctatttctcacagctttttgagcaaagtcctttttgagtcgctttctgtacattgcataccaagggagctttgaatgctttaggcgattgtggcaatacctcttacattttgagtttgcaaacaggtaaacctgagaattaccacaacaaatctgatgcccttt

SEQ ID NO: 43154 - DNA, 589 bp, Glycine max
  Clone ID: jC-gmro02910071d04d1
gtaactatgaactatcattatatgatcgttatttatgtctgtgatacacgcaattcaggccatgatattcttacgtgatttacagcaacttctaacttatttaatacatcataccaacccaactaggagcaattttcattatacaatgacacttatctttaaactctgaagcatgacaaggtggtagtcaccagggaccatattcttatgcaatttatgccacaactggataagacccacaagttgcaacaccacacattgttttcccccattttttttggggagctttttttacccccttttttctcccagatattttttaccaaaggggggggctttttttttttcccccccccacgggggggggggggtattttcagggggggggcgcccccccaaatgggatatttttccctcttggagggaaagtggcccctttacccctttggggccccttaaccggggtaatgtatttttttttatacccttcccccccccgggttttttccccaataattttcggggataattttcaaatatacctcccccttttttttgtgggggggttctctttttgttccctactctt

SEQ ID NO: 43155 - DNA, 170 bp, Glycine max
  Clone ID: jC-gmro02910071d05d1
aaataaaaaactaaacattaattaactcagctgtgggtagcacaagaaattctgcttcttattacaagatctaccagcaaagttggaaattataagaataacaatggaacccacttattccatcgcacatacaacaaccataccatacgggatcacttatatgtagacag

SEQ ID NO: 43156 - DNA, 549 bp, Glycine max
  Clone ID: jC-gmro02910071d06d1
agaagaaaatctataccaaccagaggctgggcattatattatttattattattgactcattgtatgttgaatacacatgtaagtataacgaatcaactaccaaactccctaaggacgaccaaaaagaaaaagaaaaaaaaaatcctgagcaccatgtaaaagagcagttgatggccaactgcttggctgaatggctagaaactcagattgcagatgaaataccgtaaccgttacgatgagctttttgccatttccatgcaacctgcaaactcttctcaaggtcagtgtattgtgcggtccaattcagttccctgttgatcttagaagggtcactatacacctcggcataatcgccgggtcgacgtggaaggtagtctactttgatgtccacccctgtggcctttttgcaagcattcacaaactccttcactgatctaccctttccagttccaacattgtagatccctactttagcaggttgtgccttctcaagagcctttacgtgagcatcaaccaaatcaggtacatcattgtagtctcgtatgcatg

SEQ ID NO: 43157 - DNA, 460 bp, Glycine max
  Clone ID: jC-gmro02910071d07d1
gacaactcacaagtgaattcttgattcttaggtgctatcacaaaacaattttcatatcctatctcaggctagtgattgaggatacacagatcatatttgacattagcccctgttgaattacaaaaaaaagaatttagttctaaatactacattttggaaatgtgcaaatgcactttccaatcgaacttgtctgatgacggggtttgagaagaaattctagaagaccgctctcaattcaagaaaaaaaaaattcctgccctctcccgctacaataaaaatcttcaaaggtataataagtgatgataatttatgcaaacaaatcccaaaattcagcaaatgtataagcaattagcaagcagattcattaagcatctaacagcagacaagtgcagtagcaaactactccatcacccccctttcggtagcataagcaaccttctgcaatatcataaattcagct

SEQ ID NO: 43158 - DNA, 494 bp, Glycine max
  Clone ID: jC-gmro02910071d08d1
aataacgaacaaaatgacaattaggtttatcacttcaattggcaaaaggaattttttttcaacctgacggtcaattttgctatctcaatcacaatagattaaacaatgcaattaaatatatttttataaataaaaatataatttgatgaaggtgaaagtccttgacagattgaatattttccatgtaagaaaatcacactcgtaattagttatacatggttgttacgtacgagaaaatacgtaaaagctagcgatgaagcaacagcgcctcttccttttctgctgaagcttgagcgggcatcgtataatatctatatgatgatatgatgggtgaagggtgggtctgctttaatttcatgttggaacagatgctgttagctttgctcttagatccttgcgcaagattttgcctgacggtgacttgggaattgcatcaatgaagaatactctgtttattcttttgtaaaacaccacctgtttggagataaactgct

SEQ ID NO: 43159 - DNA, 509 bp, Glycine max
  Clone ID: jC-gmro02910071d09d1
aaagtattaactttaatatatatcatgttatctgttaaattggggtattatacaggaatccctactaaaatggacatcgcactacctcttacgaaaaaagagtaaccttagtgcatgccccccaacaaaatacacaatttaaaatacatggcagccaatcacgaccagctggcagtgatagcactaccttaaattatcattccctcatctatgcgtagaattattagacaagcaaaacaacactgcacaatgcggtccccgccgacaagatgcgatcttcagcacatacaggcacattccacacgagcgatacatacaatacaccccctcaaaaaccaacaaacaatcaaataaactacaaaccggatatcaaactcaatccttgctggttgaagtaggtctctgggcacccgggggggccggtggcctagggaaattataatcaaattgcatgccagcaaagcgcggtgcctccacataggggctctgagacgaaaaatcaggacttg

SEQ ID NO: 43160 - DNA, 499 bp, Glycine max
  Clone ID: jC-gmro02910071d10d1
attggtaatagaaggaaacagatatatagaaacttctgtgctatacatagcacatatatttgataacaatcatcattcaaaaaccacacatgttcgacagaagacgaaaaagttgacatcaaacacacgatatttcagacactctaataatcatcatctccttcaccatcatcatctccatcaccagactcgggaccaacctcctcataatccttctcaagagcagcaaggtcctcacgagcctctgagaactcaccctcttccataccttcacccacataccagtgcacgaaggccctcttcgcatacatgaggtcaaacttatgatcaatcctggagaacacttcagccacactagtggagttcgaaatcatgcacacagccctctgcaccttggcaaggtcaccttcaggaacaacagtaggaggctgatagtttataccgcacttgaacccagtggggcaccaatccacaaactggatggttctcttggtcttga

SEQ ID NO: 43161 - DNA, 367 bp, Glycine max
  Clone ID: jC-gmro02910071e01d1
attcttactgttattgtttcgtgttgggggggtgcttgtctgtgtgttgacttgtttggccaaaaaagcccaacttttccagggggaccaaaaaaagggggatagcctcaggcgcaataagctcaagatcgaagagcatctgctgtcttaaaatgtcataaacacactgaaactggctccaaaacaaatcttctttgaaaacgcggatagatccccatgcctgtattctataaaagggaccaaaaggcccacctgtcgttaaaaaaaaccgaaatctaagcgcggcggaataaagctcctgtctggggccccgatcaataagatggggggggggcccgattggacaaaggttatccaatttcaacaa

SEQ ID NO: 43162 - DNA, 459 bp, Glycine max
  Clone ID: jC-gmro02910071e09d1
catcatgcattttttcttttcactttctcggtgaagaaaaaaatcttttcatcacatacaaacataccatgagcaacaacattgtaccgatcccttaatcatgccaaacaggaaaaaaaaaaaaaaagttttaactgtcgttttgagaattgaacttcagaacttgtgtggtgggctaccatttatacttgtattacaagataaaggctgggatggtgcctgcgaggacttgacctctgaataaaattgaggggcattgctacctggtgtgctgtgtgaagtgaaacaaaacctttggggaattgggttcatggattttgttggaaagatggcagttgatggaaaagtatttgaaattgagaattttgatgatgctgcattaaagaacggtggttctgggggggcaataacctggccatttgtttggcacgcccaatttggaacttcttttgaaggatc

SEQ ID NO: 43163 - DNA, 528 bp, Glycine max
  unsure (1)..(528): unsure at all n locations
  Clone ID: jC-gmro02910071e11d1
agtacaagctacttcaaataaatttcagtgactacagtaatcaaagttaaatcccatggttccaaaaacttcctcaagtgcaagcctgtgcagttatagagatagcatgacaccaattcatgaatagagtctaagcttctctagtttccaggtacacactatataacctaccttatgacagcaaaagaaaaaaataataacagacccttttctcttctcctaacagaaataatatgaactttaccaacaccttcaaaccccagctactcacacttgatggaccggtatatgtgacgaacaaagagcagggaggcacggaatcctacgctaccgagcatgaggaagaagccatagcagatacaggccatgtaaccaaagaagaacgaagtttgcataaaaccagacatatctgatcgtgcatagtagtaatacaagcaatagccgtagatgaacaagccagttgatccaccacaaaggaaagacctncaccaccattcatgatcctcagcagcangttggaagtatgtc

SEQ ID NO: 43164 - DNA, 307 bp, Glycine max
  Clone ID: jC-gmro02910071f01d1
gtgttggaaaaccttgaaaaacccattctcttgaggggtttgaagactacaattaaacttcaatttaactgaaactagggttaccccatttctatttcctttatggggggtgggtgaaataattaacaccggcttcaactaagttttcattattatgaacctcctcctttaaaatgaaaaggaagggaaggccccagggatctggtccttcttatggaattaatttcaattttatcagggggccactttttccgtgaggattcaaccccttgtatggggggcaaatgtacaatgacttccagaccct

SEQ ID NO: 43165 - DNA, 498 bp, Glycine max
  Clone ID: jC-gmro02910071f04d1
gtaggaacaatgactataaattttcattcaaaatagtaaacaaacgtttaatattgtagcgaaatataatggtacattcatcataattatcacacacgcacaatttcgtagaacaattattaatgaacaaagaaaaacaggaattgaaacatgatgatcagtcccagatcatgactacagctataacagcaacaccagaaagcacggcgacaaacctaaacaagggagtgtcgtaacgcattgtcctctgtggtttgaagcctttggaaattaaatgattgatggcaacatagatgaagaccccacaagcaatacccattgttatagcaaacatccaatctgcggtgcttccttgtgttgtggcatctatggcaatgccaatccccacaccaatggggcttgagacagcaaaggccaaagaatatgctgctgttgttacaaagggtcttttaagtaacatccttagcaaagctattcccattgcaatagcagcaaata

SEQ ID NO: 43166 - DNA, 508 bp, Glycine max
  Clone ID: jC-gmro02910071f06d1
ataattccaatacatgcgaggccattataccatggagatcaaacaaatacattatctttagtttcaccaccaccaattatgatagataaaaaactgaggcaaccagaattttacaacaaaatgtgatgaatagaaagcactctgtacacatttgacggggaaccctttttggtgaacgcctggaaaagcaaaaagccataacgggcaggtagtttgggaaactgagattgtgtcttggagcataataaataaataaagttgttgttgttgctgctgctgctaacagtaacaagaataagcaaagtggtttttgttggagacataaggagagaggaaattggaggcagaagcagatgtagctggaaccagtatgcgtgtttttccagaacctattctctttccaactacattcgcatagaacagacctgaaaatgctggtacgaacacatcactctttgcacttacgtaaaaggcaatcactttctcaaattcagaatctagaaacttt

SEQ ID NO: 43167 - DNA, 537 bp, Glycine max
  Clone ID: jC-gmro02910071f07d1
atcagaaactattcgtagtaattttaataaaataaaaagtaattgtgagatgataatggttttttattcttttgcacgagaccgtgcatagcaagctatgtcacagacatagccttaaaactaaaaacattaaagcagcacctaaataacagctgcaaccaacgagttcaacatacactggacataacaacagagaattcaactaatattggacataacagacagactcagaaaccaccacgaaggcggaggacaagatgcagggtggattccttctgaatattgtaatccgccaaggtacgaccatcttccaattgcttcccagcaaaaataagcctctgctgatctggtggaataccctccttgtcctgaatctttgctttcacattatcaatggtatcagagctttccacctccaaggttacggtcttccctgtcagagtcttcacaaatatttgcataccaccacgaagcctcaacaccaaatgcagagtggattccttttggatattataatcaagcagggtacgcccatct

SEQ ID NO: 43168 - DNA, 282 bp, Glycine max
  Clone ID: jC-gmro02910071f08d1
atcagaaactattcgtagtaattttaataaaataaaaggtaattgtgagatgataatggttttttattcttttgcacgagaccgtgcatagcaagctatgtcacagacatagccttaaaactaaaaacattaaagcagcacctaaataacagctgcaaccaacgagttcaacatacactggacataacaacagagaattcaactaatattggacataacagacagactcagaaaccaccacgaaggcggaggacaagatgcagggtggattccttctgaata

SEQ ID NO: 43169 - DNA, 498 bp, Glycine max
  Clone ID: jC-gmro02910071f11d1
gtagtaccatgtttcaaaagtacttaattaaattagaatgtcaaaagttctttaacttaaacaaaatttattacaaatcccacgagctagcatacataaaatatacatatacacgattacaatattgcaatgtcataataactgctgtaaaaacaaaatgtcataataactctaccagtttcaaacaacacgattcctaactcaggccttgtctacaggtcaatatgcaaattatcaaacccccataggtgatatttcctgaaatgcacgtcaagcttttcaatgacccaagaactacaacgtgtagacaatctgacaatgtacatcaaggtcaactaaacctggttattcgatgcttcaagctccagttctcggaaaaatgtgcggagacagccgttaatgatgcgaggggctgctccatcacaaaaccggttagcaagaactaccgcctcattaatgacgatttggtgtctcgttctagcacttccattttggaca

SEQ ID NO: 43170 - DNA, 537 bp, Glycine max
  Clone ID: jC-gmro02910071g02d1
atattattatacacttgataaaagccataattaaagtggaacaaactgttacatgggacgggactaacactgtaaaaccagattgacaatgaaagggggaacttaacttcaaccaagcacacgagaattttgttttggagtgaggggattaataagatcaacaccacatgtacaaatagcatgtgtgtgaaataattaaaacattgtaaactctttgcacaactatttttcgtagctacaagtaggactcaattatggatgtggggatggtgtgaatagctctatgctagagggccatagtgagttcaaatttgatttctattcttgcatggcacatagctacaaggaatgcctatgacctactataataaactgattttgccacatcccgtcttttttttatacatgaccagatatacactagccttcgagtgaaggacacttagccagagctactatgagaagatgcaccttggtttgacaaaaaaacaaacgacaacgcacgttatgttgtgagaactacctcgctgatatgct

SEQ ID NO: 43171 - DNA, 535 bp, Glycine max
  unsure (1)..(535): unsure at all n locations
  Clone ID: jC-gmro02910071g03d1
gacataaatggatgtccgctttcattcgctgcagtgcaattacaagctctttgtaacccaattatacaatttatacccgctttcctgagattgaagacaacattttgatttactatataggtgtaactgataaacaagttttgaaggaacaatccaaccgagcccatttaattaataaagcaaagaaaagaaagaaaaaggaaatagaagtgacaaagcaagttgcagagtattgtaggtcatctggaacagcaagaaaaatagggttgattttgcttagatgtagaagcaccattgttgacgaggctgaccctgttgacagataactctgccttgtatgtttcggagttgagcaccttcctgctcacgttggtgtatatctctcgaattaccatctcaaatgccgtcttcacgtttgtggagtccaacgcagacgtttccatgaaaaacaagcctttcgcttgcgcaaggctttttccttcgttaacgctcaccgnccttatattctgcaagtcacatttgttccccactagca

SEQ ID NO: 43172 - DNA, 541 bp, Glycine max
  Clone ID: jC-gmro02910071g04d1
agacatcaaggatcgttaatgtaataaataaatgagtttttccggttccagatacacctaattgcgatggaaattagctgggtaacaaattcccattcgtatgtactcaagcaattttatttatcgttccacacaactttattaacagttgcatacttgcattagaatagtggataagtttcttggatgcaaagagagcatcatagccacaaaatgaactagagcctagcattacgtagttgttgcttaagcatcggttgaatatactctttaaagccatcaggaacaactgaatcattcaaaggatccttccatgcctcctcgtacaacttcggatacacatttccatcgtaacgtccaagaattgaaccaaggtagtgatcagtgtagttaaatgcatcaacaagcgcaattgcattaggacggacctgtgaatataagtttctcagctgctcactttgcagagatcctttgtttgggttaatgcagcccgtggaaagaaaatcacccagatgtttatgaagtagaaacaaagcataaa

SEQ ID NO: 43173 - DNA, 548 bp, Glycine max
  unsure (1)..(548): unsure at all n locations
  Clone ID: jC-gmro02910071g05d1
aatactgaaatctagatatcttataattaagtacattacaaaagcatgaacccatgtatagtttggagcactagcaacactttctaatcctgtcatcaaacatagcctcctttaaacaaggctggtaagcagcaggaatgaaaggcagcacttcaatataacatgagctctaaattgacaaaaataaactaataaactctactatcagttcattaaatctgtacaccaaaagctgcagatgttaagttcttttctgcgaatcaaatggatgctaaaacataaatttaacttgaacaacatacagaagttaggcaggactagctgtcattcatcgtgaaaaatgaagtttcatagcacaactcagcaactggtcactccatgtcaaaacaaaaattaacagccgctcccggaaaatggaggtatagaatacagatgcattagcagtctgaactataaatcaaaaatcaaatcaagatttcattctcaaactggctaacttttttatcatcagtcatcatcgnctgcttttcctgctccaatagtatatc

SEQ ID NO: 43174 - DNA, 565 bp, Glycine max
  Clone ID: jC-gmro02910071g06d1
cttattccctgacaccaggactcagcttgctcgggcttaaccacagaccaattaggaatttcattagctgcagtgagtatggctgcagcagcaatgcatgatggcctgtaagcaagaaagctagcctcttggatattagatacgatgatttctgtagcccgggaaatgaggaaccgggtaaaagttccagttgaatctgctttgcacgcaaagaaaacgaggaagcaaagtggggttactgatcttagcctccaatccaagacacccagaacaagtagctccatcctacgaattgttctcggttcaaatatgtacttggcaccttctatctgaaggtccaagagagatggaacaagaggttcctccatttttgctgccaaagacaagcatgcaacagatagaagttgcagaggccacccatttgtttccggcaactggctagaatccaaaaaccgatccatatagttgacggcgaggtacgccgtcaaaggctgaaagccataatacgcgtgtaccttgagaatccatgcaacggattcttctctggcgttggcgtcgagggagc

SEQ ID NO: 43175 - DNA, 238 bp, Glycine max
  Clone ID: jC-gmro02910071g08d1
ggggttggttttttttatattttctcttctcttttttttttttttctttttttttttttaaaaaaaaaaacccccgcgccccccggataaaaaaaagaaaaaaacccctttttccccctaaaaaaaaaagaggggggagtttcccccacacccaccaaaaccaattgtaaaacggccgccggggtggaaaaaaatcacaaccaccttccgccccaagggtgagtgggtaccccccccc

SEQ ID NO: 43176 - DNA, 467 bp, Glycine max
  Clone ID: jC-gmro02910071g11d1
gaggaacaatttgcaatgatctaattgaattcaggtaaattttggtaataaaagccaaagttgtgaaagtacaaaatcaaatatcacagccattgcactaatcaagtttcatactcatacaccaattttttttggaatgattgttactcttccatagcatctccttcaatcacttccaccttctccttcaacggtgtaatctttgttaagaggacctctgtctttttggggaaatcaaagccttttggattgacataggtacgaggatttggtagaaggtggttcctgagatattccttatgtcccttggttatcacacaaacatcaacattacttccacttcctaggtcattaaatataccagcccatatcgcctcaacaactagcttaatgccttcatcccttactaaactttccttgtacttagactcaaatacagacatttgagcaagtgaacctgatcccat

SEQ ID NO: 43177 - DNA, 425 bp, Glycine max
  Clone ID: jC-gmro02910071h01d1
gaggaaaaaaaaactggtatactgggtccatttattgtttttcatacattttcttgaacatccctattgtaaattaaccggtacataattttttattttttttattatattcgctggcatcataaatgaaaagggttggagaaaaaatgagttatcttaaaactgaacatccaaaattacaaaatgtcaccgcatgctggaaatatttccttccagatctgaaacattatcacgcaaacttttatctgagactccaaatggtacacccttggcatgatgaattcagacaagcctattgtaatgtttattcaagctttgtattcgctgacacgcatccatttggtacttgaccacttattacccttgatcactggacaaccaccatgtaagcttgatggatctaaagttgcatctggcttcatgct

SEQ ID NO: 43178 - DNA, 486 bp, Glycine max
  Clone ID: jC-gmro02910071h02d1
aagataaataatgtctagttttatcatgcacaacagagtatccggtcaatcatggaacaactaataagggatgcaaaaaaactgcaacagcatctttggattgaaccgcagctatcatgaagtaaatgaaagcattgcggactcctaagcccgaaatattcttttggctaaaaacaagtgatacattacataatatgcaatgatgtcacgggatatgaattatgaaataacaaacacaaactgtcaattaagacaagtccattgtacattacataactggtgcaaaaaccaaactttgtccacaagagatgaatgtgatggaaaagatgggtggtctccaaagacagtgcgacttgatcttttcaagtagagcattgtcattctgctgcggctaaacatttgcaatatggtctaacaaacagcgactacttactacttaaaaaccaatcaggcagtgatgaactcagcacgtggcctccataatcc

SEQ ID NO: 43179 - DNA, 385 bp, Glycine max
  Clone ID: jC-gmro02910071h03d1
ggaagggggcaaaaatatattttctttttctcaaaaaaagaaaaattcttttgtggccccaaaacccaaaacatgttttcccaaacaaggaccaggggtttcccccaaaataggggttggggggatcatcaaaggaataccttccaatcaaacccaacttttcttttttaagacttttgccccaaataactttttttattaaggggaccccctcaattgcggtgagaaaataaaagcatgcccccgagggcaattaacttttatttttgggacataaacatgggctttccacagagtgtttttagccttcccccccccattgtttgagccctggacccatttgtttgggcaaaaggggttccatcctgccccaaattagtgaaaa

SEQ ID NO: 43180 - DNA, 554 bp, Glycine max
  Clone ID: jC-gmro02910071h04d1
gaacaataatatacatattcctgtatatgtcaacaatcttttctatacatgtgtgatctagaataagagccaaaaaatctcagacccttttaaggatctgatctattggggcttgacatttgatctgataagaatccttgcaaccctcccataaatattacaaaaccaaaaaattctacgaaaaaaaaggaagaaaaaaatggaaaaattgaacaaataggacttctcatgtacttcaattattaggtgttgaatccaccactgcgttatgcctctttgaaggacctgaaggtggcaccggccctttggggaagaagttgaaaaccatgcttttgtatggaaaaccatgttggttattgcgctttcccttgagaatctctcttctttcattcagcttcatagtttggcctattcttattgcatcacaagaaccaataagtagcaagtaaacaaaaaggagaactagagataaggttttgcatggaagatgcaaggatttagaagaatggtaattttccatggaagagaagcctatagggatgtttaattgatgg

SEQ ID NO: 43181 - DNA, 569 bp, Glycine max
  unsure (1)..(569): unsure at all n locations
  Clone ID: jC-gmro02910071h06d1
gtaaatggtgaaaacttcataatataaggtaacaagaaagcatgaagcacttacataggtgttggaagattattatcatatgtgatacatgatagaatagtaaaacttgagcatctaacagacttttatcagttcaaacgtctccgccttggagcacgagaatctccactatccacatcagacactcttgaagcatcgttcctcctcctagaagaggatgttgacaaggataccatggaatcaatctctacagcagtgtccagttgactctctgaatttataacagcaccaatgcttgaaaaggaatctctgtcttcaactggaggaggaggttgttcttggttcctacctaatggattgctacggaaatatgcctcaactaacctttcagcggaagttagtgctgatgaaagagtagaaagtgttgctctgtgtgattgtgttcttcgaagcaaatgggactgcaccctagtccggggatcccctgcctcagaagtattaacattgntttgtgccaaacccattacatcctctgggggtgccactagattctgatgctctctacgtat

SEQ ID NO: 43182 - DNA, 362 bp, Glycine max
  Clone ID: jC-gmro02910071h07d1
ggttggggaaaaattttttatccattaaaaaaaatccccactccaaaaaaacccacccaggaggcaactacaggaccccccgggttctaaaaaaagggggggggagaacccccaaaacaaaaaaaaaaccgagcaaaaaaaaaccccccctcgggggaagaaaaacccaacggggggcaaaaaacaaaagggccccgttttccccaaaaaacaaaatgaacgggggacgagggcgaaacccccgggggaaaaagggaacggccccccacccacctacgcgtagccccacactctaaaaaaaaaaacaagggggggggaacaaaaaacaaaaaaaacggaaaaaaaaaaaggggaacccaaaa

SEQ ID NO: 43183 - DNA, 445 bp, Glycine max
  Clone ID: jC-gmro02910071h08d1
aagcttaaatggaactaaaattcgggatttcctaaatgattagtttgggacaatcattttcacttgccccgaaagaaaaagatataacaattttgactcaaaagataccatttactgcaacaaactcaattggagttaagagtaagagagacatcatataatatgcaaaactttaagaaaaaggttcatatcctcagccaattacatttattaaaagtagggactatgtccctgtgttccttcggccaacacgagcaacaaaaccagccttgattggagcaactgatcttcctgatccacacttttcacaccggagaaagaagagacgattctcctttgtaagtatagtatccggactcttgcacccaaggcaaataacgtattcattgacatatcgtcgcagaattccttcaaagttctttggtgcaaacctttcctttacaac

SEQ ID NO: 43184 - DNA, 417 bp, Glycine max
  Clone ID: jC-gmro02910071h10d1
ccagggaaaaaaaaaccccccccccccgtaaaaaaattttgggggcccccccaacaaaggggaaaaaaccgggagggggcctccaggtttaaaagctaaattttttaaacccccttcaaagggctaaaaacaaaccggccctcccttgggaaaaaaaaaccaaaaatagggggggggctttttcaaccccaaaacatgggccccccccttcaccttttttttccccccaaaacccccccccccaaacttaaaggcccaacccgggggggaccccccggttttccccccttaaaacctttaagggggtcaaccgggggccccgaaattcctcccgggtaacactttttaaaccccaacctctccctaaatattaaaaaggtgggtttattatccaagccccccccccccgggggggcc

SEQ ID NO: 43185 - DNA, 411 bp, Glycine max
  Clone ID: jC-gmro02910071h11d1
aaaaaacaatcttataaaacataatttccccccccccgaaaaaaaaaaaaagccaaaggaattccccaaattaaaaaaaaaaaaagaccttggtttattgaaaaactgaaaattaaaaataaaatcccccagcttttttaaagcccgcattatagcccgctttataatcaggggcttcagaaaccatttttccaaaaaacatgccccccaggggcccaccaagcaatccggctcccaatcccattccaaatttgtttttttttggtttttgagcccggggggggtccccaaatccaggcgggggggggtttccaaaacccggtggaggggggggaaatcccgcaccaccaccctgggggggggacccaaatccctggggggggggggttccaccatacccccggggggggg

SEQ ID NO: 43186 - DNA, 443 bp, Glycine max
  Clone ID: jC-gmro02910071h12d1
atactaacacaactctctttattaatgacaaatacagaatacattcagccactccaaatacatgacttaagcatacacaactgattaaggaatctggttccttcaatttcacatttatttaaaaccaggaacagtacttaagcaaccatagggtccttagatagagatactgttgggaattcctctgaaagtcaatccctcctcactagaaggatagagcagagtgtaaggcattttagctggcccatagcggtttctcaatgtctcatctttgttcttctctataagcttcttttcaatctcttcaagcttctttccaaacctcttaaatgcctctaatggaccggcatcagaagtccagtagtcaccaccatctctctgcccaaggtagaactcatcagatgcgtgccttgacaagatttctataactgtaaggtcaatga

SEQ ID NO: 43187 - DNA, 493 bp, Glycine max
  Clone ID: jC-gmro02910072a10d1
ggcgatgaaaattacttttttttattctgccatgaactatcattatacaacataaacgttactacaaacccagtaagcacattgcatttacaataatcaagaaattgttacaagcaaatatggtctccccaatccaatgcaccgagagcatagggccagaatcatttcttccgtcatctggttctcgagtatatggttctcttgtataaagaatggaccagcagaatattttggatggtttgtgcttcagagtccaaattgaagttcaacctcagagggaaagaccacaaggtatactggggagatgtggaaatattttggttctatagctatttacaatcttaacttaaattagtctcattcttggagatccaccagggggtgtattggctctgtatcgagatgtttcatgccaaggatcaagagcaaacgtggcatttgatgtcattggatatgaggatctgtcatcaaagggtaactactttgtcccatt

SEQ ID NO: 43188 - DNA, 576 bp, Glycine max
  Clone ID: jC-gmro02910072a11d1
aaataaccatctcagaaattttggatatatcattattcatacataataatttcaaggaagtatatacacactaaacttgtgaaatcccaagaaaacatagctcaggaaagaattttagtttaaaacattgagttccagaatcacataatcccaagcaaaatttacgggtttctaagagccgccaaacgcttctcaagttcttcaatgcccgagctgctatcattttcagcattctttgatgcgactctccctttgggagctgctgataactgtgaggcaacatttacaccaatttcatcgagcacctggtttgtcagctcttcagtctcctcttcagcttcatcattatccaaggcatcatctatggcatctgacatcatttcagtagtcatatccatctgcgctgattgtttctggaagtcttgtataatcttagcttgctttgccggttccattttcttattcatagctgccattgccttagtagcacctttcaagccaacagcaacagaagaatgtgcatgcatggcctgagtgtgaagtgctatgcctcttatctgagctcgactaccttga

SEQ ID NO: 43189 - DNA, 561 bp, Glycine max
  Clone ID: jC-gmro02910072c10d1
attcaaatgattccttaatatgttaatttcttttctttttgggtccaattttttccctggccaataggggccggcaataagataatgtagctaaaagaaaaataaatacagaaaaaggcaaaatctttcatcctatacaagaaatcaccactagtattccgattgcttgaatcgaaatctcctatgttacaatgaaattaactagttttccagaccccttgcatcaactagcggagatgtcttggcaggtaatattttaacactccttccagaactgagaaaaaaattaaaactgtatgtgaatcattcattgcggattgaataatatttatcccagagagtttgtgattttgatatttcgttcataagattcttgaacttgacactgcaatcttctacacttatgcggttcaaggatgcaatagctcggagtgcacttcgaatcatgtcttcattgcgatctactttttgcttgacagcgttttgctttggcttaaaattaatagttctttggagaggatcaaccaatgaatcaacactgtcaagactgcagaaggacac

SEQ ID NO: 43190 - DNA, 490 bp, Glycine max
  Clone ID: jC-gmro02910072c11d1
aactcaacccataagttagtttatggaatgatagtttatggaatgagttatctcccacttagacttattcaaccataatagcaagactgattcaaccatagctaatactgccacgatgaaaaaatccgttgaaattatggcgaccaatttggtttagcaaacaaaacaaagcacaccagaaaaacatctcctgctaatgctatacttgataaactacgggtctaacacattgatcattacaaccggtgagtttcaagaactgaaatcagagcaaaattttcaaaggaaactaattaaactagtaaaagaaacccagcactttcccaccaacattctttctcctagcttcttcatgatccatgatgccagctgaggtagtcaacacaatatacccaaactgttttgaggggagcaacctaacagtccaacctttaatttctttgacaccaacatcaaaacgcggactaataaccccacatttgttcagtct

SEQ ID NO: 43191 - DNA, 219 bp, Glycine max
  Clone ID: jC-gmro02910072d10d1
ggctccaaacaaagcgcataaattaaaatttatttcaagttttttcttccaaatatttaaatgagtccctattggacacaattttttccggacattttttttcttagggcatttcattatttataaacccccccaaagaaaaccattttaaaaaaaaaaaaaagccttgtcacccttttgaaatttggggtttttaaaaaaaaaaaacttccatttcct

SEQ ID NO: 43192 - DNA, 549 bp, Glycine max
  Clone ID: jC-gmro02910072e08a1
ttcgcaaccgactgcatcttggatacgggaacattgtgcttatatgagctctcgggcaggcaagggacctgctatcagaagttaccggcggagaaagacagctttggaccttgaccttaaccgtttaccggctggtgagaatcgtgagcaggagggaccttcaactcaggcggtgcctcaagaaattcaacttgaacagcagccacaggttactcaacctccgatgattgacgtggaagccattgatgatgatgttgttgaatgtaccccaagggcttttgctgaggctaaaaacaattcaagaagaattcgtaggaggactgtagttgatattgatctagaagatcagactaggcgcaacaaacgccgaagagaattgccaaatctgattattaattgtgataagtatataaatttggaaggcagtagcagttccatggggggaagtgttaaaaagacacccgaacctccaaaggagcttgtcttcaactgtccaatatgtatgggccctatggtacatgaaatgtcaacaagatgtggtcatatttt

SEQ ID NO: 43193 - DNA, 450 bp, Glycine max
  Clone ID: jC-gmro02910072e10d1
gaaataacctataatcaagccgatgtgttaaaaattggattctcatgacagctatgcaaccagaaaagatttacagtaaatttgaaatacatatgacataagacaccttcacatgatggaaggtctttaaaaatttcaggaatagaaattactttgtgattgattacattacatttattgcagaagttatcacaagacacacgggaacttggataagccgtaggaacaaactaaagtatccataaaccttgctctgagttttccaaccaggtttaatgcacatgcacccaagtgaaccaatccgaatcctttttgcttattatggcggtaacaacacaaccctgccgctcttcaccagataactcccacttgtcaaatttcactagccatgtatctgaacctaacggtgtagccaataaatcatccacccaaatcctgaactgttttccc

SEQ ID NO: 43194 - DNA, 531 bp, Glycine max
  Clone ID: jC-gmro02910072e12d1
caataaaatagattcttcatagattagaatcattagacattatttccttttatgatttggcacaatattcttccttcaacattatgaaaattgctaacatatccaaattctaagtgatatatagcataaatatgataagtgattttatttatgatgctcgtcatcatccttcaagaactgattttatttatgatgctcgtcatcatccttcacaagtaatagcataaattttatttataaaattccaccactgatagaaccgacggtgagtctttacatgcaacatgaaatccagaaaatccagaattcctgcacaagctctcaaattctttctcagttctttcctttccacttgttactaaaaacatgagactatcagcaacacaagtttgcatagaaattttgcttgaatccggaacttctggaattatatagtctataacaatcaccttcccatgttgaggcaaagctttgtggcaattccttaaaaactttcacagtcttcgcttaccaattgtgacatacaagctt

SEQ ID NO: 43195 - DNA, 562 bp, Glycine max
  Clone ID: jC-gmro02910072f10d1
aaaccataaactgtttataaaacttcgttataaattaaatgcgacttaaaacatccctcagcagcaaaggaaatggactaaaaccctatagctgcttgtgaaattcgaaatatctcatactcttcttaccatcaaaacaaaaaacagtactcatcaaaaacaaacagcaatgaaaattgaccaccgccgatcaagaacctagttttgaaagttacggctacatgaaatcggcagaaacttaaaaatataacttaaacaaaacacctaagactctgcaaggataaaactactattaaggagtaaccacgatgatgatcacatgtgctagcaaaattgcccaaatgcgatcactttttcttgggagcggacttggagaccttggctccggtggggtctttcttctcaacactcttgatgacttcgcagccacagtttgacgcatgtccctaccagaaaacgaccaaggggaggatacttagagaaagtctcaccaccatgggcttggtgggaatcatcttaaccatacctgcataaccattcttcaaaaatttgggctcctttt

SEQ ID NO: 43196 - DNA, 359 bp, Glycine max
  Clone ID: jC-gmro02910072f11d1
ctattatatcaaggtatacttttttgtgcaatggtttttacaataaattctctctctctagactctactaaaaattaacaccttaacaagaatcccatctccaccctaaaagggaaaaccaaccctttgttatatcacttggaaaaacaatcaaaccatatggtttctcatatatcaagacaccataagcctaacattgaataagttacccatataattaaacatacaaaatgctcttagatggtcattatcctagagattaataagttatcccactctgcacggtgataccttatctctccttcagaaccaatctgggcaataaatacgttccattttgtccatatactttggaaatt

SEQ ID NO: 43197 - DNA, 421 bp, Glycine max
  Clone ID: jC-gmro02910072f12d1
ggaaccaaaaagcccaacaaagttgtgcttcaaaaacccttttagcctaagcggtttttatccctgcccttggggtaaaccaattttgggccaaatttataggggaattatggggttcgttgggctaatggagttctccaaaaatttacaaaagaaaaaaaaagggggttttctaagaatggtttaacaaagaaatggtcaaccatccacgttaaacaggaaccggaaaaccctttttgggcttgctttccaaaaaattgggggggggttggcctaagcccccaattgggggggcccattgggggaccttttgaggggtattcggaaaaggtgttccagcccttaacctggataaaagggccccccatccttttctcataaaacattttgggagctttttttcgggcttgggggggggggt

SEQ ID NO: 43198 - DNA, 564 bp, Glycine max
  Clone ID: jC-gmro02910072g10d1
aactgcggttgaatcaataaaccttgatcaaatattgtctcccgattcaattgtcagtccaatttttaaaacattagttaaacctaaaatactagttataattacagttaaagcttaataggttggcctaatcattatagtagaatcactctaattagtatatccatgtgattcaggatccaaccaccagctgaatggctcagcaacccaaaagaaatagaaaactcacaaaatgaggcactgggaaacaataatagtaataaatgggaaccaaatatagaaatctagattacatgatttgtggaacattgagtagtaaaaccagtccttcatatcctttaagtttcacttttccccctttctgtatatctcatgccaatggtacaggagggacgagccaataattggtgtaaccatcaaaaccaactccactttcatttgttgagaagaaaaaatttttcagcttctggaacctatcacccaaacagtccctcatcattacctttcctaaacatatcatcatcttgatgtagcacttgacttttcttcatgtgtacaggactt

SEQ ID NO: 43199 - DNA, 477 bp, Glycine max
  Clone ID: jC-gmro02910072g11d1
aacctcttaactaaaatttagaagagaacttcatcaaatcttatttatgtcacagtcttacataagagtaataatatttaagtaacaacaagatggctacactgatatagaaacacacaatcacaattcacaaagctacatataatgggtaacatgcaagtttttattatatattattattattatgtatataacacatactagacctgccaagcttaaaatattatttagttctactgggcctacaggattacatgtgaagaaaattgcagtgaaaccctttttcggccaaaggaacttcacatgattaggggggggccaacccttttagaaggaaaataaaagagtcctgatagatgaagatgatgaggaggtttcaagctttaagctgtcattttcactggcaccaaatagagatatcaggctgtttttgaagagcattcatccctactactcctccttgcatatcctccttga

SEQ ID NO: 43200 - DNA, 535 bp, Glycine max
  Clone ID: jC-gmro02910072g12d1
atgaacaaagctagctaatcttgtttacaaggcatatatacaatttttacattcagagttggccccgttggcatttatgtatatttacaaatttacaattctcaagtgaaatgtttgtcccaacagcagcaggacagaacaggttaatatggagatagaaggggcaaaactagtgaccattgggcaagttaacaccttctctgaaaaggatgctagctactgaagatgtccatgtagggctgctagtgctagcattctggctatctgtataatgactttcactctccattgcagtaacattaatgttcctcccaaacttctttccaattgacattcctagtttcacagcagtaagaaggccaaatgcaagtagcacaggtctaactgcccagtggtgatcctctacatgttgatacttctctatcatctttggacaattcttaaaattaacgacatcaaccttggagggatcaaccaagacggtgcttggtgcatccaaaaagttcaacatgcctggaaacttgacactagacat

SEQ ID NO: 43201 - DNA, 601 bp, Glycine max
  unsure (1)..(601): unsure at all n locations
  Clone ID: jC-gmro02910072h02a1
gttcattccaacctacccttattcttcttcttcaattccatacccaccatggaccgttttccgatcctctttctcctcgccaccctcatcaccctcgcctccggtgcccgccacgatattctccggttaccctccgaagcatccacttttttcaaagcacccggtggcgatcaaaacgatgagggcacgaggtgggccgttttaattgccggttccaatggctactggaattacaggcaccagtctgatgtttgccatgcgtatcaactactgaggaaaggtggtctcaaagaagaaaatattgttgtatttatgtatgatgacattgctttcaacgaagagaacccgcgacctggagtcattattaacagtccacatggaaatgatgtttacaagggagtccctaaggattacattggtgaagatgtaactgttggcaacttttttgctgctatacttggaaataagtcagctcttactggtggcagtgggaaggttgtggatagtgggcccaatgatcatatatttatatattactctgatcatggcggncccggagtgctagggatgcctactaatccatacatgtatgcatctgatc

SEQ ID NO: 43202 - DNA, 411 bp, Glycine max
  Clone ID: jC-gmro02910072h09d1
acataaattatgtttcatcggttctgaatcacactacatatataattacagcatatgctatatatgcttgaggtgtcttaattagttccttgatgcatccaatatgatatccaaagtaactacaaactagggcgaaaatactctttgcaagcctaactatccattaattaatcaaatatatgacttccaaatatttgattattactttttcagtatctatactgaatactcttaagcttctatgtataataacatgtctagctatttgcatgactgagacaacataatgcttgcgctttcactcatctcaggtctatgccttttcatctccctctctccttgaacatctaatctcactccaaacagcattggccttacatcctctttctcctcttttgcatgtgatgaata

SEQ ID NO: 43203 - DNA, 110 bp, Glycine max
  Clone ID: jC-gmro02910072h10d1
actcttcttggggaattgcattatatgcttaatattcttgctgagcaaccaaataaaagccctcgttgctaccaaaagatatccatcgtacccacaaacctcggcaaaaa

SEQ ID NO: 43204 - DNA, 518 bp, Glycine max
  Clone ID: jC-gmro02910072h11d1
gctcaaaccatgatttagagctccctaacagaaagagagagaaaacaaagtgctgatttgtagtatcaagcatatcaagaaattaagcttgtgcaagatcatggctggttggggccactctctatttccttagccaattctcttgtcagcttgtcagcacgatcatcatgtccaccagcaaatgtatagacccgaaatgccaattggaaagccctccaaagcaacttagcatattcttttctttttccatcactaatgtttgatcctgaacctctggcagcagcatcattgcgcctttccttagtgctagctccatgcaattggaggaaacatccaccattgcttctttgatttttataaggatgtggaagtcgaattcgatgttgtggcctttgaatttcttggattcttcatctttggttcgctccaaaccatctaattctgtttttatcttattgaaataacgttcaaccttgtcaaggaactgacccatgggagtcactatattccaattttga

SEQ ID NO: 43205 - DNA, 332 bp, Glycine max
  Clone ID: jC-gmro02910073a02d1
cttgttcattatatcataaataatggcgtattaccaatccacatattttaatcctttttggagaaccagcaaatccaactaatcagctagagagctacatacttattagggcctaaatgctaactatcaccaaattttacccaaagagaacaaccattgtcatcaaataaccataacttcacaagccacttaatttcaacaatgtaagctataaaaactaaaacatgactcaaacaaaaaagcttttttctttttatcgctctttgagggagggcttttcagagccagaatgggtcttttcccaaaacttgaactgcacagatctttgttcc

SEQ ID NO: 43206 - DNA, 534 bp, Glycine max
  Clone ID: jC-gmro02910073a03d1
atgtaaccttaattacttgattaagtaccagtcacaccttattgaaatgatgattatgaatacataaaaagcaactgcgatggcaagacactactattgtatatgatgattatcttaattaagaaaggagtttagatgcaacgccgatccttgcaagtggaacacaaacgagactatgtgcccttggaactgtgaggccagctctctcttccatgctaactttggcatcatcacctttcaatatttgtccttgagggcccagcacttgcaggtcaaagcattggataagagatgcaagaagtgttgccattcctgaagtagccaaattgacaccagggcacatttcttctcccagacccaaatgggaggagttggaaatgcttgcccctaaatcaagaagccctgctttctcttcaacaccagtttttaagaacctctcgagacggaattctgatgggctgtcccagtatttggggtcccttcctacttgccaaacattgaatagaacccaagctccctttgggaacacatacc

SEQ ID NO: 43207 - DNA, 441 bp, Glycine max
  Clone ID: jC-gmro02910073a04d1
caattgtacatcatgttatttagataatagatttgggagttcataatacccgaaccataaaaaaaatacagctactcaaaatgctgtgtcttgtaaataaattacataaatttatgagacttgtttgtcttaactcttgttgtacaatagttatcttaaatgtttagtgctacatcagataatagcattgactatccaaacaagaaaacaaaaatgcttcactattttctcagacaatcttctctctggcaccaacaaagtttgtaagattttcccttgaagattggggttgaagaccacaaaaattataggagagggacttgaccactggctttgaaatcaagctggaaccctgatggttgctatgaccttaaacaagcaatacagcatttatacaaccatgattttctgggttatttggtacctgagcgtatttacccc

SEQ ID NO: 43208 - DNA, 485 bp, Glycine max
  Clone ID: jC-gmro02910073a06d1
aaacaaatgttattgtcagattattgcatgaccttgcacagttaataatttacacggcagcttggaagaccttattactaacacctacaaagacactaataatgtagctcatttaagcaattatttatctacaattttaaaggacggttataaaattacagaaaggaagcattgaagtctgtatgaaacggatggtctcatatcgtgataaagactaacagaactattacaatacacaattcgctaaagtgaaatgccacattgcaacttgccacttaacacaatttgcagttcaggtgcgtcgatgttcccttgtttaaagagcttcaatttccctcatcacttgagctttgtcggcttcaaattgataatcctctttatcaattttgaaggcttccaatagtctcagcattttacttttgttcgcaacagatatactgaccgatatcacctggcttatgttgggttggcagcaaatatcttga

SEQ ID NO: 43209 - DNA, 240 bp, Glycine max
  Clone ID: jC-gmro02910073a08d1
ccaccaatccgatgcatgacgttagaatctttggttacataattattccacgcggcgatttatttgtaagggtcccggttaacctgccaaaagccgtttatgtcgccacatgaaacggggaacggatatgacactcgaacggtctggtctccccagggaataaagcaagtacctttctttttccacatggacctcactgggaggtttgacacgctgggacattcgcctatgatccaacga

SEQ ID NO: 43210 - DNA, 541 bp, Glycine max
  Clone ID: jC-gmro02910073a10d1
gaaataatatatatctttattttgctattttcatataatatagacataccacctattttcccagaagtacattgtcatcatttcatttgtcgtcttctccaacctcacttagccactatttacatatctctaccccaaaacttaggtataataatttaccttagaaaccaaaccctataagtccttaccaaatatcatcaccttaactaaggttgaaaaagagccttgcttattttgctacacgccattcttttgatcactgcaccatcaactatttcacaggggtcttatttctacttcttcagccttttccagttctgttggactttgctatatatacaaaacgctagaaaccactacaagaagaaaaataaaaagacggacggtgacacttccaaataccggccctaggaaagctcgagtattggactttgatgaaacgacgtcgaaacacttgctttagtatactatggtatttttatacctaagggcattgtagccaataacctaaaaataccaactatctaatattctatgatta

SEQ ID NO: 43211 - DNA, 343 bp, Glycine max
  Clone ID: jC-gmro02910073b01d1
cacccctattcattctttttataaactctcacacctcattactctcttctcttcctgctaggaaaatctacctaaaataccaatttaacaacccccccccccccaaataaaaaaaaaaacacccccaatacttttcccttcaaaaaaaaatgtgttttcttctaacacccgggacaaaaaaaaaaaaacccccccccttcccctcaaaaaaaataaataaaaaacaaaggtgacaacaccccctcaaaaaaacaaaaaaaaactccccccgggtaaaaaaaaaaaaaaaataattttattaagggcccccacaaaaaacccccaccccctttatcacccccca

SEQ ID NO: 43212 - DNA, 302 bp, Glycine max
  Clone ID: jC-gmro02910073b02d1
acagaaaagaatcattttattgattattactgtatttccatttttgtaaaattacttactgaatcgggcacagatttcactgccatcttattacataaaaccttcttatcccaccaacacaaccttctaactgaatctaaattgcactatatattggtttcactagacttgaaaaacttttgttctcaagtccaagacccaaatccccaagaagaaaaatcgagaaggagaaagaaaaaaagaccatcacaaaaaccgtggggaaaaccaaatccatagcagctgctgttattacccatttc

SEQ ID NO: 43213 - DNA, 495 bp, Glycine max
  Clone ID: jC-gmro02910073b03d1
ggaggggaagggggggaaccgatttgatattgcatgttttttagggtacaaattcatgtatttggaaattatggagcaacataatattgttgcatatattttgaaagaccaaaatagaaagataccctacacagcagtttttgagaacttgtaactatgatgaaaattggtcaatgctcacatcaaccgacatttcctgaccaattcatataattatttgacaacaatgacacctcatgggaaccattttattcttccacacttcacaaagttttggacttggctggggcagaagcaactgataacaagatattagagacgaaacaaatccaaatgccccagtcacgcgaggagtaactgtcttgggtgccaattgaagcagtccaactgctaccactgtataaattcctgctttgataagagatagagttctctcatttgacttgtttagtttggcacggtattgctcattatcatatttattcttggtcttga

SEQ ID NO: 43214 - DNA, 399 bp, Glycine max
  Clone ID: jC-gmro02910073b04d1
aaaaaataaaactttaggcgcgacatattattcacatacagataggtattacatctaaggtcccctgttatttattatgctgatcggcaactaaaggattaaaattcaaattactgctatctaacgggggaggacattatttccaaagcgattactttgcagagccatttaaataaaaaaaatccccatggagaaatccaactcaagcagcagtacgtaacgtagtccttagatggggatatgctggagtgtcccagtcccactatcttttttagtcaaataaacccgcctttgaccttaggtgctccttgaaaccatatggcaccttcccatctggtcacagtttgaacagcacacaccccttatttatgggcaacctgatttatgagccttaaatca

SEQ ID NO: 43215 - DNA, 484 bp, Glycine max
  Clone ID: jC-gmro02910073b09d1
agtaggggaacgacgatgaaagtcaacataattcataacagggaacaacctcaaagatgtaaatccttgtgtgttatttagggtacatttaagaaaataaaatgagcaaaggcaaatgaaacagagaattcctttttaatgactaatatggcagcaacgtgccatattcaaattcttccactagttgcccatttcattttgtactcctttaacagctacagcttgctgaaagcatgacaaggcgtattgcacatcacttgctgatatttggtgatggagaacaactctcattcttgatgaactctcttgcatcacaaggataccacgttcttccatgtacttgcatatcttttctgctctagtctttgtaccctcttcaatgtcaataaataccatattggtctccacagaacaggcattcactctcaattctttaacttcgtttatccatcagccaaaagtctagctttcttgtggtcacttt

SEQ ID NO: 43216 - DNA, 454 bp, Glycine max
  Clone ID: jC-gmro02910073b10d1
ggaaatggaacagggagttgatttgtgttacctttcccgaaaaattaagaaaaatatttgggtttctgatctacactccttacgcaattttttttttcaaaagggggagggaaaaattacaacaacctggttcttcaaaattggcctaatgcccaaactaagctcaaaatttatgggcgggagtgttttttaatggccgcccctgtctgttaagtttcaatcatttcttcaattatctctccttggtggcccccgacgtgcaggggcagaagaatcctccttttctttggtttcctcattctcaccactggcttggctagttgcagtttctggtgggtctacgtttgtgttttccacccttgggggcttcttttttccaccaatatgagccttaagaaaactggcacgatgaccaccacaacggtttcaacaattccaacagtgagatttgggt

SEQ ID NO: 43217 - DNA, 446 bp, Glycine max
  Clone ID: jC-gmro02910073c01d1
aaagaacaaaatatactctaaatacaaatgcattatatattaggccatcatcagttttttagtactataaacagtcaacagataaggaaccaatttgcagctcaagatagtcaaccattgggtcactgtaataactttaaatgaataaaatgaagtgatttccaaatttttttcacccttgggctctcaatcaatgacataattaggagccactgctaaaattcggtaatttcttggtgcgcctgggggttttgttgttgctgccgcggcttccccattatctacaactatcaaatggccctctctccgaattaagctctctataatagctttaattttggaaattttagcttgcacctcatccatcgaactgtagttgtttctctcattttgtggggctacgtaccattgaatcaaatttttttgcctcattccaaacaaaccgt

SEQ ID NO: 43218 - DNA, 335 bp, Glycine max
  Clone ID: jC-gmro02910073c02d1
gggggataattaaagaatcaattatgaaacacgtttagctatttctgtaacaaaattcttcatctatattctgaaggtacaatcatgctaattagatcctatagaccatcacctagaaatatgacacaggattggatgccctgcagctttgaagtcatcataaaacctctgctcggaaaacctccctgcccgtttccttgcaggtgcagccatcttaagtctctccatctccggcatcgatacaattctcaccatggcatttgcatattcttcaacactggaggcaagaaatcctgtctgctggccttcttcatctaatacaatgtccatttttg

SEQ ID NO: 43219 - DNA, 420 bp, Glycine max
  Clone ID: jC-gmro02910073c05d1
aataaataaactcaactcttcattgataactcgcaaaagccttgaattgaaatcattcacctttgtcaataaattaatcctgacttattctcattgaaaacatgttacattgggaaaacgagacaactcaaaagtttacatctctcctattattctttgatgtgggagagacaaacactgtaaccaaaacaatgcaccagtaattagccgagaagcagcaatgttgcatttgcagcaagaagaacacagccctacaaataactccactgtggacttggtccaccttcctggttaaaagctctctaggactagtaacgaagacttttctgcttcaatctgttgatctagtaggtatacaaaaaaatgaaactagtgttacactgatttacctttgacattaaccacatctttaggactcct

SEQ ID NO: 43220 - DNA, 470 bp, Glycine max
  Clone ID: jC-gmro02910073c06d1
ggcattgatttgaactgatgagaccagacgcagggcctgcaaactaaagcactgacctgaccattttattcaaatcaacaagtattattattataccatgtttggggacatcaaacactgaaacacataatgctcggaggttgcctattttatgtgataaaataaagtgtcgtaacacttcagaatttcagttacaattctagtcatctgaaacatactttgatgcaataatataatctgcaatgctaagaacaggactagaccagaacacacccttccatcactttaacagccttcccacgcaaaagcaccctttggttctgctcatcaagatgaacattgagaactccccctctggctgatgcctgataagctttgaaatcacacttccctagcttcttgctccaatagggtgccaatgcacaatgtgcacccccacaaacagggaccctattgacttcaagttttgg

SEQ ID NO: 43221 - DNA, 539 bp, Glycine max
  Clone ID: jC-gmro02910073c08d1
gatagggtgtaattaagtacctaattttgaaatcattcaaccgtccaaaacagaaattaccaaagccagagaagagacaaaacagcagaagaaaactaagaacacaaataccaacatagttttatactacaatttataaaataaaactaaaacttaagaaaacgccatttattaattattagccttctagtaaattaagtgacggttgggcacaacgacgtcgtccagcattcacaggtcatccatgttgtcccactcagcaccaatgttgttgctaacaggcagctcattctccaaacctagaaaccattcaatttgtttcaggtcgagttcgtcgtttcctacgccgctttcgccggtggatccagtggtggaatgtgagctgctgctgctttcttcagtgatgatgtcagggctgaggcagcgttgctttttggagggtggcggaacggcggcggcggcggaaatggtggtggccgggaaagtgagcttggacttgtcgccggagatgcgtatggcggcgtcgtcgtaagcttggg

SEQ ID NO: 43222 - DNA, 242 bp, Glycine max
  Clone ID: jC-gmro02910073c09d1
ctactcctctggttatgggtggattttttttaaaaagaaaaaccaaccccattcttttacaaacatgaaccaaaacctccccctccctcaaaacagtccaatttatttttccttttctctcgcttcctataaaagaagctttatgcttaaacacctaccttctctcctttttttctattggctcaacgccccaaaacctacttctggaaattatatataaagccccggcgtcccaatctcca

SEQ ID NO: 43223 - DNA, 482 bp, Glycine max
  Clone ID: jC-gmro02910073d01d1
aatcaaatcaaaattttttcgcagggggaatcaaccaaaatatattggtatatcttacatcttcacaaaaaaaaaaaaaaagttgttcccaggggggaatttgacaaatactatactatctcacgcttaggcatttaagagttttctgattcctgctttttgctcttcagggagcctagttgggaacttgatgttaaactttatcctcaaattccccttctttgatggatcttttggaagtggcattccttctcttgggacaaccttttcataagtgggatgaataacattgttgattggtatggttaagtttctaccatctagggtagtgaggtgcactgtataaccagttaatgcctttgcaagagaaatcttctgggtgacaacaaggtcatttccggcacgagtgaagacgccatgcggttttttcgtaatgatgaaaacaagggcctgaggcatcacgtttgggtgttcatttccct

SEQ ID NO: 43224 - DNA, 295 bp, Glycine max
  Clone ID: jC-gmro02910073d02d1
atggcaaaaataaggaaatgaattggttttcacatttgggggggggacccccactttttttatcagcaaaacacattttttggttagggttaaaaaactttgaactaggggaacatattatccactaaaaaatttatgccatgttttaaaaacaaaccttaacaaaatgcattttgctagaaattcttaacaaaaccctttttaaaaaaatagtccgtggaacctaaaaataaaaaacaaaacccggggcttcttttaagggttgccctccccctggacctttttaatttttttt

SEQ ID NO: 43225 - DNA, 507 bp, Glycine max
  Clone ID: jC-gmro02910073d03d1
atgattaacgaaataattttggtgtgtagattaaataaacacacgaagtacaaataaacattggtctctttaatcacaaaggagattaagtccattgtggggtgccttcatgactgaattataccaaagtactacccttaacatactcagtaaaagccagagcaatcaaacccaacatagcaaatttcccattccacagttttgcatttgaggacatgaaccctctggacttagactccacgctgacaccttggaagagtggaatcaaggaagcaagggtaaggaccacacttgtccccaagaaccatgggatgccaccattggatatttgttctaacacaccttgccctttggctacttccactggcattgcagccacaaacccaatcatggccaacctttcattgatcctttcaggtgctggcccactgaatgccaacacattaaaaaaacttagtgctcacttttggtgaaggagcaaaaactggctgtggcttgggttctact

SEQ ID NO: 43226 - DNA, 166 bp, Glycine max
  Clone ID: jC-gmro02910073d07d1
ggagattgaacatcaatttattttggctaccggacctttaaaatttactgcactggttactttagattgaattaaagatacaacaattgtaaatgaaaaataaccctcggctactttgtgttattatgaacaattactttttttaaaaatctcataacattatctt

SEQ ID NO: 43227 - DNA, 464 bp, Glycine max
  Clone ID: jC-gmro02910073d08d1
ctaataaagaacaatattttacatggggccaaaaagaacaaactaaataaacttatccaaaaataagatttgacaagttttaaaacttgctaaagtttttatgaattaagatatgaattcaccctgcaaatttcctttacagcgccttctcttgaattaaggttcattaaaattaccctacaccttatattgcctccagttttcacaaagatttttttttattttgaaaatatgttaagacagcactgtttggtaattcttgggagatcccaaacaacagacattcttggaggtcccaaacaaaatacctagcagcaaaactttggatttacataaatttattcaaggggaaaatcttctacctactagtcttaagtttccaacaaaaacccaacaaaaagcccataaagcattaataattgtgaagaaaaggaatggaagtccctttttgccagcttttttta

SEQ ID NO: 43228 - DNA, 476 bp, Glycine max
  Clone ID: jC-gmro02910073d09d1
agaacaaaacgcatggaaatatattcaatcaaaaatcaaacaaacaagatgtaagcaacacagcacgcacgcacaagagggtgcaagagttccaattatagctaaaagtattagctaatttaagcaatcatacaaacccaagttacacaaaagagaatacttctagcaagcattctgctattacaacattcgctagaaaagataagcatctttctccaagaaccgccagactcgcatgaaatcaccagacaagaccaaaatttttcaaatgtctcatgctttgctggcaatgttgttagaaagccagtccaaaccctcatagagaccctctccagaagttgcacaagtgctctggatataccagtggcgttgacggagtgaatgaagtccaagcttgtcagttatttctgcagcattcattgcattaggaagatcttgcttgttggcaaaaacaagcaaaacagcatctttaagtt

SEQ ID NO: 43229 - DNA, 484 bp, Glycine max
  Clone ID: jC-gmro02910073d10d1
cttatgacattagctgagcatcacttttatttattcatattctgtgatgattcatacgggaaatatatgaatccccacagttttagtccccaatacaaagagcactagatcgactcaccacaaaggaacattcttagaatagcacaaaccataaacaataaaacactagtaatctagtcactatctatattcctgaaatcagaaagtgccttttttcattttaaccaagctgaatttcggagtcaaagacagctccaccctcccaatcactagagataacattctcggattgcacccaatacttctctgcattaccactcaattggaacctcaactttatgtcaccccttggagggttctcagcgtcaaacacagtcccaaatgccctgcgcattcgcctccactcttggcaatcttcctgccacaattcaacagcagttacgtcgtaagttccaccaagatagagaatgacaatggctaagta

SEQ ID NO: 43230 - DNA, 476 bp, Glycine max
  Clone ID: jC-gmro02910073d12d1
ccaacaatgcacgcgtcaagttcgaaatatgatttacattaatgacacaagcggagagtaatggataaaggttccggtaaaaatgccaaatgccatgaatctttacacataaatccggggacaaatatgaatcttgaagggacttgattcacaagtgaatagtacaagttgttgtatttttcaagttgaagcttaagggcgggtttaaaaggctgggacagcccccttttaaccaatgatgacttctccattaattaagcctgccaaacctcctccaatcaatgtgccaacccaataaatccagttagtagcgaaatctccactgaccacatcttggccgaatgagctatctgggttcattgacccaccacttaatgggcctgttgataagatgttggcacccagaactaacccaatactattgggtgcaatgatgcccaatgaccctttttttggttcttgtgcccttgtttcgg

SEQ ID NO: 43231 - DNA, 324 bp, Glycine max
  Clone ID: jC-gmro02910073e02d1
ggacattgggggcccaaccaaaccatgggtacaatattttatttcaaggaaagattttatttaccaacctaacattcccaaccaaaaaataggttagataacattgtttaaaaagattggaccacttgcaaaaattttttttgacaggtgggtgtttcccttgccaattttgtagttggtgaaggtttaaaaaatgtttttgaacaatccagccaacataaaatgtgtttcctttgaaggcctttttgtttgaccaagtttttattggatccaaaatttctgaagggccacccttcacttgggggggaaattccagcccaaaaa

SEQ ID NO: 43232 - DNA, 486 bp, Glycine max
  Clone ID: jC-gmro02910073e04d1
agcacaaaaatcaattatttgaaatatttaagatctgctgcgtctaaaactagtttcaatttaagtatgtacatgaagaaaagtggaccattagaagaaacaatcacagtccaatgtatataacctacaccatttcagctctgaccactataatttggacagatttctgattttatttaatattcaacaaggcacttgaacaccactgatttcatagtgaccaaccgtggaaatcgacagaagagaacttgccaacattgtctgctactgaccagagttccccaatagccgttcaactgcggcatgaacattacctgaagtggcaataagggctctaatgttctcttgtgaatcaaagaatcccatctcttgaagctgtgaaagttgggaggcatacagctgctccgggggctcatttgatctatttggaacagctaggctaccagctccaagttcaccaaacatgctcgataacatctccatccc

SEQ ID NO: 43233 - DNA, 541 bp, Glycine max
  Clone ID: jC-gmro02910073e05d1
aaaagaacaagaaaattgctactcttatagaaagttttacacaaattacattggatcattttatatgaaaagaacacaatctatcctataagtcaaagccacccttggttattccactacgttacactttttcctatgccaaaacttgtatggcatcatccttgcctccttggcttcgatgccacaaaccacaaaactaatgaaaggtgggaaagaaaaagactaacctaagataaatttctctgttatcaaaggaaatggacgaagagaatagatactggacgtgaagatctggacaagacaggcatcgaaaagatgcactaaggtttaggggctaaatacatgtacttaaaagcaaaggagtgagagaagttaagaacccggaaactaagatatgaatcatggagtcacctacacataaccatgttagttaaagaaggcacaactgaagaactgtagatggaaggatcccccacatacttgcagtcattatgatcaacttttaatgatgccgggatcaaaaactgtcaggagcattgat

SEQ ID NO: 43234 - DNA, 452 bp, Glycine max
  Clone ID: jC-gmro02910073e09d1
aagtcaaatctattgatgcatgattcgtaacttaagcgcaagaaatgcttcaatataatgtaatgatggaagtcttccatgatgaaattcaaacattaaaagcatgtggtggagccaaccttaaacaaatcaaataaaaacactaccaacataatcttgactgcaaagtgcaaaccatttcaatgttatacatagacatcatgttttctcgactttggggtcataatcataatttgatattacccacaacttattaatgttagcttttggatacctatcacagccttgaaggagactggtaccagccccacggttcatcaaagatatattgggtcacttgcttcacactcaagtaattatcaagtccccatttcttctaattcacgaccaaaaccactgcgtttaatgcctccccatggggcttgagtgaagcatggttgagagcatataat

SEQ ID NO: 43235 - DNA, 498 bp, Glycine max
  Clone ID: jC-gmro02910073e10d1
aggcgattaatagaggtcctaatttttattgaagggggctcatgatatttttttatgattcacataacaaactccatttactctatgaacgaaccacatgatactgatattttagaaaggaaaggaaggattcaaaggggaagggtttcgaaatgatatccataacaccgcaatcccctaaacgacatgggaaagagaaaaaaaaggcaaaaacgacaccgaaagaaacgacacattcagagccaccgacacagagataaaagcctagggtcaacgtcgtctatctaagagagttgaccacagtcggcgacgacgacaggcttggcggtcctgccggagctggatccgaccttctctatctccttgacaacgtccatcccctcgacgacctgtccgaacacgacgtgctttccgtcgagccactccgtcttcggcgcgcagatgaaaaactgggatccgttggttccgggaccggcgttcgccatggagaggatgccg

SEQ ID NO: 43236 - DNA, 555 bp, Glycine max
  Clone ID: jC-gmro02910073f01d1
caacaaatggttcttaatctcgtgatcttttgaaaacacgaaaaaaagcactgaaattttcattgcacatgacataattggtacagaaaaattggtcaagtactgctctctggataattatttttttaacaaaaaattcttcgttgtgaaatgacaagtacctataaaatttgacacggcacattctgcttaaccatctgaatcatagatttacgttctccaagtaccacttgtaggtatcagcaagcccatccttgagtgagacttttggtgtccaacccaggcttgcaagtttggagctatccatcagcttccttggagtcccatcaggcttagtagaatcccaaacaagatccccttcaaatcccaccacttccttcatcaactcagccaattccttaatagtaaccttctttccactccctacattcaaatgctccagtccgctatacttttccatcatgaagacaaccgcgtctgccaaatcgtcaacgtgcaagaactccctcaatggactttcggtgccccacaccaccaccttcttagcaccattga

SEQ ID NO: 43237 - DNA, 333 bp, Glycine max
  Clone ID: jC-gmro02910073f02d1
cgggaaacctaaaaaaagggggggggcttttataaaacaaaagaaacacaagccaaaaagggccggaaaccgtgggggttaaaaaaaaaggaaatggggggttcccccaaacccaacatatttaaaaccaattaaaaaaaagcttttttcccccggggaaaaaaaaacccttttggggaaaaaaaatgggaaaaaaagggggggaaaattaaaatttggggggaaaaaaagttttcttaaaaaaaaaaaccattgggttcaaaaaaaaaccccttttttttggtaaccaatatccctgtggagaaccccccccaaaaatacattttttttttt

SEQ ID NO: 43238 - DNA, 499 bp, Glycine max
  Clone ID: jC-gmro02910073f03d1
agtaggggaacgacgatgaaagtcaacataattgataacagggaacaacctcaaagatgtaaatccttgtgtgttatttagggtacatttaagaaaataaaatgagcaaaggcaaatgaaacagagaattcctttttaatgactaatatggcagcaacgtgccatattcaaattcttccactagttgcccatttcattttgtactcctttaacagctacagattgctgaaagcatgacaaggcgtattgcacatcacttgctgatatttggtgatggagaacaactcttattcttgatgaactgtcttgcatcacaaggataccacgtgcttccatgtacttgcatatctattctgctctagtctttgtaccctcttcaatgtcaatatataccatattggtgctcacagaacaggcatccactctcaatcctttaactgcgttaatccatcagccaaaagctagctttcttgggtcaattttcacttcccacattttc

SEQ ID NO: 43239 - DNA, 494 bp, Glycine max
  Clone ID: jC-gmro02910073f04d1
aaatcgcattttatttatataaattcttcctaatgcttgtaacagccaacacacagtttgacaagatgtcatttccaaagccaaataaaaaagcgacaacccaaaaaacaattgtagaagagaaatatacttcttgaaaaaggtaagttccatagaggatgccataactgattcagtcttcatattctgtttcttcatcatcatcttcattgtttcctcctgcatatctccaaccatcttcaacattgtcacgatcctcttctgtttcttcactatcttcttcatcgaaaggttcatctttcacgggccaagaatttttatttacagttaaagtgggagtggagactttgcgttttgcaattttggaaggaggcaacttgaggtttggttttggcttactctgcttctgaattttaccatttgaccgtttcgcaacataggcatcatggtcactttgcttatccattttattgccaacattagcctgagcatgc

SEQ ID NO: 43240 - DNA, 285 bp, Glycine max
  Clone ID: jC-gmro02910073f07d1
aaactatatcaaagctatatcaatccattgagtgttcttctattcattctaaagactcattacagtatctggtgaaatctcaacttgaatctacctttcagatttcagctacaacaactggacgggaaagagcttactagacattggggggactagtccctactgacagtttatttatgaaccaagaaaatcacaaaacaaaaggtgaatactacagggcgggagcacctttgtaagaagctttggggagttgtactttacaaaaatgccaccttatatcatcct

SEQ ID NO: 43241 - DNA, 458 bp, Glycine max
  Clone ID: jC-gmro02910073f08d1
gtatataagtattttttttcaagaaaaattactgctcataaatcaactatatctattgctagccgcttggttggcttcactggcaagaatttcatgttgacagccaagtattatttggagtatgattttattatgtcagattagttacatgctcaataatattattgtataaaaaagagacctgttacatattacatacattgaacatacaccaaccataaattgaagagggtagaaacttcatttcatgcatacaacttctgaagctcatctttgaatttggctttcagctgctctctctttatcttgagagctgcagtgaccaatccagattcaggagtccatggatccggcagcaacttaatctttgcagggatttcagttttctccagctttgcagattttgcaaccttggaaatagactgaagaacctcagtgacagtttcaggtttgttaca

SEQ ID NO: 43242 - DNA, 372 bp, Glycine max
  Clone ID: jC-gmro02910073f11d1
aaagacgtaaagccataccaaaactttgtatatgggtcgcatccattacatgtttattcaatttattttggccaaataggaatgagaaatcctgtcacagaacatttaacaacatagcggggaggaacataatgtaaattcaccaaaagttgataatgctatgtcatcatagcttttttcagcaaacaacactcaaaccactatatacaattacaacgatgaccgaggatgttcataaatataaacgctaagtgtgacatccacatcattaaaatgttcaaggttagacctcaatcttagatctaaaaccaaagatgggaaatattttgtagtgtttgaatcctgcttcgatgaaaaattgattccattttt

SEQ ID NO: 43243 - DNA, 541 bp, Glycine max
  Clone ID: jC-gmro02910073g01d1
ggcaaggagagtcccatataacataagaactaaaattttgatgacaagatgaaagccaataatgttaaatgtgtactaaccagagaaagtttacaaattaacaatgcaaaaacacacacacaaaaaaaaaaaaacataatcacaaatattatttatgatatgattcatttggagcctcaattcaaagcatgccatcaacacaagatggcaaccttttgaagaaattactaggcatcgagggtagcttgcttctgaacctggggtgcctgagccagaaaatgccagcaactgaagccacaaccttgaaaggtgtcacatacaatgccacagcaacaacaaggcaaaaaatcacaaataggcttgtggctctagggtctctccaactaagcaatgcatgaaacctctcaccttgtgttgcaatatctccaaccacagtttgtatcctcccagccacactcctaagcctatcatacctcattctgatcacatcttgagcctttgaggtgggaaaagtataaaactcctcattaagttcatttgg

SEQ ID NO: 43244 - DNA, 568 bp, Glycine max
  Clone ID: jC-gmro02910073g05d1
gttataataatcatccaaaataatcaggaaaaaccctgccaaagagtgaactttacaaaataattcacaatttagatatgtacatttagaaaagagacaaattgagaatgaagattgaataagaatatatatacatacactcgcacacaggatatttttattcaattctatccatcagattatttgtcgtttcccattccactgacaatggtcatttgtgagtcattttctaccgccttcaaatctacagatatcgtaaattccactgcctccttttaacttaaatcaaagccagcatcagcatttatggcatacagtaatttggtttccaattgctccttgcttgtataaggcggaagctttagtagattcatacaagtagccgatgttggtaatcggtcaagtgattcttcaacggcattaccggaagccctttgtatgcaaaacataggttcaagatatcggaaaccaagcaaaggcccacgagagcaacctgtcacaaactttaaaaatttctttttgttttccaatgaaaagccttgagaacttcccaaaacatttcataaca

SEQ ID NO: 43245 - DNA, 443 bp, Glycine max
  Clone ID: jC-gmro02910073g08d1
aatcatcatcccaaacatgatagggagtaattaagtgcctaagtttgaaagaattcaaccgtccaaaacagaaataaccaaagccagagaagaggcaacacagcagaagaaaactaagaacacaaatgccaacatagctatatactacaatttataaaataaaactataacttatgaaaacgccatttattaattattagccttgtagtaaattaagtgacggttgggcacaacgacgtcgcccatcatacgcagggcattcatgttgtcccactcagcaccaatgttggtgctagacaggcagttcattctccaaacctagaaaccattcaatctgtttgaggtcgagttcgtcgtttgctccgccggtttagccgggggatccagtggtggaatgtgagctgctggtgctttcttcagtgatgaagtcacggctgaggcaa

SEQ ID NO: 43246 - DNA, 503 bp, Glycine max
  Clone ID: jC-gmro02910073g10d1
aaagagatgcatatatatgactctggtgttatttttgattttgcaaattaaattacacaatcacagccgtacatcacacatgagttgggcctcttccaacttaaaagcagaggataacattggcccatgacgcgacacatgcaccacctaataatcataattttacatctttacatacaaaatacaaagactttaaattttaaaaagaagaaaagagataaacagatcatcttaatgaaatgaaaccaaaacccacaaacattggcttgatttttgttgttgttgttgttcccaacttgattaagcatgaaccgtttgattgaatcacttggacttgaagggaatggccctaattacgacctggtggtagagtgctgcaagagctgcaccgatgaatggtcccacccagaagatccagtgttcatcccaaccaaggtccttgttgaagatgatagcagcaccaagactacgagcagggttgataccagttccggtgatgggga

SEQ ID NO: 43247 - DNA, 424 bp, Glycine max
  Clone ID: jC-gmro02910073g11d1
gactcgtataaacttggggggaaatataggccatttgtattacaacgtaaaatgtaacatctatcatagagaattgtactgtgaaaatttcaagttcggacactatacaaagccgtaaccaaaaaatattttgtaaatcaattgtaatttttaaagagtacaggctaccgaaaagttaatctaggtagactgatttaatttgtaatgcaacagacagaacagacagcccttctggagacaataatttatatcatttccacctttgcctaaaatctgaaagataaccgtcattttcggagtcacaaattaagggcacaaaatccttaacgaatgaatatctttctgaattcctcattagattttgggttttaatccccctcttatggttttggcttatttgtagaaaaaccaagtggtctgacat

SEQ ID NO: 43248 - DNA, 503 bp, Glycine max
  Clone ID: jC-gmro02910073h01d1
agattatcaaaacattatgtgaactaggcactcaagcttgcatttccatatacagcttaaggaaactagttcccttccctgattactcattactcaggcataataaaaatgacaactctatacgatatcaaagtaccttaatataaaattcaggcttcgaaaagacactagcaaaatgtgacagccgaaaactaaaagtatacaaaagttcagaacaagaaatccacttttagcacaacaggcacaacagcgaccttgtacgaaaattgggaggattgcaaagaaatcaccaatgcatgaagtggcctgtcacccattcctggagatagataatgctttttataagtcactactcaaccgatcggctttcattatgaattattaaagataattcagtgaacttaaagaagctgtccctggtgtggcattccacttctcatcattgcacagaattcctcatagtttattctcccatcattatctgcattcaccttaaaaaatat

SEQ ID NO: 43249 - DNA, 544 bp, Glycine max
  Clone ID: jC-gmro02910073h02d1
caatatagcaagggagactttattgtgcaattgtgtattacaataaattctctctctcttgattctacttcttattaacaccataacatgatttccattcaaacctagtaatcactcccaaccctttctcgcatcacttggaaaaacaatcaaatcatatggtatctcatatatcaagacaccataggcctagcatagaataagttacacagaaaagtagacatacaaaatgcacttagatggtcattatcaaagagattcttagttattaactcgtgcacaatgtttccttatctctccttcagatccaagcttgacattaattcgtcccattttctccatagacttggcaaattccgcaaagaatccttgagttgactgaagttgactagcgataatagaccttgtgataggactagtaagcaattcagcatctgattggaacaaaccccttctcttaaccacttgtttgtaatatccaagatcaaatgtatcacgacttccagggtccatctcaataagtgagttatcattaatgttctta

SEQ ID NO: 43250 - DNA, 578 bp, Glycine max
  Clone ID: jC-gmro02910073h04d1
gagaatcaatttctaaaaataggctgcgataattattgcagcacgtccattaagcagccaaaatacattcaagccctcaccgatcttccgaaacaacgaaaaccacatccttcaaaacggcgttcatttcgaaaatcagaaaacaatagccaaaaaacaaagaatagtgtgaactgttgttcttcaaattgcggcaaacagagcggaaattagggaacgatatgatcaaattgacacaaccccacactcctcttatctattatacatcttaagagtcaatccaacaaccctaaccctaatcaccgcccaaaccataaacaaaaaggacgaaaaagtaatccacagtcatgcaattataattattcaaacgaaaccttccattaacaactgttcagatcattacatctacaaactaatttttaagaaaagaaatccacagaaaaccctagatctgcaacacaaccgcctaacaaaccctaattcaagagctggttaacttggtaaccgccttggtcccttcagaaacggcgtgtttggcccattcaccaaggagcacgagacgcacggcggtctggatc

SEQ ID NO: 43251 - DNA, 549 bp, Glycine max
  Clone ID: jC-gmro02910073h05d1
atatgactctggtgttatttttgattttgcaaattaaattacacaatcacagccgtacatcacacatgagttgggcctcttccaacttaaaagcagaggataacattggcccatgacgcgacacatgcaccacctaataatcataattttacatctttacatacaaaatacaaagactttaaattttaaaaagaagaaaagagataaacagatcatcttaatgaaatgaaaccaaaacccacaaacattggcttgatttttgttgttgttgttgttcccaacttgattaagcatgaaccgtttgattgaatcacttggacttgaagggaatggccctgattacgacctggtggtagagtgctgcaagagctgcaccgatgaatggtcccacccagaagatccagtgttcatcccaaccaaggtccttgttgaagatgatagcagcaccaagactacgagcagggttgataccagttcccgtgatggggatggttgccaagtgaaccaagaacacagcgaacccaattggcaagggtgccaaaatgggga

SEQ ID NO: 43252 - DNA, 545 bp, Glycine max
  Clone ID: jC-gmro02910073h08d1
gtaatgttattatttgttctgaaaattggagaattacacaaaacgaaggtagcaacggggttgtggttatactaagtgatatcatactagctcaagatgttggcgtgcatattatacgtatttcatgcctcatcataatctctaaaatgcaacttctacgtcatactcatagtcaagcaggaaaagatgccacgaattcaaagccttggttcagaagagcagcagtcacccatagcttcaaatttggcaggttaatttctggttcagttccttttacattcaatgtaaatgtaagtagaaaactgtcatcaactgtagccaagtttgagttctgaacattaaaacctgcaagagactcaagagccctgtacagtgaagcagccaacccttgtactttattgcacattatttttgcatagtaccctctttcctccacttgaaacatttccatttgcatgatcttcttgcagattggatgactaatattacgggccactcgcacatttttggggtagttaattgatccttgataattttcagacact

SEQ ID NO: 43253 - DNA, 512 bp, Glycine max
  Clone ID: jC-gmro02910073h11d1
aaagacgcaaagccataccaaaacattgtatattgattgcatgcattacatgtttattcaatttattttggccaaataggaatgagaaatccgtacacagaacatttaacaacatagcggggaggaacataatgtaattccaccagaagttgataatgctatgtcataatagctttattcagcaaacaacacgcaaaccactaaatacaattacaacgatgtttgaggatgttcataaatataaacgctaagtgtgacatacacatcataaaaatgttcaaggatagacctctatcagagatctaaaaccaaagatgggaaatattttgtagtgtttgaatcctgcctcgatgaaaagttgtttccattattttttccgttctctcttttgcattcttcgccaacataataatgtgcaaactaaactttgtttgtgtcatatccgggtcatctagcttttcatttattacggcatctatgataatcacttttgcactgttgcctttgcttga

SEQ ID NO: 43254 - DNA, 517 bp, Glycine max
  Clone ID: jC-gmro02910074a02d1
aatcttagaattgttcttgacattttatacaatgcagctgagtgctatattctttctttaataagcacttgataacaatacattatccatgaacatgctgaaacttattaaaacaaagtgacttagggaagaaagcaatttagaacactttggaacaaatttaattattgctgggctttgaagggctgatatttcttgagatcttgagcgaggccttggatggagccagcagctgagataatagaaacgatcaagcaagcccagctcaatatcttgagccatgtccaagtgaaggaaaacttttgcatctttgactgcttaatggacatctctatggggaagtaaaccgttaatggccaaaatgacagtgaaccaatcaggcctaggaagtcattgaagaatggaaacatcatatctatcaaagcagtgatgatgacataatgtggtctccataccaccctgaaaaagttcacagggaaggttccaaatagtggaaactttaaagcgtgttctccat

SEQ ID NO: 43255 - DNA, 318 bp, Glycine max
  Clone ID: jC-gmro02910074a05d1
acatgtcaaatcacagtaacttgaattttttggtgaacactcaaacaagaggccttaggccataacactgaaattcccgaaagggtacattttggaaagcatcattcagtacaattggtacacaacattacccactggatgctaagaatgtcttcacttcgaactaacagtaacaagaataggcaaagtggtttttcttggagacataatgggacaagaaactggaggcagaagcagatgaatctggaatattggccggaaccagtatctgggatttacccgagccgatttttttaccagctacatttgcataaaata

SEQ ID NO: 43256 - DNA, 326 bp, Glycine max
  Clone ID: jC-gmro02910074a06d1
cagaatagaaagaattatctataaccaataaaagaaaatacagatctacaaacaatcactatgcagagacctcggtaaagtacaactcttaaaaaattccacccacgatgcctactcctatactggaaccgaactagctgcatttggcagaaataagaaattaaatcacaataacaaacactcaacagctgaaatgatccctttaaaatctatcatagtatcccagccagttttttggttgtagagtcaagaacaatgatgtcacatggttggctcaacgcatactacagaggtacaatgtcattatccttgccataccatatacc

SEQ ID NO: 43257 - DNA, 299 bp, Glycine max
  Clone ID: jC-gmro02910074a07d1
agcacaacaaacttagcttaaacgagattagatggcaactgaatgttgtccaatacaattccaaagggactacctcccgtgggtaaaaactaaaaacagaaacattttgacccacatgtccaaaaattaattacaagccaattttttaaaaggaagaaaacacagtcccggacacttggcagtatttgcctgtatcacaattaatgggtaataccggaaaacacctacacttcctaacaaccctattcattgaaaaaaaaaaaaaaaaaggaatttgaacaacaaaaacaccacccgca

SEQ ID NO: 43258 - DNA, 321 bp, Glycine max
  Clone ID: jC-gmro02910074a08d1
aaacaacaactaaataaatcgaggttgaactcgaactttttttctttacagaataagaaaatgtaaaaaataaaatacaaaaaacaccaattaataccaaaaaagaaaagaaatcaacgaaggaacaacagctgttttagctggcctcccaagtaaagaatgtaaatcttctccttctcttcttttcttttcttttctctttttttccccctcttttctttcttccttttaatccagtttcccttctttttcttgaccagggtctttcttcttctttttttctatctgggacttaaaacctaccacactaaaaaagaaaaa

SEQ ID NO: 43259 - DNA, 67 bp, Glycine max
  Clone ID: jC-gmro02910074a10d1
attaattggggttcggttttatttctttaacatacggaacagagatctaataaaaataaaacaagaa

SEQ ID NO: 43260 - DNA, 322 bp, Glycine max
  Clone ID: jC-gmro02910074b02d1
accacaacaactaaaaccagacctttttctgttaatacaaaaaagctagacttacatgtgtaattttttacaacacagaaaggtttttcacaaagaggacacaattaatccttcacaaatatttttttcccttcccaagcaagtgaaaacaatacgaaacacctttacacactttatttgcaccgtgtaacgtataaattggagacattctataggagtcaattcaaaacctttggataccactcaaggttgggaattaaagatcagcccctgccaacactcccatgcctttgacttttaaattgattgagggaaagcttgg

SEQ ID NO: 43261 - DNA, 274 bp, Glycine max
  Clone ID: jC-gmro02910074b04d1
gagcaaggaaggggccccccacttggattacccttgttttttaaaaaaaatctaaacttattaaaaataagaaccatgtctgggtttttccaaattaaaaaacttgaccccttgttttttttaaaaggaaaatgaaaattctttgtttaaacaatttatttgaaactcttacttgtcaaacttaacctaaattccccaggcggcttttattttgaattaaaaaatgaaattatgcttattattgaaacgttttccttttacccaccggggggaa

SEQ ID NO: 43262 - DNA, 323 bp, Glycine max
  Clone ID: jC-gmro02910074b05d1
gatgtattaaacccatgaacatatgaatttccaaggtcatataatagtcaataaaggatataattgatacaaaacctcaatgatgaaaacaaaatgcaaaccaaaaaagccatagaaactaatagcacgacaaaaggatccataaagaactgcaagggaaaatgggatagcagaagaatgactgtgagagctgaagtatgaaaatcagaattatgtagaagattgctccacaggggctggtggagcttccttctggggtaaatctgtggcagcgttattggtggtggcatcctttggttgtgatgcaggtgcagctccatttg

SEQ ID NO: 43263 - DNA, 270 bp, Glycine max
  Clone ID: jC-gmro02910074b06d1
aaaaaacttgtcctgaaccaataaaaaatatccttcttggggccctccaaggcgttccattcctgtttaacccggggcaaattttttttccccgcccaagcattgtgttgttttttgcccgttaaaaattataggggaaaaacccattcccttccaagactcaacattttggccttggggggaaatatcccgaaaaaccctcttttatcggggaacccataccattttccatacctccggggggggggggccataaacccccccgagggg

SEQ ID NO: 43264 - DNA, 329 bp, Glycine max
  Clone ID: jC-gmro02910074b07d1
gacagaaaaaagttcatttagcagttaagataggaccaagcctgtgagagtacaaagttaagattccctgttacctataacagatcaacaagtacagaagcgagaatcccactggacagtgcattatttcattcactactgatatcaggtttcattctaaaatctaagtcacctgaaagtatttcccttgatccaaagttcagaagaaagccctgcttccataaaacacacgggagttagggctctttggtgtctgaatcttctgttcagagctagagtttcctgaactagttggtccactttcaaagtccataggaagcttcattttc

SEQ ID NO: 43265 - DNA, 318 bp, Glycine max
  Clone ID: jC-gmro02910074b10d1
cttccttcattttttcttccctcctactcctagttttttttggtttctaccatacccggatccatattcagaatcctcctttctcccaccatacccggacccatattcaccttcttccttccttccatacccggatccgtattctgattcctcctttcttccaccatatcctgacccgtattctccttcttccttccttccatacccggatccgtattccgactcctgcttcctaccatacccggatccgggggcgggattgaagcctgcaggagcgggcctgggcttagggcgagagtaactgctatactcagtggc

SEQ ID NO: 43266 - DNA, 557 bp, Glycine max
  Clone ID: jC-gmro02910074c02d1
agaaaaaagtttcatagtttattgcattttaaataagttgcaactgaattataacatgagcatcacaataatatatgttcatataccactttacacaagatttgtaatcaaactaaacattatgcaaactgacgttaaataaataataaaaaatgcattcatttattactagctagagtggaacaatgtggtgttgcctatggatttcaggatcagctgctcaatcaaagagatcattcttatttggaagcattgaaatgctaatcaagctggtacctggtaattctgccggaacagttacagcctactatgtaagttcaccggatctaagagatctcaaagacaccaaaacacgcacttttgaacaaccaaatctatcaaactcccattactaaatgaagtgtccatgtttttcactcaaaatccatacagttatcctctgcaggaagccaacatgacgagatagattttgagttcttaggcaacagtacaggacagccatacactgtccacactaacatatacacacaaggaaaaggaagccgagagcaacaatt

SEQ ID NO: 43267 - DNA, 326 bp, Glycine max
  Clone ID: jC-gmro02910074c04d1
gaagttctactatcccacttcttactaaaataaactgcttcagatgcatgcatcatacaatgcaagcaaccattgttacaatctttaccagagaacacaaccacaatatcaaaataaaatgaaacctactaataacaaacataaaagaaattgaagtattttatgtcaccaatgtccagagcaattaagaattttggcaactagaattatgacaatgtctaggttacagcgtgtatcaatattccaaagcttccgttagacataaacaagaaaacagtgtactttacaaaaaacaagattcctgaaaatttacaatctgcttatag

SEQ ID NO: 43268 - DNA, 294 bp, Glycine max
  Clone ID: jC-gmro02910074c05d1
ggcaaagtacattaatttattacaaattttcatctgtttaggggacaaacttagcaacacatggatacaaagattattttttgagctttgacatcaagggtttatatttctacataaagatcttgacataaaatctaacatggctaatcttcactcttttggaatactaccaccccctaccatgatgatgatcactccacataatatacaaaggatagcattcatactccaagggacttattggcttcctcaattacattggtgagggttttctaagaagctgaaaaatacaag

SEQ ID NO: 43269 - DNA, 334 bp, Glycine max
  Clone ID: jC-gmro02910074c06d1
gttgaataatgaccacatacagtgataggtattgataatggtgacaaacaaaaacaaaaacaaaaacaacgagggagagggaattattgtgtttttgttgaataataactaaaacataaaattcaatctaaaactggagtattagacaagacaggtgaaggcacgcacgatttattatgtttggaatctctcatgacaagccatccatcaaaccagaaaagaagccaagcgtttgatcatggctttagcaagatgagtctcaggcttgaagagctggaaagcatgcttctcatcgccagcatcaaagagttgaagttcaccttgccagccactt

SEQ ID NO: 43270 - DNA, 329 bp, Glycine max
  Clone ID: jC-gmro02910074c07d1
agatgggattaaaattaaaattaaaaactcttagatgcaaacaagtgctagatattttacattctgaacataccaactcgctatcctattggatgtttttcgaaagtaaaaccactgaaacaaggaacatagactagagttatgcctgaaaatgaaattattacagctgggtcacactagctaggggtgaacccttccaaaagccttaaagatgcaatgctatacaggttagactttataaggtggcacacatgatgatatgctatgaacaaaatattgatcggaaaaaagaataataatattagccggttaaaaaaacggtgccctgt

SEQ ID NO: 43271 - DNA, 293 bp, Glycine max
  Clone ID: jC-gmro02910074c08d1
ccaaaaaaaataatcaagtaaagggagtaaaaattattttattctaaacatttgcaaatgcgtctgtgcttatgcccacacaaaaaaacaaatgatttttcccgtttgacaatggcatgtaaagaacctatcatgcaaaattatttcattcctacctacaaagttttcagcaagaggaggattcgagcaaaaccatcctcctaaaaattcaaaatcctcaaatttaaaaaaaatggaaacacgatgtctgaactctaaaagaatattttatccaaccaagctcgagttccact

SEQ ID NO: 43272 - DNA, 316 bp, Glycine max
  Clone ID: jC-gmro02910074c09d1
aaagactgaatttgttattttttatccatattataagaataaagactgaattagttttacaaagcaaagaaagaggaagctgacacgtttaattacagtggaaaaggacagcagagaaagggagaagaaaacttatgactacatttgtataaacaaaaataaacgggtggataaactgcactaagccgaccgtccaatttttggccggaatctgaagcctaatttttccgggcatgcgctttccaagcttctgcaaagaaaagcccttcccaccacggaaaggcccttttcttcatactggctcgaattgtactta

SEQ ID NO: 43273 - DNA, 557 bp, Glycine max
  Clone ID: jC-gmro02910074d01d1
gagacaaaaaacacatttaagtcatatattaataaatttattcacagtgcattccagctccaagaaattttaggagcatttaggaaaaacgatttaaaacatcttgtactaaatgcattgctcaagttcgatgactagatcagtactattaaagtttgccgaaagaaaaccactatgtaacagaaaacgatacaaaaacataactcattgagttggtacaagactaagaccattattttagcttagtgttcgtttatttttcttgggatttaagggaaacaactaggggaagggggggtcttatacaattgtgacacacttgcaaagggaagctaggtcatgtacatcatcacgcacaccagcgcagggttaagaacacttttttaaacggttacagagtttgagattttcaagttcagatcccacagctaaaatgtgcccttaacgaaattgtgatgtgcacctttcaaggcaagagtttttttcacaactggctctttcacaaatcgatatgtcaataggtttccaagtgatacattcacagtttccttttcgca

SEQ ID NO: 43274 - DNA, 496 bp, Glycine max
  Clone ID: jC-gmro02910074d02d1
aaaacaacacgatatgacaattaatcatttcatatgtcacacattcataacaaacgtaggggggatattagagttctattattaatgggacacaattgagttcaacacaaaccgaacttattttcaagggacattattacagacccattaaacatcaaagttcttcaaatgttttgggaacacatccaacattacacaacgagcttaaaaccccccacggagacggaggacaaggtgaagggttgattccttctggatgttgtagtcagcgagggtccttccatcctcgagctgtttgccagcaaaaatcagcctttgctggtccggcgggatgccttccttgtcctgaatcttggccttcacattgtcaatggggtcagagctctccacctcgagggtaatagtcttacccgttagagtcttcacgaatatttgcataccaccacgaagacgcaacaccaagtggagagttgacttcttctggatgttgtagtca

SEQ ID NO: 43275 - DNA, 336 bp, Glycine max
  Clone ID: jC-gmro02910074d07d1
ggaggaataaagtgatttcaaaagttctaaaaaatacttgagtattttcatcaaacagaatgattaaacacgcacgatataccatctgagagagcttgtttgcatgtgacagagcaaacataggtaaggtctttcatcttccaccagaaagaactaataataaagaccttcttcatgttgcaatggctgcattaatattattgtgacaggccacattcaaataatctacgaatacaatgttacctaaaaataaaataaaatatagctaataatagagaaattgatgtagttcttgaagttcaaacacggatgaatcaacagataatctcttcatct

SEQ ID NO: 43276 - DNA, 320 bp, Glycine max
  Clone ID: jC-gmro02910074d08d1
aaaaataacaaagacgaattttccaattactagtaaaaaatccagatataatggtttgcatataaacagtacaatgtgatggtaaacataaaagtagttccacaaacttgttatcaccattaccaactattctgagtgtgaatgtggcccaaacagtttcaagaccaaaaggattacttcaaacttgtctgttgcctgccatcagggattgcatatagcacgattggttgtgaggggcgaatgaagggtaaatcacacctgaaatatccctttctctccagttgcaatacatctccacgctgaagatttcgcatgttggg

SEQ ID NO: 43277 - DNA, 316 bp, Glycine max
  Clone ID: jC-gmro02910074d09d1
ggaatccaaacattaacttgaacactctctttttgatattgatattaagagacacattggtagggcatacatacaaacagagagtacatgtttttagttgatcacgtaaaaaattacaaaagaacatacaaataacaaaataggaggaagaggagagaaacacacagagtaagagacgtggaaagttatggatattagacatattataagggcaacgctcaaaaaacttccagcatagagcagtggaatgaattacttaggccttctcccacttgaggggtttgaccacttcccatgtgaagtcagggtcttctct

SEQ ID NO: 43278 - DNA, 281 bp, Glycine max
  Clone ID: jC-gmro02910074d10d1
acgaaccacaagggctccctgggatactttcaaattttatttcattaacgggtgtatggttaaagggtatatgataaacaactatgtacatcttcaggggggggattgtttgtaaaaaaaaagcaggggtggaatacccctatattacttaatttaaaaacacaatgggttacatactatggattggatattggtgggcattatactactaattccgggatttccaaaaatgaacggatacttttttgggcccctcttatatattggtttgaagcagtccc

SEQ ID NO: 43279 - DNA, 276 bp, Glycine max
  Clone ID: jC-gmro02910074e03d1
aggggaagggaaaaaaagaatactttattaatataacaccccccataaaggggttttgggccggaggcaaaattcaacggttaaaattttttatcccaaaaaattttgaaaaccaaaaccttggataaaacttccaagcccttaagtttttttatccaaaaggggtttaaaccccatttggttggtggggggcaatccttttcccaacttattaaagggtggggaggttaaaacccccacccctgggcagggaaatccctgggtttgggcccctgc

SEQ ID NO: 43280 - DNA, 326 bp, Glycine max
  Clone ID: jC-gmro02910074e05d1
gcttcggaattttaaaaataggctttcaatttaaattttgggatattatattcctctgataatacaccgacaaattattaaatgaagttgtctatgagactataaaactagttttttaaaagcactctcaacacatgattcacggtgaaaaaaacttctaacaaggatcaaaattagactcaaactttggctatggattcagaatcttttaacatagtccaaaatgtaaggttccagtcttttattgaccaaggagacgaggacacaaaaccaagtacccacaacctagttatcctcaagaatacggacctcacattaaaacgaag

SEQ ID NO: 43281 - DNA, 322 bp, Glycine max
  Clone ID: jC-gmro02910074e06d1
agcaaataaaagtgaataaaagattgttgaataaacaaattcgtcaaatgtacaatgtactcatccctgaacaggaggacgctgtaagtactaaaacacgaaaaaacgcagtcctaaattggaatttcacacagccacgagcggtgaaaatccaaaaggagataacggcgacaacggcggaatgttgaaaatatccttgacgtcactgtcccagaacccggtccacatagacggcgttaacggcatccccctaaaacaactcacatcatgctccgttattttctccttcttcaccaccgcctttacatccttcaccaccacc

SEQ ID NO: 43282 - DNA, 305 bp, Glycine max
  Clone ID: jC-gmro02910074e08d1
ccaaatagttaataagaatatttcaactacgtttcaatcagagggcaccatgttaacaattatgaaaacaagcagaaaaataaaatccctaaacactacgaaatccagccacgaagacagacacagagtgccccaaaacaatccaaaatcccgaaaaagatattcaggtcaagggatgaaaaaaacacaacattaacagagtttcacaacaaaacacaaacaagaacaccctgcaaatcactactattgttttaaacctcatcttcctgaggttcttcctcatcttcatactcatagccctcatc

SEQ ID NO: 43283 - DNA, 317 bp, Glycine max
  Clone ID: jC-gmro02910074e09d1
aaaaaaattaataatatactgaataaagtgtcgaagaacaataattaaaataattcaaggaattaaattaaaacaataattatactgatcaactaaatctaccatatgaaaatttcattctttacttgtaaagagccgaaattatcttcaccttaataattgtagatgtagaagaataatcagaatcttcctaaatccacgatatttcttcgaaaatgctttgcccaacacaatgatattgtcacaccagaagctatgcggcgtcttccatttgatattccatttatcgcctggagatttacaatgctaatgaccta

SEQ ID NO: 43284 - DNA, 308 bp, Glycine max
  Clone ID: jC-gmro02910074f04d1
gttacttaatactatttaattttatttagtaacaaccacaataacaaaagaattaaacaaaaataaaaccctatgttaaatgttaatttaatgatcatcaccttcttccttatcatcatgttcttgcagatctgaaagagaaaagcttttagccttgaagctttcaagtctaagccttatatgagcagcataagattctggcattctgttgaatcttagctgaacttgatcttcttggtttttttcctcggccaaggaggaagaggaagaagatgaagcttagggaacttttttagcatttttttttt

SEQ ID NO: 43285 - DNA, 326 bp, Glycine max
  Clone ID: jC-gmro02910074f05d1
gggcttagaagttaacgatgtaataaccatttgagttcaattcacgatacatatgaagttgcttagtacttgaaaagagtaattccttttggattgaaaccaacacatacaacataaaaatacaattgaatcttaacatagaaactcagcatctcaacccaacggcttaaactttttcggaatccaactcacttaaactcattgagtcttgataagtttccgaatccaacccacttaaacttttttatagcaaaaataaaaactgacatgactaaccttataaaacaatacagcttcttattctttccactggatatgccattatt

SEQ ID NO: 43286 - DNA, 321 bp, Glycine max
  Clone ID: jC-gmro02910074f06d1
aattatggaaaggtagctaggcattaatctgcgttaaaaacagaatccattaatagaaaaataattgtacaacttcaactagctcaaacactcgagtctccaaaaacaggagaagatctacacccctgaagcaaataatcttttccttttcttaaaaggaagaaaaaagaaaatactgaaaacagagtgcacctaaaatgaaactaagcccaaaatttatctgtggtgatgatgatactaaacagggcgccactttaaaataaagattcaaccatttcaagtttctcgccttggcctccgacgcgcagcattagatgcttc

SEQ ID NO: 43287 - DNA, 334 bp, Glycine max
  Clone ID: jC-gmro02910074f07d1
caagaatacataaatccttatattacaaattttggcgctcaagcaaagctttgactttgacacttttcatcccatccgcgagttacatacaaggatggtcatccgccctttccatctagcgtaatgttacattacatacatggcccaatcaatggcagcgtcgcagcgctaatagtacagcgtgtccccacccaagtcacgtgccttctgtcattttcaccaaattagaagaaggaggagcatcatttcatttacctagctccaaccaacgaggatcatgatcctgatcatccgagtcatcgccatcaagcggttcagatttcacatctgaacc

SEQ ID NO: 43288 - DNA, 321 bp, Glycine max
  Clone ID: jC-gmro02910074f08d1
aaaatggaacacttaatcaaaatatagcaaagtagggacaattgtccacataaaaaactgacaagtttaacttgcaagctcaaatgaattgttcaaaaaagaagcgagacttatttttctccaacaaaatagcctaactaggtcagaaacaaaaattacagatacttaaacgaacacatactgcgaactaggaaggaacgaatcatcatgccatgggtagcacacgggcttccttgaaagggtcctccaatcaaaatattttgggctcaaaaagcctgcttgtgaagcccatcgaataatagatcaaccacgagaatgttt

SEQ ID NO: 43289 - DNA, 319 bp, Glycine max
  Clone ID: jC-gmro02910074f09d1
aatgaaaattaaggggaagcaagttttaattaagaaaaccaaatactggagcagcagctgaacgcaagcattttgacgaagcaccggtgatacaattccacaggtttgtctcactcgcaagtccaactatatacgaagaattacataaatacataagcaacgtgtacaatgctcttccgtgtaaaatggccataggtccaaagcattctccaacgattgtaatttgcaacacctttaaagttcctatgaccaccaatttggaatatttgctgtagcttcattcaccatttttacgagagtcaccacactttctggaaca

SEQ ID NO: 43290 - DNA, 320 bp, Glycine max
  Clone ID: jC-gmro02910074f10d1
aatagaatccattatttatatataacaataaactactatatacacatacaatgtattctagtttagtcccctaaaacacgagcaagttattctgggtgtcgtagcccaacttctccaaaatcggctggactgcaaattgaatcataggtgggggtccacaagtcaatgccaaggtatcaggagatgcatttggaatatgctccgtcaggatactttcagtgatgaatcccacactgtattcccacccttctcttatgctttcttggatcacgtaccacaccttcaacctatcatacttcttagcccactcatcaagctct

SEQ ID NO: 43291 - DNA, 314 bp, Glycine max
  Clone ID: jC-gmro02910074f11d1
atgaggacaaaaaaattatgtgacttgagaaagtagctagcaagcttattctataagagcttatatataaacctacaacaaaaagtttcacctaacactgctctaaaaagagctctatttgctcattctgtgaggcaatttctcacagaaagaaggcacattttaattgcgaggagttgaggcttcagatggactgcttgaggagtcacctgaggatggattcagtggtgaaccatttgcaagagaaccatttccactttcagtctcagccaccactggtatcttgacggcggctgctcgttccatctttttct

SEQ ID NO: 43292 - DNA, 516 bp, Glycine max
  Clone ID: jC-gmro02910074g01d1
ccatgtaagatctacaggtgtataatagtagtaagtggagaacaaacaagggttggaaaaaattatttctgaaaaagtaaaaagattgacttttttttttctgaaagggccgaaacacagactcagggaatatttgtggctttccttttctgggcttgggactagggcgagaatacttaaaatatccatcccaaggaacctttttaagcccagcccgatgggagattatgtctctaactctttctgcaaattcaatgggggtctctcctggcttaaaattttgtggctccaagtaccaaacattacaaattacagcccaagatgtgtttaattgcaagaaatgagtggagaatgattgttttctactattccaaaaagcatcgacgaaaattttatttgacttgatcgcacctgggcaaattgtgcagccaagttaaaatgcgccctttttgaacatgacagagttgtgattttttacacaagctccttcatgaaatatagaggagggtttttgtt

SEQ ID NO: 43293 - DNA, 562 bp, Glycine max
  Clone ID: jC-gmro02910074g02d1
aacaagacaaactccattaatcattattccaccattacaagcgacctcgcatgcaagggaaactagaatcccgggtacaagaatacaagataaacaaccttgctactttctaaaattcaatcatacataggctgggtgtgttaaccgaaatacatgatacagaaggaagccagaacttaatagactagggagactttctcggctttggcagtcatagtggcctccaacctaaaccagaacccaaaatgctatggcgagttggtttcaaaatcacactgcagcagcaccagcaggaacgttagattcaactgacttcagtatctcctcacctagctgtttgcatcctaccagcttcgttccagcagaatatatgtcaccagttcgaaatcccctgttcaaagtgtccatcactgcattctctattctttcagctggcttttcctctcctaggccatatctcaaaagcatagcagcacttagaacagtggcaaatggatttgcccttgtctgtccagcaatatcaggtgcagaaccatgtttgggttcaaaaagtccaggtccc

SEQ ID NO: 43294 - DNA, 299 bp, Glycine max
  Clone ID: jC-gmro02910074g03d1
aaaccaaaaacactttgggattatcccttggaaattgcattgagctgaaagttaaaaaggattaaaacgagttatagggtaacaaagaagaggctttgccaatcctgtaaagaaggatgaggctttttccatacaaagcttctctccggctttgattttccattgaaaacattggataagcgatgcaagcgtgacttgtttgagcgttaatgcaagggaagatccagggcacccccttctgccaaacccaaacggaagatagctgaaatcagcggggttgatcccattcaaaaaccttt

SEQ ID NO: 43295 - DNA, 326 bp, Glycine max
  Clone ID: jC-gmro02910074g05d1
ggcacgccaagggataataataagcatttcatttcgttcatacattctggatctattaacaaaagacaacaaagtaacccatctctacagcaaaatgataatgacaaaagaggaatccataccataaagaaatacacatttggcctacctacatgttgagcctagctacttttccaactatatggagccattgaaaacttcaatgataaaaaatattgaatgtaggaaagaatacagagccaagtggtgaagagactgaggttttgctgaagagcattctcctcttttcatctcaatctcagcctcagacaaatcaatataaagaa

SEQ ID NO: 43296 - DNA, 329 bp, Glycine max
  Clone ID: jC-gmro02910074g08d1
aacgatgtaaaagtttattagttattttaggagaaagagagcacatcccgccagagagatgcgcgcacaaagcccccaagaactcttttatttggtgataaaataataacacacaaaccaaagtatacaacaataagacgaataggaatcacgaaatttaaaagcagttgatgatgaattaattaagggcaaaacacaagcctataatcagatcctcccatgcaagtgaacatgctgcttgcgtcatccatagggtaactaaaggcatctggacacctctccttgaagaacttggaataatcagtgggaccgcaacccgcagcaccggt

SEQ ID NO: 43297 - DNA, 315 bp, Glycine max
  Clone ID: jC-gmro02910074g09d1
gaacactaaaaatagaaagttgacatttaataaaccaaagcaacacaacgcagcaaagtcctgaaactcgctgcgcttaacaaaaatgtaattaggggttccgacaaacacatcacattaaaacacagataaataaaagcaattttgccaccgtcgatcaagaacccagttctgggaacaacagttgcgagatgatggtggagacttcaaactttgtccgaaaaacaagcttcctagaaaagaagacacacgagtacagaaaagaaaccaacatttattgtaaccaacatcccctgatgaaccagcccgcacgat

SEQ ID NO: 43298 - DNA, 330 bp, Glycine max
  Clone ID: jC-gmro02910074g10d1
gatacaaagtcatttaagattcatcttattataagaattggtgggtaaccgaattgtatcaaatcgtaagattcgaataatgaaacgtaaaattctaataactacgcttttctcgtgttcaactttttgtgaaagaaaataaatggggaaaagataattaatcagggttgatagcttaaacccctacagaatttgaatgaaatgcttattgtggccttctgttgctcagaatgcataccggtagatggcatctgctgcaccatcttcatcattgctcaaaccaattacgttagcaacagatttggtcttttctgatccattactaagtgc

SEQ ID NO: 43299 - DNA, 491 bp, Glycine max
  Clone ID: jC-gmro02910074h02d1
acagccttaaatgttggcttttactacgacagaaagttccaagaattacaaactttgcggggacagacaatggcagaaacttattccatttataatccttgcatagcatcttcaataggcaatttacagcatttcctatacagacaaatgacaaccaaacataatacaaagttcctgcacggtttaacacatcacagcatttaaaacaaaaaaagatgaatacactattttaacgtggcatgggttataatacataattttcagaccatctatgagctatatagcgaagcaacactgggactatgaattctgcagattatcaaccccttccattcgctgcaagagttccaatatgcttccagcttttctcttagctctatcagttccattttctgacaactcctgcagtgctgcttttgcaccatgttcttttgctagttttaattgcagcggttctccagtgcatagtgaccacaagacagcagcagcat

SEQ ID NO: 43300 - DNA, 279 bp, Glycine max
  Clone ID: jC-gmro02910074h03d1
gaccgggaaatctttttctttttttaaagggagggcccccccatttgtaaaagctataaatgccccctttttgtcccttccctgttttcccctccacaaattctaaaaagtcaggggggaagaacgggggaaacccatctacatccaccttcttaaactgggggggaaaaaaactagggcaccatcttgggggggaaatgccacaaataaaaggggaccccgtacctccccctaaaaactcaagaccccgtatgttgggtggcccaaagaaaaaacaat

SEQ ID NO: 43301 - DNA, 311 bp, Glycine max
  Clone ID: jC-gmro02910074h04d1
cgagcaatacatcatttcattatatagcgaaacaagttcacttgtgcacattcaagctggctgaaaggagagcatattacatatatgttatctcaacaaacaagaaaatcaatacaaacttgattaagataccatatatatagtactagatataaatacacatatttcccagaagatcgacaacctaataatagatacatcatacatgcatcaaactagttgaagaagcaggggcttcaatttcatacttaattcccacccaaattaaagcacttaatcttccatgattgccaaattaattaagtagccca

SEQ ID NO: 43302 - DNA, 312 bp, Glycine max
  Clone ID: jC-gmro02910074h06d1
ggaaatgtaacagtgagttgatttctgggttacattaccagaaaaataaagaaaaataattgggtatctgatctacactccttacgcaatatcatctttcaaaaggtgaagggaaaaattacaacaacctgctactacagaattggcctaatgcccaaactaagctcaaaatttatgtgcggtagtgttctttaatggccgcccctgtctgttaagtttcaatcatttcttcaattatctctccttgttggcctccgacgtgcaggggcagatgattcctccttctctttgttttcctcattctcaccactg

SEQ ID NO: 43303 - DNA, 325 bp, Glycine max
  Clone ID: jC-gmro02910074h07d1
gtagagaaatttgtttccccattatgtaaatcatacccatgatcttgttaaaatatcaaagcataaatatagacacacgcttttcatatgcaagggcagtatgaactacgtatcccgagctgattacttgctcacaccacaaataaaatggagatctctaaacgttaagaaaattcttgagagcaataatttaatctagatatataggttgtaataaaaatatttctgatacatgtaatgaaatttaattgcacttgaaatccggaccataccaaggagtggaagatgaaatccccttaaacatgtaaattaccatgagcagcag

SEQ ID NO: 43304 - DNA, 327 bp, Glycine max
  Clone ID: jC-gmro02910074h08d1
atgagagcaccaagtttctcacagtattaatatatgcatgatatattatgcaaatcctacaacttcatccaatgacattgatcagagcaattatttaaacaccaccttattcatctaatacttaactgccttgcttacctcaatgttcaagaacaatacagagtaaatatccgcagacattgaactaggtgaccaattccattattgcctcaaaactttttcagacgaactaactcaccttgcctagctccagattcaagcattgcctctaacacagcaacatctcttgcaccttcgacataagagaggcgaggctcagtcacaaac

SEQ ID NO: 43305 - DNA, 313 bp, Glycine max
  Clone ID: jC-gmro02910074h09d1
ctaaaaataccttatttatgacaaagctttacatgaaaaaaaaaaaaaaaagagcttaatgcattaggagtaggaaacactctcatattacagtctaaaaaacagtaaatgcaaacacatttaaatgaccacaatgataacataagaatgctgatcgagagtaatttctaaggctgaattgtgattggactggttactcctgtgcttgccatctgcccaagataaattcccaaataacccacgacgggcaccaattggttgtagtttaacctgaaactttttcttttctccggttctctaaaaagtcaacgaa

SEQ ID NO: 43306 - DNA, 335 bp, Glycine max
  Clone ID: jC-gmro02910074h10d1
gcattcaaatttaactgaacattttcttggaaatccagtacatcatgattgtgctcacatgacataaatagaaaacgaacactagatgtggatggaacaacacttaagacagctagatagagagccttatctatttatatatagccttgcctgaataaactacacagcaggccaaattttcatttatgatgattaatgagtcattgatgactagtataataatatattttggttctagggcaactactagtttttgctatggctcatactagctctatatggcacctcctagtggagaaacttccatctttgggatgatcttctctggttctaca

SEQ ID NO: 43307 - DNA, 334 bp, Glycine max
  Clone ID: jC-gmro02910074h11d1
gaaagttgtaaatgctttttcagaaatagatttatacaaaggtgtgctgcgtatctatttgccaaactaaaaatgtaaagacccttcttcccaatcctagtagggtcccaaatgtatttacaaaggcgggacaaaatgtgtatatacaagtgcaatcatatagcataatggaacaataatcatactttggtctttactggtgcacattacaggaattattatgcactgaaacccctttgcagagaactcccaggattggaaggaatagagacacaagcttgtgcagaggcctcagccatttgctcattctttatccctacattgcagatgtttg

SEQ ID NO: 43308 - DNA, 475 bp, Glycine max
  Clone ID: jC-gmro02910075c07d1
atgggatctgataggctcttcgggctggttactaaataaatcaacttgaccaaaaatacaaaagtttttttgatgttttctaataaatcatatacaccggaaatgcatgtcttacaaacctaatatactgtaaagaaaggaaaaggcacagccttagagtgaaacaacatttacaatatctgccccctattcataattgtaaaggaatgacctcattctatagccaaaatcatacaattaacctcttctttacaatgaagcacaatctctttcccacacaagaaagtggataaacctgtttcaatttgattttcccaaaataccaacaatttccctaactgtataaccaagattatcatcagaggagtttggatctcaggcttgaagaacctgacagtgaacaatatgactctttaaactaccacgtcccgctatagttgaccataaatttctaactaaagacctgacatgacct

SEQ ID NO: 43309 - DNA, 401 bp, Glycine max
  Clone ID: jC-gmro02910075e09d1
gcaaatgacttaaacttctagagaaagactaacataatgctataatgaattcccacactgccacacagttaaaagttattgcataccaataatttcaagaacccttattaacttacactttcaaagggattggcacaacaatattatatgctaataaatataataatcttaagatgatgaagcacgtttggaagatgggttgaaaggaacctgctcagcgcatgtaaggatgtcatggtgcccatcctgttctcgaccaacaccaataaagtcatattatacaggtaatgggaaacaatattgttcattgagtccacattaccttgtccacaaacaccatccccatagaaaatgttcattgcagtgccaaatccaagaacccgattctccataatgtcatt

SEQ ID NO: 43310 - DNA, 500 bp, Glycine max
  Clone ID: jC-gmro02910075e10a1
ctcttgttggttttttcactaccagctctgacttttaattaacatgcagatcaacgcctcaatgatgttgttggcagtgcttactatgttgcacctgaagtgctccatagatcttatagtgttgaaggagacttatggaagtattggggttatatcatacatattgttatgtggaagtagaccattttgggcacgcacggaatcaggaattttccgatctgtcttaagagcaaatcctaactttgatgattcaccttggccatcaatatcacccgaagctaaagactttgtgaagagacttctgaacaaggaccacaggaaaaggatgactgctgctcaagctttagctcacccatggttgagaaacgaaaaaaatgctattcctttagatattttgatatacaagttagtaaagtcatatgtgcgtgcctcacctttgagacgtgcagcattgaaggtagtcatctgttatgcttccatcagaacaaatgcatattata

SEQ ID NO: 43311 - DNA, 556 bp, Glycine max
  Clone ID: jC-gmro02910075f01d1
ggtcttaattttccatatgttgcaagtagttgggacaggatcctaactcatttgcctatcaatcccagtactcaagatattttatctaaagattcaagttaaggtgggaaaaatgatcctcagaaagcaggagtccttgaggatgatactatataggaatgcctgaagttcacaaacatcctcacatcatgattagtgaatttctaatccttcattgattaggattccatctatcaattcagaacaatccggctctcatttatgcgctacatttatggaattagtgcgactgtgcctccagtaggatgttggtggccacattgacatcatttctggcctgcactaaggcttgtctggcagaattcctgtcaaagcccatagagacaagggtagtgatcgagtcctccgttggctctactgcagcttgcattggagcagggtaatttctctccatttggtgagttggataggaaggtaaattcctgacaacattccttgctgatgatggtgcacgtggactccccatagatggcaacgaaattcttgaaaataatga

SEQ ID NO: 43312 - DNA, 451 bp, Glycine max
  Clone ID: jC-gmro02910075f02d1
aataaagcaaaatgcagacatgccccaaacaaaacaagccttattcaacccaaattggtttcatatcacagaaaccaacaggatgccgccttcctccttactggtcccacccactcgaacaaaagttctacagaaataaaaatggctacaattcttctaccacaaatctgaaaagtctaacaccaaaaatcaaaaaaaggaaaattaaacaatcaaatccgattgataaaaccgatttttgtctttccctcactcacttttcagttgatcatctcaatcacttagtacctgtagtgagcaggcttgtatggaccctcaacaggcacactgatgtaatcagcctgggacttgctaagctgggtcagcttagctccaagtttgcccaggtgaagtgcagccaccttctcatcaaggtgcttgggcaaaacgtaaaccttcttctcgtacttgc

SEQ ID NO: 43313 - DNA, 498 bp, Glycine max
  Clone ID: jC-gmro02910075f08d1
cgatatatcactatcattatcgctgaacgggggtgtttaacaaaagtatcaaccacaaataaaaacaacaacccaacttcccaatcatcgtcacgtccagcaaaatacattcaaaagctatctaaaatctggggaacccacattggcattaaaaaccatgaccatacaattttttagagaaatattatgggcaccatgcctcttcaacaatcccctaaacgttgcttaggcatcagcaaacccaagctcggaaagcttttggtgagcctcagcgtaatcagcaaagaaggcatcttcgtccgctgcatatttatcaacgagagggcggaatacagggtcagacaaaagagccttgtcagaaggtagctgaaggagaccttccttctcaccactcaacaactccgtgaagtatgagttgtcgaaaataagaggattagaagtccagggaccctcaaatccaaaacgcttcttgtgtgcaagctccatagtgtgaccccc

SEQ ID NO: 43314 - DNA, 523 bp, Glycine max
  Clone ID: jC-gmro02910075f09d1
atatattatagttttattacttttatgataaatgaaagtggagaacagaataaccgaagtttgaagcacctaatcaatgatcaagttgtcatgaaagtaagatatttgagctgattaatacccttaagtagatgaggttttctcttatccacattatgaatcttcctgcattaagaaagtggagccttttgctgctacgcaagggaaattttgatagctttactttactgatcatcaattttgcttcatcctcttccctattcacctatcacaagccactaacattaaatattgaaatggaactaagcaccatgttttgcttgtttgctccttttctctttattggtctgctcaagcaactgctttaatccttcccctacaaaccttggagtagctgttcccacctgattccataggtcgaccttacataggagaaaccttttaaatgttttctcgaaacccaaacattttccttgccacaaaaataaaaaggttacatatcaaaatttcactttccacttta

SEQ ID NO: 43315 - DNA, 544 bp, Glycine max
  Clone ID: jC-gmro02910075g02d1
gggtctgcaaaatatgtatatatttatatggatagtataccaagagatacaagaagtatctctcacattggggtacacatgtgtctacaaacgttacagctcaacatattaatcataataatcacaataaatatggacgatgtcttgcataatcctagaaatagaatgatcaaaattcacgttgttgaatacctcattttttcctgaatctcattaaattccagctgaccgatccctatataacccacgcagcttctccaaaattgtaattcgcattccaagatccgcaataacttaaccatgaaaagcacacaaaatacaactacttaaaaacaatttaagaaaaaagctatttacctaaacctcactcgaattttcccagtgacgagccaattgagacagggtttgtgttgaagagccatctttcagtgcattagcagagaaatcttttaaattcatctttctttcacgttttcctttaccttcttccccttccatcagacactttatcaccttcgcaatttccttcttctccactatgcca

SEQ ID NO: 43316 - DNA, 495 bp, Glycine max
  unsure (1)..(495): unsure at all n locations
  Clone ID: jC-gmro02910075g03d1
atatcaccttttaccaggggggtccccatgatgaggcattaataacacaaccaaagtaatgtttacatgtctgagagcatgaaaaaacgtgaattactacaaaccaatattatttttcatctactttgttaaaccagcaatgaacattaggattacgtacaacaacaccaaaggcctgcaaattgcaaaagaaccgagactggggggggggaatggcaggccgttgctaggccattgctgttagagatagatgtgaaatcatgccaccgcagtcaggcatggatgaaatgcagtaccacatgctatccactgtcgttttctcccacgtggcaccacacacccaggaaccttcagccattctttctttgctatgttgtaagtaaccaatcggttcatttgttttgatctcaaggacaacatgagcaagcctttgttccccaagcaagtcattctaacgtgcttcccatanaagtccaagcaccatatgtttggcat

SEQ ID NO: 43317 - DNA, 516 bp, Glycine max
  Clone ID: jC-gmro02910075g08d1
gcttatattaattcattagaatttttggagacaagattatgatttattgtctgtgtggctggaactcccgttaactcaaaatacacaatgtggcatgaagagttaaaagctggcattctgcatattaactttgttctattgatttttcagcacgtcaaaatataaaacccgggtcctattcatgtttggcgtagttcctttttattacctgtacaaaagaaactcaagcaacttgatctgcttctgacttctgcatgtttatacatttgcatttagcccgtttatcgttcagagtcttgaattctttctgaagatcttttatgtagtctacagccaagtccaacatctctgctgtgctagtttgcttgtccatgtttggaacaagctcttgcaattttcttattcgttcactgatccgacttcttctcaccctttcggcaatgcttcgaggatgtgtagcaaagcctctcttaactctgattttacaaggaacagaatctgaaaactgaagcaaac

SEQ ID NO: 43318 - DNA, 534 bp, Glycine max
  Clone ID: jC-gmro02910075h02d1
aattaataccttttgtggttttctattctggagaaatgcgggcggagaatgataaccaaatggtatacttttctactatcaagcatgtcttatagtaccaatacccttaaaacaaagtaaaagatgaagttttttttttttttcaaaaaaaaaaagtggggggaagcgcaaaagcattttctatacgaaagcaagttgcttttctcacatggccctaacagcttggaatcttggttccttgggaaggaacttctgctcagcatagacagacatgtagtcaccaaaaacaaacttaggataagtttcatctacttgttggtcttctttctccacaagttgtggtgcaggacatatggtggccttgaatgaaggattatagaaggaggcaattgatcttctgttcccatctggtgtggccagaaccctgtgccagcaactcttgtatctaccattgctcaagaccttaatctgatcaccagtgttgatgacaatggcatttggaaaggctgcacatcaatccattgcccttttttc

SEQ ID NO: 43319 - DNA, 480 bp, Glycine max
  Clone ID: jC-gmro02910075h05d1
ctcttattccaaaagacagatgtgaacgttttgttcaaataaacaaacattgttacatcctcccgtagataacaatattctctctttatccatctaattgatgacatactacaagtctaaaccaaattacatgctacaacaaaaggacttccccaccccatgactactacaacatgccttgtctagctattaggatcaacaaccctttttctccactacatgatactaatactaggtgtcttacaacaaacctcccccctctttttttgcctgactccaacaattccctcaatgcttaattacaacaaaacccttctcctgatacaacaatgcatcaaacaccaagtcttaaaaaggactcaaacttggatctttattgaccatctgtacatctcctctggagaaactggaatggagaaggttgtcaacccggtctctgagtcatagttgaagtcggtttcagcgccacctaccacacac

SEQ ID NO: 43320 - DNA, 497 bp, Glycine max
  Clone ID: jC-gmro02910075h06d1
aaaaaaggaaatccttactctcatttttaccataaaaattttcggatgatatgacaatttaatcaccatttccgctgaactaggataccaacaaaaatccaagcttcaacgctgtccaactgataaacataatggacaatattaaacttttactgctacaagttgatagttctcccctcccagaaggaaaaagatgaaaattcccattctgtgatgttagaaaaaactttttattcttcatcaaagcctgaactttctgcagctttgccatgtttattcacggccccattgacagcttgtttcttattttttggggtctggccatttttttcatcttcactggactcactctcataggcatcatcatactcttcatcctcggtggccttattctcctaaactccatcctccatgatagggcctttatcagccaaaacagcacccctggtgccagcccgagtttgtttcaaaactttgagctttaaatttgccctttt

SEQ ID NO: 43321 - DNA, 378 bp, Glycine max
  Clone ID: jC-gmro02910075h08d1
ccctaaatgggttctgttgagtttttgaaatttataaatcaccacccatatatacatatttattcttacggagatataatttaccatgaatcgaaatatacaactaaattgatattcatgatagtagaccgaataaaactagcgaggcttgtttgatgactcttgaaactctccaaacttcgggctgtacacaatgccacaattctgcagtatgtaaatttttggccattttaacagcattatcgattccaggaaaaaattgaaacccgcaatcattatgttttgatggcccataaataaaatgcttataccatgacattccaaaaaggccatctctgtcagtgaatgcacgctcagccatcatcaatctatcattca

SEQ ID NO: 43322 - DNA, 491 bp, Glycine max
  unsure (1)..(491): unsure at all n locations
  Clone ID: jC-gmro02910075h09d1
agnttattatttttttattccgtcactattggactgggatatgttctgtttttatagaacccaaataggggtccttcatatactcagataatttacacgttacggtaaagaagaaaagtaaaatattgatgtaaaatatagatagggagtaataatacaaaactgatctgggaagtcaccctaactggtgcatgtctaatctgatgccaaccgtcttcaaatcaaattgtcatgaattttgtcatgaaaattcagcttcgggagcgtttgttcttcgcctctgagacaagtttgtggttgagtattcgttatcatcaacagacaagccaacactcgatacattggaaattgaggttgatactgaatctggtttgtgcacttgatttctgaagatctgtgtctgagaagctgacccttgtgattcttgaggggtttgattcccctgagcttcttagcaagacgtttaataagggtcataaatgtgggaagaa

SEQ ID NO: 43323 - DNA, 170 bp, Glycine max
  Clone ID: 701036916H1
gtttctctctacaagtccatatgtaaaatggataacagaaagaaaaagaaaaatcactttggtttgagaactttttaaagtttatattaactgtgttaaggttcataaaactgtagactgatttgtgtgacatgctccacagaaccttaaattttcctctattttgtcct

SEQ ID NO: 43324 - DNA, 288 bp, Glycine max
  Clone ID: 701036954H1
gtacttccttaatttgccaccctaacctactgcattattattctcttccccttaatttctatctccaatccctcagcaaaacgcagcaaatgggtcggcttaatctcctacttgtgtggtcactctcattaacactgtccctttattatctacacccaatctctgctcagctcagtccaaaccactatgctaaaacatgccccaatcttgaaagcatcgttagacaggccgttgccaagaagttccaacaaacctttgtcaccgtcccggccacccttcgtctcttct

SEQ ID NO: 43325 - DNA, 285 bp, Glycine max
  Clone ID: 701036957H1
tatacttctcaattgaaagcagctaaatactatgtaatatggccaacaactttcactcattgctcccatatctaaaagttgattgatccttagaatcttatcttctacatgaggaatagatactgtgcccacttccgttggtgaatggaactcttgattctattcaatctcccttctccaaccctctattatatatcctgcaacctgctttgtttcttgtagtgttctaatcattttggctttggctttccaatcctcctgatttcctcttctacgattctaaaa

SEQ ID NO: 43326 - DNA, 263 bp, Glycine max
  Clone ID: 701037023H1
cgttcctctttccattcctttcttcctccgtcccattctcgaattggcgtgtgcctcttgctatccctcaaaggtcttttgaagcagaagaatggacttctttactagagacataaatgaggactctatgcttagatgtccattcttgaggaacatcaatgagcctactaacttctcattcttttcacctttggctttaccaatgcctgttcgtggagctaaaggtccaatttttgaagatggtcccaattttgatttggcat

SEQ ID NO: 43327 - DNA, 262 bp, Glycine max
  Clone ID: 701037040H1
cttcgctttcccttccctgcactttgcactttgcactttgcactctgcacagcgcaatggcgtgtttgttgagagcgagaaacacctgttactctctgatgaggcgcattcgaatccggtgcatgagcaacgttcccgagaacacggtgtattcggggcccacctcgcagagctcaaccaagcgcgtcacgctgagccagttgcgccagaagcaccgctcctcccagcccatcaccatggtcaccgcctacgactaccccgc

SEQ ID NO: 43328 - DNA, 277 bp, Glycine max
  Clone ID: 701037112H1
gccaaaatatgtctcccaaatacatgtcccttttcctcctagtaatactagggatggcttttctggccactacttcccttgctgatcgtcgttttctttcggtggaagatggtcatgatcaccatcaccaccacccaccaaaaaaacactggcctccaaccacacaaaatgaaccttcaaacgtagaaaacaaggagaacactgaggtggaggatggtcatgatcatcaccatcactacccacctaaaaaacactggcctcctaccacacaaaatga

SEQ ID NO: 43329 - DNA, 275 bp, Glycine max
  Clone ID: 701037141H1
ctctgtgaatttcctcatatttctataagacacagaatatttaagaatggagttcaccaaaacaagttccctcctaatattcttgctagtgtttgtctcaagcttgatccatgctaaggcataccaaaatctatactgtggcagaggaaccagatgctatggaaagtacatcacatgtcctgctgaatgccctaacagtgaaacaaacaatcctaagactaaggtttgccaaatcgagtgcaacaaacctacttgcaaggcagtctgcagaagtc

SEQ ID NO: 43330 - DNA, 271 bp, Glycine max
  Clone ID: 701037143H1
gctggtacaaaatccggtgccttatggagaattcaggctgcaaggtctcatgcatagacctcaaaagtgctggaattgatcaatctgatgctgattccgtgctatcttttgatgattacaataaaccacttatggatttcatgtctgatttgcctgagaacgaacaggttatattggtggggcacagcgctggagggttgagcattactcaggcctgtcacaagtttgcaaacaagattcgtttagctgtttatgtggcagcaactatgct

SEQ ID NO: 43331 - DNA, 272 bp, Glycine max
  Clone ID: 701037156H1
ctctagctccaattcaaccatggcttcgagactcacggtaacagccttggtgctgatagctttggcaacagtttctctccaaacctcagcttcatcagtgggtaaattcatcgacgaaaccatcacttcccacaagatcgtcattttttccaagacctattgcccgtactgtagaagggcaaaagctgttttcaaagagttgaaccaagttccacatgttgttgagctcgacgagagagaggatggttcaaagattcaggatatcatgatta

SEQ ID NO: 43332 - DNA, 280 bp, Glycine max
  Clone ID: 701037212H1
gagttgtcctgtttcggatcaagggatggaggcattggcaaatgggtgtccgaatttggtgaaagttaaggttaagaagtgtaagggggttacccctgagggtggtgattggttgaggaggactagagggtcagttgctgttaatttagatactggtgaggcagagcttcaggaagcgagtgctagtgatggaggggcacaggacaatgttgtagagtttcctcagatgcctgcccaaatcgtggccgcagcagcatctgcatcaagcagcaccactcgg

SEQ ID NO: 43333 - DNA, 283 bp, Glycine max
  Clone ID: 701037322H1
tggggccagtgaagaaggctatggaagatgcaggattacagaagagtcagattgatgagattgttcttgttggtggaagcacaaggattccaaaggtacaacagcttttgaaggactactttgatggaaaggagccaaacaagggtgtcaaccctgatgaagcagttgcctatggtgctgcagtgcaaggaagcattttgagtggagagggtggtgaagaaaccaaagacatccttctcctggatgtggctcccctcactctcggaattgaactgttggtgga

SEQ ID NO: 43334 - DNA, 279 bp, Glycine max
  Clone ID: 701037352H1
gaagggtgattaccacaggtaccttgccgagttcaagactggggcagagaggaaagaggcagcagagagtactttgcttgcttacaaatctgctcaggatattgctcttgctgacttggcccccactcaccccattaggctgggacttgctctcaacttttctgtcttctattatgaaatccttaactcgccagatcgggcttgtaatcttgccaaacaggcatttgatgaggcaatttccgagcttgacacattgggtgaagagtcatcaaggatagt

SEQ ID NO: 43335 - DNA, 158 bp, Glycine max
  Clone ID: 701037405H1
ggcaattgttttaagttaacacggctgacccagatgtaaagcctaagtaccctgttcctgagcaggcccataagcccagaagcaaaagcttgacctaggttacacatcaataaattggattgcagagggacagagaaaccctagggaggaagcagcgg

SEQ ID NO: 43336 - DNA, 155 bp, Glycine max
  Clone ID: 701037419H1
gttcttccaagaaaaggagattcagaaagcaattaagatgattaagttgaggtcaatgaggtttagccgaagcagctccaagcttggaaatggtgggcacaaagcaacaacacccactgaaaaggattgcagaagcattggtgaaatccaatggg

SEQ ID NO: 43337 - DNA, 153 bp, Glycine max
  Clone ID: 701037435H1
gagaatctaatttgaaacaaaaatgaaggccggtgcagttgagtctggtgaaatttcaaaaggagcacccccaagaaaagggttgattagagggctctcaataatggactttattttgagaattgttgcagccattgccacactcggaagtgc

SEQ ID NO: 43338 - DNA, 152 bp, Glycine max
  Clone ID: 701037453H1
aagaataagcgtcgccgtgtacagtgagtttttgatgtcttggctgttcaaggacgttgttagtaaaaactttcaaactgttaagagtttatttgtattgtctgatgttcgaaactaaaagcctgcttgctttatgaatatttatattaaaa

SEQ ID NO: 43339 - DNA, 197 bp, Glycine max
  Clone ID: 701037465H1
cttgtatgtcacaattggttagacgaagactgtgtaaagtttttaaggaattgccacaaagctttgccacaacatgggaaggtgattgttatagactatataattccagaagttccggattcaagcaaaatttctatgcaaacttgtgttgctgatagtctcatgtttttagtaacaagtggaaaggaaagaactga

SEQ ID NO: 43340 - DNA, 195 bp, Glycine max
  Clone ID: 701037476H1
gcaaaatcgctgtgaaaatgagcggaacggtgaagaaagttagcgatgtagcattcaaggtgggaaggaacatcgattgggatggaatggcgaacttctggtctccgatgaggctcgcagggagttctccaatctccgtcgcgctttcgacgaggttaactcccaactccaaaccaagtttagccaggaacctga

SEQ ID NO: 43341 - DNA, 152 bp, Glycine max
  Clone ID: 701037479H1
gctaaagatgttgaggttcaagagcaaggaggagagtactctgccaaagactaccatgaccctcctccagcacctttgttcgacccagaggagctcacacagtggtccttctatagagccctcatcgctgagttcatagcaacccttctctt

SEQ ID NO: 43342 - DNA, 269 bp, Glycine max
  Clone ID: 701037521H1
cttgttcgtccggttgttcccatcttctctctcgtaccaatcaaatcacacttttgtgttgtgttgggaaaccctaaaccccgttttcggtgagatcgagatcgatcgaacatggatgaggagtacgatgtgatcgtgttgggcacgggtctcaaggagtgcattctcagcggtcttctctccgtcgatggcctcaaggttctgcatatggataggaacgactattacggaggagaatccacttcgctcaatcttattcagctttggaa

SEQ ID NO: 43343 - DNA, 144 bp, Glycine max
  Clone ID: 701037580H1
gttgattttgtttcatagcttgttggttatgctgttgtggagttacttctctgttgtttttaccgatccgggcagtgtccctccaaactggaagcctatgattgatgaggaaagaggagaggctgatccgttggttgggacaga

SEQ ID NO: 43344 - DNA, 200 bp, Glycine max
  Clone ID: 701037592H1
ctgagtttgccctgtatgaaagctaaaatcatgtagttctgtttatgactgcagttgcttcactttcttccctggttcacaagcctagtttaaaggtacttccagataagggcctagaagttggattgtctgggtctgctgccaaagggaagcctcctacaacgttgtcaccctcaatgttgattgttgattggagatgt

SEQ ID NO: 43345 - DNA, 271 bp, Glycine max
  Clone ID: 701037851H1
atttgcccaaaatgcaagcaacaattctgcctcgattgtgacatctacgttcatgagagcttacataactgcccaggctgtgagagttccaggcactctaagtctgtaactgcttcccaatgattgccaatcttctgcctgtgacttaaaatttccataaaaatggcgttctacattgtctccttcatattgctatactgcatccacccactggacccatgaataagttccggtgccaagtgactgactaacattatcatctgctcattga

SEQ ID NO: 43346 - DNA, 268 bp, Glycine max
  Clone ID: 701037855H1
caaacattaccgacaaagtagtttcatccttggccaatctgcatggttggactcttgagaatctaaaccttgatggttgcaaaaatatcagtgatgctagcttgatggcaattgctgaaaactgtgcattgctatgtgatcttgatgtctccaagtgcacaatcactgatgctgggattgcagtcctggcacatgccgaacagattaatctgcaaatcctttctttgtcaggttgcactttggtctcagacaggagcttgcccgctct

SEQ ID NO: 43347 - DNA, 267 bp, Glycine max
  Clone ID: 701037857H1
gttcttcagagcatcttcatcaatcaagatatccacatgtattatgaagaaactgacaaaccagctctagcccgtacttcaaacttgaatgaggaacttggccaagttgacacaatactttctgataaaactggaactctgaccatgaactcaatggagttcatcaaatgttctgttgctggggtagcatatggccgcggtgtgacagaagttgagcaagccatgggtaaaagtaatggtttacctatttttcatgagcatattaat

SEQ ID NO: 43348 - DNA, 266 bp, Glycine max
  Clone ID: 701037858H1
cgacggaacacattctacgtactcgacagacaattccatccctgtcgtcgtttctcaactttgcgtatcagaagacttcattttcttctgcatttctccgttaaagaaaaagcaagaacaaaattaaatttactattttctgtgtgacactgtgtcttatttatgctctttctgtattttctttctacatctatattctaaaccttccttttcctttctgtctgcacctgcgttttcatttattgatgtccttcttttgttttatt

SEQ ID NO: 43349 - DNA, 267 bp, Glycine max
  Clone ID: 701037871H1
gaggcggtgatgtcttcaattagattcctatggatcctgatggtgtctttgacggcatcatgcgcgttaagccaaccgcagaagctatcggcgtacgatgttctgatggagtacgggttcccggtgggtcttcttcccaagggagccatagggtattcgctcaacagagacagcggcgagttcgcagtgtatttccaaggagcgtgcagcttcgacatagagtcctacacgctcaagtacaaatccaccatcacgggtgttatctcc

SEQ ID NO: 43350 - DNA, 292 bp, Glycine max
  Clone ID: 701037903H1
gcttcttgcaaagttgagggaatacaaatctgatctaaccaatttgaaaaaggaatttaaaaggctaacatcacctaatgctgacgaggttgcccgtgaagaattgttggagactggaatggcaaatacacatttggcttctgctgatcagagagaacgattaacaatgtctgtggagagaataaaccagtcgggtgagagaattagggagagccatagaaccttgctggagactgaagaactaggtgtcaacatcctccaagatttgcacagtcagagagagactctactg

SEQ ID NO: 43351 - DNA, 287 bp, Glycine max
  Clone ID: 701037922H1
gttttgaatcatagggaagtatagcaaacagttatatcataaagtcaactgttcttgccgttgttctgtctttcagttatgtgtttcagctggccctgcccttggcctctggccccaagatatcttcaaacttcaaagtttctcttgttttgtcttcttgaattccaccttcatcaacctagagccccttaaaacttaaaagtgtcctaatttagttaattgatcccataccatagtctattccattaatgtcaggtggtgaagacactgagggctacaagtactgg

SEQ ID NO: 43352 - DNA, 300 bp, Glycine max
  Clone ID: 701037931H1
cttcaacgtcctcttacgagcagatcccaattctccttcccagtttcaaaccctaattccctcattcccatggcctcagaagagcccactgtcgcggtggaacccgctcccgaacctgccaccgccgagcctcccccggaggagaaggaggagcccaaacctgaagccaaggctaagaaaaccaaggaacccaaacctaaaaaggtttccagaccacgcaaccctcccactcatccttcctacgaggagatgattaaagacgcaattacctcgctgaaggagaaaaccggttcgagccaa

SEQ ID NO: 43353 - DNA, 285 bp, Glycine max
  Clone ID: 701037936H1
cagatctgtcttccgaagcaggaactaaatatggctgacttgttggaatggtcaaagcaagataagaaacgaatgcttcatgtcgtctaccgtgttggtgaccttgatcgcaccatcaaattttacacagaatgtttaggaatgaagcttttgaggcaaagagatatcccagaggagaaatatgctaatgcttttcttggatttggccctgaagaatcccattttgttgttgaattaacatataattatggggttacctcgtatgacattggcgatggctttgga

SEQ ID NO: 43354 - DNA, 285 bp, Glycine max
  Clone ID: 701037944H1
gcaagctagctaggttgaaaatagtttggttttgtagtaagtgaggtgaggtgccaaaatggtgaagataactcttggtactttcgatgactcttttggtgttgcctctcttaaggcttatttggcagagttccatgcaactctgattttcgtgttcgctggtgttggttcagccatcgcttacaacgagcttacaaaagatgcagccttggatccaacggggctggtggcagtagctgtggcccatgcatttgcactgtttgtaggtgtctccgtcgcagccaa

SEQ ID NO: 43355 - DNA, 282 bp, Glycine max
  Clone ID: 701037951H1
gctttgcagagtataagatctggtatgctcttgctcccacgtctctgattgattacttgcaagcttcatctgcactcatggatcccaaccagcccgtgggtgaaaactacgccaatcccaggacttgcttctttcatgtcctcttcaaggctgcagccttggcattttacattctctcggccctctttattgataactttgtcatcattttcgtggtgaccgttcttcttgccgcccttgatttttgggtagtgaagaatgtgagtgggcgaattttagttg

SEQ ID NO: 43356 - DNA, 284 bp, Glycine max
  Clone ID: 701037966H1
gtaaaatacatccccactgaagttcaagttcttgtgtgtaaaatggccaacattttcctacacaatgggggcaacacttgcaaggctaccctctatctcttattcataaccacagccttttttatcgcaaactctgcaaggattctagatgaagtggaatcccaaccccaagccataggcaatctaccagcacctggagctaccaatccttcactcacaacagctccagtcaccaccacaccacagatagatcctgccaccactttgccaagtggccaaacatc

SEQ ID NO: 43357 - DNA, 159 bp, Glycine max
  Clone ID: 701037995H1
ctctttctctagtcctgttatttctcagcgcgtaaagcatggctttgttggtggagaaaaccacgagtggtcgcgagtacaaggtcaaggacctttcccaggccgacttcggccgcctcgagatcgagctggccgaggttgagatgcccggcctcatgg

SEQ ID NO: 43358 - DNA, 280 bp, Glycine max
  Clone ID: 701038011H1
atcaacgctgggaaggcttcaaaggggagagaacggagggtcataaacccattttcagcgtcaagagatcgtcgatcatcggacggtcgaggaccagcgtggcggtggaggtgtacgatagccccggtgtggagtacctcatcgaagttgcttcccgcagcgctgctgcaaggttttcaatgccgctaaggaacttgtggctgagattcgtcgcaaagtggaccccaccaccagcgttatgctcgggaaggaagtcttttggctctgcgtgaagcctggt

SEQ ID NO: 43359 - DNA, 274 bp, Glycine max
  Clone ID: 701038036H1
atcgcccttccaattttcttcaattcaagcaccaaactttcttcttcaagttcccgaacctgaacccgaacccgaacccgaacctccttcgattgcgcaggctcaattgctcagtatcagacggcaccgttccgtcttcggtggtgccacggactcttcttctcttgcggtgaagtctttgttcagaagaaagcagcagaggtgtcttctgagctcaaagggacctccatatttctggttggtttgaagagctcttttaaaactagtttgggga

SEQ ID NO: 43360 - DNA, 274 bp, Glycine max
  Clone ID: 701038050H1
gtttgttggttcgagccacgccctcaaaggaagccaatgaagcaaaagcattttcttcatctacatgaccattagttccaaaaacccactgactactacgagtgcccgttgtctgcttcagaatcactccctgaggaacccccgaatccgaatcgcttgacgaagacgaatcactgcttgaactgccagagctactagaactactacttgcatggcctccaacaacatctttatctttctcaatctccacaggggggaacatactcgttggcat

SEQ ID NO: 43361 - DNA, 274 bp, Glycine max
  Clone ID: 701038076H1
gccaagtatcccaaattttcccccaatctcttcagacattcatccactgtccctctatagaaccattcataatccgaatcccaaaaccaaaacctagggttcccaattcacaaaatccacaatgaaagcctctttgaagtccgagaagaacacaagaaacccctcttccgtgcaaaagtcccactgagcatcctcggcaagcccttccaatccggcatagtcgctggcgaatccaaagaactcacactcaacctttgcaccttcttcgaatcgg

SEQ ID NO: 43362 - DNA, 272 bp, Glycine max
  Clone ID: 701038077H1
gtgagttcaaatcaattttaggcagaaaaatgaggtgttttggtcttgtagtgataggtctagtggttgtgcttggagggttacccttctcttcaaatgcaggattagatcccttcttttacaagaagagttgtccccggtgcatttcattgtatttagagtcgtagagaaagtttcaagaaccgatacacgtatgcctgccagcctcgtcaggcttttctttcatgactgctttgttcaaggctgtgacgcatcaattttgttgaacaaca

SEQ ID NO: 43363 - DNA, 273 bp, Glycine max
  Clone ID: 701038088H1
cctagaaaacaagactgccttcaccaccaagaaagactatggtaaagaggagagggaagctcaatgggctcttgctcagaggaccctgcatggacttcaaccaccagaaacttctaatatcttcaatgaaaagagcagtatagagaactcactgagattgctgagcaggccaagaggagagctgaagttgcaaggcttcgtgagcttcacacacttaagggacatgttgagtctgtggtgaagctgaagggtctggacattgacacaatccag

SEQ ID NO: 43364 - DNA, 281 bp, Glycine max
  Clone ID: 701038189H1
cttctgccctgcttcagcagctgttttagtcttgggtgagaacattccaaacctcattcaagatgggatcataaataccgaagggttcccgattataaaagggaaatttcaactatccccagaaatgccaattatggacacagctgacattccatggtgcagcttaggtgacccaaccatgcacaaggttatatataatcatgcgtcaaagattatacgatattcacatttaacagattggtggcttggaaacaccacaagtgaccttgaacctggtgcta

SEQ ID NO: 43365 - DNA, 113 bp, Glycine max
  Clone ID: 701038251H1
ctccctctttctcgtcactagctctgtgcattcttctctcgctctctgccttccatcacactcggcatttcctttcccaagatagtagaagatggcagacactgaggatattc

SEQ ID NO: 43366 - DNA, 282 bp, Glycine max
  Clone ID: 701038556H1
ctagggttaacatttctccatttccattttctctctcacttttcaagaatcgtaagctatgggaaagtcttacccaactgtgagtgctgattaccagaaggccgttgagaaggcgaagaagaagctcagaggcttcatcgctgagaagagatgcgctcctctaatgctccgtttggcatggcactctgctggaacctttgacaagggcacgaagaccggtggacccttcggaaccatcaagcaccctgccgaactggctcacagcgctaacaacggtcttga

SEQ ID NO: 43367 - DNA, 278 bp, Glycine max
  Clone ID: 701038585H1
aattaacctcactcaaactcgggatcacagaaaccaacaacagttcttgcactgaggtttcacgatgttgctggaacttgcacttggtttgtttgtgttagctttgtttctgcacttgcgtcccacaccaagtgcaaaatcaaaagcacttcgccacctcccaaaccctccaagcccaaagcctcgtcttcccttcattggccaccttcacctcttaaaagataaacttctccactatgcactcatcgatctctccaaaaagcatggccccttattct

SEQ ID NO: 43368 - DNA, 278 bp, Glycine max
  Clone ID: 701038590H1
tccaaatacagaaatatcattttccgagacaatcccatcttccatttccatcttcaatatttcttctcatcgagaagcttcgcgaacgaaaacaaagaaccctagacagatccattccatagccatgtcaggtgttggccctctatctcaggattgggaacccgtcgtcctccgcaagaaggctcccaccgccgccgccaagaaggacgagaaagccgtcaacgccgcccggcgctccggcgcggaaattgaaaccctaaaaaagtataatgctggga

SEQ ID NO: 43369 - DNA, 255 bp, Glycine max
  Clone ID: 701038604H1
agccgccgttgcacgccactcctaacgcttttgataacgacgtttgttcctacttcctacgttcccttctctctctgcgtgtctctgtctctgtctgcggctccgtacgggtttcgaggcaatctaggtgcaaattgcttgtcttgaatagaatgccaggagaagaagtattagctcaagaagatgagaggggtagatgttttgagcctgaaacctctgaggatgagtggcggaagtctcgagctagatctctta

SEQ ID NO: 43370 - DNA, 254 bp, Glycine max
  Clone ID: 701038606H1
gagagagatgccaatatagctgcacaacaggctgagagggctaagaatgatcgcatgagtggtcgggagctatttttgtcaaatgctagcttgtttgtggatgatgcagaagcatatgacgtgtaccagagagaaccagaatcttatgaaactgaagagaatgggagtaggaatgctgcagaagatggtcccagctcctcagcaacagccgctgctgatggtgattatcttgatgacatagatgacgatgacga

SEQ ID NO: 43371 - DNA, 252 bp, Glycine max
  Clone ID: 701038624H1
gaaacatttcactaatagagagacataagcataatattgagaaataatggagggttgtacttattgtgtgaagttgctatgccttgttgggtttgtggtgcttgtgagtactattgcaggggtggagagtgctggtgaatgtgggaaatctaccaccccagataatgaggcttataagcttgcaccatgtgcctcagcagcacaagatgagaatgctagtgtttctcagagttgctgtgctcaggtgaagaa

SEQ ID NO: 43372 - DNA, 252 bp, Glycine max
  Clone ID: 701038630H1
caaaagattgcaatgtttgacaagaatggtggtttacaggctctgattcaatatccagatatccaaacagctgttgtggccaaggaagccttggaaggacactgcatatatgatggaggtttttgcaagcttcacatctcgtattcgcgtcattctgatcttagtataaaggtgaataatgatagaagtagagactatactattcctaatgtaccaccacctgtagtgaatgctcagccctcaattttaggg

SEQ ID NO: 43373 - DNA, 254 bp, Glycine max
  Clone ID: 701038632H1
caatgttgttagaaagccagtccaaaccctcatagagacatttgaaaatttttggtcttgtctggtgatttcctgctgagtatggcggttcttggagaaagatgcttatcctttcttgtcaatgttgtaatagcagaatgcttgctagaagtattctcttcttttgtgtaacttgggtttgtatgattgcttaaattagctaatacttttagctataattggaactcttggatcctcttgtgcgtgccttgttt

SEQ ID NO: 43374 - DNA, 251 bp, Glycine max
  Clone ID: 701038640H1
gccaaattaaatatttggtatactgcatggagaatgctattctaaatcttccaccagaacaggaacagatggtctggttgattgatttccagggtttcaatatgtcacacatatcaataaaggtgacacgtgaaacagcccatgtattacaagaacattatcctgaacgtcttggtctggcaatactgtacaatgcacctaagttctttgaaccatttttcacgatggtaaagcccttattagagactaag

SEQ ID NO: 43375 - DNA, 250 bp, Glycine max
  Clone ID: 701038641H1
gaaaactctgttctcggccatggaagaattacggaaactagagaaagtacatagcatgctggaattcatggaatcacggggcgtttcaaacctcgatcatcactctaaccgcttcctcgctaatttcattctcttcttgatagaaccctccggagaccttgccataaacgacaagtgctccttgctttcccagcttattcccactctctcatcttcattccttgaagacgcgtatcaacaccaccttgac

SEQ ID NO: 43376 - DNA, 248 bp, Glycine max
  Clone ID: 701038645H1
ccagatcttaatcaagaggagtgagttttgtttttccagccatgacgccgctggtgagtctaagcctttctctcagatttacgcttaacagagttacagtcactcagtaatctactccttttctagatcctgcatgctgggaaaaccaacaaaaattcttacaagacactcattgcagccgagtatgctggcgtccaagttgattttgcccctaattttgagatgggtgtctccaataaaactcctga

SEQ ID NO: 43377 - DNA, 107 bp, Glycine max
  Clone ID: 701038647H1
tttttggtggatgatgtttgcatgtgctacacttgtggccaagttgtacactgtacgagattctggtgtcatatttgctgcattcagtctagttgaaattgagtact

SEQ ID NO: 43378 - DNA, 249 bp, Glycine max
  Clone ID: 701038656H1
gaaaatcctcacccattttcttcgtagccaaacactctgaaattctcagttatgtcgtggcaagcgtatgtggatgatcacctactgtgtgaaatcgaaggtaaccacctcactcacgccgctatcatcggccaagacggaagcgtttgggctcagagcaccaacttccctcagttcaaacctgaggaaataactgccatcaataatgactttaatgagcctggatcacttgctccaactggattgtat

SEQ ID NO: 43379 - DNA, 247 bp, Glycine max
  Clone ID: 701038657H1
gttgacatgaagtccatgtttcagttacttgaggaaagagcagatattagggataaagaaaatgcaaagcctctgaaatttaacgggggaagaatccaatttgagaatgtacattttagttacctcacagaaagaaagatactagatggaatatcatttgttgtgccagctggtaaaagtgttgcaattgttgggactagtggaagtggaaaatcaaccattcttagattgctattcagattctttg

SEQ ID NO: 43380 - DNA, 245 bp, Glycine max
  Clone ID: 701038660H1
caggctctggttttgcggttagggtagctctttctactcaaaacaaaacaaaacatcaatttctgtttcagttcgcggagatcaatatttgtcgctgaggtcgatcgtcgataaaaggcaatgtttttgtgggattggttttatgggattctagcgtcgcttggcctgtggcagaaggaggccaagatcttattcttgggcctcgataacgctggcaaaaccaccttgcttcacatgctcaaaga

SEQ ID NO: 43381 - DNA, 248 bp, Glycine max
  Clone ID: 701038662H1
aactattatgaaatcgacaatacacctactggaacttgtgctgtttgtgtggttggcggtgaaaggtcccttgttgccaacttatcagctgcaaattgctataagtctgagcatttgacgagaccggaaaattgggcattagttgaaaaggccaagtatttctacatttctggctttttcctcactgtatctcctgattccatacaattagttgctgaacatgcagctgcaaataacaagttcttcat

SEQ ID NO: 43382 - DNA, 249 bp, Glycine max
  Clone ID: 701038663H1
gaagaaacacgttcgtttcgtttcgttcccatggcggtctccgtttccgcgtcctccgcgattgcttctttgaactccgaactctccacgcgcttgccaccctcactcgcctccgcatcttcttccgccaagcaatcctttctgcaattcccgtcgtgcacgcgccttcttcggattagcactccacgcgctcccgctccatcgcgacctcgattccttcctctggttcaagcgaagaaacaaacctat

SEQ ID NO: 43383 - DNA, 244 bp, Glycine max
  Clone ID: 701038673H1
tagcaagctagctaggttgaaaatagtttggttttgtagtaagtgaggtgaggtgccaaaatggtgaagataactcttggtactttcgatgactcttttggtgttgcctctcttaaggcttatttggcagagttccatgcaactctgattttcgtgttcgctggtgttggttcagccatcgcttacaacgagcttacaaaagatgcagccttggatccaacggggctggtggcagtagctgtgg

SEQ ID NO: 43384 - DNA, 243 bp, Glycine max
  Clone ID: 701038675H1
gtaagaaatgctgcacaaaagagtgactgcaatgttggtcagttggatccaaacttgtatgatgatgctgggtttgaatttgatttggagacaaaaaaggatgaagataatgagagtggacagtaagaactaggttccatttgtaggtcaatgtgtctcactgtaatgtgtagtgtctttttctggaagaaaatacaaatcatgctttgtaaattaaatttcacgcaatccatttgtacatat

SEQ ID NO: 43385 - DNA, 248 bp, Glycine max
  Clone ID: 701038678H1
aagtaatcgagcttcagcaatggtgtacgtcaaggctcagaaatcaaaagcctacttcaagagatatcaagtcaagttcaagagaagaagagagggaaaaaccgattaccgtgccaggattcggttgattaatcaggacaagaacaaatataacactccgaaataccgatttgtggttcgctttagcaacaaggacattgttgcacaaataatatctgctagcattgccggcgatttagttcttgcta

SEQ ID NO: 43386 - DNA, 246 bp, Glycine max
  Clone ID: 701038679H1
gggcatctatgactaggataatggcagggcttcaccagtctctagaaagggaagcttttttgccaagattaggagaatcttcaccaccctcttggtttaacaagttatattgagctgtctgattgagcatgattgaatgcttggggacatagatgacaagctcattggaaactgaaggggaggaagtgccatggatttagaaccattatgatgttacggtcgaaattatatacatttttcttggag

SEQ ID NO: 43387 - DNA, 245 bp, Glycine max
  Clone ID: 701038687H1
agaaaaagaagcgaaactaaagtcagcattcgaaaaagatgagtagcatcggtacaggttacgatctatcggtcaccactttctcccctgatggccgcgttttccagatcgagtatgccgctaaagccgtcgacaacagcgggactgttattgggatcaagtgcaaagatggggttgtgttgggcgttgagaagcttattccgtcgaaaatgatgcttccgggttccaatagaagaatacactcc

SEQ ID NO: 43388 - DNA, 242 bp, Glycine max
  Clone ID: 701038689H1
taatcatgtggtttgtgtcatcccaggaggaccagcatgcaagtctaatctcttcaataaactaagttccttgcttagagtgaatgagatggatgtaatatgtgctgctttcagtggacagttagatctgtctattttgaaatcaccatgcgtactagtttcatcatcatgctcgacagatgagacaattgttgcagattcagatattgaagttgaaacagccacatcagtccgctcaaatg

SEQ ID NO: 43389 - DNA, 241 bp, Glycine max
  Clone ID: 701038692H1
cgtgcctctagggttatcatatctccatttccatttcctctctctcagtttccaagaatcttaagctatgggaaagtcttacccaaccgtgagcgctgattaccagaaggccgttgagaaggcgaagaagaagctcagaggcttcatcgctgagaagagatgcgctcctctaatgctccgtttggcatggcactctgctggaacttacgacgtgagctcgaagaccggtggtcccttcgga

SEQ ID NO: 43390 - DNA, 244 bp, Glycine max
  Clone ID: 701038718H1
aaaagaaaaaagaagagagaaaaatacaaaattaggatatttgttccaggcctagcaaggggtagatgacctcctaagaggaaaagcttcagcagttgcaactgaggaaaaggtgcatgaaaatggtaagcagctggtttttcaattgtaccaataatgtaatggtgttcgaccccacctggattataaagagttatttacatattgattatttcctttgttaaatgaacgagtgaagtgaaag

SEQ ID NO: 43391 - DNA, 245 bp, Glycine max
  Clone ID: 701038731H1
gccatgttcaaggtactgcacaaatccccggatatacctgaaagtttgtcttcagagggacaggatttccttcagcagtgtttcaaaaggaatccagcagaacgaccatcagcagcagtgcttcttacacacgcctttgtacaaaatttgcatgagcaagatgttcaagttcattcacaagggcaaagctgtcccagaggagacgctggaccaggagatgattcacgtaggcatagtcccagtaa

SEQ ID NO: 43392 - DNA, 248 bp, Glycine max
  Clone ID: 701038732H1
tgttgttgttgtagctatcagtaggtgaatccaaaaccctagccctcactctcaccaccattttttcaattcttgagctatgtttcagggataatagggcagggatgtacaaagaacgagagcgaggtggtgtttccgtttccgcctctaaatccgaggatcggaagcgaatcaacgacgttctcgataagcacttggaacgatcctctccttccacttcccgccccatcaacaccgcttccaagaat

SEQ ID NO: 43393 - DNA, 236 bp, Glycine max
  Clone ID: 701038742H1
cttcaacctcaccaaaggaactaagaatttcattgaggctagagaaagtggtgatcaatatgtcaaagaatccaaaagttttctttgatattctaattggaaagatgaaagctggacgagtagtgatggagttgtttgccgatgcaaccccaaaaacagctgaaaacttcagggctctctgcactggggaaaaggggattggacgatctgggaaacctttacactacaaaggttct

SEQ ID NO: 43394 - DNA, 238 bp, Glycine max
  Clone ID: 701038744H1
gtgagaaagaaaaatggagggaaaagaggaagatgtttccttgggagctaacaaattctcagagaggcaaccgattggaactgcggctcagagccaagacgatggaaaggactacacagagccacccccggctccacttttcgagccctccgaactcacttcttggtccttctaccgagccggaatagccgagtttgtagccacttttctctttctctacataaccatcttaaccgtc

SEQ ID NO: 43395 - DNA, 235 bp, Glycine max
  Clone ID: 701038759H1
gggagatgcagtgtatgagattgaccctgccaaagaccttgaggcttctgaggcttatcctcacgtggaatacagcactgtttctgaatatttggatcagtttgtctgatttccgaaatcttaggaaccaaagcacttatatgattttatcactctgcaaaatgcttaataaaacaaatgcagttcttccttctgtttttctttcagaaaaggcctatgcaggcttttttgcagc

SEQ ID NO: 43396 - DNA, 231 bp, Glycine max
  Clone ID: 701038789H1
aagtactataatagctatctatcgaaaccagcgagcaagatcgattcgggtcaaacatggatgggcaatcgtcggagaaactgatactggtgaagcgcgagtcaaacggcgtcgcactggtgatgattaatcgtcccggttcccttaactcgctgacccggcccatgatggtggacctggcccaggctttcaagagactcgaccgggacgagtcggtgcgggtcgtcatat

SEQ ID NO: 43397 - DNA, 238 bp, Glycine max
  Clone ID: 701038795H1
gtgaaagagaatccgaggcgaagagaagagaaaaattaagatggaggggaaggagcaggatgtgtcgctgggagcgaacaagttcccggagagacagccgattgggacggcggcgcagagccaagacgacggcaaggactaccaggagccggcgccggcgccactggttgacccgacggagtttacgtcatggtccttttacagagcagggatagcagagtttgtggccacttttctg

SEQ ID NO: 43398 - DNA, 197 bp, Glycine max
  Clone ID: 701038852H1
acttaatcgatttcccatatttcatccgtacgccaaagttggtggtattcactctccacgctaattaggttgttgctgtacatcatcttcctcaagttgtctgattgattgagtatgtacattgtgtacaggaagtatttgcacctaaatagttttctctgttattttggtattatctgtaaaactagagtaaaggt

SEQ ID NO: 43399 - DNA, 190 bp, Glycine max
  Clone ID: 701038859H1
gggaagatgcatctgcagcttgcagatccacaaagaagtataaatgtttgattattatttagagggctctatctagttaaaattaaatagttattgtgcttttgttttattagacagttgtaaggcactgtgttctacatgtgtttgcagttgtctgcatgcattgtaattttcaaagtccgctttatca

SEQ ID NO: 43400 - DNA, 152 bp, Glycine max
  Clone ID: 701038862H1
caccattctaagttatatcagtatgagggggatcatattgtcattcatagctctagttggatttagataaattgtacatagcttggagatgaattcctgacctgtttctattcttctttgctacacccaattagagatactgttgattgacc

SEQ ID NO: 43401 - DNA, 190 bp, Glycine max
  Clone ID: 701038867H1
acctacctctttttcttctctctcaacaacttcaccttcttcctcctcgatcatgtctcacttcaagggcaagtaccatgatgagcttatcgccaatgctgcgtacattggcactcctggaaagggtattcttgctgctgatgagtcaacagggacaattggcaagcgtttggccagcatcagtgtagag

SEQ ID NO: 43402 - DNA, 186 bp, Glycine max
  Clone ID: 701038880H1
tttgaatagaataaattagagaagaaaaagtctcaaatcaggtggaatgggtatctgcatatcctctgaatcttcagcgattcatggagcccctgaagaggctcgtgatgaaaatgtgttagtgtttgaagcaaccaaggttctaagtggactttgctctgcttacactaaacaaggtagcaaagg

SEQ ID NO: 43403 - DNA, 184 bp, Glycine max
  Clone ID: 701038887H1
cgatttctgagattccttcgaattgttaactctctttcagtttcaagttggaaactttttcgattttcgctttctggaggtgtgaattgttgtttgaaagtcacaagcaatggtgaaggacactgcgtattatgacatattaggtgtcaattatgatgcatctgctgcagagatcaagaaagct

SEQ ID NO: 43404 - DNA, 186 bp, Glycine max
  Clone ID: 701038888H1
gacgctgaaagtgaaacgcaaaatcccgtgacggagtgcttccactgcactgtcatacaatggcttcctccaacactcccaaacccgaaaagaagaagagtaccaaaaaatccgaaatctccaaagccgaaaagaagaaaaccaaaaacgctgaaatccccaaaaccgatggcaaaacgaagaaga

SEQ ID NO: 43405 - DNA, 266 bp, Glycine max
  Clone ID: 701038934H1
gctgagttgaccaaggaactccagtcagtccaggcacaacttgtggctgagagatcaagatgctttaacttggaggccaaaattgcagaactccagaagttgctggaatcaatgcagtctgtggaagatgaggtacaggctcttcgtgaaaagaaatctgctctggaccaggagatggagctcgctgcaacagctgagaggaaaagttctggttggcgggtttggtgggagtgaaacatgataaatatgtggccatgagggcaaat

SEQ ID NO: 43406 - DNA, 263 bp, Glycine max
  Clone ID: 701038936H1
ggaatttaatatagtcgtcaaagatccagaatctcaagtcttagagcttactgtttatgactgggagcagattggcaagcatgacaagatgggtatgaatgtcattccattgaaagagattacacctgatgaaccaaaagcggtgactcttaatttactcaagaccatggaccctaatgatcctgagaatgcgaagtcacgtgggcagctaactggaagttctgtacaaaccttttaaggaggatgagttacctcagagtgca

SEQ ID NO: 43407 - DNA, 260 bp, Glycine max
  Clone ID: 701038952H1
catgggctctgacaaaatactcccttctcatgtggtcgcaaatggccacgccccacttgattccggccacgcccgtctcaaagaactcggttacaaacaagaactcaagcgtgatctttcggttatttcgaattttgcgttttcgttttctattatatcggtgttgactggagtgaccactctttacaacactgggttgaattatggcggccgtttcgctggtgtatgggtggtttttagcttctgctttcaccatgatc

SEQ ID NO: 43408 - DNA, 259 bp, Glycine max
  Clone ID: 701038960H1
gcaagttcctttttgttttcctattattgggaattcttaactgtgaggcacaatatttcaatgccaacccatacgactatttacaactagccttaaggtggcctaattcctattgcttgacacatgaaggtggttgcagggaaatagtgccacaatattttactattagctaccttcatcccatgagaagaggaggccctgatctgcaaaagcccctcaccatttaatatgccaaatagcactatggagataaacaaga

SEQ ID NO: 43409 - DNA, 259 bp, Glycine max
  Clone ID: 701038982H1
ggtttgttttcggcctttgatcttcgattctctctctttttctctcgcgaaaaccgtatcagcaatgtctggagaatcagccagcgctattcacaagggtcaagtcgatctcttagacttcattgactggtctggggttgaatgcctcaatcaaagctccacccactctctccccaatgctatcaaacagggttatagagaagacgatggtgcatctggagagtgatgcagacgagcagcttttgctctatattccttt

SEQ ID NO: 43410 - DNA, 258 bp, Glycine max
  Clone ID: 701038983H1
gcttgctatagggtttaggttaaatactttgagagtagtctggttattcagctctcacaaatactagtagaaacaaaaaccgcggaagcagccatggccgaagcagaacacaacgatcccacctcgccggagcgcgaggaccaaaccaaaagcaacaaaaagaagctccgaaagagaaaaagacctcaaaagaccgagcagaaacaagaaggagaagaacgatgcgaacattgatagcgcccaaacacaaactgaaga

SEQ ID NO: 43411 - DNA, 257 bp, Glycine max
  Clone ID: 701038993H1
gcagcagccatccgttttgaggttgtaagaattgccggtgagtgattacaatggctcctgctaaggcggacaatgccaaaaaggctgatcccaaagctcaggctttgaagacagcaaaggctgtcaaatcaggtggccaagtgtttaagaagaaagctaaaaagatcaggacatctgttacatttcacaggccaaggacattgaagaaaaaggaaccctaagtaccctcgtattagtgctccacccagaaacaagtt

SEQ ID NO: 43412 - DNA, 264 bp, Glycine max
  Clone ID: 701039010H1
caacaaacttgattcaaccaaggacagagaacaaaagtctgccgggtcttattattaccttgatgactgagttcatactttggggctgttctttcaccaacacaaccttgcatctgtttgagcttttcatgggatctcagatttggttcagttcatgccttgaaatataagattgccatttttgccgatgaaagcatctttctcaatgaatagaggagcctgcatgcaattgcaagccctatgttggttggtgcattttgtata

SEQ ID NO: 43413 - DNA, 266 bp, Glycine max
  Clone ID: 701039019H1
gtgattcatcacagcatattgtctctgaaattcagaaatgacatctgcaatgccaaggtgttggtggtgatgcattgccatcttacatgcgtggagctgtgtattgggaacccaacaagcctctcaccatcgaggaatttaacatgcctcgccccaaggccggtgaagttctcatcaaaaccaaagcctgtggagtatgccactctgatctacatgttatgaaaggtgaaattccgttttccagtccttgtgttgtggggcatgag

SEQ ID NO: 43414 - DNA, 262 bp, Glycine max
  Clone ID: 701039026H1
gccgtcattgatcaggtttttggtgagaaagcttttgagaaatttggaaaaggtttaatttcattgcatttctccgaccagcaccctggtatacacaaaaagatattgttgttcaagtttgtgcttccagctgctaaggacatggctgatatgactcgactggtggctcttgttccgtattatattgacttgatcggacgatacaaattaagttctcaggctcggtctaaaacagaggctgcacgacaaaaggctgctctag

SEQ ID NO: 43415 - DNA, 260 bp, Glycine max
  Clone ID: 701039028H1
agcaaagttactcacaggtcaagttgttgctgttaaaaggctcaacatattagactctgacgacattcccgctgtgaaccgccagagctttcagaatgagataagatctcttacaggagtgaggcaccgcaatataatcaagctttttgggttctgtacttggaggggacaaatgttcttggtttatgaacatgtagacagaggaagtttggcaaaagtattgtatggagaggaagggaaattgaagctaagttgggcta

SEQ ID NO: 43416 - DNA, 263 bp, Glycine max
  Clone ID: 701039039H1
gtgaaatcgaaaagggctcttcgttgaatttggactcaaggaatacaacatcctgatatttggaggacagattaaagagaaacatcgtggaggaaacaatggcagcaaggtattggtgtcacatgtgctctcaaatggtcaatcccatcatggatatggaaatcagatgcccgttttgccaaagtggatttgttgaagaaatgggtaacacccccagtagcagcagcattcccaatacatcagaatctgattttgaatctgat

SEQ ID NO: 43417 - DNA, 262 bp, Glycine max
  Clone ID: 701039041H1
aaagcctactcattctgcttcggaatgttctgatgatgaaaactctgttataggcagagaggaagggctggaatgcccaatatgctgggaatctttcaatattgttgaaaatgtgccctatgttttatggtgtggccacaccctttgtaaaaattgtatcctcggactgcagtgggctgttgtgaaatttccaacactgcctgttcaacttcccctttttatctcctgtccatggtgcaaccttctgtctttccgtttagtt

SEQ ID NO: 43418 - DNA, 261 bp, Glycine max
  Clone ID: 701039042H1
atactccatcaagaaatgctgcgatttttcatcatccaacacttggtgattttgaattgcagcatttacccatgggtgtgaatgaggccgatattgaagagcgaataattcaacatttgactgctgcagccgcaatgaggagatctcatcacctcagccggagggaaggccatcgaactaggccatctgctcatggccgtccacacttcttagtatactcaactcagcctagtgcaccaccatcagctgcaggagggggaa

SEQ ID NO: 43419 - DNA, 258 bp, Glycine max
  Clone ID: 701039046H1
ggggatttatcaatcgttcactattttcttgaatgattatcactctccaagggtaattttttagagtagagacaagtcagtcttctatgttcggtggcaaagcttgtatgctttgtctctagaacattatggtttagttttgcgatccagcatttcgacacgatgataattgggagaaggggatatagtgatatcttgtataattagtgttttgaactgctacgagttcgtaaaatgtattgcccctttgatttctca

SEQ ID NO: 43420 - DNA, 257 bp, Glycine max
  Clone ID: 701039060H1
gttgctccttcgccacaactccctgccaacatgggtatctccagagattctatgcacaagaggcgtgccactggtggcaagaagaaggcatggaggaagaagagaaagtatgagcttggtcgccagcctgctaacactaagctgtcaagcaacaagacagtcaggaggatccgggttagaggtggaaatgtgaagtggagggcactgagattggatactggaaattactcctggggaagtgaagctgtaactcgcaa

SEQ ID NO: 43421 - DNA, 261 bp, Glycine max
  Clone ID: 701039067H1
aagattgcttgggttgatcattttagtccttgatagttgatattgtgttagtctttgattttataaagtgacactcatttagtgtcaaatgatagtagaaaataaagtaaaaaataaaaaaaccctgtaaagtgagagactaatagaggatatttaaagtcttagggattaaaaatgtagtagtactatgattctacaatctcgaggattgatgtgaagatttattccatttaattctcttgcacacttatctcgttggaa

SEQ ID NO: 43422 - DNA, 259 bp, Glycine max
  Clone ID: 701039071H1
ctccccttgctgcggttgctccaccacctaatcacttcccctgtaaatcaagtttagttcgcacaaggttttaaaaaatggctgatgctgaggacattcaacctcttgttgttgataatggaactggaatggtcaaggctggttttgcaggtgatgacgctcctagggccgtgttccccagtattattgggcgaccacgccataccggtgtaatggttgggatgggtcagaaggatgcttacgtgggtgatgaagctca

SEQ ID NO: 43423 - DNA, 263 bp, Glycine max
  Clone ID: 701039081H1
tgtttccagaatagaatagatggctgcaattgtgtgccagtcaagattacacagacttatgttggcatccccaaaacctcctcctcaacaacccttcaagtcttgttgcttctgggaagaatccaattatgctaaaccacattatgacgatgaagacaattacaaagccgacgacaccccaacagattggagctccattcaagctctttcaagtactgtgactgtgagcaactctatatatgaggtgaaacaatcatcatcgc

SEQ ID NO: 43424 - DNA, 260 bp, Glycine max
  Clone ID: 701039082H1
ctcaatttacgtctatttatttttttgttagttttgagaaggccccttgaacaagcaaaattaagcacaaaagcccaaccctctctctcgctgttggtctctcctatttggcattcgcagatcgattacgaagtaatttcactgaatcttattgaagatgtttctcacaaggactgagtatgaccgaggagtcaacaccttttctcctgaaggccgtttatttcaggttgaatatgcaatcgaagccatcaagctgggat

SEQ ID NO: 43425 - DNA, 259 bp, Glycine max
  Clone ID: 701039083H1
ctcttccctctgccgccgcaccctgcaaattcaatggcttcagagaagaaactatcgaacccaatgagggaaataaaggtgcagaaactcgtcctcaatatctccgttggtgagagtggagatcgtctcaccagagccgccaaggtgttggaacagcttagtggccaaaccccagtgttttccaaagcaaggtacactgttcggtcctttgggattagaagaaatgagaagattgcatgctatgtcactgttagaggtg

SEQ ID NO: 43426 - DNA, 254 bp, Glycine max
  Clone ID: 701039091H1
cccctttactcgtgatagccacaaactcgctgcttattttgatttgaactttgaagttttgttattttgtgcaatggcagccaagagcaaaatcctagtccttggaggaacaggatacattggaaaattcatagttaaggcaagcgcagaagcaggacaccccacttttgccttagttagagagagcaccctttctcatcctgaaaaatctaaacttattgagagcttcaagacctccggagttactcttcttt

SEQ ID NO: 43427 - DNA, 276 bp, Glycine max
  Clone ID: 701039105H1
aaggcaatgaatctgatgcaggcggttcgctacgacgcctacgggggaggtcctgccggcctcaagcacgttgaagttggcgttcccagtccaaaggcaaatgaggttttaatcaaactggaagcagttagcattaaccccattgattggaagattcagaagggtcttctccgtcctttatttctccccagaacctttccccacataccttgcactgatgtggctggagaaatagttgagatcggaactcaagtcaaagatttcaaagttggcgac

SEQ ID NO: 43428 - DNA, 274 bp, Glycine max
  Clone ID: 701039106H1
ctggtggaggagtagagattggaggaccaggaaaaagggctcatctttacgagcacaagttcagttggtatttcgtctatacatgcttcgttggggcccttggcggttctctctttggctatgatctcggtgtttcaggtggggtgacttcaatggatgatttcctgaaggaattcttcccaaaggtttacagaaggaagcagatgcatctgcatgaaacagactattgtaaatatgacgaccaagtgctgacactgtttacatcatctcttta

SEQ ID NO: 43429 - DNA, 273 bp, Glycine max
  Clone ID: 701039123H1
caacactctcaccaggcgtgggtacgcagcagcgacacaaagcgcaacaagaggaggagctgcctccatcagcagcaagatagctcccaagtcaggggaagacaaggtaggaggaggtgctgaaaaggtttcgtgggtcccagaccctgtcactggttactacaaaccggagaacatcaaagagattgatgttgctgagctgagagccacggttttgggcaaaaaattcaaccactagctcgctagctagttaatttcaataacctttttggt

SEQ ID NO: 43430 - DNA, 268 bp, Glycine max
  Clone ID: 701039131H1
ctcttctgtgtttcttagcagaattaagatggctaccttgactgtacctccagttcctccttcccccagagatgatgccatgcagctttaccgtgcttttaagggatttgggtgtgatacaagtgctgttatcaatatacttgctcatcgagatgctacacagcgtgcctacatccagcaagaatacaaagcaatgtattctgaggaactttccaagcgcttagcttcggagcttagtggaaagttagagactgcagttctgctctgg

SEQ ID NO: 43431 - DNA, 273 bp, Glycine max
  Clone ID: 701039136H1
ctctctcataaattcaatgctctcatcgttttccctcataaaccgctttctcgtgttgtaacacactcatcactcatcatattcattcacacttcccactttccaatatggaatgctgcataatcgccaggctcaagacccaacctttatggttcgcgctgctcttcgttgtcggattgttaacgattctcaaattggctttcgttgttttcagatgggtctacgtcaatttcctccgaccaccgaagaatctcaaaaagtacggatcttggg

SEQ ID NO: 43432 - DNA, 269 bp, Glycine max
  Clone ID: 701039153H1
accgcgtgaggctctgtttctagggtttgttgggtctaaaaaatcgaagcgatttcgatggcggaagagcgattcacgggcgtggtgcagtggttcaacaatggcaagggcttcggcttcatcaagcccgacgacggcggcgaggatctcttcgttcaccagtcctccatcagatccgacaagtcccgcggccccttctggaacctcctccgcctcgtcttcggcggaatcgtgaaacccatccaaaccctcggtcagttcctcggccc

SEQ ID NO: 43433 - DNA, 266 bp, Glycine max
  Clone ID: 701039172H1
ctctctctcaccaaagccttcctagaacgaaaaaaaaaagaagagcaattttccctcaccaaagaagaagaagcaaacaatggccgatcaacttaccgatgaacagatctccgagttcaaggaagccttcagcttgttcgacaaggacggcgatggttgcatcacaaccaaggagcttggaactgttatgcgttcattggggcaaaacccaactgaggcagagctccaggacatgatcaatgaagtggatgctgatgggaatggta

SEQ ID NO: 43434 - DNA, 269 bp, Glycine max
  Clone ID: 701039183H1
gcaaaagagaggaacagaacagaactgagagaagcaagtgaaaccctcaatcacctaggctaaaatcgtctcgtcttcattccttttttttccggtttatagaattgaaaagatttcattgataattgagcaaacacaatgagtgctccacctcatcatgatgatgacgacgacaacgaagaagttttccttgatgagtctgacatcatccatgaagttgccatggataatgaagatcttcctgacgctgatgatgattctgaactcct

SEQ ID NO: 43435 - DNA, 267 bp, Glycine max
  Clone ID: 701039184H1
cttgtctgagaaggaaacagatagaagctttgggttgagaaatttcaggtacattgagaccatcaaagaagctttggaaagagaatgccctggagttgtttcatgtgctgatatcctcgttctctctgccagagatggcattgtttcgctaggaggtccccatatccctcttaagactggaagaagggatggtagaaggagcagagctgatgtggttgagcagttcctcccagaccacaatgagtccatttctgcagttcttgacaa

SEQ ID NO: 43436 - DNA, 280 bp, Glycine max
  Clone ID: 701039212H1
gaaatagagtaatatccccttctttgcttttctttgaatggaacaagctgggaagcaaggaattatggtgacgtctcagagtcagaaccctatagagcaaatccaagcgcgcttcaaggagttggagactggcttccgcctctggctctcaagcagtccctccccgtcgaggccgccgtcgtcaccaccaccagcgccgcccagggcgccgctatcggcgccttcatgggcaccctcaccgccgacgcctcctccaccttccccacccctccgcccaacg

SEQ ID NO: 43437 - DNA, 279 bp, Glycine max
  Clone ID: 701039225H1
cgcaacaaaaagaaagaatcccaggcgaggagaaagatggaggggaaggagcaggatgtgtcgttgggagcgaacaagttccccgagagacagccaattgggacggcggcgcagagccaagacgacggcaaggactaccaggagccgcgccggcgccgctggttgacccgacggagtttacgtcatggtcgttttacagagcagggatagcagagtttgtggccacttttctgtttctctacatcactgtcttaaccgttatgggagtcgccggggcta

SEQ ID NO: 43438 - DNA, 271 bp, Glycine max
  Clone ID: 701039260H1
taaactgatactttttggaacttaaaatttgaaaaggaaggatttttcattgtatcgttgattctagaaaggaggtcctaggttggttatcatgggagagaccaaacaacttgttacccttttgacacaatttcaagaggcatgaggatggtcaaggatatagtggaaaaaagcagatcgagtaaaacgagcaaacgattactaaggaaaaccctcaagaatatgactcctctactgcaggaaatcaatcaatacaatgaacacttggacc

SEQ ID NO: 43439 - DNA, 271 bp, Glycine max
  Clone ID: 701039279H1
ctaccgtttctcctgcaaaacagagcttgattctcaatacaccattctttcttctcctttcgaagcactgccaaataaaaatggagtggcctgcgtgtacggacgaatacgaaaagctcataattcggatgaacactcccaggttgtcattgacaattccgttttctcctcagctacgctagtcaaggttgacagcgccagaaggcatggtattctattggatgctgtagaagtgctagctgacctgaacctttcaattaagaaagcgtat

SEQ ID NO: 43440 - DNA, 240 bp, Glycine max
  Clone ID: 701039310H1
gagaaaaacagatagtgtgggagagagaagagcggaagagaaaatgacgaccaggttcaagaagaacaggaagaagagaggtcacgtcagcgccggacacggccgtatcggaaagcaccgcaagcatcccggaggtcgcggtaacgccggtggcatgcatcaccaccgtatcctcttcgacaagtaccatcctggtttcttcgggaaggtaggcatgcgctacttccacaaacttcgcaa

SEQ ID NO: 43441 - DNA, 237 bp, Glycine max
  Clone ID: 701039322H1
tctctctcccttagtcaaagggactcattgttcttctcccaggttatttagaaaagcaaaatggtgaagatttgctgcattggtgctggatatgtggggggtcctactatggcagtcattgcacttaagtgcccatccattgaagttgctgttgttgatatctctaaatcccgcattgcagcctggaacagtgaccagcttcctatctatgaacctggccttgatggtgttgtgaag

SEQ ID NO: 43442 - DNA, 235 bp, Glycine max
  Clone ID: 701039327H1
accgcgcggtgggggctttcgtgagtcactgcgggtggaactcggtggtggaagggttgatttcgggggtggcgatgctgacgtggccgatgggtgcggatcagtatacaaacgcttctcctccccgaacctcagttcccgaacccgaagcaaaacgacaacccggaagacccaaacggcgttgtttcgttcccaaatctcccaaattccccattctacccctggtggcagatca

SEQ ID NO: 43443 - DNA, 238 bp, Glycine max
  Clone ID: 701039345H1
caggtcctcaggctaagaagcttgaagggtctgtttctaaccttcttgatgaccagaactcacagaccaatcagtgccagtgaatatacacgagaataaaagcattttaggaagttgtgcaatctaagcaccacgattcatcgaccagtagaagttgccttttgctgaaatcacattctttggtaaccaaaatgtaatatcaatcttggagtcatagcagtgtttgtgagtgttgata

SEQ ID NO: 43444 - DNA, 239 bp, Glycine max
  Clone ID: 701039347H1
ctcaagttggatcttccgtatgcaatcctcctgttagtgtgtacaagggatactcgttgtcaaaggacaccgaggaatatcttgtctcacatggactgaagaatgctttatacacaattagagctactgatttgaaagaggatttgtttggcatgcttgttccttgccctttccaggaaccttctaccaaagagggcacatcaaataaggacgtatctaaacagagatctttgggagtg

SEQ ID NO: 43445 - DNA, 267 bp, Glycine max
  unsure (1)..(267): unsure at all n locations
  Clone ID: 701039411H1
cacgagtacaagccagagcttgacattatttccaatgctagctgcacaaccaactgccttgccccgctcgccaaggttatcaatgacaggtttggcattgttgagggtttgatgaccactgttcattccatcactgntacccagaagactgttgatgggccatcagccaaagactggagaggtggaagagctgcttcatttaacatcattcctagcagcactggagctgccnnngctgttggaaaagtcctccctgctttgaatgga

SEQ ID NO: 43446 - DNA, 296 bp, Glycine max
  Clone ID: 701039509H1
tgccaatacaaatcctaccatttctactcctttccaaaagaaccagagccttcatttaccaaaactaaaatcatgatgaaaaagcaatgtctcttgtccttctcactagcactgctagtttcatttttgtatttcaccaccactttagcccaattatcaccagcttctgcccctcaaaaaccagcccaacctacccctacagcaccagctgcagctcctaaaccattggttccctcattgccacagtcaccaagtgattcaacccctgacagtactccagctgttgacattgttgg

SEQ ID NO: 43447 - DNA, 141 bp, Glycine max
  Clone ID: 701039531H1
tacaggtatccaaagttctccagggttttaactcaaattcagcttcatttcactttacctatgatttcctaaccatgaatcatactgagaggttagttactagttattgaaaaacagtgttacatgccattattccacaca

SEQ ID NO: 43448 - DNA, 151 bp, Glycine max
  Clone ID: 701039543H1
ctttttcaatttcagattcagaaggagacgatggaagaacccgtgaaggaacagcagcccctctctgctgggaactctgcgagacccaagcttcagagatacgcgcttcgttcctcctctaaatccaaggaaaacaagccagacgcacctg

SEQ ID NO: 43449 - DNA, 165 bp, Glycine max
  Clone ID: 701039560H1
caagtgagttgtaggagctctcgatgcaggcattggactggggacaccgtgctgtttgtaacaatttattgattactgtaaatccaaggtgtttactgtctgtagtaacgtttatgttgtatattgttagttcatggcaggagaaaaaagggagtaagttttcat

SEQ ID NO: 43450 - DNA, 151 bp, Glycine max
  Clone ID: 701039642H1
ccggtcgctccactccgaagaaggttctcaattttcgagaaaccgccacgtggcttctggaagcagcaagtttggtctagaaagatcccaaggagtcggtccgaacgaggatccacccccttccttgacgaacacagagacgtgtgttttg

SEQ ID NO: 43451 - DNA, 147 bp, Glycine max
  Clone ID: 701039670H1
cacaaataactctaaactaagcacttccatacacaaattttctctcccagaagaaatattttcatttcatttcgagtaaaagtaaaacacagttcctgatccatggcatctcgccgccgcatgttgttgaaggtcataatcctcgga

SEQ ID NO: 43452 - DNA, 80 bp, Glycine max
  unsure (1)..(80): unsure at all n locations
  Clone ID: 701039727H1
cagctaaagtcctcatgantntnacgaattagtaaatcgnggctncgagtagtngnttggcagnttgggatcccccttnc

SEQ ID NO: 43453 - DNA, 263 bp, Glycine max
  Clone ID: 701039793H1
caggggcaatgaccaaaatggactggtttgagctggattttcccaaggctgaagtgttgatcattaatttcacatccagtgattactttttacctcccttcatcaataaaatgccaaatttgagggcattgataataataaactacagcacctcatatgcccgcctccaaaatgtttcagtttttaggaatttgaccaacttgagaagtctctggcttgaaaaggtttccatccctcagttatcaggcagtgtcttgcaaaac

SEQ ID NO: 43454 - DNA, 127 bp, Glycine max
  Clone ID: 701039803H1
caccattctgttggtgccagatattgctcgagaattttaattaaataacccttgcgaatgttgattatagtgacactacgctattttctatgtgatgtggacgcaatccaaattccaatttaatttc

SEQ ID NO: 43455 - DNA, 283 bp, Glycine max
  Clone ID: 701039823H1
ggttggagttggagtgagtaacccagcacagcaatggcattgagactgagactcaaagtgtcttcaattgggtcaccttttctgcagttaggttcttctgcaagtgcagcatgctctgtttccaaacttggttttcatccaccagcttgcaactcaacaaaaattcacacccaataaggctttttgttcgggctgctagaattgagtccaaaggtgttaccttgggtttcaggaccccacaatttcagcttccggagccccttaccgggacgacctggacatt

SEQ ID NO: 43456 - DNA, 273 bp, Glycine max
  Clone ID: 701039883H1
cagctgtctgctgttagatctgtacccgcctagccattgatttggaaaagtccaacttcaaggatgagtaagcttcagagtgatgctctaagagaagctatctcaggaatcatggctgattccaaggaaaagacaggaaatttgtggagaccattgaactccaaattgggttgaaaaattatgatccccagaaggacaagcgtttcagtggctctgttaagttgcctcatattcctcgccccaagatgaagatttgtatgcttggagatgccc

SEQ ID NO: 43457 - DNA, 268 bp, Glycine max
  Clone ID: 701039887H1
gttcggtggtttgcaaggatggggaacacgttctgcttcttctgtggttgcgttgctcaatccagcgtcggcgtggtcgagcagtggggtcgcttccaccgcctcgcccaaccgggcttccactttttcaacctctcgccggcgaatgcctctccggtatcctctccaccaggatctcctccctcgacgtccgcatcgaaaccaaaaccaaggacaatgtttttgtgcagttgctgtgttcgattcaataccgagtgattaaggaaaa

SEQ ID NO: 43458 - DNA, 294 bp, Glycine max
  Clone ID: 701039905H1
gttcatcaacggagagtccagcctgccgcttcatgagatggaaggaggaagaacttactatctgggaatgtttttgggtggggcttacgaggaggcgctcggtggagtccacaacttgttcggcggccccagcgtggtcagggtgtcgcagagcgatggccctcacagctttgcggtcacgcgtgccgtgccggggccatcctgtggagatgttcttcgagtgatgcagcaccagcccgagctcatgttcgagacactcaagcaccgcgcgcaggagtatgtcagccacgacaa

SEQ ID NO: 43459 - DNA, 61 bp, Glycine max
  unsure (1)..(61): unsure at all n locations
  Clone ID: 701039930H1
cttgatcaccataaccatgttcaatgggnaacaanatncnccttcagannggcctgttncc

SEQ ID NO: 43460 - DNA, 303 bp, Glycine max
  unsure (1)..(303): unsure at all n locations
  Clone ID: 701040078H1
tnngaagagaagcaagtgtttgatggagannaggctaatttgctagttaaagatctnagggaganctttaattcanggnatgncataaagcagctatggatggaggggttcccagttggaagccatagctacgatgttagaagagnaagagaaggaaattactgaagctctatataaggnccttgganaacctcganntcnaagcatttatnaccggagnttcnccangnnaaatcctcatgtnantcaaggacttaaagagnnnnnnncatgggtgaaagcctgagaaggtnanttcttccc

SEQ ID NO: 43461 - DNA, 262 bp, Glycine max
  Clone ID: 701040122H1
ttgtatttaaggttgagttgaatactaaggaacatcgccacccactactccaagtttgcttcttcttggtctttgttgtctcgccattcctcaatcctcaaccctctctctgtgtctttttcttcatttcatagccaaggtgttggtggtgatgcattgccatcttacatgcgtggagctgtgtattgggaacccaacaagcctctcaccatcgaggaatttaacatgcctcgccccaaggccggtgaagttctcatcaaaa

SEQ ID NO: 43462 - DNA, 260 bp, Glycine max
  Clone ID: 701040132H1
gttgaaattgcaggtattgtttgtctgtgaatgtaatcgcatttgtatacgctgcgtttcaagcgtgtgatctggcgtatcaggtagtaacgggaagacgcataatcaatcaccacctgcgttaccactttgatttcttcatggatcaggttttggcgtatcttttggtatcggctgcatcatctgctgctacacgcgttgatgactggcaatcgaattggggaaaagatgatttcacagagatggcgagtgcttcaatt

SEQ ID NO: 43463 - DNA, 258 bp, Glycine max
  Clone ID: 701040148H1
ttcttcttcatcctttctgatctgtgctgttttttcagggtacaacaaaattgggtgctttcggttaaactgtgatgtctccgccagtgctgagcataggggaggaggagggtaaaagcaatgtcactttgttggtttcctcatcaaccaccatggaaagtgtgtgtctcaagagcttagaatttaaagagcgcaactacatgggattatctgattgttcttctgtggacagctcggttccgtccttctctgaagaga

SEQ ID NO: 43464 - DNA, 260 bp, Glycine max
  Clone ID: 701040150H1
atttcctctctactcactccctccgggatcgatattttcaagaacagaccgaaaagctgttcatcgatctgttggatctgcgagtgaattgggcgaaagaaaatggttaccaaatcagaggaaactcaactgagcaggctagaaaatcaggtcgataacggcggcggcggcgcgtgggagtacctctgcctcgtgcgaaagctgaaagttcggcggtcggagaaagttctgaagcatggtctctctatccttaacgaccc

SEQ ID NO: 43465 - DNA, 260 bp, Glycine max
  Clone ID: 701040156H1
ggagattgtaaaagttataactacaaaaatactccagcagccaaatgaaaagcctgctgtgcgattgaagattatgatcagcctgtacaaccttttggacactccatactgccagttttatgtctacatgaagttactgaatttagctgttgatgggaaagtcacagaacacattataccttcattcaataagattgataacttcttgaaagactggaaaattgggataccagaacagagagagctctttcttgctgtct

SEQ ID NO: 43466 - DNA, 256 bp, Glycine max
  Clone ID: 701040180H1
gaaaaagtatggaggggtgttgccaaagaagcctccactaatatccaaggatcatgaacgtgcttactttgactctgctgattgggctttggggaagcaaggagcacaaaagcctaaaggaccacttgaagcactccgcccaaagttgcagccaacacaacaacatgctcgttcaagacgctcagcttatgctccagcagatgataatgaagttgatggctgcagcagtgattcatcagcagagcatcagagtgcc

SEQ ID NO: 43467 - DNA, 257 bp, Glycine max
  Clone ID: 701040185H1
gggagccgtagcagcggaagctctagcttgggtagcgaatcacaatggcgagaggattaaagaagcatctgaagaggcttaatgccccaaagcattggatgcttgacaaactgggtggtgcatttgctcctaagccctcatctggaccacacaaatcgagggaatgcctgccactcatactcattttgcgaaaccggctgaagtatgctctaacataccgtgaagtcattgctattctgatgcagcgacatgtcctt

SEQ ID NO: 43468 - DNA, 300 bp, Glycine max
  Clone ID: 701040227H1
cccaattccactagggattcaattccgatgcgattccgagcttgttagatccacgacaacgtttcgtttcccagattcttttgtaaaaaaaaataatcttcctttgcccaacaggtaagttggaaaaaaatggaccatgacaagactgggtgccaagctcctcctgaaggtcctatattgtgcatcaacaactgtggattttttggaagtgcagctaccatgaatatgtgttctaaatgccacaaagacatgttgctgaaacaggagcaggccaagcttgcagcatcatccattgggaat

SEQ ID NO: 43469 - DNA, 293 bp, Glycine max
  Clone ID: 701040252H1
ctcagttagtgtgacacggagggtgaaaaatgttgggccaccaggcacttatactgcaagactcaaagtaccagcacgtctttccatatctgtggagcctaatgtgttgaaatttgacaacattggtgaagagaagagctttaagttgacagtggaagttacaagaccaggtgagactactgcatttggaggtataacttggtcagatggcaaacgtcaagtgaggagtccaattgtagttgggggggttagagggtagatcattatcaagtgataacacataattaattagg

SEQ ID NO: 43470 - DNA, 293 bp, Glycine max
  Clone ID: 701040284H1
ctgcttcttcctctttttttcatttctcttcaacttcctcttctttcaattctcttcagtctctctccgccttcccaaaatggtgaaccctagatgcttcctcgacgtcagcatcggcggcgagttagaaggccggatcgttgtggagctcttccacgacgtcgttcccaaaactgccgagaatttccgcgccctctgcaccggcgaaaagggcatcggtcccaacaccggcgtccccctccactacaaagtcattcattaattctacaagctggttttgtagggttgagtta

SEQ ID NO: 43471 - DNA, 292 bp, Glycine max
  Clone ID: 701040286H1
tttctctctctctgtgatcttatctccttttaattattcactcacccctttacactggttgatgcaaaaaaacatggtaccctctattgttggttgttgctgacactcttcatagtcgcaaagtaggtgactagcagtagcatgtgagtgaaggagcctgcagtttttttttatcgtactgtactatgtttgttatgtaatggtatcatggtaagctgaccaaagtgacggatttgttccatcactgccttcagggaaagaagttaactcatagcaggtccatacaaacatg

SEQ ID NO: 43472 - DNA, 292 bp, Glycine max
  Clone ID: 701040288H1
gtttccttctcgctcccgtctctgaaatctcgagggtttcatcgttgctgaatcaacaattcggaaccagttagcaatgttcagattctggggatcacaagagcaacaatcgcaggatggttcttcgcagtcacagtcgtggtatccgccatcggtggtgagttcacctacttcatcgaggcctgttacaccgactgcatcttcttcttcattatcgcagaggccttcgtctcatgttccaccttccgaagctgctgcagttattgccgttttgaaggacaagagtgttgat

SEQ ID NO: 43473 - DNA, 272 bp, Glycine max
  Clone ID: 701040310H1
gcgtctttcaaggagagagagaaaatatagcacgccgaaaaacacgctcccacttgtaacttagtataacgacctccaacaactgatacatacaatctcctttccttcgtgttggacaacaacaatggcggcgaaatctagttcgagttcgacaacaaacgtggtgactctgaaggcggcgtgggttctcccgcagcgcacgcagaacatccgtgaggtgtacgaggtggggcggaagttggggcagggtcaattcgggactaccttcgagt

SEQ ID NO: 43474 - DNA, 283 bp, Glycine max
  Clone ID: 701040319H1
gacacattatggccacaccagcatccatcaccaatgtcactgtggagttccttcaattccccgcggtggtgacacctcctgcctctaccaaatcctatttccttggtggcgcaggggtgagagggttgaatattgaagaagaatttgtaaagttcacgggaataggtgtttatttggaagacaaggccgtgtcatcactcggtgccaaatggaagggcaaaagtgcagctgaattgctggactcacttgacttctacagagatatcatcaaaggtccgtttga

SEQ ID NO: 43475 - DNA, 267 bp, Glycine max
  Clone ID: 701040328H1
cacacaccacacacatagtagctattatactctctagagtaattgcggaatctgctagaattttctaataatggcgaaagacgttgagcaggtcacagagcaaggtgaatactccgcgaaggactaccatgaccctcctccggcaccgttgatcgacccagatgagctcacaaagtggtccttgtacagagccgccatagctgagttcatagcaacactcctttttctttacatcaccgtgttgaccattattggctacaagagaca

SEQ ID NO: 43476 - DNA, 269 bp, Glycine max
  Clone ID: 701040346H1
agaacaactacttcttcaaacaacaacagattcaagttcatagttttttttggtaaaacagaaatggcctaccactcttctcaaaattcccaacctgctctccctatgcacctatgtttcttcttgctcaccttgttcatgttccttagtttctcattttactcaagctacgagccaataatggagagtttcatggaccaagtgaagttggttctaatggtttctccccttctgcttctgctagttgtgcacttcctttgcaactatgg

SEQ ID NO: 43477 - DNA, 273 bp, Glycine max
  Clone ID: 701040356H1
tttcctccttctgcaaccatcaatgtcggcaatcgcggctccccaacaagatgcaggtcctccagcccgccgccaagatgctcgtcgagctctccaagtcccaggactccgccgccggcgacggcaccaccaccgtcgtcgtcatcgctggcgccctcctcgagcagtgcctcctcctcctttcccacggcatccaccccaccgtcgtctccgacgccctccacaaggctgccgtcaaggccgtcgacgttctcaccgccatggccgtccccg

SEQ ID NO: 43478 - DNA, 276 bp, Glycine max
  Clone ID: 701040368H1
cctttttgtggcggatgttaacacccagttgaagaacaagaacatcaccactgatatcaaagtggacaccggttccaatcttttcacaactatcactgtcaatgagcctgctcctggtctcaagactatttttagctttagagttcctgatcaaaggtctggaaaggtggaagtccagtacttgcatgactatgctggaataagcaccagtgtgggtttaacagcaaacccaattgtcaacttctccggcgttgtaggaactaatgtacttgccct

SEQ ID NO: 43479 - DNA, 268 bp, Glycine max
  Clone ID: 701040576H1
gctcgctaaccccagctacttctccctcatccactcacaaaatgtgccaggccctctccgccccatcgcctccgtgtacggcgcttctctccttccttttcttcctcctcacggtggtgggcccggtctcggtctcggcatggcggccgtggccccagaaaaacaatatgaacaccaccgattacgccttcggggactccaagaaatacgaggggtcctcggagttcgtgaagctgaggtaccacatgggaccggtcctcacgaccaa

SEQ ID NO: 43480 - DNA, 268 bp, Glycine max
  Clone ID: 701040578H1
gttgttgattcaccatgctgtctggtgactggagaatacggttggactgcaaacatggaaaggatcatgaaagctcaagccctaagggacaacagcatggcaggatacatgtcaagcaagaagacaatggagatcaaccctgagaacccaatcatggaggagctcaggaagcgtgcggatgctgacaagaacgacaaatccgtgaaggaccttgttctgttgctgttcgagactgctcttctcacttctggtttcagccttgacgaac

SEQ ID NO: 43481 - DNA, 280 bp, Glycine max
  Clone ID: 701040601H1
agtaattggtggattccagcaatggccgtggttcatggcagttgggtcaagcttgatcaaagaggagaagggcaaggagcgagaagctcacatgctatagccatagtagcacagaaggtgtatgcatttggtggcgaattcgtgccacgtgtccccgttgataacaaacttcacgtgttcgacctagagactttgacttggtccgtggctgatgcatcaggggatgccccaccgccacgtgtcggtgtcacaatggccgtagtgggagaaaccatatatg

SEQ ID NO: 43482 - DNA, 276 bp, Glycine max
  Clone ID: 701040633H1
cctaactttagcaaccatccaagaagttgatcagttccttgtctctccttgaattataaaaccattcacagtcttgaacccaatttcactctttgcacctcaaacaccttataagcctcaatttcacaaccaaaaatgcaaagttcaatctcacaatctgagatttgcatcactgattaccttctaccccaagaagttccatctcaatttcaatttccagatatgagcaacaataacataccaatgaaccataccaaccttcaaatgcctcaaatc

SEQ ID NO: 43483 - DNA, 265 bp, Glycine max
  Clone ID: 701040638H1
caattattatcatggaaggaaattcgggttcggatcctgcgcgtcctcttctggctaatcgtgacaataactccgccgagaacggtggtcagagaagccggctcagtcgccggatatcggttagctcgctcagagcctctttcacgtccaagcttcccgacaaggtccgttctggccttgactccgagtctcccttcgacgttgatctctcctccaccaccgccttaagcaaaggggagaaagagtactatgaaagacaatttgc

SEQ ID NO: 43484 - DNA, 265 bp, Glycine max
  Clone ID: 701040651H1
tgattattgaaaattaagttcaattggggggtctcatcctcagagaatttggcttttgaatcatatgatttttccataggggatgaaatgacccgagtgatttggaaactgataaaagataagcttatttttccttatttggagctggatattaagtattttgaccttggccttcctcatcgcgatgccactaatgatagagttactattgaaagtgctgaagctacactcaagtataatgtagctatcaaatgtgctactataa

SEQ ID NO: 43485 - DNA, 263 bp, Glycine max
  Clone ID: 701040653H1
gcccggtggaaccaaacgaagaagacgttccgttttccctctgcttttccaagttttcatcgactcaaccatgctattcttacataactagggttaggagttagggcgttcttatcgttttcgctccgttaattacaacaacggccaacatggttgttctttcgctttcacctcccagcctctctaccgctttcctcgcaaagaaactgtctccccaagaacacgcggtgaagctagcgacctttcgcaacaattcatttcgc

SEQ ID NO: 43486 - DNA, 260 bp, Glycine max
  Clone ID: 701040657H1
cttacttagtagacattctcaagccatgacttgtaaacttgtgatctacttcactttcttcttctgcttgctttttaccttggttccttatgttcatatgtatccctcgtacccctatagtggaaattaccagcttgacctcaatttctatgatagatcatgcccaaatttgcaaaggattgttggatatggtgtttggttagccttaaaaaatgacaacagaatggccgcgtccctccttcggttgcactttcacgatt

SEQ ID NO: 43487 - DNA, 263 bp, Glycine max
  Clone ID: 701040667H1
tgattattgaaaattaagttcaattggggggtctcatcctcagagaatttggcttttgaatcatatgatttttccataggggatgaaatgacccgagtgatttggaaactgataaaagataagcttatttttccttatttggagctggatattaagtattttgaccttggccttcctcatcgcgatgccactaatgatagagttactattgaaagtgctgaagctacactcaagtataatgtagctatcaaatgtgctactat

SEQ ID NO: 43488 - DNA, 257 bp, Glycine max
  Clone ID: 701040679H1
agaactttgtttcccaatttccattgcctccgcttccacctcgcaaccatgatcatcccggagaagaaccgcaaggagatctgcaaatacctcttccaagagggagtttgcttcgcgaagaaggacttcaatttggccaagcaccctgagatcgacgtgccgaatctgcaggtgattaagctgatgcagagtttcaagtctcgcgagtacgtgagagaaacttttgcttggatgcactattactggttcctcaccaa

SEQ ID NO: 43489 - DNA, 195 bp, Glycine max
  Clone ID: 701040708H1
gccagtcttaggatccaacatgtctcaaacactaagctgcagaagactacacccaatggactcaactttgatgaagtcaatgtcccacaatccaaaaaagtcctattctaccgcattcacaaggcactttgccaaaaaatctggttttttgatcaagatcatggcttctgctacacctacagcagctgctatcac

SEQ ID NO: 43490 - DNA, 192 bp, Glycine max
  Clone ID: 701040710H1
caggtctgccactcgctcggcggcggaacgggctccgggatggggacgcttcttatttccaagatcagagaggagtatcctgacaggatgatgcttactttctccgtttttccttcgcccaaggtctccgacactgttgttgagccttataacgctactctctctgttcaccagttggtggagaatgctgat

SEQ ID NO: 43491 - DNA, 193 bp, Glycine max
  Clone ID: 701040724H1
ttaagtctctgcattattctcttcccttttctatctccctctgcaaaaacgaagtaaatgggtcggcttaatctcctacttgtgtggtcactctctttaacacttttccttaattatctacacccaacctctgcccagctcagtccaaaccactatgctaacatatgccccaaccttgaaagcatcgttagac

SEQ ID NO: 43492 - DNA, 191 bp, Glycine max
  Clone ID: 701040725H1
ctttgggaatagtgctgcaatggcttcaagtcaggaggaggtgacccttttgggagctactggaagcccatttgtgtgcagggttcatattgccctcaagttgaagggagttgaatacaaatatgtcgaagaaaatttgaggaacaagagtgaactgcttctcaaatccaacccagttcacaagaaggttc

SEQ ID NO: 43493 - DNA, 193 bp, Glycine max
  Clone ID: 701040736H1
attctctctgtgtatttccctacctctcccttcaagatgcagatcttcgtcaagaccctcaccggcaagaccatcacccttgaggtggaaagctctgacaccatcgacaacgtcaaggccaagatccaggacaaggaaggaatccccccggaccagcaacgtctcattttcgccggaaagcaacttgaggacg

SEQ ID NO: 43494 - DNA, 190 bp, Glycine max
  Clone ID: 701040738H1
tttggacccaattaatgttaagattgctgagctcagagaggcactagaatctgttacagctgaacaaaagtacttgaaagctcgtgatgcgagacatcgccatacgaatgagagcacaaggaagcgtgttgtattctacactgtgggagagtaccttctcttggctgctgttagtgcactgcaagtcata

SEQ ID NO: 43495 - DNA, 188 bp, Glycine max
  Clone ID: 701040745H1
ccaacatgacgcggtcaacgcttccaccctcatctccgatctccctcttcgtgtcgctcatgtgcgttgctttcgcgtgcgccacatcgttgaacaaaattgagcactgcgagttggattgtgcaagttccacggtggaggggctgaacgtggttggtgactgcgaacccaagtgttctcaggggttg

SEQ ID NO: 43496 - DNA, 189 bp, Glycine max
  Clone ID: 701040747H1
tgaccttatatgcggaatacgttgtggagaacttgaggcggtagagcttggaattttgtttggttgtgaagacatacatgctttcaaaggctgctattataattgcgattatgacgataagaaaacctttctatccttgtcgcgtgtgcatttggtctcagggctggcaacatgcatattctgcacatg

SEQ ID NO: 43497 - DNA, 192 bp, Glycine max
  Clone ID: 701040750H1
atttctccatttccattttctctctcacttttcaagaatcgtaagctatgggaaagtcttacccaactgtgagtgctgattaccagaaggccgttgagaaggcgaagaagaagctcagaggcttcatcgctgagaagagatgcgctcctctaatgctccgtttggcatggcactctgctggaacctttgaca

SEQ ID NO: 43498 - DNA, 190 bp, Glycine max
  Clone ID: 701040751H1
gcgactgcgcttcagcacaatgggtgcctacaagtatgtttcggagctatggcgcaagaagcagtctgatgttatgagattcttgcagcgggtgaggtgctgggagtatcgccagcaaccttctattgtccgtttgacaaggtctactcgcccagataaggctcgtcgcttgggtttcaaggctaagcag

SEQ ID NO: 43499 - DNA, 189 bp, Glycine max
  Clone ID: 701040756H1
tgtcactggagatgatatgcagacacaggttatcatcaatcaccaggctcttccttgccttctgaatctgttgaccaataattataaaaaaagcatcaagaaggaagcttgttggaccatatcaaacatcacagctggtaataaacagcagattcaggctgtgattgaggctaatctaattgctccttt

SEQ ID NO: 43500 - DNA, 185 bp, Glycine max
  Clone ID: 701040758H1
gcgttgttgccgttgaggtcaccggtggacctgaagttcccttccatcctggaagagaggacaaacctgagccaccaccagagggtcgcttgcccgatgccactaagggttctgaccatttgagagatgtgtttggcaaagctatggggcttagtgaccgagatatcgttgctctgtctgggggt

SEQ ID NO: 43501 - DNA, 187 bp, Glycine max
  Clone ID: 701040769H1
ttcagaaataacgacctatgaacacacaagtattgcttttgcaccttatggagaatattggagacaggtacgaaaaatatgcgccatggagcttctctccccaaaacgtgtcaactcattccggtcaattagagaagaagagttcaccaatcttgtcaaaatggttggttcacatgaagggtccccc

SEQ ID NO: 43502 - DNA, 184 bp, Glycine max
  Clone ID: 701040774H1
ttagaatgttatgccatgtggccaaggaagagatggatgcaaaaattcacataaactctgcatttgatcttttcaacaaaataaagaatatgctttgcaaatcccttaacctaatcaataaatttcaatctgcgggagtactgggagcaaaggcttcagatggagagggtagagagggttaagc

SEQ ID NO: 43503 - DNA, 184 bp, Glycine max
  Clone ID: 701040787H1
ttcccttctaacctcccattccgttttctctgcagtactcaattgatccctttgtttttctattcgttctgagagctttgtgtgtatggccggcatagacttgggttcagcatcacattttgttcatcatcgccttcaacgccctgaccttgaagacgatgagaaccaacaagaccaagacaac

SEQ ID NO: 43504 - DNA, 186 bp, Glycine max
  Clone ID: 701040788H1
gggaaaaggcacagaaagtgacaaattggtgcaactatatagtagaatccctttggcttttgctagagattttaaagcttcaatgatcaagatggggaacatgaagcctctcactgggaggcagggagagatcagatgcaattgcagaagggtcaactagttggattgcaaggtctggattacaat

SEQ ID NO: 43505 - DNA, 182 bp, Glycine max
  Clone ID: 701040791H1
gtagaggagaatcttttggacattttcccccctacaaaaagatctaatgaagccttctctgagcatttcaccaaggaaggactggtggccttggtggagtataatgaaaagaaaaattttgaggtgaaacttaaggaaatgaagtcttctttaacagcacagttaacagacgaggctgatac

SEQ ID NO: 43506 - DNA, 204 bp, Glycine max
  Clone ID: 701040838H1
atggggaacacggagaagctgatgaaccagatcatggaattgaaattcacttcgaaatcgctgcagcgtcaatcgcgtaagtgcgagaaggaggagaaatcggagaagctgaaggtgaagaaggcgatcgagaaaggcaacatggacggcgctcgaatctacgcggagaacgcgatccgtaagcgcacggagcagatgaactac

SEQ ID NO: 43507 - DNA, 206 bp, Glycine max
  Clone ID: 701040850H1
gaacaagcccgaaggccctcccaatagtcgtgcttacactcctggctctccattaataggatatggtgtgtctaaagtcctggaatctgggcacccagattataaggaaggtgatttagtgtggggctttaccaaatgggaagagtatagcttgttaccctcagctcaaatactcttcaaaattgagcacactgatgttccactta

SEQ ID NO: 43508 - DNA, 201 bp, Glycine max
  Clone ID: 701040855H1
agcgacacgtatcttcatcaataatcgcagaagcagtttccggtgcatctcatcgtcttccaaaatgaacgacgcagatgtctcgaagcaaatccagcagatggtgcgtttcatccgccaggaagctgaggagaaagccaacgagatctctgtatctgccgaagaggaattcaatatcgagaagctgcagttggttgaagc

SEQ ID NO: 43509 - DNA, 197 bp, Glycine max
  Clone ID: 701040858H1
aattggccttggggccaaggatcctgttgatgtcattgcggttgtagagctcatagtcaaagcctactttttcaacaccctctatgaacctttccgagaaggtgcagattttgttcgcggttaccccttcagtctccgggaaggtgtaccaactgcagtttctcatggtctttggctcaacatcccagattacgatg

SEQ ID NO: 43510 - DNA, 201 bp, Glycine max
  Clone ID: 701040869H1
attgaatacaagcccccaccagccatgaaggctcaacaacctactaatgcatcagcagctgtctctattttcagactcacgcgtgaccagctcaacacactgaaagccaaatccaaagaagatggcaacacaatcagctatagttcttatgagatgttggcgggtcacgtgtggcgaagtgtaagcaaagcaagagcactt

SEQ ID NO: 43511 - DNA, 197 bp, Glycine max
  Clone ID: 701040896H1
aagagctcttaaccagttactgagaatgagtgatgttcttcttctaacttctgaggaggctgaggaattaaccggcataaacgatccaatattagcagggcaggagtttctcaaaagagggattcgcacaaaatgggtgattgtaaaaatgggttctaagggttcaattcttataacagcatcgagtgtagcttgtg

SEQ ID NO: 43512 - DNA, 276 bp, Glycine max
  Clone ID: 701040907H1
atggctcccaagggtttaatctttttggctgtgttatgcttctcagcactgtcactgagtcgttgtcttgcggaggataatggacttgttatgaacttctacaaggaatcatgccctcaggctgaagacatcatcaaagaacaagtcaagcttctctacaagcgccacaagaacactgctttctcctggctcagaaacatcttccatgactgtgctgttcagagttgtgatgcttcactgttgctggactccacaagaaggagcttgtctgagaag

SEQ ID NO: 43513 - DNA, 287 bp, Glycine max
  Clone ID: 701041006H1
gttcgatttcagactcttcattcgggatttgccatagcgattccttggttctcattcattcgttgcgtgctcgttcggctgttctcgtcgttccagtgaagagttccgtttcagtcatacaaccttgcatgagaattgatggcgccaatcctgcagagctctcagccatgggtcgagaaataccggccaaagcaagtgaaagatgttgcccaccaagatgaagttgttcgagtactaacaaacacccttgaaacttgcccccacatgctcttctatggtcctcctgg

SEQ ID NO: 43514 - DNA, 287 bp, Glycine max
  Clone ID: 701041023H1
ctaacacccaccaaagaaccatggctacccagttcctcaaatccctccttctcctctccaccttaaccctaaccatctcagcagaatacacaggctttgtgggcacaatagacccaaagtccataggcataaagcacaagaaaaccctaagccacttcagattctactggcacgaagtcttcagcggagaaaaccccacatcggttagaatcattcccgcactccccaaatacaacacaaccacaacctttggttcggttgggatcttcgacaacgctttaactgtg

SEQ ID NO: 43515 - DNA, 276 bp, Glycine max
  Clone ID: 701041062H1
gtggaatctacagtgttcttaaccagaagcgtggacacgtgttcgaggaaatgcagaggccaggtaccccactatacaacatcaaggcatacctccctgtcatcgagtcctttggtttctcgagcacattgagggctgcaacatcaggccaggccttcccacaatgtgtgtttgatcactgggacatgatgtcttctgacccattggaggctggatcacaagctgcacagcttgtcactgacattcgcaagaggaagggcttgaaggaacagatga

SEQ ID NO: 43516 - DNA, 242 bp, Glycine max
  Clone ID: 701041138H1
ctcctcattccttcatttttaaacctagctccatctccctccactcaccataacatggcatcagaagcaaatgctgccaacaccaacttctgtgtaaatgttagcaacaatggctacattagtgctaatgaccccttgaactggggtgcggctgcggaggctatggctgggagccacctcgacgaggtcaagcgcatgctagaggagtaccggaggcccgtcgtcaagctcggtggagagac

SEQ ID NO: 43517 - DNA, 241 bp, Glycine max
  Clone ID: 701041161H1
caaacatgtccaccgcaacaactcacgtgctcgcttatcccttccctacctccggtcacgtgatccctctcttagacttcaccaaaaccctagtctctcgcggcgtccatgtcaccgttctggtcacaccctacaacgaagccttacttccaaaaaaactattcccctcttctccaaacgcttctcctccccgaacctcagttcccgaacccgaagcaaaacaggctcgtatccatggtaa

SEQ ID NO: 43518 - DNA, 232 bp, Glycine max
  Clone ID: 701041189H1
cttagggattcaactggaatatcagattcagtgcttctcttatttggtgggaatgtatccagaggtggactagatggtcacctgaaaatgttgggagggtatttggagtttttcatgaaaccagaattagccaagacttacttgagcttaaagatggaactggaagaactgatacagaaaaaacttttggatcccatgttggaaacacaatcgcatagtgagctgctttctg

SEQ ID NO: 43519 - DNA, 237 bp, Glycine max
  Clone ID: 701041262H1
cgcgtcgtccgatgggaacagaaggttacacttacatggggcgcagtttgaccgaactccgcatcaacgacgattcctcttcctccgccttcagcgactgcaacagtgacagatctggcgaattcgccacgcttcttcgcagacgcggaggtttctgatcgcctgcgccaccgaaaattccgacgacttgattcgccaactcgtttctgatctccactcctcttccatcgactatca

SEQ ID NO: 43520 - DNA, 257 bp, Glycine max
  Clone ID: 701041301H1
tcggtttcaccgtttatccatcccctcaggtttcgacctcggtcgtggaaccctacaacagcgtcctttcaacgcattctctcctcgaacacaccgatgttgctgtgcttctcgacaacgaggcaatctacgacatttgcaggagatctctgacatcgaacgccctacctacaccaacctgaaccgtctcgtttcccaggtgatatcatccctcactgcctctttgaggtttgatggagcactgaatgttgatgtga

SEQ ID NO: 43521 - DNA, 248 bp, Glycine max
  Clone ID: 701041310H1
caacaatgcctcctttgactttgtggctagtgctgccttttctcgtgttgctagcggcggcaacaacgtctccaacacgcgccacgacggtcgcctcgtcgttccacggtcaacgagagtttgactatttcgctttcgcgttgcatggcccggcacttactgcaaacgcacccgcagttgctgccccaccaacggttgctgcagaggctccaattttccaacagtgttcaccatacatggactctggc

SEQ ID NO: 43522 - DNA, 249 bp, Glycine max
  Clone ID: 701041312H1
gaggaactccacggagttcgcgagcaacagtttggcgattgtcacgaagatcctagggttgctgtcgcagttcgcggcgccgattcaccaccggcggctgctaggatttccggagtggctcggggcggcggagcggaggttgcttaggtgaacagcagcgaaacaacgctggacgctgtggtggcgcaggacggtagcggacagttcaggacgatcggtgaggcgctgaaattagtgaagaagaagagc

SEQ ID NO: 43523 - DNA, 249 bp, Glycine max
  Clone ID: 701041324H1
cacgtcatcaccctcaacctcaacctctccgagcgagaaccagacacaagaaagaaaacgtgttgcgccagtgttacccctttctccttctctttatctttcctgaatttggcgcgtttcgattcttcttcttccgaatcagagaagtctggatttcttgttgaagatgcgacgctcttctgcatccaaaaagacgggtcaatccaattccacccccatcgccgccgatctcttccgctccgcttcaag

SEQ ID NO: 43524 - DNA, 245 bp, Glycine max
  Clone ID: 701041341H1
atggcttcttttcatatccaatattcattccttgtgcttgtgcttgctatggtgatcacattgatgaaccctaccaatgcaaccctctctccccatttctatgataaagtttgccctcaggcattgccagttataaagtcagggttcaacgagcaattatccgtgagcgacgcatcggagcatctcttctgcgcttgcatttccatgattgtttcgtaaatgggtgtgatggatcaatattgcta

SEQ ID NO: 43525 - DNA, 246 bp, Glycine max
  Clone ID: 701041343H1
caattattcctcaattatttcccacttttcttctctctcaagcaaaagttttcttctctcatttctcagcgttctgaatcgaaactaatggcttcagagacagaggtgttaaatattatttcctctgttttcgaacgcttcggagaaacatgtctctgtttctgcccttcatcttcggcttctctgacgccacctcaggacgagatagcgacgacccagatcacgaaactgctcacacagaaggtt

SEQ ID NO: 43526 - DNA, 248 bp, Glycine max
  Clone ID: 701041354H1
gaaagaagcaagcttgttcaactgtgctggttccgaccagagtggcacaggccctaaatctgaatcttgatgacatgatggctggccagccgcaacacttacaacgatttaatgctagttccaacatggaaaatggtgcagcttttccaggcagaggagtaattatgtcctttctcaacaacagaagcgcaacctcaaatctcagccagcagtgtaccatgagattaggctgccacaggagtggacat

SEQ ID NO: 43527 - DNA, 247 bp, Glycine max
  Clone ID: 701041355H1
agagagactctctctctagaaaccctattgcacgttttgcaatcgaactcgacaatggccaacagcaacctccctcgaagaatcatcaaggaaacgcagcgtttgctcagtgagccagcaccaggaattagtgcctccccttcgaagagaatatgcgatatttcaatgtgatgatccttgggccaacccagtcgccttatgaaggaggagttttcaagttagaactatttttgccagaagaatatcc

SEQ ID NO: 43528 - DNA, 258 bp, Glycine max
  Clone ID: 701041364H1
gttaggtcttcccttcccactgttgccctgacaccgccttgctaatcccatcctccctctttctctctctacattttaataggaatcaatttccaaccatgacggactacaaacaagaacaggatatggagattgaagcattagaagcttactcatggatgagttcaaagaaatacactctggtgaaagtggcctaagtacttccaatcggtgcttccaaataaaggttgttgcgcaggatgacgatgaagatgggcc

SEQ ID NO: 43529 - DNA, 249 bp, Glycine max
  Clone ID: 701041394H1
gaaaaatggggtgtttccatctcacagtgactagtctgtgctttgtagtggttgtggttggagtgcttccactctccttagatgcacaactagatccctcgttttacagagacacgtgtcccaaggttcactccattgttcggaagtggtgaggaacgtttccaagaaagatccccgcatgcttgccagtctcattagacttcactttcatgactgttttgttcaaggatgtgacgcatcagttttgtt

SEQ ID NO: 43530 - DNA, 251 bp, Glycine max
  Clone ID: 701041395H1
ggccaacaatgcttacattttcccgggctttggtctggggttggtaatctcaggagcaatcagagtgcatgatgatatgcttctagcagcttcggaagccttggctaaactagtgtccaacgagaactacgaaaagggcttgattatccaccattctctaacatcagagaaatttcagctaacatagcagcaagtgtagctggcaaggcatatgagctaggcttggctactcgtctccctcgtcctcagaa

SEQ ID NO: 43531 - DNA, 275 bp, Glycine max
  Clone ID: 701041402H1
gcaaaaaaagctccaccaatggcgggttacagagccgacgacgactacgactacctcttcaaggtggtcctgatcggcgattccggcgtgggcaagtccaacctcctctctcgcttcaccaagaacgagttcaacttggagtccaagtccaccattggcgtcgagttcgccacccgcaccttgaacgtcgattccaaagtcatcaaggcccagatctgggacaccgcaggccaagaaaggtatcgtgccatcaccagtgcatactatcgtggggc

SEQ ID NO: 43532 - DNA, 273 bp, Glycine max
  Clone ID: 701041408H1
gaaaattttcatgtaaatgtaaatggggtaagataccaatttcaatgcttgctgtcatgtagcacaggaataggtcaaataattgaagtctcaacacaaatgtaggttattggtgttgtttattttaagttttccttttttttaagaacacccaactagatattgattttcatgatcataaattttcgtagcttgaaggataggaataatttccggtagttgtttattaattttggattatttagcaatccacttttcatttcaattcaaaaa

SEQ ID NO: 43533 - DNA, 271 bp, Glycine max
  Clone ID: 701041425H1
ttcattatttccattaacacccgattctgcttaaattggcacaccaccaattttcgtgggaacccgaaccaataaaacaaaaaaagagtccaattttgtgaaaattattaccattcattcttattcatcaacgtccccccttctgtgcccacttccaaatcttctcctctcgctatgggttgtggctcctcccttccagatagggattcaaggcagttgggtcgacccaattccgagaatggtggagggcaggacgccaagaatctaaggg

SEQ ID NO: 43534 - DNA, 267 bp, Glycine max
  unsure (1)..(267): unsure at all n locations
  Clone ID: 701041452H1
ctagctcttgttgacattccaataactttggtgctatgatcatggagatcaatgcatcccccgacaacattaattcagtcaagtacaacgtacatgaaaaacagccttaccgaacttggtaccactttcagcccccacaaantggatgaatgatccaaatggaccaatgtactacaaaggagtttaccactttttctaaccancataanccttatgcnaccaacnttggtaggctaatggtatggggtcttccgtatctatgatctc

SEQ ID NO: 43535 - DNA, 281 bp, Glycine max
  Clone ID: 701041505H1
ttgcaatcaaattagttcattctctttgcgcagttccctacctctcctttcaagatgcagatcttcgtcaagaccctcaccggaaagaccatcacccttgaggtggaaagctctgacaccatcgacaacgtcaaggccaagatccaggacaaggaaggaattcccccggatcagcaacgtctcatcttcgccggaaagcagctcgaggacggccgtaccctcgccgactacaacatccagaaggagtcaacccttcaccttgtccttcgtctccgtggtgg

SEQ ID NO: 43536 - DNA, 275 bp, Glycine max
  Clone ID: 701041513H1
cacaaactagtaaatagtaatattattcttcgaatccattttattcataatgggtgttttcacatttgaggatgaaaccacctcccctgtggctcctgctaccctttacaaagctctagttacagatgccgacaacgtcatcccaaaggctgttgatgccttcaggagtgttgaaaaccttgaggggaacggtggccctggaaccatcaagaagatcactttcgttgaggatggagaaagcaagtttgtgttgcacaaaatagaatcagttgatg

SEQ ID NO: 43537 - DNA, 275 bp, Glycine max
  Clone ID: 701041515H1
gcgatcgaagtttcacatcagccttatccagtttagggtttcggttccttaccctacctttgacgtatcgaaaccttaaatttgggattaggtctgagcaatctggttggtagaacctttggtcttagagagtcaagttttatgtctggattagacgatcaaattcctactgccttcgatccttttgctgatgcaaatgctgatgactcgggtgctgggtcaaaggagtatgtgcatattcgcgttcagcagcgaaatggtaggaaaagcctgac

SEQ ID NO: 43538 - DNA, 210 bp, Glycine max
  Clone ID: 701041517H1
ggcaatttggaggaatgtaatgtttccgatagcttatgtaaaaatggttggccccctgcattgtatttgggtcatttatctatcatgtgttgagtcaaagtttggtgatattgaatgcataatgtcattcattacactaacccaaattgtttaaagaacattgaatgttgtctctagacccaaaagaatgaaaagtgaaagataaaatgc

SEQ ID NO: 43539 - DNA, 278 bp, Glycine max
  Clone ID: 701041520H1
ctcatccttggcacaaggttttccacaagagaatgcctcctgaagcaattgaccttgcatcaaggcttctccaatattcacctagtctacgctgcactgcgctggaagcatgtgcacatcctttctttgatgagcttcgcgagccaaatgcccgtcttcctaatggccatccactgcccccacttttcaacttcaaacaggagttagctggagcatcacctgaactgatcaataggctcatcccagagcatattaggcggcagatgggtctcagcttc

SEQ ID NO: 43540 - DNA, 274 bp, Glycine max
  Clone ID: 701041525H1
ctagaatggcaaacaacggtgatgttgttaagatcaatattgaggagatgctggagatgctggagggggcaaaggcacccctaattactgagtgttgcatttacaaagtgccgtttagtatccgaagacacaacgaaaaagcctacaccccagaggttgtttctattggcccttttcaccacggccatcctcgcctccaagacatggagaaacacaaactcttttactccaaggcttttctcaaacgaactcaaacaactttggacactttgat

SEQ ID NO: 43541 - DNA, 272 bp, Glycine max
  Clone ID: 701041526H1
atcgtatgatcaatggagagtcaatatgccctcgaatttacacttttggcattggttcgttctgcaatcattatttcttgcgaatgcttgcaatgattggtaggggccaatatgatgctgcgttggatgtagatttgattgaacctcgaatgctgacattgtttggcaaagcttcatctctcattcttgcaaatatcaaaatggacacattggatgatcttgatgacctcgaggtataccctcctcatattccagatctttcatcagagggt

SEQ ID NO: 43542 - DNA, 135 bp, Glycine max
  Clone ID: 701041527H1
gtttgataacttgatacaacaacaaagcttcatcccattagacgaggtcgattacatgaatcacacgacaccattttgacacggttaaaacccaaagtttcagtatatcgaaataaaagtagacatttgtttttc

SEQ ID NO: 43543 - DNA, 278 bp, Glycine max
  Clone ID: 701041535H1
cccgaatccaagtgaaacgaaaaacactcatcatcatggattcagttgcattaaatggcaaaagcaatgataagcctcttcacgttgccatgctcccatggctggccatgggtcacatatacccttacttcgaagtcgccaagattcttgctcaaaagggtcactttgttaccttcataaacagccccaaaaacattgaccgcatgcccaaaaccccgaaacacttagaaccattcatcaaactcgtgaagctacccttgccaaaaatagagcatctc

SEQ ID NO: 43544 - DNA, 276 bp, Glycine max
  Clone ID: 701041536H1
gcagtgactaaaccaaacctctcactcgccgtcgtagggtttctcctttcgtttagcaacaacaacaatggttgcagccaagaaaaccaagaagacccatgagagcatcaacaacaggctcgctcttgtcatgaagagtggaaaattcaccctcggttacaagacggttctcaaatcacttaggagctccaaagggaaattgattatcattgctaacaactgcccccctttgaggaagtcagagattgaatactatgctatgttggccaaggttgg

SEQ ID NO: 43545 - DNA, 269 bp, Glycine max
  Clone ID: 701041544H1
cttcttgttcctctcgcccagaatccgagatcaaccctgacccctaaggccaggggtttttctcggcttcttcagattcctgaaatggcgtctgtttcagctttagccaagtacaagctcgtcttcttgggtgaccaatccgtgggcaaaaccagcatcatcactcgcttcatgtacgataaattcgataacacctatcaggctacaattggtattgattttctatcaaaaactatgtatctcgaagatcgaactgttcgactgcagtt

SEQ ID NO: 43546 - DNA, 271 bp, Glycine max
  Clone ID: 701041553H1
gttcaatgtaggattatttcagaacaatccccagatggctttctcaaatgatggtcctatgggccaagtgcacaatgtggccaactattgtgagcaaccaagaaactttgatgcatttgttaatggtgatactggaatcagaataaggactcgtcatggaagaaatgaacagccaaacatgaacatgatgatacaatcacaaggtattgcaccaaggagaatacgattgggagttgttaggcgtccgcttggttctcaggagacagcaaaa

SEQ ID NO: 43547 - DNA, 270 bp, Glycine max
  Clone ID: 701041554H1
gaagcagtggcccctgtggtgaaggtgcgtcaacatcctcctagtgctagtcgtgtgctacttccagatggtagatacatggcttatcatgagcaaggtgttttggccgacacagctagattttcacttgttgctccgcactcttttctttcatccagactagcaggtttacctggagtcaaagcatcattgcttgaagagtacggcattcgtttggtcacatatgatcttcctggttttggggagagtgatcctcatcccaacagaaat

SEQ ID NO: 43548 - DNA, 271 bp, Glycine max
  Clone ID: 701041566H1
ttttgtgcttctttctgtgtgcaagaaaggtaaaagctttcacacaccaagaaaagtagccatggctgcttgctcaagaacttctcttttgctccttttctttctctttggattctccgcagctaaggaactattggttggaggcaaaatagatgcttggaagattccatcttctgaatcagattccctcaatcaatgggctgaaaggtctcgtttcagagtcggcgatcatcttgtgtggaaatatgagaatgggaaggactcagtgttg

SEQ ID NO: 43549 - DNA, 263 bp, Glycine max
  Clone ID: 701041576H1
cacgagactcatacattgtgctgccaattatagtaactctctatttctctttccatctctcaagttctgaagaagaaacatgtgtggaggtgctatcatctcagacttcattggtgtgaagcgtggccgcaacctcgccgcgcaggaactatggtctgagcttgaccctttctctgacttccttggcttcgataccaccaattccaaaaaccaaccacccctgcagaaaattccagacaaaaaagtggtgtcatcatgtgaga

SEQ ID NO: 43550 - DNA, 263 bp, Glycine max
  Clone ID: 701041587H1
ctattacatatatcagaatcattaaagataagattatattgctaagaagaaaaaatatgaaggttgtctacttgcttgttgccctcttggctttgacatcaactgttgtctctgcctatgaccctagtcctctgcaagatttttgtgtggcagccaaagaaaaagatggtgtatttgtgaacgggaaattctgcaaggaccccaagcttgtcaaagcagaagatttcttcagacatgtggaacctgggaaaactgacaaccca

SEQ ID NO: 43551 - DNA, 260 bp, Glycine max
  Clone ID: 701041593H1
tgttgtagagagaagtaatggcgaacatagacatcgaagggatcttgaagcagcagcagccttatgatgggcgcgttccgaagacgaagatagtgtgtactttgggccctgcttctcgatccgtagaaatgaccgagaagcttctgagggcagggatgaacgttgctcgtttcaatttctctcatggcacccacgactatcaccaggaaaccctcaacaatctcaagactgccatgcacaacactggcatactctgtgcc

SEQ ID NO: 43552 - DNA, 262 bp, Glycine max
  Clone ID: 701041594H1
taaatctcctctttgtttccgagtcagagagcaatggcacgtaccaagcaaaccgctcgcaagtccaccggcggaaaggcgccgaggaagcaattggcgactaaagccgctcgcaagtcagctccggccaccggcggagtgaagaagccccaccgcttcaggcccggaacggtggctctgagggagatcagaaagtaccagaagagcactgaacttctgatccgaaaactcccattccagaggctcgtcagagaaatcgctc

SEQ ID NO: 43553 - DNA, 269 bp, Glycine max
  Clone ID: 701041612H1
cagaatcggtcactaaatccgcaatcatgaagctcgataccaccggtctcgaatcgtttcccacactgcttgcgcctcaaaacgacgtcgttggagaactctccgccgctccatccttcgaccttccgaattccaacgatttcgatgggtttgtgaaagaagctattcagatggtgaagcccgcgaagggtactacgactcttgcttttatatttaaggagggtgttatggtagctgctgattctcgagctagcatgggaggatatata

SEQ ID NO: 43554 - DNA, 271 bp, Glycine max
  Clone ID: 701041614H1
cagctatggaaggagaaaatggaaagaagctgaaaatactgtgcctccacggattcagaacaagtgggagttttcttaaaaagcaaatcagcaaatgggatccttctctattcattcaatttgatatggttttcccagatggtaaataccctgctggagggaagtctgacatagaaggcatcttccctccaccttactatgagtggtttcaattcgaaaaggacttcacagtgtactttaacttggaagaatgcatctcatacttatgcga

SEQ ID NO: 43555 - DNA, 271 bp, Glycine max
  Clone ID: 701041621H1
ttgatatctggaatgacagcactgaggtcgctaaatgtttcaaattctcgtataaccaatgaaggactacggtatttgaagcctttgaagaatttacgcactcttaccttggagtcttgcaaggttactgcttctgaaattaagaagcttcagtcaactgatcttccaaatttgataagctttcggccagaataaatcaggagaataagagaattctgttatctgcctgttgaacaattctctgtacatatttatggctactgtttggata

SEQ ID NO: 43556 - DNA, 269 bp, Glycine max
  Clone ID: 701041636H1
cataaatattccgttttgcgtttctctgcctaaaaggattgaaagatgggtcaagcactaggttgctatcaagttgatcagtcaaatgtggctatcaaggagcattttggaaaatttgatgatgtcctagaacctggatgtcattgcctgccttggtgtcttgggtaccagattgctggtagtttgtcactgcgtgtgcagcaacttgatgttcgatgtgagacgaaaaccaaggacaatgtctttgtcactgtggttgcatctgtgca

SEQ ID NO: 43557 - DNA, 265 bp, Glycine max
  Clone ID: 701041639H1
gtgaaccactacaagctaagagggaatatccaaagttataatcttggtggcatgggttgcagtgctggactaatctctatagaccttgccaaacagctcctccaggttcatccaaactcttatgccttagtggtgagcatggagaacatcactctcaactggtattttggcaacaacagatcaatgctagtctcaaattgtctattcagaatgggtggagctgcagtcctcctctccaacaagtcttctgatcgcagaagagcca

SEQ ID NO: 43558 - DNA, 263 bp, Glycine max
  Clone ID: 701041644H1
cataaatattccgttttgcgtttctctgcctaaaaggattgaaagatgggtcaagcactaggttgctatcaagttgatcagtcaaatgtggctatcaaggagcattttggaaaatttgatgatgtcctagaacctggatgtcattgcctgccttggtgtcttgggtaccagattgctggtagtttgtcactgcgtgtgcagcaacttgatgttcgatgtgagacgaaaaccaaggacaatgtctttgtcactgtggttgcatc

SEQ ID NO: 43559 - DNA, 269 bp, Glycine max
  Clone ID: 701041647H1
gtgaaccactacaagctaagagggaatatccaaagttataatcttggtggcatgggttgcagtgctggactaatctctatagaccttgccaaacagctcctccaggttcatccaaactcttatgccttagtggtgagcatggagaacatcactctcaactggtattttggcaacaacagatcaatgctagtctcaaattgtctattcagaatgggtggagctgcagtcctcctctccaacaagtcttctgatcgcagaagagccaaata

SEQ ID NO: 43560 - DNA, 265 bp, Glycine max
  Clone ID: 701041654H1
aattaatcaaacatggctagggttagtgctttgtttcactctttgctcttgatttcttcccttgtattggcttctcaaatccatgtttcctctgggaaactagtccctggactatcatggaattactatttgttgacatgtcccaagcttgagaggattataaggaagcatcttgaggatgtcttcgagaaggacagtggagtagctcctggcatacttcgactcttcttccatgactgctttcctaatggatgcgatgcgtcta

SEQ ID NO: 43561 - DNA, 261 bp, Glycine max
  Clone ID: 701041661H1
tttgcttcttcgagtttcacagccaagtcgtaaaagggtttcaagggatggaaaacatgcagagcttctggcaattgggtgatgaactccgtgggcactcaaaagcatcggaggatcacaagtggttaatggttgcctcgaaactggccgaacagacaagattgaagggggagcgtgtgaacaaccttgatctttcaaagggacccattgaaacaaggtcaagggataaatttgggttccaggaagagaacaaatttgatt

SEQ ID NO: 43562 - DNA, 260 bp, Glycine max
  Clone ID: 701041686H1
ctcgtcttcaatcctttcgttattctcttattcatccttctcttctgaaaaatccagatctctttctgcccttttctccgtcacgcttttcgtgaccggatctgtatggatttgatccagatctacacgccgatggtggttttggccgggtctttcatagatctggtgcgtagaggctcagatctacggtaccgaggtacaacagagaatcgatgacaagaacgcagatccgacggtagatccagccgattccgcttgtt

SEQ ID NO: 43563 - DNA, 208 bp, Glycine max
  Clone ID: 701041705H1
aataagtgagatgggtctggcccgttttcaaaattttcgtcattatagttattgttacgattatgatactgagaaagttggggggcctgaaatttggcatctacagctatcagattgctatatttgttgttttgtttagcaaaagactgcagcatgtcactacaaattttgctgtttgtaagacgattgaattgaaattctttccttt

SEQ ID NO: 43564 - DNA, 277 bp, Glycine max
  Clone ID: 701041721H1
ggctgctgaagtgacatatgaggataacgagaattttgttgatgatgggattcaaattgagcctttcaacctagagaaagaaagggaagaaggttattttgatgctgcaggaaattttgttgaatatgtaagagagaatgagattaaggatgcatggcttgataatgttgaagttgatccaaaatatgctgcattaagctctgtagcaacaaatgatgaagatgagggccccccagacctttcttctaaagatattggaatcatgaagaggcgcatt

SEQ ID NO: 43565 - DNA, 276 bp, Glycine max
  Clone ID: 701041723H1
ccaacatctatctcacttcttagttctttgtggctctttccatgatggcctctcctacatctccaagagttctcttcttgagtctctttgtaactctttccatgattttacatttgagttcagccaggaagttgtctgagtcagacccccaattgcagttccaataccacagaggccctctcctcacaggcaaaatctccgtaaacctaatttggtacggtaagttcaaaccttctcagaaagccattgttgctgatttcatcacctctctctcct

SEQ ID NO: 43566 - DNA, 275 bp, Glycine max
  Clone ID: 701041734H1
gctttctcccaactctaccaccaccacttcaacaccttcgtttcccaaacaaattgcatagtagtctccgtggagtacaggctcgccccggagcaccctctccccgcatgttacctcgattgttgggaagctctcaaatgggtcgcatcccattccagcgaaaatagccccatcaacgcagaacagtggttaattagccacggcaatttccaaagagttttcattggaggtgacagtgcaggtggcaacatcgttcacaacattgccatgcgtgc

SEQ ID NO: 43567 - DNA, 274 bp, Glycine max
  Clone ID: 701041741H1
ttttcatttccgatccataattgtcccaacgcgatacaccaattcttccttcctttcatctcgtgaaatccaaagagttgcgacacgttaaattgttttccaggttgcgcatatccagcatgcaggcatcgcgggcaaggctgttcaaggagtacaaagaggtgcagcgggaaaaggctgttgatcttgatattcaactagtttgtgatgattcaaacatttttaaatggaccgctcttatcaagggaccctctgagactccttatgagggtgg

SEQ ID NO: 43568 - DNA, 268 bp, Glycine max
  Clone ID: 701041758H1
ctctaatcactctagctgttgcaaatttctactatttttcaatggcttctgcagatgttgagttccgttgctttgttggtgggcttgcttgggtcaccggcaacgatgccctcgagaaagccttttcaatctacggcgacatcgttgaatcgaaggttatcaacgaccgtgagactggaaggtccagaggattcggatttgtgaccttcgcctcagagcagtcaatgaaagatgcgatcgcaggaatgaacggccaggaccttgacgg

SEQ ID NO: 43569 - DNA, 270 bp, Glycine max
  Clone ID: 701041761H1
caaattaatcaaacatggctagggttagtgctttgtttcactctttgctcttgatttcttcccttgtattggcttctcaaatccatgtttcctctgggaaactagtccctggactatcatggaattactatttgttgacatgtcccaagcttgagaggattataaggaagcatcttgaggatgtcttcgagaaggacagtggagtagctcctggcatacttcgactcttcttccatgactgctttcctaatggatgcgatgcgtctatat

SEQ ID NO: 43570 - DNA, 271 bp, Glycine max
  Clone ID: 701041763H1
actgacgtctactggactactatatggatggggttggaataagtttggacaggttggagttggtgacaatgttgatcgttgctctcctgtgcaagtgaagttcccccatgatcagaaagtagttcagatctcatgtgggtggagacacacaattgctgtaactgaaaaggaaaatgtattttcttggggaagaggcacaaatgggcaacttgggcatggggataccgttgaccggaattctccaaagattattgaggcattgagtgtggat

SEQ ID NO: 43571 - DNA, 267 bp, Glycine max
  Clone ID: 701041771H1
aagacacacataattagcatagttattatggggagggttgagtactccccattgtttgagacaagaaggtgcagaggaaggttcatctacaggtcctttgcaatctcattatttgtgaccatatgctttatatggcattacagatttagccacataacaaagggtgaagatggaaactgggcatggcttggtatgcttgcttcagagctgtggtttggcttttactgggtccttactcaagcccttagatggaaccttgtgttcaga

SEQ ID NO: 43572 - DNA, 267 bp, Glycine max
  Clone ID: 701041775H1
agcgcagaatccaagaagaaaggatcaactgtcaaagataaggaaaaatctaaaaggatgaagggtcaatcatcccatgcaacctggaaaagtgaaacagagatgcatctaaggcaacagtttgattagcattatgtgttcttgtatgttaccagttacctggtagaatgtgatgtgtttaggactatgctgttaaatcaacaaattaacttcgtcgttatcaatgccagcaggtacaagttgctacatatggctctaaaattatgg

SEQ ID NO: 43573 - DNA, 272 bp, Glycine max
  Clone ID: 701041780H1
aatttattcaaaaagaaaagatgaaccctaatttcctctgtctctgaacttggaagatctggtttccattatctcctccatcttcacgttccgaaattgtagatagaagatcacacttgctcaattcccttctcaagttattgttggttggcaatgcaagatccaaggattcctttgtcagaggagatcttgaataataaaccaaggaagaagaaaaactcaacccagaaggcatctttatttcttttgcaagcgaatggtgtcaaggaaga

SEQ ID NO: 43574 - DNA, 267 bp, Glycine max
  Clone ID: 701041795H1
gttcaacaacgtggcgctgcaattatcaaagctagaaagctttcaagtgcactatcagctgctagtgctgcttgtgaccatattagagactgggttcttggaactcctcagggcacttgggtatcaatgggagtatattctgatggttcctacaatgttccagctggacttatatattcattccccgtcacttgtgccaatggggaatgggcaatagttcaaggactttccattgatgagttctcaaggaagaagttggacttgact

SEQ ID NO: 43575 - DNA, 279 bp, Glycine max
  Clone ID: 701041841H1
ttttcatttccgatccataattgtcccaacgcgatacaccaattcttccttcctttcatctcgtgaaatccaaagagttgcgacacgttaaattgttttccaggttgcgcatatccagcatgcaggcatcgcgggcaaggctgttcaaggagtacaaagaggtgcagcgggaaaaggctgttgatcttgatattcaactagtttgtgatgattcaaacatttttaaatggaccgctcttatcaagggaccctctgagactccttatgagggtggtgtgt

SEQ ID NO: 43576 - DNA, 274 bp, Glycine max
  Clone ID: 701041859H1
aacgacctgtttcctccctcgcacggatccacccgatttctgagattccttcgaattgttaactctctttcagtttcaagttggaaactttttcgattttcgctttctggaggtgtgaattgttgtttgaaagtcacaagcaatggtgaaggacactgcgtattatgacatattaggtgtcaattatgatgcatctgctgcagagatcaagaaagcttattatgtcaaggctagaattgttcaccccgataaaaatcctgaggatcctaaggcc

SEQ ID NO: 43577 - DNA, 282 bp, Glycine max
  Clone ID: 701041903H1
cttgtttatcattttcttactttcctctcacgctctgccacaaaactccgtctccgcaataacggaataaaaaaacaagtttaattactattatggcgccgagggatcataagacaagcaacgctaaggctaacggtaacggtaacagcggggtgaaggaggtgcattttcgtggagtgagaaagaggccgtgggggagatacgccgcggagatcagagatcccggcaagaagagccgcgtctggctcggaaccttcgacacggcggaggaggcagcgcgtg

SEQ ID NO: 43578 - DNA, 280 bp, Glycine max
  Clone ID: 701041934H1
ctgctctgtctctatctctacttgaggcctttccctctgttccgttggcgggtgggtctttcttctctcaaaatggccaccggagtgaccagaaaaatttctgctgcatcagctcgggcccacaccagaagggcgaagaaaaccaattctctaccccttccttcaggaattcttggaacagcactagcagtgttgtttattgggtttctagcatgggcttatcaggttattcaacctccccctcccaagatatgcggcactcctgatggaccacctataa

SEQ ID NO: 43579 - DNA, 161 bp, Glycine max
  Clone ID: 701041970H1
attgatgacatcttgaacaagttcgaccctgtcgttgaaagggtcatcaagaagcgccgtgagatcgtcagaaggagaaagaacggagaagttgttgagggcgaggccagcggcgtcttcctcgacactttgcttgaattcgctgaggacgagaccatgga

SEQ ID NO: 43580 - DNA, 266 bp, Glycine max
  Clone ID: 701042011H1
accgtgttcctatacatgtttgtaatagggatgtggaaatggaggttccgcccgagataccctcctcacatggatgctagtctctcttgtgcatatgtaaccagccctgaggactttgatgaggaaatggacacttttccaaccacaaagagctttgatatcgttcgttggaggtatgataggttgagaagtctggcagggaaggttcagagtgttgttggacagatagcaactcaaggagaaagaatccatgctcttataaattg

SEQ ID NO: 43581 - DNA, 271 bp, Glycine max
  Clone ID: 701042015H1
cgacgaaaactactcgctcggcaaatccctcacgagcaagcacctcattcagctagcttcaaagggtgaccacaaaaacgccatcaacgttgtgttaacttccgctgacgtggcagttgaaggtttctgcacgagccgatgtgggacccacggttcttcctcagcgggccatgcaaagaacaagaactacaagttcgcatacatatgggttgggaattcggaggcccaatgcccgggccaatgcacgtggccgtttcaccagcccatatat

SEQ ID NO: 43582 - DNA, 273 bp, Glycine max
  Clone ID: 701042016H1
ctcacgcatttcctcgtttttttcttcccttttctctttctccggcgacgatctcagattccggccactcctctcgccggcgagcccttactcttccctcctccgtcgagccctctccgattcgaatcgttcccagcctcgcaccaccatgaatcccgaatacgattatttgttcaagcttttgctgattggagattctggtgtaggcaagtcatgtcttctcctgaggtttgctgatgattcataccttgacagctatatcagtaccattgg

SEQ ID NO: 43583 - DNA, 269 bp, Glycine max
  Clone ID: 701042019H1
ctctccgccacttcctgcacaaaccctcccttctccatgggacagtcaccgtccacctccgccgcgcctccgtcggacctcaaccgcctccaaattgctcagttacacccaaacaccgattctgattccaccgattacaccctgtgtctctccgacgattgcttggccgcaatctttcatttcctgaacaccgccgatcggaaacggtgctctctggtatgcctccggtggcgccttgtcgacggccagaggcggcaccggctctccct

SEQ ID NO: 43584 - DNA, 163 bp, Glycine max
  Clone ID: 701042023H1
cgcgccttcaatttgttcttccaacaccctcagtcattgtgtgagtccgaagctcaacctctctcgctcttcaatggccgtatcctctattcgaatcgccgtcgtcggtgatgtgcatgattgctggaaccttgaacaagattcgaaagcacttgagctcttg

SEQ ID NO: 43585 - DNA, 265 bp, Glycine max
  Clone ID: 701042029H1
agggtctcttccattcacaaccttaaacctttctttcttgtaaactttattgattgattctgagaatagaactaagagggtatagacatggctagcgcaattgcagcttcttttttggttctgcttctggctttccccactgtatttggagctgaccatgaagttggtgacactagtggatgggccctcggagttaattacaacacctgggcctctgggaaaactttcacagttggtgacactttggtgttcaagtatgactcca

SEQ ID NO: 43586 - DNA, 267 bp, Glycine max
  Clone ID: 701042030H1
ggttggttcatttgatctgcgactgagagaagagaagagaattgtgatggggggaggacagggtcacggcacaacctacaaaggtgttaccattcatcagccaaagcgctggcacactatcaccggcaagggtttgtgcgcggtcatgtggttttgggtattctacagggcaaagcaagatggtcctgttgtattgggctggagacatccttgggagggtcaccatgatgatcatggcaagggccattagcattccttaggcatgag

SEQ ID NO: 43587 - DNA, 260 bp, Glycine max
  Clone ID: 701042060H1
cttccatctaaccctcaaatgcttcatggaacccaaaacaatcttattcatactgataaattcaggttgggttgtctctaatttctttctttccaacacatacaaaccacttaactaaacttgatctgcatgcaggttcttggacaaggcttgtatcagagtggaacaagagggaaatcaggaaagcgcgtggagattatgcagtgttgcgcaagttgagcaagtgaagatattgctatcggtcattccgatattctcgt

SEQ ID NO: 43588 - DNA, 259 bp, Glycine max
  Clone ID: 701042074H1
cgtgcgtgcattccattgttgttgttattgtatcgtagccagagaagaagaagagaagagatcgcggcgaagaaagaaagatgacggaggcacatataaggaagaagcccgggatggcgagcgtgaaggacatgccggttctccaggatggtccaccgccgggcgggttcgctccggtccggttcgcccggcgcatcccgaacaagggccccagcgccgttgccatcttcctcaccaccttcggcgctttctcttgggg

SEQ ID NO: 43589 - DNA, 258 bp, Glycine max
  Clone ID: 701042076H1
ctcgtgcaccagattgagaccgttccaaaccctaaggggctctgtgcggtttcgcagctgtccgattctctcgttctcgcgtgccccggtttgcacaagggtcagattcgcgtggaacactacgcgcagaagaagaccaagttcatctcagcgcatgattccagaatcgcttgcttcgctctcacgcttgatggacagttaatcgccaccgccagcaccaagggtacgctgattcggattttcgacaccgatcacggc

SEQ ID NO: 43590 - DNA, 262 bp, Glycine max
  Clone ID: 701042095H1
gtaccaaatggatgcgtgtcagcgaatacaatgcttgaatatacattactataggcttgtctgaattcagcatgccaatggtgtactatttgagtctcagctaaaaatttgcgtgataatgcttcagatctggaaggaaatatttacagcatgatgtggcattctgtaattttggatgttcagttgtaagctaactcattttttcccctatccttttcatttataataatagcgaatataataaaaaaaaattatttaccgg

SEQ ID NO: 43591 - DNA, 265 bp, Glycine max
  Clone ID: 701042096H1
attaattgcaagaatggcacttcgttgcttggtgatgtccctttctgttctcttcactcttggtcttgcgagagaaagccatgccagagacgaagatttttggcatgctgtttggccaaacactcccattccaagttcattgcgagatcttctaaagcctggccctgcaagtgttgaaatcgatgatcaccctatgcaaattgaagaaacacagtacccgaaaaccttcttctataaagaagaccttcatccaggcaaaacaatg

SEQ ID NO: 43592 - DNA, 267 bp, Glycine max
  Clone ID: 701042103H1
ctcggttctgccttcacaaaaaaattatcgagatcccctttttctcctaagaaaagccatggctaagggtcccggtctctactctgacatcggcaagaaagccagggatctgctgttcaaggactaccacagtgaccagaagttcaccatcaccacctactcacccactggagttgctataacagcatcaggaaccaggaaaagtgaactgtttgtggctgatgtcaacacccagttgaagaacaaaaacatcactactgatatcaa

SEQ ID NO: 43593 - DNA, 261 bp, Glycine max
  Clone ID: 701042108H1
ggtttgataagcttcttcaggttacaggtccaggcatagtcaatgtgctgacacatcatgtgtataatttgggcccaggtagtgatgagcatcttgacaggaagattctagatcctgagtgcttgagcaaggttgaatcaatttttagcaatctttcagaaaccattcaaaaatatggcccttggtcttctgcatgggtaggtgaagctggcggggcattcaacagtggtggtcgttctgtttctaacacatttgtaaata

SEQ ID NO: 43594 - DNA, 250 bp, Glycine max
  Clone ID: 701042116H1
ctggattccaaggtttccaagtcctgtgctgtgctttcaatacctacgtcatggaatttctcaaaaaggtttaagttctttggcgtggattcatatcaagttgcatttggattttgactttgagactctgcttggggtgctacttacgaatgttttcccggaaaaacgtaaatttcttctaatgctttatgaaaagaataacgaacaagttcaatgtataccgcctttataaaataataacaagtttcat

SEQ ID NO: 43595 - DNA, 266 bp, Glycine max
  Clone ID: 701042120H1
gaaaagaagaggaaaaggagagtggagaggaagaaaaggattgaagttgttgctgtgagaaagagaaagagtgaaatcggagtttgggaaggaattgcaatcaatggatgtgataaagacgcagcaaatctcatctcgaccaatcgagaaggtggtggttcaccctctcgtgcttctcagcatcgtcgacaactacaacagagtcgccaaagacactcgcaagcgcgtcgtcggcgtcttgctcggctcctccttcaaaggcaccg

SEQ ID NO: 43596 - DNA, 261 bp, Glycine max
  Clone ID: 701042123H1
atctgattcgttcgttcactttcactttaccaactcctaacaatttctctctgtttccttcttcaccgcatcaatggagttggacggcgttctcctcggcatgtgcaaccctctcctcgacatctctgccgtcgtcgacgacgctttcttgcaaaaatacggtatcaagttgaacgatgcgattctcgctgaggataagcacaaacctatgtatgaagaattggctaacaatcctaatgtggagtacattgctggaggtgc

SEQ ID NO: 43597 - DNA, 258 bp, Glycine max
  Clone ID: 701042125H1
gaatttgcaggatcatttagttaataagacgttggggaactctttgaaagaaaatatgtcaagtggactttctgttcctgcaattatgattcgtaatttggctattcaacttaggaaggtgtgtaaccatcctgatctccttgagtcagcatttgatgattcatatttgtatcctcctttggaagagatagttggacaatgtggaaaattccatttgcttgatcgattgctgcaacgtttattttcaaggaatcacaa

SEQ ID NO: 43598 - DNA, 260 bp, Glycine max
  Clone ID: 701042128H1
ataccatcttacttttactttgttttcacaacatagccatggccatctccagcaacgcttctccttttgattccatcatcttcgatttggacgacaccttgtacccgtcaagcaccggtattgacaagtgcgtcaagaaaaacatccaactctttctcatccagaaatgcggattctcagaatccgaagccttcaccctccgagttgatctcttcaaaacctacggaagcacccttgccggtttaagagcactaggccat

SEQ ID NO: 43599 - DNA, 259 bp, Glycine max
  Clone ID: 701042129H1
tgatgcttcgcttggggattctgatggcctaaaaaatcctgctttgaagaaaaggactaaatctgattcaagtactgcttctagctccaaagcgtgtcgggagaagttgaggagggataggcttaatgacaagtttgttgaattgggctccatcttggagcccggaaggcctcccaaaacagacaaggcttccattctgattgatgctgcccgaatggtgacacagctgcgggatgaagccctgaagttgaaagactca

SEQ ID NO: 43600 - DNA, 262 bp, Glycine max
  Clone ID: 701042136H1
ggggggtggcactgtttggccgttgatgatcagggcagagcttatgcttggggtggaaatgaatacgggcagtgtggcgaagaacccgagcgcaaggatggcactggtagacctttaaggagagatatagagatccctcagcgctgtgctcctaagcttgttgttcggcaggttgctgcaggaggaactcactcagtggtacttacacgagaagggcatgtttggacatggggtcagccatggccgcctggtgacataaaac

SEQ ID NO: 43601 - DNA, 260 bp, Glycine max
  Clone ID: 701042139H1
atcctaagtctttgggaatagtgctgcaatggcttcaagtcaggaggaggtgacccttttgggagctactggaagcccatttgtgtgcagggttcatattgccctcaagttgaagggagttgaatacaaatatgtcgaagaaaatttgaggaacaagagtgaactgcttctcaaatccaacccagttcacaagaaggttccagtgtttattcacaatgagaagcccatagcagagtctcttgtgattgttgaatacattg

SEQ ID NO: 43602 - DNA, 258 bp, Glycine max
  Clone ID: 701042145H1
gaaaatcctcacccattttcttcgtagccaaacactctgaaattctcagttatgtcgtggcaagcgtatgtggatgatcacctactgtgtgaaatcgaaggtaaccacctcactcacgccgctatcatcggccaagacggaagcgtttgggctcagagcaccaacttccctcagttcaaacctgaggaaataactgccatcaataatgactttaatgagcctggatcacttgctccaactggattgtatatcggtggc

SEQ ID NO: 43603 - DNA, 260 bp, Glycine max
  Clone ID: 701042182H1
ccctgtttcaaaacttcaacaatcagagagggagaagttgttgcatttagaggaagtgcttcataagcgtgttgtaggccaagaccctgctgttaaggcaattgctgaggctatccaacgttcaagagcaggtctttcggatcctcatcgtccaattgccagcttcatgtttatgggacctacaggtgtaggaaagacagagctggctaaggcacttgcagcctacttgttcaacactgaagaagctcttgtacggattg

SEQ ID NO: 43604 - DNA, 286 bp, Glycine max
  Clone ID: 701042201H1
caaacttcaacttgtaatcaagggagagagaaaatttcaagcacaaaaaatggcggagaagaaagtggtgatcctaggaggtggtgttgccggtgccaaccttgcaaaaactatacaacatcaagccaacgtcacccttattgatccgaaggaatattttgagattccatgggcaagtttgaggggattggttgagccaacttttgctgaaaggatagtaatcaaccatagagagtacttcaaaaagggtaaccttgttgtatccagtgctgtcaacataactgaa

SEQ ID NO: 43605 - DNA, 279 bp, Glycine max
  Clone ID: 701042204H1
ctctcacatttcattacttctaccaagctactacatttttaacttcctctttctacatttcattcaaaacaatcatggcttctcttcattccattacattttcaacaaaaactgtcctttatgtatttgtattggcctcttccatcgcagcctctgctggcaacttctaccaggattttgacgtaacttggggagatggtcgtgccaagatactcaacaacggcgatcttctcactctttcccttgacaaagcctctggctcggggtttcagtccaaaa

SEQ ID NO: 43606 - DNA, 274 bp, Glycine max
  Clone ID: 701042227H1
gtgaagaaaccagagacaatcacatgaaccctaacctaaacccctgagaaattattgaaattgatgcatggcggaactgaacactctggtggtgcgaaagccatgttttggccttccaaccggttgcactcaatccctctctgcctacatttatctcaaattcgcccaaattcccttccaattggacttccacctcaacaaccctcattctgatcaaattccttactttgaggttgatgactctgtggcttataataatgagaaggaggggatc

SEQ ID NO: 43607 - DNA, 278 bp, Glycine max
  Clone ID: 701042235H1
tgggtatagtagatgaagggaaagggacagcagccagcttcgggactcacggaaccttctaggctatatataaaaaaaaaaatattgcacgctcctccgggctcctggcatttcaaattcaaggcctctttccaatcttcaaagcagctactgcggcagctccattttccaattgaagttagcagagcagccatctgtgtgtgaaggggacatgatggatgattcccaaaagcatagaatcctgatggtctcagattttttctatcccaactttggag

SEQ ID NO: 43608 - DNA, 275 bp, Glycine max
  Clone ID: 701042239H1
aaaggacactacttatgtctcaaaagagcttggagaagcgttttggtcagtctccagtttttattgctgccactttcatggagcagggtggcattccaccttcaacgaaccctgcaactcttcttaaggaagcaatccatgttatcagctgtggttacgaagacaagacagaatggggcaaagagattggatggatctatggctctgtgacagaagatatcttgactgggttcaagatgcatgctcgtggttggatttccatctattgcatgcca

SEQ ID NO: 43609 - DNA, 273 bp, Glycine max
  Clone ID: 701042242H1
ccacacaccacacacatagtagctattatactctctagagtaattgcggaatctgctagaattttctaataatggcgaaagacgttgagcaggtcacagagcaaggtgaatactccgcgaaggactaccatgaccctcctccggcaccgttgatcgacccagatgagctcacaaagtggtccttgtacagagccgccatagctgagttcatagcaacactcctttttctttacatcaccgtgttgaccattattggctacaagagacagagtg

SEQ ID NO: 43610 - DNA, 273 bp, Glycine max
  Clone ID: 701042243H1
caccaatacaacacgcctaagccaaacccaaatccaccgctctttattttcgtcttttctacccttcccggatcccaatccctaatctttctaccactctcactccaaaaatctctaattttttcatctgggaagatcggttgacgaatcgaggatccgatcgcttgcgaggaactagggtttcaatcgatcgcatcacacacaaacaatcatgtttagccggatgttcggtaaacctaaacaggaaaccaatgctgttgccactttggacaa

SEQ ID NO: 43611 - DNA, 273 bp, Glycine max
  Clone ID: 701042244H1
aaaaaaaagagcagtgtaagaaattagaaagggcgaaaggcgcagtttatctgaaagcaaaaaccctacctagggtcaaccgtgacgccacaatcgccttcggcatctttgcaacgggatcaggtgctcctcgtccttcacgatggcgggaactgaagccaaaaaaactgaatccaaaaaacctgccgctaagcaatccggtgcgaagaagaaggaggtgaagaaggaaactggcttaggtctcacgcatcggaaggcggagaacttcggaga

SEQ ID NO: 43612 - DNA, 273 bp, Glycine max
  Clone ID: 701042246H1
gcaagctagctaggttgaaaatagtttggttttgtagtaagtgaggtgaggtgccaaaatggtgaagataactcttggtactttcgatgactcttttggtgttgcctctcttaaggcttatttggcagagttccatgcaactctgattttcgtgttcgctggtgttggttcagccatcgcttacaacgagcttacaaaagatgcagccttggatccaacggggctggtggcagtagctgtggcccatgcatttgcactgtttgtaggtgtctc

SEQ ID NO: 43613 - DNA, 278 bp, Glycine max
  Clone ID: 701042247H1
atcagatcaaattgcctggacttcacccatcaatgtccatggacgatttggtaagccacattggacattgcatttcagaacagatgggatccgacaatccgagtttggctggtgacagccagtatagtagatctattctggaagaattttctcagtacttgttcaatgactctcaacatgcaactacctctgatgaacagcgtgtgatgtcaagggtgaactcactttactgccttctgcagaaggatccttcttcagcagaagacataaacacaatg

SEQ ID NO: 43614 - DNA, 276 bp, Glycine max
  Clone ID: 701042250H1
gctcgtgcctctagggttatcatatctccatttccatttcctctctctcagtttccaagaatcttaagctatgggaaagtcttacccaaccgtgagcgctgattaccagaaggccgttgagaaggcgaagaagaagctcagaggcttcatcgctgagaagagatgcgctcctctaatgctccgtttggcatggcactctgctggaacttacgacgtgagctcgaagaccggtggtcccttcggaaccataaagcacccctccgaactcgctcacgg

SEQ ID NO: 43615 - DNA, 273 bp, Glycine max
  Clone ID: 701042253H1
tgtagacaagatggaaggaactgtggaaacgtctctcgaatttggcattgcattcctcagattttaccaaccttgcacatttcagcaaatttttatcatgggttctgttgaatcgagatagctccatttccctgcatagtctagatttgaggcgtaaaggctgtatagatcatgaactcctggacatgatcatgggatatgctgtgtcacatgatgtccagcagttggcaattgaagttaatttaaatgctaaatttggttttaagttgcagc

SEQ ID NO: 43616 - DNA, 274 bp, Glycine max
  Clone ID: 701042256H1
gttttcgctcattctagaaacacccataagtcggcattacaagcaccatatttcggaagctggaagctcacacatttttttctgcgtccgagaatcgcatttttctagttcctgcgcatccaaacgagtccttaatatcgaactttcctgaagatggtgttgatagagcatgaagagagcaagcagagaaacgcgaacccctccaacgccgccaacgacgattccgacggcttcgaaaccgccagcgacaccgatctggccggtgaaggcgacg

SEQ ID NO: 43617 - DNA, 271 bp, Glycine max
  Clone ID: 701042257H1
tgcaaattctatgttgtttgatttgcgtgagtgaattgggaagatgctgtgtctgggtcgattcggcggggtctcttacggttggatttggaatcggaggagggacaacaccattaacaggcccagatggcgtttgatggcccaggaatcaccctctctcgactcagacaaaaccgccactgctggattctgcatcattgaaggccccgaaactgtacaggattttgccaagatggagcttcaagaaattcaggacaacattcgaagtcgg

SEQ ID NO: 43618 - DNA, 280 bp, Glycine max
  Clone ID: 701042264H1
cgtcaacatcctcctagtgctagtcgtgtgctacttccagatggtagatacatggcttatcatgagcaaggtgttttggccgacacagctagattttcacttgttgctccgcactcttttctttcatccagactagcaggtttacctggagtcaaagcatcattgcttgaagagtacggcattcgtttggtcacatatgatcttcctggttttggggagagtgatcctcatcccaacagaaatctcaactcatcagctatggatgtgctgcatctagtca

SEQ ID NO: 43619 - DNA, 272 bp, Glycine max
  Clone ID: 701042271H1
cacacgtacatctatcactccccccaaacccacaccgttttattctctcaaatgggtcttgatcaggatgccaatagctcaggccttcacctcgttctagggctttctttgactgctagtgttaaggaaaccgctccgtccaccaagcccgatgatcatcatctttgtgttatcaagccaactccaacgaaaccttatccttccaaagaaccgtctttgacgttggggctgtccggtaagggttaccacgtgcccagaaataacgttgccat

SEQ ID NO: 43620 - DNA, 269 bp, Glycine max
  Clone ID: 701042276H1
ctaacactcattaattgcaagaatggcacttcgttgcttggtgatgtccctttctgttctcttcactcttggtcttgcgagagaaagccatgccagagacgaagatttttggcatgctgtttggccaaacactcccattccaagttcattgcgagatcttctaaagcctggccctgcaagtgttgaaatcgatgatcaccctatgcaaattgaagaaacacagtacccgaaaaccttcttctataaagaagaccttcatccaggcaaaa

SEQ ID NO: 43621 - DNA, 275 bp, Glycine max
  Clone ID: 701042281H1
gatgaatcaagtctcaggatccacggtaaagaggtggccagcaagttgaatcgccgtgattcagatcccttgtatgaccgtgaatgggaggatgagaagagacaaagagctgatcagaagcgaaggcaccgaaagtaacaaaccaaaaggggatttcaccagtaaacttttttgaaggttgttcattttatgcacgtgctataatgccaactttttgcgtgagttgaggtggtgggttcacaacacttttaaccgtcagccccctcatttttctg

SEQ ID NO: 43622 - DNA, 271 bp, Glycine max
  Clone ID: 701042285H1
gttcgtttttggggactcgtatgttgataccgggaactatagaataaatcaagctggttcgtcgtggaaaaacccttatggcgaaacttttcccggaaaaccagccggaagattctccgatggaagagttctaaccgactacattgctaagtatttgggactcaaatcaccagttccctataaatttaggaaagtgatgcagcaacatttgaaatacgggatgaattttgcatttggtggtacgggagtgtttgacacatcctccaaaaat

SEQ ID NO: 43623 - DNA, 275 bp, Glycine max
  Clone ID: 701042295H1
agtgatttcagtgagtgatcggtgttcacttgatctcatcataatcgtcagcgtcaattgaagaagatgccgatcagaaacatcgccgtcggaaggcctgaagaggcgactcaccccgacacgttgaaggcggctttggctgagttcatctcaaccttcatcttcgtgttcgccggctcaggctccggcatcgcctacaacaagctcaccgacaacggcgctgccacccctgccggcctcatctccgcctccatcgcccatgcattcgccctctt

SEQ ID NO: 43624 - DNA, 78 bp, Glycine max
  unsure (1)..(78): unsure at all n locations
  Clone ID: 701042332H1
gnggaacttaanttgntntggtgcaatgnnggatttggacgaacgaagacaanagcacggcaatggagnaanaagttc

SEQ ID NO: 43625 - DNA, 255 bp, Glycine max
  Clone ID: 701042333H1
cgactcggttcggttgatgtttggactatttttcttctctctctgtctctctgaggactctttgtgtttcgactctattttctccaaacacaacaacaacaccagaggcagaggcagagagaaacagagagagaaaggagtaacaaatagttgattatttcaaagacaatgaacaataaagatggaaaacccgtcatccaaccagacaagagcaggattgtccctatggcaatcatatttgtggtgctatgtgga

SEQ ID NO: 43626 - DNA, 248 bp, Glycine max
  Clone ID: 701042340H1
gctaggttgaaaatagtttggttttgtagtaagtgaggtgaggtgccaaaatggtgaagataactcttggtactttcgatgactcttttggtgttgcctctcttaaggcttatttggcagagttccatgcaactctgattttcgtgttcgctggtgttggttcagccatcgcttacaacgagcttacaaaagatgcagccttggatccaacggggctggtggcagtagctgtggcccatgcatttgca

SEQ ID NO: 43627 - DNA, 248 bp, Glycine max
  Clone ID: 701042344H1
tgcgttacgatactatgcaggtgcggctgataaaattcatggtgaagtattaaaaatgaatggggattttcatgcatatacacttttggaaccaattggtgttgtgggacacataattccatggaatgcccccagcctctcgtttttcatcaaggttagcccttccttagctgcaggctgcaccatggtcctcaaacctgctgaacaaacacccctctctgccttgttttatgctcatctagctaagt

SEQ ID NO: 43628 - DNA, 248 bp, Glycine max
  Clone ID: 701042353H1
gttgccccaaagacactattaagtttggtgtgtgtgctgatgtgttaggtttgatcaacgtgcaacttgggaagccaccaaagaccccatgctgcaacctcattgagggtctcgctgatcttgaagctgcagtgtgcctctgcactgctctcaaagctaatgtgttgggcatcaacctcaatgttccagtgaacttgagcttgctactcaactactgtggaaagggtgttcccaagggtttcgtctgc

SEQ ID NO: 43629 - DNA, 248 bp, Glycine max
  Clone ID: 701042357H1
gaaaagggtcttctccaagtgggaccaagtgaaagacccagaaccagaaccagaatcagaatcagaatcaaaatcaacggttaattcttcttcaaagccaccaactttatcatcctttgttcttgcatgtgcatattctgttgtgtgtattgcaaaagcggttcacggggttgaaaaggagaagcaaaagtttggtttctggttcccggtggattatagggctaggttagagcctccaatccctgata

SEQ ID NO: 43630 - DNA, 247 bp, Glycine max
  Clone ID: 701042370H1
gtcgcctggtactacttctacttctcccgcgacgtccccctcgtcgttttcaaccaaaccctcgacgacagaaccgtgctctgcgttttgggattgctcactgtcgtttcgctcgtctccactcacgtcggcctcaacgtcctgctctcgttaatcgtctcggtggttctcgttggcttgcacgctgcgtttagggttaccgaggatttgtttcttgacgaggaaagttcgttgctttccgttgtgg

SEQ ID NO: 43631 - DNA, 247 bp, Glycine max
  Clone ID: 701042385H1
agattatcctaagtctttgggaatagtgctgcaatggcttcaagtcaggaggaggtgacccttttgggagctactggaagcccatttgtgtgcagggttcatattgccctcaagttgaagggagttgaatacaaatatgtcgaagaaaatttgaggaacaagagtgaactgcttctcaaatccaacccagttcacaagaaggttccagtgtttattcacaatgagaagcccatagcagagtctcttg

SEQ ID NO: 43632 - DNA, 246 bp, Glycine max
  Clone ID: 701042392H1
aaatggtgctgccaatggtagttctctaaaatcaaacaaccaactatgcagtcctcctgcttctagtgcaagttctgttatgaggcagttttcagctcccccttcatctgggccttcaaatgttagattagtacagtcacctaagataatgccaggttatccggagcactgaagaagaatgaatctaagtggttggggaaattccggttccttgtgccaacacctaacctagcacggataaaatta

SEQ ID NO: 43633 - DNA, 75 bp, Glycine max
  unsure (1)..(75): unsure at all n locations
  Clone ID: 701042508H1
ctnnacacggagggatcggaggtctcaaggntaannncagggagtngagggattacatacgancattncaacata

SEQ ID NO: 43634 - DNA, 269 bp, Glycine max
  Clone ID: 701042519H1
actcaaactcgggatcacagaaaccaacaacagttcttgcactgaggtttcacgatgttgctggaacttgcacttggtttgtttgtgttagctttgtttctgcacttgcgtcccacaccaagtgcaaaatcaaaagcacttcgccacctcccaaaccctccaagcccaaagcctcgtcttcccttcattggccaccttcacctcttaaaagataaacttctccactatgcactcatcgatctctccaaaaagcatggccccttattctc

SEQ ID NO: 43635 - DNA, 267 bp, Glycine max
  Clone ID: 701042522H1
ggccgaagtgcagagaaaccaagaactgtggaagatgtaatagatagagctaaaccatggcaactatctgaaattctggatcctgtccaatgtcggtcagttaccatgcctgagagcacagattcttccagcaaggttgtcagacttttatatacaaactctgctgttggtattttggcccttggttcaaatggtatccagaagctttggaaatgggctcgcagtgaacagaatcctactgggaaggctactgccaatgttgttcca

SEQ ID NO: 43636 - DNA, 270 bp, Glycine max
  Clone ID: 701042526H1
ctacactatacttgtcaaccctttgagagttagaatggctgctgctattgaaatccccacaatagtgtttccaaactcctctgcccaacagaggatgccagtggttggaatgggatctgcccctgacttcacatgcaacaaagacacaaaggaggctatcattgaggccgtgaaacagggttacagacacttcgacactgctgctgcttatggctctgaacaggctctcggtgaagctctcaaggaagctatccatcttggcctcgtctc

SEQ ID NO: 43637 - DNA, 269 bp, Glycine max
  Clone ID: 701042534H1
cggggttcttccctccaagcctaacggctttacgatacaccttcattcccgaatcgccaatttccacatttgcccctccccataaacggtgccgtttcgtgtaccagaagagaatcttgtacttcaccgcagtagcatagtccacacggtaccacattctcccagccaccgccgcggtgaggtttccgccgccgccgctgaagtttccgtgcttggtggccttcttctggtggccctggtagaacctttgcacggtggcgttgccgagt

SEQ ID NO: 43638 - DNA, 265 bp, Glycine max
  Clone ID: 701042539H1
atccctccatcaaaagtggcatatgtagctaaagaactatatgatatgggttgctttgaaatctcacttggggacacaattggagttggtactcccggtaatgaattagctagatgtctttctttttgaaaactttatgctacacacagaacataataatatcagcctcatggcagcattcccttgtttggcatttgtcttcaaacactttttactaaacatcagcctattactcacctttcctgtgctttgtgttgatcgtgat

SEQ ID NO: 43639 - DNA, 264 bp, Glycine max
  Clone ID: 701042571H1
caagtgttagggaggacaaataccgcccctttatgcgcgaagacagtgagaagaacatcaaatggagatatggtgctcctccaaattatgacgttgtcaacaaattatttgatgaaggcagaaccaaggtatggcctccgggttcacttgaagaaaaggtgcagactttagtgaagaattgggagatggaaatgttccacaaggaggatttcaaggataacagatcagtggacccagagaaatacactttcagcctaaacggaa

SEQ ID NO: 43640 - DNA, 266 bp, Glycine max
  Clone ID: 701042573H1
tgctaatagatccattttggtcattgaagacattgattgcagtgtggatctgccagagcgtcgccatggtgatcatggacgtaaacaaactgacgtacagttgaccttgtctggattactgaacttcatagacgggttatggtctagttgtggagacgagagaatcatcatattcaccaccaaccacaaggagaggctagacccagcactgttgaggccaggaagaatggacatgcacattcacatgtcctattgctcctaccaag

SEQ ID NO: 43641 - DNA, 266 bp, Glycine max
  Clone ID: 701042575H1
cagaaaggaaggaagtgcaaaacagaggaagcgaattaaaaaatcttatgatgcaaaggaccaacttttggagggtggtgaggatgatgatattgttcaatccaagtatgattcagatgaagatcagggtgatcaagaagcaaatccattaatggtgccacttaatgatggggcagagctcacccaagaggaggtcatgaataagtggtttagtcaggatgtctttgctgaagctgcagaggaaggagactttgagaaggatgaga

SEQ ID NO: 43642 - DNA, 269 bp, Glycine max
  Clone ID: 701042578H1
gaagcctaccctactattatccctttccttcctgcctctctttgctttcctggctctttcagaagatgttgaacaagttgtggacataagtggcaaccccattttcccaggtggcacatattacattatgccatcaacttggggcgctgccggtggtggattgaaactaggccggacaggaaactcaaactgcccagttactgttttgcaagattactcagaaatcttccgtggcacaccagtcaaattcagcatacctgggataagcc

SEQ ID NO: 43643 - DNA, 264 bp, Glycine max
  Clone ID: 701042584H1
gtcggcgattatgttgacgtcaaggttaacggtgccgttcacaagggaatgccccacaagttctaccatggccgcaccggacgcgtctggaatgtcaccaaacgtgctgttggcgtcgaagtcaacaagcaggttggcaacagaattataaggaagaggattcatgtgcgggtagagcatgttatgccttcaaggtgcactgaggagttccgcctcaggaagattaagaatgatcagctaaaggccgaagccaaggtcaagggt

SEQ ID NO: 43644 - DNA, 270 bp, Glycine max
  Clone ID: 701042607H1
attgatgaagagggataatgatgtctcttggaaatgggtcatttgctttttacaaatttttttcaggggagaaaaagggtaatctgtaaattgattttcccattgctgaagatgtacagactacagagttcatgtcaagctgattctgtcaaacctgctatttaatgcagttgacagattcagttgttctgaatttcatgctgtcacattgtataaattttacaaatatttgtcacatttggtgaaaacccaatgtgaacatttcttcag

SEQ ID NO: 43645 - DNA, 269 bp, Glycine max
  Clone ID: 701042609H1
gggcacagtccacgtttcttgggtgcagccaagagttctgggtattcaacagatcaaatccttacgggatcgactagacagttggaccggaaaagttcacactgcattgttgtccattgaggcagaaacacctgatctaattggatcgtgatctttctttaattttttttctgccctatgtaacaatttctcaagtcaaagggaacacatcctaaggcttcaaaagatgaagagaaattccaagtgacatgggcaatgtagccaacttg

SEQ ID NO: 43646 - DNA, 268 bp, Glycine max
  Clone ID: 701042610H1
cacctagcgtttaaccctagagttttggtttggcctttcttctcttctcttcttatttcccacaaaatcatttcacaaagagaagagacagtggatcgcggtttcatttcagaccaaagatggtgcagtggcagagacacgttttcccctttcttcgccacattcacaagcgagcagtggaaccccacgccacccattctgctccaagccttgtaatttctcgcttagcctcttctctttcacaaggtcagttaggaaggagaacatg

SEQ ID NO: 43647 - DNA, 267 bp, Glycine max
  Clone ID: 701042622H1
gcgccgtgagatcgtgaggaggagaaagaacggagaggttgttgagggtgaggtcagcggggttttccttgacactttgcttgaattcgctgaggatgagaccatggagatcaaaatcaccaaggaccacatcaagggtcttgttgtcgactttttctcggcaggaacagactccacagcggtggcaacagagtgggcattggcagaactcatcaacaatcctaaggtgttggaaaaggctcgtgaggaggtctacatgttgtggga

SEQ ID NO: 43648 - DNA, 272 bp, Glycine max
  Clone ID: 701042631H1
gaagtgccaaattaagagagaaacagagagatagaaggaaaagcatcaaagatgaaacccaacttttcatttttgtttaagcttttgatactgcaatatctagcagttctatccatttctcaggaatttgatttcttctactttgttcagcagtggccaggagcatactgtgacacaaagcagagctgctgttatcccaagactgggaaaccttcagcagatttcagcattcatggactttggcctaactacaatgatggatcatggccctc

SEQ ID NO: 43649 - DNA, 264 bp, Glycine max
  Clone ID: 701042650H1
ttcagatctatatttgcctcagaaaagagttggacaatcattgtacagtcagcaccaagagatgtgtggcattcttcagctttctgatgaagtcttggctcacaacattttgtcacgcttgacaccgagggatgttgcatccattgggtctgtatgcaggaggatccgtcaattaacaaagaacgagcatgtcaggaagatggtatgtcaaaatgcgtggggcaaagaagtgacgggcacattggaactgatgaccaagaagtt

SEQ ID NO: 43650 - DNA, 263 bp, Glycine max
  Clone ID: 701042655H1
ctttagtgatttgagcataactagcagcggacctggttttggaagtggctctggttttggattgagttctgatgttggttccttttctaccaagtctaaaggtggtccaacttcatctgccactgctccaccaaaaggtcttggaatgaagcttggtaaatctcaaaggacaaatcagtttttggaatcattgaaagcagaaggtgaggtcattcttgaacatgttcaaccaaaacttgctcaggcagctgccccaccatcta

SEQ ID NO: 43651 - DNA, 259 bp, Glycine max
  Clone ID: 701042658H1
tcgcaagcaaaaagaaagaatcccaggcgaggagaaagatggaggggaaggagcaggatgtgtcgttgggagcgaacaagttccccgagagacagccaattgggacggcggcgcagagccaagacgacggcaaggactaccaggagccggcgccggcgccgctggttgacccgacggagtttacgtcatggtcgttttacagagcagggatagcagagtttgtggccacttttctgtttctctacatcatgtcttaacc

SEQ ID NO: 43652 - DNA, 260 bp, Glycine max
  Clone ID: 701042660H1
gtatgctttagtttctagcatcgatcactcctaattacttgctgcatttctctactccttgtgcttgacacttttgtcatttaaaatggaacttaattttaagtaccaacttagccttttctgtgtcacactgctcttacctgccctgtgtacctctcaagactcttttacgtgctccagagcaacctattatggtagcccagattgttatggaaatccaaggggagcttgtggctttggagaatatggaaaaacggtaa

SEQ ID NO: 43653 - DNA, 263 bp, Glycine max
  Clone ID: 701042661H1
attctggggtagtccttttgtcctcagggtcaagtgggttcttgaactaaaagggattcagtaccaatatgtggaagatctcggcaacaagagtgccatgctcctacagtataaccctgtccacaagaagctaccggctctcgtgcatgacggtaagcccctggcagaatcactagtgattcttgagtatattgatgagacctggaagcaagatccctcccttcttccacatgatccctatgaaaaggccaatgcgattctgg

SEQ ID NO: 43654 - DNA, 262 bp, Glycine max
  Clone ID: 701042670H1
cttcgcatcaataatgggttcaggtgattggtttaagacaataattagcttaagaaaatcaaaagaaggcagatcaaagaaagcaaagggtatcttaactcaagagaaactaaatgcatcaaagtcaaacaattatccaggaaaagaatccagtggtttaacaaatggtattaaaagtgaaaaccttgtgtcggctggggtgtcagttgaaactaatgctgcaacaaggatccagactgcattccgagcttataaggctaga

SEQ ID NO: 43655 - DNA, 252 bp, Glycine max
  Clone ID: 701042715H1
ttttggcacgaatcagacagaagcaaacacattgagagttgttggaacatatggctatatgtcccctgaatatgctatggatgggaacttctcagtgaaatctgatgtttttagctttggagttctagtgctggaaattataactgggaaaaaaaatagaggattctattactcaaatgaagatatgaatcttctagggaatgcatggaggcagtggagagatggcagtacattggaactcattgattcatc

SEQ ID NO: 43656 - DNA, 256 bp, Glycine max
  Clone ID: 701042719H1
ctgacgacagactgaagttgtttttctggggcaactaaggcatccacatctcgtgaagctgataggatactgctgtgaagaagaacacagggttttagtatatgaatatttaccaagaggaagcttggagaatcaattatttagaagattctcggcatcactttcatggtcaacgagaatgaaaattgctgttggagctgcgaagggtttagcatttcttcatgaagctgagaagccagtcatctatagagatttc

SEQ ID NO: 43657 - DNA, 256 bp, Glycine max
  Clone ID: 701042725H1
ctcaaatctcttcgttccttcgattcgttccatttcttccaaaatggccaaagacccagttcgcgttctcgtcactggagctgcagggcaaattgggtatgctcttgtccctatgattgctaggggagtgatgttgggtcctgaccagcccgtgatcctccacatgcttgacattcctccggcagcagagtcattgaatggggttaaaatggaattggtggatgctgcattccctcttcttaaaggtgttgttgcc

SEQ ID NO: 43658 - DNA, 254 bp, Glycine max
  Clone ID: 701042735H1
gtatcttgagtctgaagcagaagagttgaggaaatctaatttaagattgcagatagaaaattctgacttagctcgaagattggattctacccagatccttgcaaatgcatttctggaagacccagaggcaggtgctgtgaagcaagaaagtgagtgtcttaaacaagaaaatgtgcgcttgatgaaggaaattgagcaatttcagtctgatcgatgttcagatcttgaagaattggtatatctgcggtggataa

SEQ ID NO: 43659 - DNA, 254 bp, Glycine max
  Clone ID: 701042736H1
ctctttgcaacacaacaaaaaaagacaacacagagagaagcgtcttaataaacgctcttctctgaaaaacctgatttcttctcttcttctcttctctttcgtttcgatcttcgatctctgaaaatgagagagtgcatttcaatccacatcggtcaggccggtattcaggtcggaaacgcctgctgggagctctactgcctcgaacacggcattcagcctgatgggcagatgccaagtgataagacggttggtgg

SEQ ID NO: 43660 - DNA, 255 bp, Glycine max
  Clone ID: 701042738H1
gccattttattttgccctacctcctcgattctagggtttcaacaatggcgctgttccttctctacgaatccgcttcgggctacagcctgttcgaggttcacggcgtcgatgaaatcggccagaacaccgaagcggttcggaactccgtttcggacctcaacaggttcggcaaagtcgttaagcttcgctccttcaaccctttcacttccgctctcgatgctctcaaacagtgcaacgccgtctccgaaggcatat

SEQ ID NO: 43661 - DNA, 251 bp, Glycine max
  Clone ID: 701042743H1
cgcagtgcttttattcgcaccgcaaacagtgagccatggccgtcggaaagaacaagcgcatctccaaggggaagaagggtggcaagaagaaggcagctgatccctttgccaagaaggattggtatgacattaaggctccttctgtttttcaagtgaaaaatgttggcaaaaccctcgtctctcgtactcagggtaccaagattgcttctgaaggactcaagcatagagtgtttgaggtctccttggctgat

SEQ ID NO: 43662 - DNA, 250 bp, Glycine max
  Clone ID: 701042745H1
tctcacttctcttggggttgtgagaaaagtgctcgggactcttacaacagatattgttcaaccaaggagtggaaattggcacttagcaaaaagaggtggaagactcatatcgtttaagggtcgtgcgaggctggtacatacaacgtgccgaatctctgtccctgggaccttaccaagaactgatgaaaaggcctcatctaacatctcgagggataagaagacagttccagaagcagatcctccgagtatc

SEQ ID NO: 43663 - DNA, 247 bp, Glycine max
  Clone ID: 701042747H1
acagttgcaacctctattaccccattcaattggtggtatctccaggcaaattctctttcttcctggaacgatactaatagcacatggaacagccaaccaaaccctaattcttcctcttcttgtgaggaggatatatctgtttctacatctttcactaatgcttccaaccattcaagcctcactgttgagtcctcacgcagactcattgagccacctgctccttcctccaacgagttgatgggagaac

SEQ ID NO: 43664 - DNA, 248 bp, Glycine max
  Clone ID: 701042748H1
gaaacatttcactaatagagagacataagcataatattgagaaataatggagggttgtacttattgtgtgaagttgctatgccttgttgggtttgtggtgcttgtgagtactattgcaggggtggagagtgctggtgaatgtgggaaatctaccaccccagataatgaggcttataagcttgcaccatgtgcctcagcagcacaagatgagaatgctagtgtttctcagagttgctgtgctcaggtga

SEQ ID NO: 43665 - DNA, 251 bp, Glycine max
  Clone ID: 701042751H1
gcaagaatggcacttcgttgcttggtgatgtccctttctgttctcttcactcttggtcttgcgagagaaagccatgccagagacgaagatttttggcatgctgtttggccaaacactcccattccaagttcattgcgagatcttctaaagcctggccctgcaagtgttgaaatcgatgatcaccctatgcaaattgaagaaacacagtacccgaaaaccttcttctataaagaagaccttcatccaggcaa

SEQ ID NO: 43666 - DNA, 252 bp, Glycine max
  Clone ID: 701042753H1
aaacgctgccttagcaatacccgaaaagagaagagggtgtgggaaaggaggaggaagaagagcgagatggcgtcagtggtgaagaacgtactcaaatcggtcagagaaaagggtttcggcgctttcctcagggagctcaaggatgaaggctacctgagatgccttccggatggaaatctcttgcaaaccaagatccacaatattggggcaacacttgttggtgttgataaatttggtaacaagtattatgag

SEQ ID NO: 43667 - DNA, 251 bp, Glycine max
  Clone ID: 701042754H1
gcctctttcaagaagcatctgagtgtttattattcgtaatatatagtcactcaagcttctaggatttctgccagctacatgaaaatgggaagcaacttgaggtttttgagtctttgcctcttggcattgattgcatcaactcatgcccaacttcagcttggtttttatgcccagagctgcccaaaagctgagaaaatcattttgaaatttgttcatgagcatatccacaatgctccatcactagcagctgc

SEQ ID NO: 43668 - DNA, 251 bp, Glycine max
  Clone ID: 701042756H1
ttgggcttgtctagagttgctggtgctcctggttactatgctcctgccccgcaacctatgatgccttatggaatgccacaatttggaggcattgggcaacctggaggctattaccctgcaccttattattgaattgaagtgagggaggaacttgttttgagccaaactgtgttttttcatggtcttcaagctctccggaagatcggactctatttttctgtctttgcgtttgggatataaatgttcaaaat

SEQ ID NO: 43669 - DNA, 248 bp, Glycine max
  Clone ID: 701042759H1
gcagagaggaaagactttaccgagtccttacgcgttgtttgtgtttgcgtcggaaggaagagaagatgagtgagaatttgatggagaaagtgagcgcactgggagagcgcctgaaaatcggaggcgtggaagtggggagaaagatgagcgaggggatgagctccatgagtttcaagctcaaggagttcttccagcctgggcccaatcaggccgacaagcttgtggaggacgctacttccgaggccctg

SEQ ID NO: 43670 - DNA, 246 bp, Glycine max
  Clone ID: 701042761H1
caaacttcaacttgtaatcaagggagagagaaaatttcaagcacaaaaaatggcggagaagaaagtggtgatcctaggaggtggtgttgccggtgccaaccttgcaaaaactatacaacatcaagccaacgtcacccttattgatccgaaggaatattttgagattccatgggcaagtttgaggggattggttgagccaacttttgctgaaaggatagtaatcaaccatagagagtacttcaaaaa

SEQ ID NO: 43671 - DNA, 247 bp, Glycine max
  Clone ID: 701042764H1
attcattcaagattcagcaagtgcgttttggaagcagagaccgaaatacttcgagatggcccgtacaaagcaaactgctcgtaagtcaactggaggaaaagctcccaggaagcagcttgcaaccaaggctgcacgtaagtctgcaccaacaactggtggtgtgaagaagcctcatcgttatcgccctggaactgttgctcttcgtgagattaggaaataccagaagagcactgagctcctaatcagg

SEQ ID NO: 43672 - DNA, 245 bp, Glycine max
  Clone ID: 701042775H1
caagcaacttaattccagaggctcctcctcctagcaaagctgatgaagacagtaagattaaagcctttcttgatactccagccttggactggcaacgtcaaggttcagactttggcactggtagaggctttggaaggggtacagggggacggatgggtggtggacgtggttttgggatggagcggaaaacacccccacaaggctatgtatgtcacagatgcaaggtgcctggacattttattcag

SEQ ID NO: 43673 - DNA, 248 bp, Glycine max
  Clone ID: 701042782H1
ccgacgaagccaaagccaaaggcaacgcagccttctcctccggggactatcctgccgccatccaccacttctccgatgccatcgccctggctccctccaaccatgtcctctattccaaccgatccgccgcatacgcctccctcaaaaactacgcagatgcattagcggatgccaaaaagacagttgaactcaagcccgactggtccaagggttacagccgtctcggtgccgcgcatcttggcctttcc

SEQ ID NO: 43674 - DNA, 247 bp, Glycine max
  Clone ID: 701042787H1
atcgtaagcagcggctaccctaatcctctcctcttcctctctactaatttcagctatggccgacgaagctgtggttgttccagatcccacccagatcgatgtcaagctctttaaccgctggagcttcgacgatattgagattactgacatttctctggctgattatatcggagtggcgacatccaagcacgccacgtatgtgcctcacaccgccggcaggtactcggtgaagcggttcaggaaggcg

SEQ ID NO: 43675 - DNA, 242 bp, Glycine max
  Clone ID: 701042793H1
atcgcttaggtacagatacagatacagacacaacctggaaaaaattccgaccccagcccttcactcttctctctgcagcggaggagttgttataaagctattcatccctgctcaatattctacaccccaagacagagaaggacaatagagatcaactaactatcccaacttgccaatataaactgtgaagagtttctataaatgcaggacttctagcatactgttgtttgattaaccaagtt

SEQ ID NO: 43676 - DNA, 241 bp, Glycine max
  Clone ID: 701042795H1
accctccccacaatggtttcccgggaaaacaccaattggctcttcgattacggcttgatcgacgatattcccgttccggacgccaccttcggcgtcaattcctccgccttcacatggccccctaacgccttgaacgcttcctccaatgtcggcgttgaaattgatggctcgttgggggattctgacagtctcaaagagtctggctcaaagaaaagggttaggtctgagtcatgtgctgctt

SEQ ID NO: 43677 - DNA, 201 bp, Glycine max
  Clone ID: 701042914H1
gaaaaaccaagtaatactagccaaaatatgtctcccaaatacatgtcccttttcctcctagtaatactagggatggcttttctggccactacttcccttgctgatcgtcgttttctttcggtggaagatggtcatgatcaccatcaccaccacccaccaaaaaaacactggcctccaaccacacaaaatgaaccttcaaac

SEQ ID NO: 43678 - DNA, 199 bp, Glycine max
  Clone ID: 701042919H1
aagagaacgggttttgaagaagaagcagttcaattgatcaactcagatttcagggacctaagtctagctgctaatagactcgcccatcatgccatcaaacttggtggcattggctttggagcctcttttttcggattgtttgctgccattgctgctatttatctgttgattttggatcgtacaaactggaaaacaaata

SEQ ID NO: 43679 - DNA, 196 bp, Glycine max
  Clone ID: 701042935H1
tgcttacaatccttgtttcctttggagtgttcttctacttgcaggattcttacacagcacagttatttcctctcataaagttaccgcgggataagtgcagccttcttccccatcgccacttctggatatccagcaaacgtattgtgaccccacaagggatcatttctggttcagtggagataaatgatgggaaaat

SEQ ID NO: 43680 - DNA, 197 bp, Glycine max
  Clone ID: 701042938H1
ctctcttctcttcattctccctcttaattcttttctcttttctttctttcacacaaactcctcttattatgatgggtcttgatcaagatgctagcagcaactctggccttcatcttattctagggttagctttgactgccaccaccaccactactccatcactaccatccatttccaacaagcttgatcatgttgat

SEQ ID NO: 43681 - DNA, 198 bp, Glycine max
  Clone ID: 701042939H1
cacaaactagtaatattattcttcgaatccattttattattcataatgggtattttcacatttgaggatgaaaccacctcccctgtggctcctgctaccctttacaaagctctagttacagatgccgacaacgtcatcccaaaggctgtcgaagccttcaggagtgttgaaaaccttgaggggaacggtggccctgga

SEQ ID NO: 43682 - DNA, 196 bp, Glycine max
  Clone ID: 701042941H1
caattaaacagttgagaaagaacctggtcgttaaggcaaaaccagtaccaagcttctattatgaggggccaccccccaagactgaactcaagaaggtactcttttttctatttcatctgccttttccaagtctcaggatgcatatgaattgcaattaagaatcttagagtatgcacgaatagatcgatggagtaat

SEQ ID NO: 43683 - DNA, 197 bp, Glycine max
  Clone ID: 701042944H1
gagtgcggtaggctcatccgagaccggaagcagcaatggggatcgatctcaaggccggaggtaaaagcaaaaaaaccaaaagaacagcacccaagtccaatgatatctatcttaagctcttggtcaagctttatcgcttccttgttcggagaactggcagcaaattcaatgccgttatactcaagagattgttcatg

SEQ ID NO: 43684 - DNA, 193 bp, Glycine max
  Clone ID: 701042963H1
ctcattaattgcaagaatggcacttcgttgcttggtgatgtccctttctgttctcttcactcttggtcttgcgagagaaagccatgccagagacgaagatttttggcatgctgtttggccaaacactcccattccaagttcattgcgagatcttctaaagcctggccctgcaagtgttgaaatcgatgatcac

SEQ ID NO: 43685 - DNA, 193 bp, Glycine max
  Clone ID: 701042969H1
caaaaacattcttctataaagaagaccttcatccaggcaaaacaatgaaagtacaattcaccaagcgtccctatgcacaaccttatggtgtatatacatggttaacggatattaaagacacctctaaagaaggatatagttttgaagagatatgcatcaagaaagaagcgtttgagggagaagagaagttttg

SEQ ID NO: 43686 - DNA, 193 bp, Glycine max
  Clone ID: 701042970H1
ctctcgccttgctcctggtactcctccaagatccaagaggggatattgatatggagctgaatgtttgttagctatatgatattctggtgcaaatttcaaacatcttacaacacactgcaagttatagatttgtagatcataataccagttgtcttatggtggtgatctttcttcagagcatagttgctaaaaa

SEQ ID NO: 43687 - DNA, 194 bp, Glycine max
  Clone ID: 701042972H1
tcatcaaccatggcagggagattgacgaacgcagcatcgaggatcttaggcggaaacggcgtcgtttaccgatccgtagcttcctctcttcgcctccgctccggcatgggcctccccgtcggcaaacactatgttcccgacaaaccccttcccatgaatgaggaactcctgtgggacaacggcactgcatttcc

SEQ ID NO: 43688 - DNA, 193 bp, Glycine max
  Clone ID: 701043002H1
gctttttgattctgaaatctgagctttgtagttttcctatgatccagtctctttagttagctcctgctccttttctgccagaagtttcaaggaaaaacaaagaaatgagacttggatttgcttcttggagattcatcccatgcaccctggttgcctttttgattctacaagacagtggagctagaaagatagc

SEQ ID NO: 43689 - DNA, 190 bp, Glycine max
  Clone ID: 701043007H1
gttcgtcaccatgacttttaagcgcaggaatggaggtcgcaacaaacacggccgtggccacgtcaagttcattcgatgctccaactgcggcaaatgctgtcctaaggacaaggctatcaagaggtttctggtgaggaacattgttgaacaggctgcagtcagagatgttcaggaggcttgtgtctatgaa

SEQ ID NO: 43690 - DNA, 190 bp, Glycine max
  Clone ID: 701043009H1
gcacagcagaactctgcttcttcggattccgatcgcacgcgccgtcaccatggtgaacgttccgaaaacaaagaagacatactgcaagagtaaggagtgcaggaagcacacgctgcacaaggttacccaatacaagaagggtaaggatagcattgctgcccaaggaaaacgccgttatgatcgcaaacaa

SEQ ID NO: 43691 - DNA, 187 bp, Glycine max
  Clone ID: 701043010H1
gctcgtttggtctatctgtgtgtgtctgtttgctcatgcatacactttcatatgtaaacaaggttgtgcatgaaataaaatctgctgtcaaataggattcgtttgagcagaggccagtacttaatacctagctcagcttggatcaagttaaaatgtattgagtttcttttgtaagttaaaatcaatt

SEQ ID NO: 43692 - DNA, 190 bp, Glycine max
  Clone ID: 701043014H1
ctgcgttctcaaacgttgttgcttgctgctgctgcatagttgatcgaaagcatgacaacatcattgtccagcatccttttcaagggaattgcagctcgttctttcaccgcccctctaactaggtcctgttatcatggaatgagatactttgctactgtatcaaatgatcctgacacacatgatgacttca

SEQ ID NO: 43693 - DNA, 191 bp, Glycine max
  Clone ID: 701043015H1
tcgtcattttcctctggaagcataataagtatatatataaagttgttgccacttgcaatactcatcaatcaaaatccaaacccaaagctttcttttttctccatcaaattctctgacctcaccatggggatgcagcttgttttcattggcaccatagccttgtgtttggttgtttcctcggctatgcttga

SEQ ID NO: 43694 - DNA, 189 bp, Glycine max
  Clone ID: 701043018H1
aaaagattgatgactgatgtgccttttggtgttctactctctggaggtttggactcttcattggttgcatccgtcacttctcgctacttggccaacacaaaggctgctgagcagtggggatcaaagttacattcattctgtgtaggccttgagggctcaccagatttgaaggctgcaaaagaagttgct

SEQ ID NO: 43695 - DNA, 189 bp, Glycine max
  Clone ID: 701043019H1
cgattgctagaatggaatttcgatgctcagtcatctcttttaccattctcttctctcttgctcttgcaggagagagccatgtccatgcatcgctacctgaggaagattattgggaagctgtttggccaaacactcccattcccactgcactgcgagagcttctaaagcctctccctgcaggtgttgaaa

SEQ ID NO: 43696 - DNA, 186 bp, Glycine max
  Clone ID: 701043027H1
agctactgagaattctgcttatcttgatatgcttcggttgtttgcacatggaacatggagtgattacaagagtaatgctgaccgtcttccacaattgatatctgatcagatcctcaagcttaagcaacttacagttcttacactggctgagacatacaaggtactaccctatgaccaactgaagca

SEQ ID NO: 43697 - DNA, 188 bp, Glycine max
  Clone ID: 701043030H1
tttgagacaaaatcaacagtttgggcagatacactaagcaggggattggttaatttgaatatatctggacctaaaacaaatccattagcagatattggggttgactttgaagccattaataggagggaaaagagaatggagaagcccactaccacggctgtaacatcaactgtaactatgggtaaagc

SEQ ID NO: 43698 - DNA, 187 bp, Glycine max
  Clone ID: 701043036H1
gcaaaagaaaatcacattacctgtctctgaaatcagattcactttgttcttcatcaatggaaagagaacaactatcccttcacatgaatggtggcaagggacaaaggagttatgcaaacaactcctcactacaaagaacaataatacgtaaaaccagatccatacttgaagaaactataacgaggtt

SEQ ID NO: 43699 - DNA, 187 bp, Glycine max
  Clone ID: 701043047H1
gcaaattaagcaatttacaaaccctagttctcgtatatattcttcttctttgcatcaatcctttgtctcaaattaaaatcatgggaattgtcactactgaatgcgagcaagtttgtgccgtggctcctgcaaggctatacaaagccatggccttcgattttaacaatgttatgccaaaagctatccc

SEQ ID NO: 43700 - DNA, 184 bp, Glycine max
  Clone ID: 701043055H1
gatcaatcgccgccatcttcttcctcttcctcgtccctcgattccattaattctaacggtcccgccgttcaaacaagcgatatcgccgtgaaacctgcgtggaagaaaccggaggccaatggcgtcgccgaagttgggcctgtaatgggcgctcattcttggcccgatttatccgagtccacca

SEQ ID NO: 43701 - DNA, 187 bp, Glycine max
  Clone ID: 701043065H1
cgttgccattctcatcctcttctttctctctctaccattgccatggatccctacaagcaccggccatccagcgccttcaattctcccttctggactacaaattctggtgctcctatttggaacaacaactcctctttaaccgttggagctagaggtccaattctgctggaggattatcatcttgtgg

SEQ ID NO: 43702 - DNA, 184 bp, Glycine max
  Clone ID: 701043066H1
tcttccctcttcaatcttcacattttctctatggagaatcatggcaacaagcgagtctgggaccagtcctctgactccaacactcagcgggtcgactcgcccgagtctaagattcgtcgagttgactcgtccgattcgggtattaactcgtccgagtctcaactcgaatcggtcctcgactcgt

SEQ ID NO: 43703 - DNA, 181 bp, Glycine max
  Clone ID: 701043087H1
caggttggttgctccatatacacctcctcatgtaagtcaccatgcgagaaagtagtcttcacatccaattgaaacaaaggccaatgatgtgtagcagcaagagagataagaatacgaaaggaggaaagcttagcaacaagggaaaaagtatcagtataatcaactccataagtttgagcat

SEQ ID NO: 43704 - DNA, 179 bp, Glycine max
  Clone ID: 701043089H1
gatcgatcaagcatcagggagctttgagggttgattctctggtgtagtagcaatcagcacaatagaaaatgttttttgacggatatggatatcatgggacatcatttgagcagatatatcgatgctacccagcttcctttattgaaaagccccaaatcgaaagtggtgacaaaattatc

SEQ ID NO: 43705 - DNA, 183 bp, Glycine max
  Clone ID: 701043095H1
tttagcaccaaagaggccaaatatcccaacggaaatcgctctaacagagccacaaattcgggttattggaaggcaactggcttggacaaacaaattgttacttcaaaagggaaccaagttgtggggatgaagaagacacttgttttctacagaggcaagcctcctcatggatccagaactgat

SEQ ID NO: 43706 - DNA, 251 bp, Glycine max
  Clone ID: 701043101H1
caacatccaaggaaaaccagttgtcactgcaacccagatgttggagtcaatgatcaaatctcccaggccaaccagggccgaagctactgatgttgccaatgcagttctggatggcacagactgtgtgatgcttagtggtgaaaccgctgctggagcctatccagaccttgctgttcaaacaatggctaaaatatgcattgaagcagagagcacccttgactatggtgatgtgttcaaaaggattatggagc

SEQ ID NO: 43707 - DNA, 243 bp, Glycine max
  Clone ID: 701043106H1
caaaacctttcaaaatacacatgctgcaaattgctcacccaatcaccagccatgggagaggttgacgcagcattcatccaagacccaccacacaggccaaagctctccaccatccaagccgaaggaattcccataattgatctctctccaataaccaaccacagagtttcagacccttctgctattgaaggcttagtgaaggagataggtagtgcatgcaacgagtggggtttcttccaagta

SEQ ID NO: 43708 - DNA, 244 bp, Glycine max
  Clone ID: 701043109H1
gtcccggaaacaagtttttaggtttgggcagtttgagtgctcagtgaaggagaaaatggcgaaggagttgttgactcttgataatggcacaacctgcacatcatggaactattctggcaccaggctcgctgcgggttccgccgatggcactctttcaatcttcgattcccgcgagccgccttcttcttcctccctccgttctactttcaaatctagggttctagaaggaaacatcgtgaagatt

SEQ ID NO: 43709 - DNA, 246 bp, Glycine max
  Clone ID: 701043111H1
gaaaggcattaataccagaatcaaagacggtgccggctccggtggccgcattgaacgccaacgcctcaggaggaatatcgacaactttccgaccaaccctaattgcaaccaagttgacataatagagtgaagatcttctaggattcttgagaagaggggtatacttaatccttatgggctgggccacaggcccaagtcttagcgacccagagaagttaagtgatttgaagctgggcaagcagtagg

SEQ ID NO: 43710 - DNA, 247 bp, Glycine max
  Clone ID: 701043112H1
caacaacaagggcaacctagttgggtgttcgaagacgaggtggacgatgatttggtttcggagttcaaagatctaccaatgaagttccaacaaacactaatccccgacctggaacgaatctccacaacctcaaaagcctacataacaaaagccaacaaagagatcacgagagggttcaaaccctacgttggcaacaagtacgcacccaccatcaccactttactctcttgcgcattcgctttgatcc

SEQ ID NO: 43711 - DNA, 245 bp, Glycine max
  Clone ID: 701043113H1
cacttttaggggttaaagtaattgtatacataagcgtgggggaactgtccttggaacatcacgaggtggacatgacaccaaaaagatagttgacagtattcaagatcggggaatcaatcaggtttatataattggaggagatggaactcagaagggtgcatctgcaatttttgaggaagtcagaaggcgtggtctcaaagtttcagttgtaggtatccccaaaaccatagataatgatatcccgg

SEQ ID NO: 43712 - DNA, 241 bp, Glycine max
  Clone ID: 701043144H1
caggcttcgaaatagcaagtttatgggttggattagttgttggcgtcccttcttattaccttgctggaagcctcgttgaccttggcatggcatggtggcagggcatagcaactgtggtggcagcaaacatgatcctcttggttcctttggttctcactggccatgcaggaacacgttatggcatatcattcccagtacttgttagatcctcttttgggatcaatggtgctcatgttcctac

SEQ ID NO: 43713 - DNA, 240 bp, Glycine max
  Clone ID: 701043146H1
caaatagcaaccaaacatacaaagatgaaagaaacatgttgttgtgctagttttagttttggcaaggcaaagccttatttgttaacggtgggacttcaatttgggttcgccggtgcatacatcttctccgtcgctagtctcaaccatggaatgaatcgttacgtcttcgttgtctatcgcaatgccatcgctgcattggcccttgctccttttgcattgattttcgagaggaaaattagg

SEQ ID NO: 43714 - DNA, 241 bp, Glycine max
  Clone ID: 701043149H1
tcctaattgtttaaacctaattctcatttcttcatcgttcgattcttctcctcctaaagatgcagatcttcgtgaaaactttgaccggtaagaccatcacccttgaggtggagtcctccgacaccatcgataacgtgaaagctaagattcaagacaaggaagggatcccacctgaccagcagagacttatctttgcgggtaaacagcttgaggatggtcgaacccttgccgactacaacat

SEQ ID NO: 43715 - DNA, 239 bp, Glycine max
  Clone ID: 701043212H1
gttgttgctgcaccaccgaacaacttcccctgtaaatcgcgtttcgtttgtgcaaggttttaaaagatggctgatgctgaggacattcaacctcttgttgttgataatggaactggaatggtcaaggctggttttgcaggtgatgatgctcctagggccgtgttccccagcattattgggagaccacgccatactggtgtaatggttgggatgggtcagaaggatgcttacgtgggtga

SEQ ID NO: 43716 - DNA, 239 bp, Glycine max
  Clone ID: 701043213H1
gctggtgcttctttttctctgcagcctcttcgatcccgctggtgctcacttcgatcccgttggcgctctcttcgattcagtttagcaggttgtgctgaggcttaattgacccttgaagcatatttcggagttttatcagagaacaaatgggatatattggggctcatggtgttgcagctctgcacagatataaatatagtggagtagatcattcctacgtggccaaatatgtactacaa

SEQ ID NO: 43717 - DNA, 239 bp, Glycine max
  Clone ID: 701043227H1
ctttcactcacccaaaaccaagctagtccgaggaagtcctctattcagaaccagatatggagacaaaacccaccgagatcagcagcggcaagatgttcggaggctacaacaagaggttcagacatttcagccctaccctcggctgctccatgaacttccacatctacttccctccatctccttctccctctcacaaattcccagtcttgtactttctctctggcctcacatgcacggac

SEQ ID NO: 43718 - DNA, 239 bp, Glycine max
  Clone ID: 701043230H1
gagacataaaaaataaacatatattgagaatggagggttgtgtgaagaagttgctatgccttgttgggtttgtggtgcttgtgagtactattggtggggtggagagtgctggtgaatgtgggaaatctacaacccctgataatgaggcttataagcttgcaccatgtgcctcagcagcacaagatgagaatgctagtgtttctcagagttgctgtgctcaggtgaagaaaattgggcag

SEQ ID NO: 43719 - DNA, 168 bp, Glycine max
  Clone ID: 701043237H1
tggaccatgggcatggtgtttcacatcttaattaatgttactagttctaccttttacatttccaaacacatttaagtaacctttcatatgcaattgcaaatgttgtccaaacgttaagtataactatagacattatgttttattatcaatgatggatattaatctttt

SEQ ID NO: 43720 - DNA, 167 bp, Glycine max
  Clone ID: 701043239H1
ttcaatctcagaggatgggtggtgaggaattgtgtttgatggagaactcagggaaatggaagaggctgtggaagaaggtgaagtaccagctggtggagtaccactccttgcccggttatttgagagacaacgagtacattctcggtcactatcgatccgaatggccc

SEQ ID NO: 43721 - DNA, 170 bp, Glycine max
  Clone ID: 701043241H1
ctttttccttcaagtcactaagataatggcaagcatttataacattccatcacacataaaagcttgggtctattatgaatatggaaacatagaagagattctcaaatttgaatctaacatacccataccagacatcaaggaagaccaagtgctcatcaaggttgtggctg

SEQ ID NO: 43722 - DNA, 236 bp, Glycine max
  Clone ID: 701043243H1
ctctctctctcactcttttctgtcatctgcgcaacttcattcattcaggctaaatggggaggatcaagcctcaggctctgctacagcaaagcaaaaggaagaaggggccttctcgcataagtgccaccattgttacattctatgcattgattcttgtcatgcttgtgtttatcctgtttgttacatacagacattggtccaacaggacaagacttcaaccagagagctacatatca

SEQ ID NO: 43723 - DNA, 237 bp, Glycine max
  Clone ID: 701043244H1
ttctttgcttcagtgtgaagagtagaaagaaggaaggaggaaaggggcatcggagagagagaaagaaaaaagatgagcggtggtcgactttgtacattgcttggagaattagggtacgaaggctgggaagcattggaccctgacagcttcgaatggccctttcagtacgaagatactcgccctcttctccactggatctgctccaatcttcgcccctccaacgtcctctctctcgga

SEQ ID NO: 43724 - DNA, 234 bp, Glycine max
  Clone ID: 701043259H1
tctctgtcgaacttgaaggagctcaatgtgagttttaatgagcttgagtacgtgcctgagagcctgtgttttgctacctcgcttgtgaagatgaacatagggaacaactttgctgacatgcgatccttgccgaggtccattgggaaccttgaaatgcttgaggagttggatatcagcaacaatcagattcgtgtccttcctgactcttttaggatgctcactcgtttacgtgtc

SEQ ID NO: 43725 - DNA, 236 bp, Glycine max
  Clone ID: 701043260H1
gtatactctgaaacaatcatgtagtactcttcgtcttcgttttaagaaaaagaacattttggaggaaaagcgcatacgacgtttgcgagcgaaattgcgatttatttattaccaaagagaagaaaaaaagagaaaagaagaggcgaatggcagatcagagcgagcattcgaaaacggcgtcgcctccggaggaccaggaccgtcccgttcgagtgtacgcggatggcatctacgat

SEQ ID NO: 43726 - DNA, 165 bp, Glycine max
  Clone ID: 701043269H1
gctggatcagactgagataagattggagtagaaaacgtatgatggtcgatccctctgttcactttctctttcgtgaaaatcgcaggaaggtaactgctgaagactgaagtacctgaaggctgaggtggtgttttcatggcttccgacacggtacgaggccaaagg

SEQ ID NO: 43727 - DNA, 163 bp, Glycine max
  Clone ID: 701043271H1
ggtttttatcgacatcgccacgtgcatgagggacagtgacggggttatagtaaatacttgtgaagccatggaaggtagggttgtagaagctttttccgaagggttgatggaaggaaccacgccgaaagtgttttgcattggacccgtgatttcttctgctcct

SEQ ID NO: 43728 - DNA, 239 bp, Glycine max
  Clone ID: 701043280H1
gtggacagaagagagcgtcctagtcgcaaccctaataagaagaaccacagcttcaagcgagtgacatccaccagccatgggtcgtatgcacagccgcggtaagggtatatcctcttctgctttgccctacaaaaggacaccccctagctggctcaagatctcttcgcaagatgtggaagaaaatatctgcaagtttgcgaagaagggtttgaccccgtctcagattggtgtcattcttc

SEQ ID NO: 43729 - DNA, 166 bp, Glycine max
  Clone ID: 701043282H1
gtttaaaccaacaccaaaatctttgttattcacgaaaccccgatagcactttccttatcttttccgaatccgaggagtggcagtagtgtgtggtttttcacaatcattacctcgtttcagctcaattttgttaattgggcttccattcattaaagtttacaagttt

SEQ ID NO: 43730 - DNA, 232 bp, Glycine max
  Clone ID: 701043283H1
ttgcttttgaaattctcaccaccacctattccaccttggtaatacttactctttcacttaccaaccaaccaccatggtttctgagacactccaaagccaaaccaagaacgtgtgcgtgattggagcaggaccatcagggctagtggcagcaagagagttgagaaaagagggtcacagggtggttttgttggagcagaatcatgatgttggaggacagtggctatatgaatca

SEQ ID NO: 43731 - DNA, 231 bp, Glycine max
  Clone ID: 701043290H1
ggtggcacctgcccctgagtatacatttcttatttattgttctccagttggcagctaccagaagggtgcactaaatttaaaggttgaggataaactatatagagcaatatctggctgtggtggaactggagggatcaaaagtgtcaccaattatgcccctgtttatactgcaatggctgatgcaaaggccaacggattctctgatgtgctgttcttagactcagcaactgg

SEQ ID NO: 43732 - DNA, 234 bp, Glycine max
  Clone ID: 701043294H1
gttctttggatgaggttacagctgcacttgcaaatgctgggctggaatcttctaatctcattgttggcattgatttcaccaagagcaatgagtggacagggaagaggtcattcaatcgaaaaagtttacatgacattagaagtggtcaaaacccttatgaacaagcaatttctattatcgggaaaactttatctgctttcgatgaagataacttgattccttgttttggatttg

SEQ ID NO: 43733 - DNA, 238 bp, Glycine max
  Clone ID: 701043296H1
gaaagttcatccaatctccgaagcccttcaccgcattgcaaccatgtcgagaagaaaggttagagagccaaaagaagaaaacgtgactctgggcccagctgttagagatggcgaacatgtctttggcgtcgctcgcatctttgcctccttcaatgataccttcattcatgtcactgatctgtccgggagggaaacacttgtacgcatcacaggtggaatgaaggttaaggctgacagg

SEQ ID NO: 43734 - DNA, 277 bp, Glycine max
  Clone ID: 701043306H1
tttgtttccaaggttgctctgggaatccgaggttctaaactctgcaactaactttaatggcaactgggcaagtcattaataaacctccttcacttcctccgtaccctgagatgattcgggaggcaattgaagcactgaatgaagagaatgttcgaataaatcatcaatttcgaagtacatcgaatccacctatggtggattgcctcaggcccacaaggttttgctcaatgtgcacctcgcgaaaatgagggaaagtggagtgctagtgttttggaag

SEQ ID NO: 43735 - DNA, 274 bp, Glycine max
  Clone ID: 701043320H1
gaggaagtaagaaaacacaacacgaatttcattgcagagtgttattttgagtatcagcatcaatggctccaattgcagtgggaaacgtgattccagacggcattttggcttacttggatgaagaaaacaaaccccaaactgtctccatcactctctcgccaccggcaagaaagtcatcatctttggggttcccggtgccttcactcctacttgcagcttgaagcacgttcctggcttcattgagagagcagaagagctgaaagggaagggtgtg

SEQ ID NO: 43736 - DNA, 271 bp, Glycine max
  Clone ID: 701043351H1
attccaatatattccattctctctgtgtatttccctacctctcccttcaagatgcagatcttcgtcaagaccctcaccggcaagaccatcacccttgaggtggaaagctctgacaccatcgacaacgtcaaggccaagatccagacaaggaaggaatccccccggaccagcaacgtctcattttcgccggaaagcaacttgaggacggccgtacccttgctgactacaacattcagaaggagagtactcttcacctcgtcctccgtctccg

SEQ ID NO: 43737 - DNA, 273 bp, Glycine max
  Clone ID: 701043363H1
atagtttaacagcaaatagaacccttgcgaatcaaaaccttcctgctcctttcttcaacctcactcaacttaaagctgcctttgctgttcaaggccttgacactaccgatcttgttgcactctcaggagctcattcatttggcaagttcgctgcttattcattcttgaccgattgtacaatttcagtggtactggcagacccgatccaactcttgacacaacttacttaaaacaattgcgccaaatatgcccccaaggtgggccccctaacaa

SEQ ID NO: 43738 - DNA, 269 bp, Glycine max
  Clone ID: 701043376H1
ctgcaatttcagttgagtgggccatggctgagttgataagaaacccaagggtgcaacaaaaggtccaagaggagctagacagggtaattgggcttgaaagggtgatgactgaagcagacttctcaaatctcccttacctaaatgtgtgaccaaagaagcaatgaggcttcacccaccaaccccactaatgctcccacaccgtgccaatgccaatgtcaaagttggaggctatgacattcccaaagggtccaatgtgcatgtgaatgtgt

SEQ ID NO: 43739 - DNA, 113 bp, Glycine max
  Clone ID: 701043392H1
gactattttcgtatctgaaattttgagaatagcacatttcttctgactttgataaatctttttgctaaggttgaatgtttttcgttttataagtctgagtggtatattttatt

SEQ ID NO: 43740 - DNA, 272 bp, Glycine max
  Clone ID: 701043396H1
ctcacacctctccaaaatccgttccccctttctttcaaacccttttttttttcttccaacaaatcagcgatggcgacgacgtcggtggtgccggcgaatcggcggcgtgcggcggcgaaccccgccgaggatatggacttcagacgacggagggcgtgaaggccatcgcgagcttcgaggagatggggatcaaggacgatctgctccgcggaatctaccagtacggcttcgagaagccctcagccattcagcagcgggccgtgactccgatc

SEQ ID NO: 43741 - DNA, 248 bp, Glycine max
  Clone ID: 701043431H1
ctcaaccctctaaaaatcacagattctaccttttgatgcaaatgggatcaactcaccaaccctagggtcacataccagcaagattcattcgttcattcatctcaaaccaaaccaccccacttcaattatggcacatttcccacttcccattattacttcagggccttcactttctccattttgttcctcaaaaccctagcttttgacccaattcctctgttttattatgctggctttggaaaagatct

SEQ ID NO: 43742 - DNA, 242 bp, Glycine max
  Clone ID: 701043462H1
ccaaaacccaaaaacctttccttttactttttctcaaactgaaacataaaaaatggagggtcttattccttttgtttacaaggctatcatgcaatccaagggcgacaaagagggtcatcctataggatatggctttgtgagtctccttactcatacatgagacttcctggtgactcgggtaggtttcaaattcaagcaccagctgctgcttcaccctcttccaccaaccctaattcttcttc

SEQ ID NO: 43743 - DNA, 240 bp, Glycine max
  Clone ID: 701043479H1
ctttcatcaccgccgttgattacttctcctttctctaccctgacgccagcgttgaccgcatcttcgccgtggtttacatgatagtcgggctggtggggatctccctcataatcctctacagccacaatctgacgcctatgtgaggatcaacgttggattggccctattcgtcgtttcgcttctcgtcgttcccctccttgatgccttttacataaagggtcgggtcgggttttatagcgg

SEQ ID NO: 43744 - DNA, 237 bp, Glycine max
  Clone ID: 701043491H1
ccaagaccaagttgcagataaagcctgctccagccatggcagctttctctcctagagggcccaacacagtcacaccggagatcctcaagcctgatgtcattgctcctggtgtgaacattattgcgcctactcagaaggggttagcccaacaaatctgggatttgataagcgcagggttccttttatcaccatgtctggaacatccatgtcttgtcctcatgtggctggagttgttgg

SEQ ID NO: 43745 - DNA, 255 bp, Glycine max
  Clone ID: 701043502H1
tgcaaagcgcaaattaaagcgcaaaaaccattctccttcggtgctcttgaaaacatgggaaaacagagcacagaattctctgccctcaactgcatcgacctctccaaccctgacatcaaccaatccgtcaatttactcaaacaggcatgtttggattccggttttttctacgttgtcaatcatggaataagccaggaattcatggaagaggtttttgcacagagcaagaaattcttctctcttcctcacaaggag

SEQ ID NO: 43746 - DNA, 253 bp, Glycine max
  Clone ID: 701043505H1
attccaaaccagttcaatctttaattttcagtcatcactttatattggtcacattttcaaagtaacaaatataagatattctgtgaaaagatggcaaaacttgctggctgtgtagctcatttttttattgcagcaatggttttgagcacgttttacgtgaccaaaactgtggcacaatcagagatagctcctacttcacaaatggagactggagaagggtttgctttgtctgtttctggggtgaccttgtgtt

SEQ ID NO: 43747 - DNA, 253 bp, Glycine max
  Clone ID: 701043507H1
gtttacgatgctgttaaatcaatgacccaaaacaatgttggagctttggttgttgtgaaatctgacgcgaataaggcaattgcaggaattattactgaaagagattacttaagaaagatcatcgtgcagggaagatcatccaagtctactaaggttggagatattatgactgaagagaacaaacttatcacagtcacccctgataccaaagttctgcaggctatgcaactgatgactgacaatagaatcaggc

SEQ ID NO: 43748 - DNA, 253 bp, Glycine max
  Clone ID: 701043520H1
caattattaatcaggatctaatagcaggtgggactgagagttcagcagtaacagtggaatgggcaatcacagagctattgagaaggccagagattttcaagaaggcaacagaggagctagacagggtaataggtagagaaagatgggttgaagagaaggacattgtaaatttgccttatgtgaatgccattgcaaaggaagcaatgaggctgcaccctgtggcaccaatgttggtgccaagactagccagaga

SEQ ID NO: 43749 - DNA, 252 bp, Glycine max
  Clone ID: 701043527H1
caaccctaacgcgtgcagagcagagagagacgcagccatggggcgaagacccgcgaggtgttataggcaaattaagaacaaaccataccccaagtcacggttttgccgtggtgttcctgatcccaagatcaggatttacgatgttggtatgaagaagaagggtgttgatgaatttcctttctgtgtccatctggttagttgggagaaggaaaacgtttctagtgaggccctggaagctgctcgtattgcttg

SEQ ID NO: 43750 - DNA, 252 bp, Glycine max
  Clone ID: 701043541H1
ctcgttttttctcaaaaagttgcaagagttaaagcaaaaaccaaagtgagagagaaaatgatgaagccatcgatgctcagatctcttcactctgccgccacccgcggcgcctcccacctctcccgccgtggctacgcctccgagccggtgccggagcgcaaggtggccgttctaggtgccgccggcgggatcgggcaacccctctcccttctcatgaagctcaaccccctcgtttccagcctctccctctac

SEQ ID NO: 43751 - DNA, 251 bp, Glycine max
  Clone ID: 701043545H1
gcggtgagaggaaacagaagagagaagagcaatcggtgagtgaatggaatggattcaggtcctccggcgaacgatttgtgttcagtgtgccatggcaactttcatattccatgccaagccaattgttctcactggttttgcggaaattgcataatgcttgtgtggcagcacggatcagtgggttgttcatgcaagtgcccactgtgtcgtcgagccatcagtctcttagtccccacagaagagtctctgag

SEQ ID NO: 43752 - DNA, 250 bp, Glycine max
  Clone ID: 701043549H1
gcttcttctcttcttcaactggttttgagattgccattttcttatcttgtttagtttagcttgtttggttgagaggaattaattattttgtataaaacaatgaaggagagtgtaggaaaccctttgcgtcttcaatctgtgaatcatatctccctcatatgcagatcagtggaacaatcaatggatttctatcagaacgttcttggattttaccccatcaggaggcctggctctttagattttgatgggg

SEQ ID NO: 43753 - DNA, 248 bp, Glycine max
  Clone ID: 701043550H1
catggctgaagctgcaagtgcggcacaggatcatatggggggttcaattaaccaaggttacaattcctatcctacaaatcctgtctatgcatctccgccctcaagtgctgctggtcatgcgggccatgcaccttctgcagattatggttccgtttacggcaccaattatggctattgagaacattactttacattcaattttaaatgaggagccctacgttttgtaaacattgagagttcaatttcag

SEQ ID NO: 43754 - DNA, 249 bp, Glycine max
  Clone ID: 701043552H1
tccaaccaaacccatggttgttgaaactttctccgagtatcctccacttggtaggtttgctgttagggacatgcgtcaaactgttgctgtgggagtcatcaagaacgttgagaagaaggatcctaccggagccaaggtcaccaaggctgcccagaagaagaagtgaatcgtgcgggctggttcatcaggggatgttggttacaataaatgttggtttcttttctgtactcttgtgtcttcttttctagg

SEQ ID NO: 43755 - DNA, 250 bp, Glycine max
  Clone ID: 701043566H1
aaccactcttaatttctctctgtctcgtttacacatctctccaacctttcactttcgtttctcagttttattcgaatccctctctcaatctcctttccaaatggccagcgttgaggttgcacagcaaacaccaacaacagttccagaaaatgaaacaaccgaggtaagcaagacccaggaaacaaccccagtcactgaggctcctgcaacagaacaaccagcagctgaggttcctgcaacagaacaacca

SEQ ID NO: 43756 - DNA, 249 bp, Glycine max
  Clone ID: 701043577H1
ggaaagttggacttgatctttcagccatttgagaagaatttggagctgcaaattccagaaagtgaggaatacaggtgggatggtaaatatgagaattcagcttatgctcttccaaattgagaaattcctatgtctgttaaatgttgcttcttttagaattcccccaaaaatatgtcatggatttctgtactttctggtatgcattaatccaggctactttttgagttcttgaacaaatttcaacagatg

SEQ ID NO: 43757 - DNA, 257 bp, Glycine max
  Clone ID: 701043673H1
caactttttcgacggcaaggttatgaaggaggcactgaccaaggtgctggtgcccttctacccaatggctgggcggctccggcgagatgacgacggtcgcgtcgagattgactgcgacggtcagggggtgcttttcgtggaggccgacactggcgccgtcatcgacgatttcggcgatttcgctcccacccttgagctccgccagcttatccccgccgtggattattcacaaggaatagcatcctatcccctgttgg

SEQ ID NO: 43758 - DNA, 263 bp, Glycine max
  Clone ID: 700966907H1
gaaagagagagcaatgagagagatacagttacccttaagccaaacacagaaggttcgtcttcagaaggctctggaacagttagagtctctgtcaacgaaggtgaattccgatgcttcggtaatcatcgccgattccatccacgtcaaccacgaagatggcgtcctcaagggacacggaaccgccgacctcaacggcgaagtcgtcgccaccctctgcggcgtcgtcgagcgcgtcaacaaacttgtctacgttcgcgcgttac

SEQ ID NO: 43759 - DNA, 263 bp, Glycine max
  Clone ID: 700966908H1
aaccccccttttccaacccaatttttctccataaaccctagattcaacgaacccgccgaccaagctcgaacctcacgtcgcaaaaaaacacttcttttcccctctccgaggttgtcgtgtcggagcatagccatgttgttccctcgaggaaattgatgatttttcataacattggggtctcgttttgcttgtggggtcaccttgaaggagggaaaagtaacgagctttggggctgaatcgtggtgggtctgttgagtatgcat

SEQ ID NO: 43760 - DNA, 265 bp, Glycine max
  Clone ID: 700966909H1
cactgagtaacacgcccgaatatggcaccctcaatctccgacgaaatgccaagcaccaccacctctctcctccgccgcaaccggtggctcccctccagcatcaaactgaaaacaacccttttctcagaactctccggcgcggtgggtgacctaggcacctacatccccatagttctagccttatccttagtgaacaacttggacctcaccaccacactggtcttcactgctctctacaacatcgccaccggtctcctcttcggcc

SEQ ID NO: 43761 - DNA, 262 bp, Glycine max
  Clone ID: 700966913H1
aagatttcacatagagctcaaggcattgtttcacttgcaagcagatggcatgcgctagtaacatgcacttctgattcatctaaactgagatattgtgctagtacagggagcttggaggctgcaaaacatttaaactcaatgtttttggattactcagaaagtgatctagagtcatcagattacattggtgtgccttcacatacccagttagcttcttatatgtcctcgcataacaagagacaagcctttggtacgtaataca

SEQ ID NO: 43762 - DNA, 262 bp, Glycine max
  Clone ID: 700966924H1
cttattcaactgctttttaaactgttaatggaaatggcttcctcatccttcatcttaggctcagatttcaaatgcatgttctcttcgaggaacactaaaaccatgtctggatttggtgcactgagacatccacacccaaatggtttgttcagtaaatgcttccactttcatactctatctactagaacggtgtcagggactacaaagatggtttctgatgtttatgttggtggagtcacaagtttcagagtcaatagcaaga

SEQ ID NO: 43763 - DNA, 260 bp, Glycine max
  Clone ID: 700966928H1
cagaggtgttgagtgagttcaaatcaattttaggcagaaaaatgaggtgttttggtcttgtagtgataggtctagtggttgtgcttggagggttacccttctcttcaaatgcaggattagatcccttcttttacaagaagagttgtccccaggtgcatttcattgtatttagagtcgtagagaaagtttcaagaaccgatacacgtatgcctgccagcctcgtcaggcttttctttcatgactgctttgttcaaggctgt

SEQ ID NO: 43764 - DNA, 261 bp, Glycine max
  Clone ID: 700966931H1
gcatgttaggatttccttttatttttttccaattatataggtaacccttaaattttcccttcagtttatgcatgtttggatttccttttattttttccaattatataggtaacccttaaattttcccttcagttttttgagtttatatatgtattccctgaatcgatctaacatgaatagctttctaagggtactcttctcgggatgaggcaaaccatttttgagtttatatttgattccctgaatcaaaggtacccatcc

SEQ ID NO: 43765 - DNA, 258 bp, Glycine max
  Clone ID: 700966938H1
ctctttcttcttttttagccacccctctcttgaaaaatctagatctcgttcttccttgatctacgttacgcttttagtgaccggatctgtatggatctgaaccagatctacacgccgatggtggttttggcctggtacaataaatcttccatcggagttttgctctgtataggttcgatccatcgttattagcgtcttgatattgttattttcatttgtcatataggtctttcatagatctgatgcatggaggctcag

SEQ ID NO: 43766 - DNA, 258 bp, Glycine max
  Clone ID: 700966942H1
aactagtaattaagcaagcaagaatcacaaattggaaccatgtttctcaaatgttttggcttcggcgctcagagacagtatccaacggtgatagaagagttgtgccatcgattttctctcgcagatctaaggaaatcaaccaacaatttcgatcaaaacacagtaattgatcgtggaggatgtggtagagtatataaaggttgtctccagcacaatgaacatgcttctgatacagtcgctgtaaagcgattgggaatg

SEQ ID NO: 43767 - DNA, 258 bp, Glycine max
  Clone ID: 700966944H1
aacgatgttcttttggatcttctgtctatcggatcaccttctgctgaaagcagctcatctacagtagacatcttatcctccaattcgagtaacaaagcaccagtttcttcatcattggatggtctctcatctctttcactttcgacaaaaacaacttcaaatgctgctcctatgatgaatttattggatggttttgcccccagcccgccaacagaaaacaatggatcggtttatccatcagtaactgcatttgagagc

SEQ ID NO: 43768 - DNA, 258 bp, Glycine max
  Clone ID: 700966945H1
cacattttctgtgcgctctaacaaacattctcgttcacactttcagattgtgtgaagatgggggcgggtggccgaactgatgttcctcctgccaacaggaagtcagaggttgaccctttgaagcgggtgccatttgaaaaacctccatttagtctcagccaaatcaagaaggtcattccacctcactgtttccagcgttctgttttccgctcattctcctatgttgtttacgacctcaccatagccttctgcctctat

SEQ ID NO: 43769 - DNA, 256 bp, Glycine max
  Clone ID: 700966960H1
ctaatctccatctaatagtgttaatttgtctttctctatctctatcggtcatgggtgcttttgcttttgatgaggaaaactcctccaccgtggctccggcaacactctacaaagctctgacaaaagatgctgacactatcatcccaaagattattggggccatccaaactattgaaatcgttgaaggaaatggaggacccggaaccgtcaagaagataacagctagtgaaggtgaccaaaccagtttcgtgctgca

SEQ ID NO: 43770 - DNA, 256 bp, Glycine max
  Clone ID: 700966968H1
gaagaattaagatggctaccttgactgtacctccagttcctccttcccccagagatgatgccatgcagctttaccgtgcttttaagggatttgggtgtgatacaagtgctgttatcaatatacttgctcatcgagatgctacacagcgtgcctacatccagcaagaatacaaagcaatgtattctgaggaactttccaagcgcttagcttcggagcttagtggaaagttagagactgcagttctgctctggttgca

SEQ ID NO: 43771 - DNA, 256 bp, Glycine max
  Clone ID: 700966969H1
ggctaattcagaagcatgtgttggattctggttcaattgatactgttggcactgtcggtatcctggaactgcatcctggagcaatcaacagcatccccagcaaatctcacctagaaattgacacaagagacattgatgaggaaagaagaaataaagtggttgagaaaattcatcaatcagcaattaaaataaccaaaacacgaggtgtcaagctctctgatttccgtgtcatcaatcaggatccaccagccatttc

SEQ ID NO: 43772 - DNA, 253 bp, Glycine max
  Clone ID: 700966974H1
acgaagcccatttcatgtttttgtagcgtctctgtcattctgcacgcactctgcaacaaaccactcaacaatggcttccaattccaaatcggagacttttctgcaacgaaatggttacgattttctgttgggatcaatcgctgctttctacgtactcaccgtgccttacactaaggtcgaagagagtttcaacgttcaggcaatgcacgatattctctatcaccggctgaatttagacaatgtgctttgcttg

SEQ ID NO: 43773 - DNA, 253 bp, Glycine max
  Clone ID: 700966976H1
gcatttctcaccgactgcgaagggagagcgaataaaaaaaggcaaatcaaattcgagagaaggagagaatttagagagggaaaggatgaagatcacggcgttgttggtgcttaaatgcacgggcgagggatccgatccggtgattctggcaaacgcttccgatgtcagccacttcggctacttccagcgttccagcgttaaggaattcatcgttttcgttggtcgtacagtcgccagtcgcactcctcagggc

SEQ ID NO: 43774 - DNA, 254 bp, Glycine max
  Clone ID: 700966979H1
cctcgctctatttctcagtctctgtgtttgcggctgaggattccgaacgagtgaccttcttcgtttctcgcaaagtttaagtaatcatgggtaaggaaaaggttcacatcaacattgtcgtcattggacatgtcgactctgggaagtcaactaccactggtcacttgatctacaagcttggaggtattgacaagcgtgtgattgagaggttcgagaaggaggctgccgagatgaacaagaggtcattcaagtat

SEQ ID NO: 43775 - DNA, 260 bp, Glycine max
  Clone ID: 700966981H1
gacagatactatcagatttcagaggcggaggcggaggctggagctgcctcaactcaagtcttcaactatctgaatctgaactcatccactcactcgttagcgctgctagaacgaaaactgagtaatggaaagtggagggaactcccttccatcagggtcagatggtgtgaagagaaaggtttcatatttctatgatccagaggttggaaactattattatgggcagggacacccaatgaaacctcataggattcgaatga

SEQ ID NO: 43776 - DNA, 134 bp, Glycine max
  Clone ID: 700966987H1
caatatccggactctctgcatctaattccaaaattgtgaaaaacccagaagcagaaggagcaatggcagataagccaagtcgatccctggttttattcggtgatgggttagctcgtttcatcgattcatcgcac

SEQ ID NO: 43777 - DNA, 253 bp, Glycine max
  Clone ID: 700966992H1
aaaattgggtggttttcgattgaactgtgatgtccaagccactgctaggcatagcggaagaggaaggtcaaagcaatgtcactttgttggtttcttcctcagccaccatggaaagtgtgtgcctgaatagctcaaaactgaaagagcgcaactacatggggttatctgattgttcatctgtggacagctccgcgccgtccttctcagatgagactaagagcaatctgaacctcaaggctactgagctcagact

SEQ ID NO: 43778 - DNA, 251 bp, Glycine max
  Clone ID: 700966993H1
gccagtagtagccaatttgttggagctggttgggaatggcgtcgaaaccgaaatcaaatggaaattccaaatgcaacaaaggattcgctgacagctatatgctgttgaatcctgaagacgctcatttcttcgatcttgttcatgtgctgtattcccgtaacttgggaaaccgaaaatttgtggacagcaatgctgagggatcttatgagggaagcttccgccaaagatggcttatattcgtctctgtggtg

SEQ ID NO: 43779 - DNA, 253 bp, Glycine max
  Clone ID: 700966996H1
gtcgctccgcaccagtttcaccgcacgaatatcttgttgtttggagcgatccgagaaaaactctgtaaacatgttggtttaccaggacctccttacaggtgatgagcttctctctgactccttccgttacaaggaaattgagaatggaatgctgtgggaagttgaggggaagtgggttgttaaaggagcagttgatgtagacattggtgcaaacccttctgctgagggtggaggagaagatgagggagttgat

SEQ ID NO: 43780 - DNA, 265 bp, Glycine max
  Clone ID: 700967002H1
cttacaatgatgctgtggtccattgtgcacgcaaaatgtcaagctttggattggtgtcaacacagactcagtatcttttagcatcaatgctaaatgatgatgagtttgtggaaagttttctggtagagagtgcaaaaaggctggcacaaaggcatagagttttcactggggggttggccaaagttggcataaagtgcttgcaaagcaatgctggtctctttgtgtggatggatttaaggcaacttctcaagaagccaacgcttga

SEQ ID NO: 43781 - DNA, 263 bp, Glycine max
  Clone ID: 700967003H1
tttattcataccattttcgttgggcttcggttttcatagagagagaaagagaggaagaggaaatgggagtgctgtccaatatgatcgatcgggaacaactgaagcccggtgatcacatttactcttggaggcaagcgtacatctatgcacaccacggaatatatgtcggtgatggaatggtgatccactttaccagaggagcaggtcaagaaattggaacaggaactgtgttggacaatctccttttcagttcatctccctct

SEQ ID NO: 43782 - DNA, 261 bp, Glycine max
  Clone ID: 700967006H1
attttcaagctctcaacgccatctccagctgcttccttatcagaagcgcttcgccccagagattctcgcttcctctccttcaatccttcttccaacgctattaattacaaaattaacctctccgcttccctccgatccattcactccctccctcttaaaacctccttgcggatcaaatgctcccaaacagatgggaatggaagtcctgcaaagaggacagtgcttcatgatctttatgagaaagaagggcagagtccatgg

SEQ ID NO: 43783 - DNA, 260 bp, Glycine max
  Clone ID: 700967010H1
tcgggtgggaagaaacggggacccgctccgtatagaatatttaacctggggaacacgtcgccggttactgttcccactcttgtcagtatattggagcgccatttgaaggtgaaggccaagaggaatattgtggacatgcctggaaacggcgacgttccgtttactcacgcgaatattagttcggcccggagagaactcgggtacaagcccaccaccgatttgcaaaccgggttgaagaagttcgtcaagtggtacctttc

SEQ ID NO: 43784 - DNA, 258 bp, Glycine max
  Clone ID: 700967021H1
gtcagagacagagacgcagccatggggcggagacctgcgaggtgttataggcaaattaagaacaagccataccccaagtcacgtttctgccgtggtgttcctgatcccaagatcaggatttatgatgttggtatgaagaagaagggtgttgatgagtttcctttctgtgtccatctggttagttgggagaaggaaaatgtttcaagtgaggccctggaagctgctcgcattgcttgcaacaagtacatggccaaattt

SEQ ID NO: 43785 - DNA, 258 bp, Glycine max
  Clone ID: 700967025H1
ccgaggcgaagagaagagaaaaattaagatggaggggaaggagcaggatgtgtcgctgggagcgaacaagttcccggagagacagccgattgggacggcggcgcagagccaagacgacggcaaggactaccaggagccggcgccggcgccactggttgacccgacggagtttacgtcatggtccttttacagagcagggatagcagagtttgtggccacttttctgtttctatacatcactgtcttaaccgtcatggg

SEQ ID NO: 43786 - DNA, 258 bp, Glycine max
  Clone ID: 700967026H1
cttgaagaaagtaggatacaaccctgacaagattccttttgttcctatctctggttttgagggagacaacatgattgagaggtccacaaaccttgactggtacaagggtccaactctgcttgatgcacttgaccagattagtgagcccaagaggccctctgacaagccccttaggcttccccttcaggatgtgtacaagattggaggtattggaactgtgccagtgggacgtgttgagaccggtgtcttgaagcctgg

SEQ ID NO: 43787 - DNA, 260 bp, Glycine max
  Clone ID: 700967029H1
gagagagagagcagaaataatattgattttttaattgaatggaagtaaacgttgtatcaagagggataattgtctaacctttgaagtagactcagccaaaggttcctcctcaagagggataattgtgcttcaaatccgttgtgcccctccatttgagttgattgatcagccattggattctcatcctcactcacttgctccatttcagctacatcaacagaatctccagtcttttcagatgcttcatgtgtgatttctgg

SEQ ID NO: 43788 - DNA, 260 bp, Glycine max
  Clone ID: 700967030H1
gctgagtgcagagcaaagggtggggcacctggattcaaagttgcaattttgggggctgctgggggaattggtcaacccctttctttgctgatgaagatgaacccattggtttcagttcttcatctttatgatgttgtcaacacccctggtgtcactgctgatgttagccacatggacactggtgctgtggttcgtggctttctggggcagcaacaacttgagagtgcactcactggcatggacttggtaatcatacctgc

SEQ ID NO: 43789 - DNA, 263 bp, Glycine max
  Clone ID: 700967031H1
ctcaaaccgtttaagcttctccgagttttgacctacaacactctcgaatcccctcttgtgtgttgtagccgccccgtgaccatcaatggcggaaactgctgccgacaaatcccaatctctcgctgaggaatattatgtgaaggataagcaaacagctgtagttgaaaaacctgttgaggtcaaagaagttgaaaacccagaggaggctgcttctgaggaacccgttgctgagaaaactgtggaagaaacaactcctgttgccc

SEQ ID NO: 43790 - DNA, 255 bp, Glycine max
  Clone ID: 700967036H1
catttatcatttcatgggaacatccacttttagtcaatacactgttgttcatgacgttagtgtagctaagattgacccggtagctcccttggagaaagtttgccttcttggatgtggtgtttcaactggacttggagctgtctggaacactgcaaaagtggagtcagggtcaattgttgctatttttggccttggaactgttgggcttgctgttgcagagggtgcaaaaactgctggtgcatcccgggttattgg

SEQ ID NO: 43791 - DNA, 257 bp, Glycine max
  Clone ID: 700967047H1
agggcatcagatcaaaacaaagctctttgccccaactgggacttgtgcaattttattgttgaaatcgcaactcgagaggataatagcaaattaagtttttatggcctggagtttatggctaaatggattgtaaagggtgaacgtcaaagaccccctatatatctttctgtagatgaaggtttagtactgtcagctcttttgactgctggtagaacctataattctgatctgctagtggcatcatgggctgttttgga

SEQ ID NO: 43792 - DNA, 253 bp, Glycine max
  Clone ID: 700967059H1
attcaattcctttgaatcttgttctctctaatctctctcactacaatggagactccatcatccacagcaagaagaatcacaagatcccaaatcgcctccaacaacaacatccccgtttcaagaaaaaagaacgaggactgcccagaaaagagcgtttcaaaaacgcggcagagaagcagcgtgcaacagcaggaacggtgtgcgctggtcgacatatcgaacgattcaccgatcgcggggctggcgaacggga

SEQ ID NO: 43793 - DNA, 254 bp, Glycine max
  Clone ID: 700967061H1
caacaatgaagacttaccacctccctggaaagtcatggttctcttggttcttacttggcctactttcaatcattgcttcccttgcttcagctgcagagaatcattaccatgagtttgttatccaaactgtgccagtgaagaggctgtgcagaacccaaaacatactcacagtaaatgggcagtttcctggcccaacagtggaagcaagaaatggagattctcttgcaatcaaagtagtaaatgctggaccatac

SEQ ID NO: 43794 - DNA, 249 bp, Glycine max
  Clone ID: 700967073H1
tgatgatacacagtacccaaaaacattcttctataaagaagaccttcatccaggcaaaacaatgaaagtacaattcaccaagcgtccctatgcacaaccttatggtgtatatacatggttaacggatattaaagacacctctaaagaaggatatagttttgaagagatatgcatcaagaaagaagcgtttgagggagaagagaagttttgtgcaaaatccttgggaacagtaattggttttgccatttc

SEQ ID NO: 43795 - DNA, 252 bp, Glycine max
  Clone ID: 700967078H1
gttcataaaaacgaacaactacatagcatttatttttcgctcttctctcttctattcagccactgctcacaccatgagtgccgagaagaagaaactgattggcagattacgcctatttttcactaatgcaaaaccatacctcttaatgattggcttgcaatttggcatggctggaaattacatcttcggcaaggatgttcttaaccatggcatgagtcgttttgtgttcattgtttaccgaaatgctatggc

SEQ ID NO: 43796 - DNA, 249 bp, Glycine max
  Clone ID: 700967083H1
aatttgttccgcaaaatggtgatggagattgtgaggaacaagaaagttaggttttggaagaaagtgtatgttatatacagctttttctttgttcgcaaaatcatcgcccacatggtcaccttcttcttctactgtgttgtgattccccttacaatcttggtcccagaggttcatgttccaatctggggagctgtttatattccttctgtcatcaccattctcaattcagttggaacaccaaggtccatt

SEQ ID NO: 43797 - DNA, 247 bp, Glycine max
  Clone ID: 700967084H1
gtgacgagcatcatggcctcgagagcagtgctattgttggctatgtgtgtgcttccggccatggttgtggccattcgcccagcaaagaaccctttttgcgtgaagggtcgcgtctactgtgacccttgccgtgctggttttgagacctcagcaaccacctacattgccggtgctgagattatgttgcaatgcaagagcagggttagcaacgaggttgtgtacaccaagaaggggtacactgactcaa

SEQ ID NO: 43798 - DNA, 247 bp, Glycine max
  Clone ID: 700967089H1
gaagctgccacagaaggcttcagcttcagcatcacaaacatctgagcaagctgatgatacagcttcccaggatagcaattctgattttgtcgcaagaactccacctcctaaaagtagtatagttagtcctactgctacaacaccagcagggaattttgctactcctgtttctatgaatgttcctgtgcctaacttgtcgagtccaccagccattgcatcagtcatgcctggttcaaattctgttcag

SEQ ID NO: 43799 - DNA, 256 bp, Glycine max
  Clone ID: 701043676H1
cccaaggccaaaatgaggaggttggcgcatgtcactactatccaataattcttcagtgacagggtgactgcagaattattggatagtagtgacatgccccaaggccaaaatgaggaggttggtgacgctcaacatgaagatggtgaaattgctgttgggaatgatgaggaatccaaagccccacagaacttggatgttactggtcaagaggcattacaaggtgacaaaactggaactttagaagagaatccggatc

SEQ ID NO: 43800 - DNA, 256 bp, Glycine max
  Clone ID: 701043678H1
cattaccctcacaaagtaagcaatggcataccaaaactacaacaactatgggtggcgatgcccctctgacgagtaccaagtgtacgaccccccagtagaggcaacatatcctaggcaaaatcatcacaagaagggtcatgtggcattcagaaccaactatgaggattctatagctgaagtagaatccaacgttgaggctcgagaacataacagcaggttatggactcacagtgcttacaaaagcgtggaccaagag

SEQ ID NO: 43801 - DNA, 248 bp, Glycine max
  Clone ID: 701043679H1
cttccaaagtggcatcaaaaactagaagaaaatggggtgtggccatttgttcttcacagtcctcataaccttctcagtggcactcataacatacaacatcataatctctgccaatgcccctctcaagcaggacttcccaggcccctcacgcccctccatcaaggtggatcccctcatcaagatgccactccacagatcatcatcctcggagaaatcaaaaaagaggttgtttcacactgctgtcactg

SEQ ID NO: 43802 - DNA, 256 bp, Glycine max
  Clone ID: 701043681H1
gttggctgcatatttgttgggagtcatggttgtccaagatttggttgaagtgagtgaaactgtaatctcaatattcacaggggttctcttgttgatcctccttgtcccaattgttattcccattacattgacttttggcccagagcaaaggcatccggaggaagaggcacttcttccaccaccacagaataaagaagcagggaaatctcagctggattctgatgaagtgatactgagcgagttggaagatgagaag

SEQ ID NO: 43803 - DNA, 252 bp, Glycine max
  Clone ID: 701043682H1
agagaccatggtgaacctagtggtagcacagagaccattgctacatgggcttatgaagatggcggggatcaggccctacacggtggagatagagcccgggactaccatgagcttctgggtcccttcggagaccataacaaagcctaagaaaaaggacgagaagcccagaatcagggcgaacctagcaagcccgcggtgattctggtgcacggcttcgcggccgaggggatcgtgacgtggcagttccaagta

SEQ ID NO: 43804 - DNA, 258 bp, Glycine max
  Clone ID: 701043683H1
ggttcattcactgtcaccacggatacctctggtgaggttcttggcaggggtactaagatcactctcttcctcaaggaggatcagctagagtaccttgaggagcgccggttgaaggatttgattaagaagcattctgagttcattagctacccaatttctctttgggttgagaagactaccgagaaggagatttctcacgatgaggatgaggaagagaagccggatgaggagggtaaggtggaggatgttgatgaggag

SEQ ID NO: 43805 - DNA, 256 bp, Glycine max
  Clone ID: 701043684H1
cattttcagaggaaaatggcgggtacggtttcgacttgtttcttcttcgtgtttcttctttctctccttcttccttttcagatctccgctgaggaatcctcggagaaggagttcgtactcacattggatcactctaactttcacgacactgtcagcaagcacgatttcatcgtcgtcgagttctacgccccatggtgtggtcactgtaagaagcttgctccggagtatgagacagctgcttctatcttgagtagtc

SEQ ID NO: 43806 - DNA, 255 bp, Glycine max
  Clone ID: 701043685H1
aaatttcgtttgtgagacaagctaggcacaatttttgttattcctatcttatcttaacattgtttcttggagttgattgacatggcagtgcaacctgaaattgagcatcccaggaaggcctatggatgggcagctagggatacatctggtgttctctcccctttttggttctctagaaggaaaacaggggagaaagacgtgacatttaaagtgttgtattgtggagtatgccactcggaccttcacaagttgaaa

SEQ ID NO: 43807 - DNA, 257 bp, Glycine max
  Clone ID: 701043686H1
aaaatagatgaagggcaatagaggctgctccgtagtctaggcaaacttttcttcataatcatctttatattgatattcatctattttcccctcaagtttgatgaagctatgtatacgttgtatcttcctggttgtagtgtattgccctttctcgcatttgtttttccccacaatactaatggtttgaacagcaattagacttctatatgaactgaagttgtttctctataagtatttggagtccatttattatcaaa

SEQ ID NO: 43808 - DNA, 258 bp, Glycine max
  Clone ID: 701043687H1
gtgacactaatttcaaatggaaattgctctctcataacagaattcaagaggaggaagaacaagtatataaaaactatatctacatagttatatctctctcttgagatttcaaacgtagagatatggaatggaggaagtgctacttggatgtgatattggtgcccttgggatttctaacaagcattgggtaccatttctggctatggcacaaggttcgaactcagccacacacaaccatcattggcatcaatgctagtg

SEQ ID NO: 43809 - DNA, 254 bp, Glycine max
  Clone ID: 701043688H1
ctcgatcactcccacgcgctcctatatcctctccttcaccgtcgctctctccaacgatcacaacaacatcgtcatcccatggcaaacgccgcatctggtatggcagtccatgatgactgcaagttaaggtttttggagctgaagacaaagaggacacaccgtttcatagtttttaagattgaggagcagcagaagcaggtcattgtggagaagcttggtgagccagcccaaggctatgaagatttcactgccag

SEQ ID NO: 43810 - DNA, 256 bp, Glycine max
  Clone ID: 701043689H1
aaacgccgtcgacgccgtggctggaagaatatggcttcatttgtttctacccactgtatccttcctagcggggttggatttgtgcatgaccaagatcgttcttgtggtagaactaacactttgcatcttcaaaatgctcctaaaagccctagctctctctcctttttgctctccgtgcgagaaagtagatcagatgccgttgttgttcagagcaagggtcgatcgtctttttctcaaacagctgctgtgaggcatc

SEQ ID NO: 43811 - DNA, 255 bp, Glycine max
  Clone ID: 701043690H1
gcgacaacgaggaggaggaagaagtgcagagccagttaaagatacgaactgggttgggttctttggatgctttggaagaatctcttcccatcaagaggggattgtcgagtcattttgatggaaaatcaaaatcgttctcagatctatctcaaatgagtaatttgagtaatctgaaggagttgcaaaagcaagagagtcctttcaacaagagaagaagggttttgattgcatccaagtggtccagaagatcatctt

SEQ ID NO: 43812 - DNA, 254 bp, Glycine max
  Clone ID: 701043691H1
cggctcgagggaagaacgaagcctcctccttcttcttcttctgcgctttctctctccctctctagaaccgtaaccgtcgtttctttctttctctctcctcaaccagagataaagagtcaccttcttatttttctgaatctcgcggcgttgttctttctgctgctgcggctgtggttccggcggcgatgggacagcaatcgttgatctacagcttcgtcgctctcaggctcaagatttcaggcagcagggaacca

SEQ ID NO: 43813 - DNA, 256 bp, Glycine max
  Clone ID: 701043692H1
cttggaagtcatggctgcccatggatgcaagaagctcgtgttctcttcttcagcaactgtatatggttggccaaaggaagttccatgcacagaagagttccctctgtcagcaatgaacccatatggacgaactaagcttatcattgaagaaatttgtcgtgatgtccaccgtgcagagccagattggaaaataatattgttaagatacttcaacccagtcggtgcacaccctagcggttgtattggggaggatccc

SEQ ID NO: 43814 - DNA, 234 bp, Glycine max
  Clone ID: 701043693H1
cttctttctttttctgtgagcctttctttcaggttcttaacttgatcagtgtgcagtgtccaaatcataagggtagttgcaaattgcaatggctaagcatgatgttgagggtggttccttctctgcaaaggactaccatgatcctcctccagcaccgttgattgatgctgaggaactcacacagtggtccttctacagggctttgattgctgagttcattgccacaatgctctc

SEQ ID NO: 43815 - DNA, 255 bp, Glycine max
  Clone ID: 701043694H1
tgaagatcatgcccgtccagaagcagacccgcgccggtcagcgaacccgcttcaaggccttcgtggtggtcggcgacaacaacggccacgtcggtctcggagtgaagtgcagcaaggaagtcgccaccgccatacgcggcgccatcattctcgcaaagctctctgttattcctgtgaggagaggctattggggtaacaagatcggaaagccccacaccgttccctgcaaggttaccggaaagtgtggctccgtca

SEQ ID NO: 43816 - DNA, 244 bp, Glycine max
  Clone ID: 701043695H1
ttaattccaaattagaatcctcaaattccaaaattgaaaaggtcaagatgactggtacaggatctccttgtggagcctgcaagttcttgagaagaaaatgtgtgagaggctgtgtttttgcaccttacttttgccaagagcaaggtgctactcattttgcagccattcataaggtctttggtgcaagcaatgtctcaaagctcctcgctcaccttcctgtgagtgatcgttgtgaagctgctgt

SEQ ID NO: 43817 - DNA, 259 bp, Glycine max
  Clone ID: 701043696H1
gtgatttcagtgagtgatcagtgttcacttgatctcatcataatcgtcagcgtcaattgaagaagatgccgatcagaaacatcgccgtcggaaggcctgaagaggcgactcaccccgacacgttgaaggcggctttggctgagttcatctcaaccttcatcttcgtgttcgccggctcaggctccggcatcgcctacaacaagctcaccgacaacggcgctgccacccctgccggcctcatctccgcctccatcgccca

SEQ ID NO: 43818 - DNA, 254 bp, Glycine max
  Clone ID: 701043675H1
acaaaatgggaacgctttaagctttatatacggtagcaaacagttgaaaacaaaggggggtctggcggctagaactgccacaagcaacgtgttctgtagtgctggttacaagtgtgcaatgagggcactccaatcccaatgctgcagcccggatgaagtgatatttggtcctgattttttccaatcactgtactgccatctgctgtgtggtctgattttccgggaggaagttgagtttgtatcttccacatttg

SEQ ID NO: 43819 - DNA, 261 bp, Glycine max
  Clone ID: 701043644H1
cgtgtctctcccacactgattgccaacactaacaagtaattgatactcctacagttgaatcagaaacactccacgcctacgctattgccttataatctttgttccacgcttttccctctcctcttcgcacacagccttcctttctagggtttcatccaattatgaactgtgaagtgtgccagctcaaggacattgtactggagcatgttgagatacgcgcggtcttgcgatgcatattgcacacgatcgactttcaccgtg

SEQ ID NO: 43820 - DNA, 255 bp, Glycine max
  Clone ID: 701043645H1
gcgagcattttccgctatggccgaagaatttgtgaagggctctgttcatcaaaacggcgtcgctgtcataaccctcgatcgccccaaagctctcaacgccatgaacctagatatggatgtaaagtataaaagttatcttgatgaatgggaatctgacccaagggtcaaatgcgtactggttgatagcagctcgcctcgagccttttgcgctggtatggatattaaaggggttgttgctgaaatacaaaaggacaa

SEQ ID NO: 43821 - DNA, 257 bp, Glycine max
  Clone ID: 701043646H1
gaaaaaagaggcgcaagatgagtggtagggtttctgggaaggtgaagtggttcaacgatcagaaggggtttggattcataacccctgacgatggcagcgaggaactcttcgttcaccaatctcagatcaaatctgacggtttccgaagcctagctgaaggagagtccgttgagttcgctattgaatctgaatctgacggacgcgccaaggctgttgatgtcactggccccgacggcgccaggtccagggaaccagac

SEQ ID NO: 43822 - DNA, 260 bp, Glycine max
  Clone ID: 701043648H1
acatgccaaacgacagcgttctgagtcttttcttcttcgtctccctcttcacatgccttctctctgctaattcccacgatgaccatattttcctaccgagtcaactccatgacgatgactcagtgagttgcactgctaccgacccaaaccttaactacaagccggtgatcggactcctgacccaccccggcgacggtgcctctggccggctcagcaacgccaccggggtttcttacatcgccgcctcctacgttaaattc

SEQ ID NO: 43823 - DNA, 259 bp, Glycine max
  Clone ID: 701043650H1
cttatatctatatttcagttcattttgttctccaataatttcttctgctactttagagaccttgctgcaaaggttctctcttagcatggtaacaatgggtttgaaagcactttttgtttggtgcataatatggttggcgtttgcacagttgtcactaggaggaagagtgaggcattacaagtttcatgtggagtacatgatcagacagccagattgcttggaacacgttgtgatgggaatcaacggccagtttccaggc

SEQ ID NO: 43824 - DNA, 262 bp, Glycine max
  Clone ID: 701043651H1
atgcaacgaccacaattttgttcctcaccaaaatgggaactcttaagcctattgctatccagcttgctcttccaactgggaatccaaatacttcatccaagcaagttctcactcctcccaaagatgccacctctaaatggctctggcaacttggcaaagcacatgtttgctccaatgatgctggtgttcatacacttgtgcaccactggttacgtatacatgcttgcatggaaccgttgataattgcaactcatcggcaatt

SEQ ID NO: 43825 - DNA, 72 bp, Glycine max
  Clone ID: 701043653H1
cagcctaagatcgcaacttgaagttagcgcaaatttgtggcttattgtttggtttcaaaaaagaaaatttgg

SEQ ID NO: 43826 - DNA, 260 bp, Glycine max
  Clone ID: 701043654H1
gattgtggtgagtagcataatggaggcaccgaagctgaaggtagtgacactgaaagccatcgaagcaactccgtcaaccttcaaagagttcggtcaggtcgtggaggcttcgcgagacggccaggaattcggtccccacgatgctcaactcgacctttcccaaggaactccaaggttctacattatcaagcttgaaaaatgcccgcttaagttttctagtattacacatcatgcaatcgtgactcagtgcctcgggtcta

SEQ ID NO: 43827 - DNA, 260 bp, Glycine max
  Clone ID: 701043655H1
caagtatctctaacccaccaaaatcaccaaaacgacaccttcctttaccttctcttccttcattcgaccaccaaacgcaagctcccatgcccgaagctacatttccaaacgacactgcgcactgatgtgtcccacctcgctcctcttcctgatccgttcctgttccgtctccgttcacgctatctgatgaataggtggatgactatgaagaacctcatgctagaggacacgggaataccacgctctgataggatgtgaca

SEQ ID NO: 43828 - DNA, 258 bp, Glycine max
  Clone ID: 701043656H1
ataagcattcaacaactcacctgcgctgcgtgttgtcgtttggcttgctttcctcaccgaacgacagtacattaacccgcaaactccaaaataccctctctctctctctctctctcaccaaccactatgttgcagagacctagacgccgttgcgagggcactgccatgggcgccatcgttctcgatctccgtcccggtctcggaatcggacccttctccctcgggatgcctatatgtgaagcatttgctcagatagag

SEQ ID NO: 43829 - DNA, 253 bp, Glycine max
  Clone ID: 701043657H1
gctgagtctaatcccacaattaacctctctgtgttggaagtggcatcaccacaagcttatggcctggttggaatggcagcgactcttgcaggagtttgtcaagtaccacttactgcagttttgcttctgtttgaattgacacaggactatcggattgttctaccacttcttggagcagtaggcttgtcgtcatggatttcatctgtacagacaaaaagaggagatgatggaggggcaaaacaaattgagttag

SEQ ID NO: 43830 - DNA, 255 bp, Glycine max
  Clone ID: 701043658H1
ctattttcccccctaattcttcttttttgtccatggtacccccattctaattagcatgattccctaccttaagcaggttttcaattagattggattctggctgtttatgggtatctgttggtccaattttgctaggggaagaaatcgaagtagtgaagactaaagacaaatattgctatgggtacaaacggcaaggagggaggatctggggtaacatatcaagacatggtggatgatgaagctcaggacattaag

SEQ ID NO: 43831 - DNA, 255 bp, Glycine max
  Clone ID: 701043659H1
cagcgatctgggacttttctttctcccccacaccacacccagattcaaaaactcgctctgctctgctctgcaattccccttccgtttcgtttcgatctcaaaacatgttcttcttcgattggttctatggcattctagcttccctcggtctctggcagaaagaagccaaaattctcttccttggtctcgataatgcagggaagaccacacttcttcacatgctcaaagacgagagattagttcagcaccagccga

SEQ ID NO: 43832 - DNA, 259 bp, Glycine max
  Clone ID: 701043660H1
ctctgcaacaaatctctctccttccaaaactaagctctggttcaatcactgtcattcttctcctgcagagcaatctcagatctattattcatcatctatcacaaaacacaatgttgcaagacatgtggaatgctcctcccggtttcagaccctccaagtctgcaccttcttctccggcgaagctcttgggatggttcccagaacgcgttctgagaccttccacgtggctcacaaggtccccatcggtgacactccttat

SEQ ID NO: 43833 - DNA, 256 bp, Glycine max
  Clone ID: 701043661H1
caaattgggtggttttcgattgaactgtgatgtccaagccactgctaggcatagcggaagaggaaggtcaaagcaatgtcactttgttggtttcttcctcagccaccatggaaagtgtgtgcctgaatagctcaaaactgaaagagcgcaactacatggggttatctgattgttcatctgtggacagctccgcgccgtccttctcagatgagactaggagcaatctgaacctcagggctactgagctcagactggg

SEQ ID NO: 43834 - DNA, 256 bp, Glycine max
  Clone ID: 701043662H1
taatgcatcggatgacgatgatacgagtgacagaatttatacaattgactctgttcattgtggggcaccatataatggtttcacagattccaaagctggtgcttttgaagattatgcaaccactcctagggagtcagggaatcatgctgctgattttgaggatccctacataaagaagcttcatatgaggcttcaggcacttgaggctgatagggaatcaatgaggcaggcaatcatttcaatgcgcacggataaa

SEQ ID NO: 43835 - DNA, 259 bp, Glycine max
  Clone ID: 701043666H1
tctcgagccgaatcggctcgagtgaagatcactcaaaccaatctactctatctatctggtataggcatggagctttgttggcaaaaatctatccatggctcttaaaagaagcatggaggattgtgtgagagggttctcacccttcacactccacctcctaaagtttgcttatgctttagctattggcttctctaatcaataaccacaaaagggtatgacacatggaggaacatagttctctctatgagtggcatgaagc

SEQ ID NO: 43836 - DNA, 260 bp, Glycine max
  Clone ID: 701043669H1
acttctacttccctttgttctcaaaccttatcccttatcctcccaaaaccaaaccatgtctacctccgcagcttctctcgcactcccaaccctcactctccgaactcgacaacctctctgttctccccaatgcttctcctcgtccctctccctcacccctaactccaaacccatttccatttccgccgttttcctcaaaacaacgctgtcgtcgtcgtcgccgttgtcgctgtcgtctcgcttcgttccccatgtctctg

SEQ ID NO: 43837 - DNA, 255 bp, Glycine max
  Clone ID: 701043670H1
aatatataaatataatggcggaatttacatccaccaccactaacactaacagtaacagcggtctcaggttgaaagccaaagtagccatagtcaccggagggcaagtggcatcggcgaacgacggcgcgtgtgttcgcggacaaggcacgcgtatggtggtgctcgcagacatccaagacgagcttgggaatcaggtggctgcgtccattggaacccagcggtgcacctacatccactgcgacgtggcagacgaag

SEQ ID NO: 43838 - DNA, 258 bp, Glycine max
  Clone ID: 701043671H1
ggttggagttggagtgagtaacccagcacagcaatggcattgagactgagactcaaagtgtcttcaattgggtcaccttttctgcagttaggtccttctgcaagtgcagcatgctctgtttccaaacttggttttcatccaccacgcttgcaactcaacaaaaattcacacccaataaggctttttgttcgggctgctagaattgagtccaaaggtgttaccttgggtttcaggaccccacaatttcagcttccggag

SEQ ID NO: 43839 - DNA, 257 bp, Glycine max
  Clone ID: 701043672H1
cgaaaatggggtgggtttggaaggatgacaacagcgacgatgttcgacgcgataactcttcggaacgatgcgccaccaccaaggtcgtcaaatctcagtgcagaacagaggaggtcgaaactggaaagttcgtcagaaagtgcgagaaaaccgaagagattctcaggaattgcatcggaaagcccgccgaagtgttgcaatcaaacaaagagtatactgaagaggatatcacagatgaagtacttaaaggaaggtct

SEQ ID NO: 43840 - DNA, 257 bp, Glycine max
  Clone ID: 701043674H1
agacagagtagtacagattactaccaatggctaccaaggtttacattgtttattattctacgtatggacatgttgagaagctagctagagagatagaaaaaggggctgcttctgtggagggagtagaagcaaaactgtggcaggtacctgaaacattgcctgaagaagtccttgctaagttgggagtcactccaaagagtgatgttccaattattactcccaatgagcttcctgaggctgatggctttttgtttggt

SEQ ID NO: 43841 - DNA, 259 bp, Glycine max
  Clone ID: 701043643H1
cacaacactagctatagtaagctacacttatttgaggttggagaaatatggctaaagatgttgaggttcaagagcaaggaggagagtactctgcaaaagactaccatgaccctcctccagcacccttgttcgacccagaggagctcacacagtggtccttttatagagccctaatcgctgagttcatagcaacccttctcttcctttatgtcaccgtgctcaccattattggctacaaaaggcagactgatgccacgct

SEQ ID NO: 43842 - DNA, 263 bp, Glycine max
  Clone ID: 701043612H1
gaagaacgctcgctcgcactgtccagatcttaatcaagaggagtgagtcttgtttttccagccatgacgccgctgatcctgcatgctgggaaaaccaacaaaaattcttacaagacactcattgcagccgagtatgctggcgtccaagttgattttgcccctaattttgagatgggtgtctccaataaaactcctgaatttctcaagatcaatcctattggcaaggttcctgtgctggaaacccccgatggtccaatattcga

SEQ ID NO: 43843 - DNA, 263 bp, Glycine max
  Clone ID: 701043613H1
cggctcgagggcgaatatgaacatgtacaacaacaccactccgatgggtggttactcttcgtttctgccgttatctggcgccgtcacggagacggtgcttccgtcctcggttttcaacaaccattctctcggtaacgccgtgaaatccgaaagcggcgttacctataacaataacaacaaccaccaccaccaccacattaacaacgttgttatgactcccacgtcgagaaagcgttcccgagataacagcaacaattacggtt

SEQ ID NO: 43844 - DNA, 259 bp, Glycine max
  Clone ID: 701043614H1
gttcatccttattacaaggactgggcacgttaagcttcacaattcattcacattcacattgtagctccgttaacaagattcactttcatctatccactcactaacgtgatcacacactcatcatcatcaataatggcggagttgttggaaaaggccaaaaactatgttgcggagaaagtcaccaacatgcccaagccagaggcgagtgtcaccgacgtggacttcaagcgcgtgagccgcgacagcgtcgagtacttgg

SEQ ID NO: 43845 - DNA, 255 bp, Glycine max
  Clone ID: 701043615H1
cgatgactgatgcagaactgagaaatatggttagcaagaccctcacttgtagaattgataagagagagaactgcaatgagaagatggaccaatttctaataagatgtttctaccattctggtcaatatgattctcaggaaaactttgcagcactagacaagaagctgaaggaacatgagggtgggagaacttctaatcgcctgttttatctttcaattcctcctaatatattcatagatgctgttaaatgtgcaa

SEQ ID NO: 43846 - DNA, 279 bp, Glycine max
  Clone ID: 701043617H1
attcggctcgagacccgttaaggcggatctatcgtcgaacaaggtgactgttaccggtaaaatggacgccgagaagctgcgagataagattgccgagagaacaaagaagaaggttgatatcatatcagctccgccggaaaaagaagccgccgttgcggaaaaaccgccggagaagaaggcagaagacaagaagcctgaggagaaaaaaccagaagaaaaacctaaagagagtacggtggttttgaagatcaaactacactgtgacggttgcattgcgaa

SEQ ID NO: 43847 - DNA, 262 bp, Glycine max
  Clone ID: 701043618H1
cagaaaggtatgagaacattatggacctgaccttggagatattgggttgggttgagtcactggaagatgcgctgactcagtttacttcccctgaagatttggatggagagaatatgtacagatgtggaaggtgcacatcatatgttcgagctagaaagcaactgagcatacatgaggctcctaacatcttgactatagttctgaagagatttcaggaaggaagatatgggaaacttaacaagtgcataacttttcctgaaat

SEQ ID NO: 43848 - DNA, 264 bp, Glycine max
  Clone ID: 701043619H1
ggaggatatttacggtgtggaattgatggattgacattaatagatcaaacggtttatagtttccttacctgtgcaaaaagttgatttctcttgccgtgatggagcattataaatgacattctacatgtccatgttgacaacaaaataataaaatgagaatacgttttggacatgaagaagagattcaaattggttgcgcttttaattagattttagcatgagaatgttgtgtagcactgtaatgttatatttccatgagtatgt

SEQ ID NO: 43849 - DNA, 263 bp, Glycine max
  Clone ID: 701043620H1
ctgtctctgtgtttgcggctgaggattccgaacgagcgaccttcttcgtttctcgcaaagtttaagtcctcatgggtaaggaaaagactcacatcaacattgtcgtcattggacatgtcgactctgggaagtcaactaccactggtcatttgatctacaagcttggaggtattgacaagcgtgtgattgagaggttcgagaaggaggctgctgagatgaacaagaggtcattcaagtatgcctgggtgcttgacaagctcaag

SEQ ID NO: 43850 - DNA, 260 bp, Glycine max
  Clone ID: 701043622H1
cagagaaacatttcactaatagagagacataagcataatattgagaaataatggagggttgtacttattgtgtgaagttgctatgccttgttgggtttgtggtgcttgtgagtactattgcaggggtggagagtgctggtgaatgtgggaaatctaccaccccagataatgaggcttataagcttgcaccatgtgcctcagcagcacaagatgagaatgctagtgtttctcagagttgctgtgctcaggtgaagaaaatt

SEQ ID NO: 43851 - DNA, 263 bp, Glycine max
  Clone ID: 701043623H1
cacagacccctctcatggcatcttcttctggtagtttagacacctctgcaagtgcaaactccttcaccaacttcaccttctccacacaccctttcatgcccacttctttctctgacctccttgcttctcccttggacaacaacaagccaccacagggtggtttgtctgagagaactggctctggtgttcccaaattcaagtccacaccaccaccttctctgcctctctctccccctcccatttctccttcttcttactttgct

SEQ ID NO: 43852 - DNA, 260 bp, Glycine max
  Clone ID: 701043624H1
gatcaagtcatttagagtgccagagctttttatagaggttccagaaactgcaacaattgggtccttgaagaggacagtgatggatgcagtgactgctgtgcttggaggtgaattgcacattggtgtttttctccagggaaaacaagttaaggatgacagtaaaactctacttcaaactggaatttctcatcataacgagttggatgctttgggtttcaccctggagcctaattcttcacaaagcctaccgattgtatgtg

SEQ ID NO: 43853 - DNA, 262 bp, Glycine max
  Clone ID: 701043625H1
attttcctgcaactgatgactagttcggtcataatttacgtacaagtagaatagcccacagttgtttatggaaaatcgaaattaaaacctccaattttattgtattttcacgttgggttctcgtactcataaaatgtttgtttttacatatcgtaggcaatgaatgcatgtatttgacaattgacgggatcattttacaacactataagttggcctgtatgtcgttaagttgttgctgttatctacatattcatgtaatgaa

SEQ ID NO: 43854 - DNA, 257 bp, Glycine max
  Clone ID: 701043627H1
ccaaaactgaacccaccctcttcgtccggttcacagttcactagcgttcgattcgtttctctccctctgtctctctaatgggttcactcgaggccccaaccgccgcggaaaacggttccgctcccgccgccggcaacggaaaatccccctccgtcaacggcgcggaggcggcgctggagcccgacgcatcgaagcggcggagatcgtcggtgctcccactggaggtgggcacgcgcgtcatgtgccggtagcaggac

SEQ ID NO: 43855 - DNA, 261 bp, Glycine max
  Clone ID: 701043628H1
ggtgtttgttgatcaactaccgggactaaacacgccgggcataggcttgcctcccatagatttcgcaccaaacgccctgcacgctccccacactcaccctcggtgcactgagatccttatagtccttgagggtactctctatgttggatttgtgacttccaatcaagatggaaatcgcctcttcaccaaagtcctgaacaagggtgacgtgtttgtgttcccaattggtctcattcatttccaactcaatgtgggatatgg

SEQ ID NO: 43856 - DNA, 263 bp, Glycine max
  Clone ID: 701043629H1
tccacctcgagcgaatcggctcaggtcgagaccgccaacgccgccacacgacaccttcaaggcatacggcgtcgacatgaaaccaccccaccaacacgttctccaactacgccggcggcgcaacggcgccgtcgagagattctccagctaccgcgataaggccaacgtcggagccgactccttcacctcgtacgccaagtccgccaacgccgccgacatcggattctccaactacggcaagtccttcaacgagggaaccgaca

SEQ ID NO: 43857 - DNA, 257 bp, Glycine max
  Clone ID: 701043630H1
ctcgagcgctggtaatatacctctcatctctcattagaagtgtaattgcactccacaacttgattaacaacaagatgcttaacaaggaacatgagcgggcagaagattcgaaatcagttacggtgccaggtgcagctgcttaagttttgaggggttgtgatgttcggagctctaaatgtcatttgagtacatggatttgagattgttacaccttttcctatttctgctagggttagagtacttacacctaacatggc

SEQ ID NO: 43858 - DNA, 262 bp, Glycine max
  Clone ID: 701043631H1
gttttgttttttcactctttggccatttttcctattcattcttttgagtcccgaccaaaaccctaatcgagttcgattgcaaaacatctcagtttttgaattccaccttctccgaccaatggctgccaaacctcttactaccgaggcgattgcgcttacggaaaagaagatggccatgacactagatgacataatcaaaatgtctaacaacccgaagattaagaagcaaagaagggttccgaacaaaagttccaaattttca

SEQ ID NO: 43859 - DNA, 262 bp, Glycine max
  Clone ID: 701043632H1
caatcttcgtgattttagggatactctcgctgcatattccagactgctctcttctgctttggttttttcgttgtttcgtgttcgagttttcgtgcatttggcttgaacttgtgctgatctattctgtttcttcgtcatggcaaccggacaactattctcgcgtactacacaggccttgttttacaactacaagcacattcccatccagcggatgcttgattttgacttcctttgcggcagggaaacaccatcagttgctgga

SEQ ID NO: 43860 - DNA, 273 bp, Glycine max
  Clone ID: 701043633H1
gtaaaatcttctgccccaccctgcatttcagcagagtgattctgttcactacaatgccatcatcactatcctctttcctccatatggttcctattctctcccttcttgtactctcatgtgtgatttgttctagtagtgctcagggaccaccttcacctggctactaccccagttccaaaattagtcctgttagtttttatcaagggtttagaaacctatggggacctcagcatcagaggctagaccaaggctcattgacaatctggcttgact

SEQ ID NO: 43861 - DNA, 262 bp, Glycine max
  Clone ID: 701043635H1
gccgtatcataaatgtcattggagagcctattgatgacaagggagaaatcaataccgagcattatttgcccattcatagagaagctcccgcttttgttgagcaagaaaccgcacagcagattcttgttactggaatcaaggttgttgacctgcttgcaccatatcaaagaggaggaaagattgggttgtttggtggtgctggtgtaggaaaaactgtgcttattatggaacttattaacaatgttgcaaaagctcatggtgg

SEQ ID NO: 43862 - DNA, 263 bp, Glycine max
  Clone ID: 701043636H1
tttttctttaagatggcgatgacgccaacgacggagtccgatctcgattacgagcttcgctatctcagtctcgccctaaccgataccttcactgctttccaaaacctcttaccggatgcgatgacttccttttcagcttgtggactaatagaccctctttgttctcaaaacctcactcccaagcattccaccatcactgcaaccattgattctcagtcatcgatttgcgccactagtaatgttgggagcccagtctcagctaa

SEQ ID NO: 43863 - DNA, 253 bp, Glycine max
  Clone ID: 701043637H1
attctcttctgcgttcttcccaccaacatcgaaaccatgtccaccgacttgcacctccacaacgacctgccccagctccgaatcgcctccgccgccgccgccgatgccgtcgtcaaaaccgacgacctcccctccgacgatgacgaccgcaacgccgtctcttccgtcatcactcaaaccgagaccgaaactgacggagccaccatcgtcgacgtcgccgtcgccgtcgccgtcaacgtcaacgtcaacgtca

SEQ ID NO: 43864 - DNA, 259 bp, Glycine max
  Clone ID: 701043640H1
tagagagagagcagaaggcttttttcttctttttttttccttttttgttggtttctcttgtacttttttgtaggtactgaggaagaaagaccaagactttatccgtgtgcttcacttagctcaagagcgtacaattcaggcaaaggccttgaagtcggagtgtgttaaggtttcttaggagttgctgctgtcttgactgaagaaatggaggtatatggcaaatctatggttgcaggtcctgcaaatgtcatttttctgt

SEQ ID NO: 43865 - DNA, 262 bp, Glycine max
  Clone ID: 701043611H1
ctgcagggcttttcctaacacttatggacaccctttggctcactttctcagggccactgccaaagtccctgatgctcagatcataactgagttccctcctattagggtggggattgtcttttgtgggagacaatctcctggagggcataatgtcatttggggtatccacaatgctctcaaaattcacaatcccaacagtgttttgcttggacttcttggtggttcagaaggtctatttgcccagaaaactctggagataact

SEQ ID NO: 43866 - DNA, 247 bp, Glycine max
  Clone ID: 701043574H1
gaaggtgtcttgatagagtagctatagtatccgattatgagagtaaaagtggtgactattctaatccatggagactttgcaccgtgacccaggtggaggaattgaaaatcttgatctgcgtgtttccaatttgggccaccaggatcatttttgctgcagtctatgcccagatgtcaacattgtttatggagcaaggaacaatgatgaacacatgcattggttccttctaactacccctctcaacttt

SEQ ID NO: 43867 - DNA, 240 bp, Glycine max
  Clone ID: 701043575H1
ctttttcttcccatttcacccctcgtctttccttgtttccactgagggccaaccactacatatgttaaactaggaacaacctcctaaacataacatcctacgccaaacaaaactttgacctccttcagatctatacccttctctctctctctctctctcttctattttcatatttctacatcatgggcacggaggttctacggccacaagattgtttcacccaacgcatcggtgttccac

SEQ ID NO: 43868 - DNA, 248 bp, Glycine max
  Clone ID: 701043576H1
caattcccaattgaaattcccccaaagccaccttttttttattcaataaatcaacacccaattttcaaaattccaacttgtaaattgtaatcaattttctttccatttgtcaaaccataccaatcaaccaacctcgttgcttcttgtgatcactctttgaaccaccctcatggatattgatgagtgggagtttctctctgatgatggctaccttgatttcaatgaagagggtgggaagcaaaagcaaa

SEQ ID NO: 43869 - DNA, 243 bp, Glycine max
  Clone ID: 701043578H1
atacaatcagaataacggccatccccatatttgctataccactacagtgtttttggggtcagccgctatgcttttcaataatgttatacagatgttgatgcaactttagttaaaatgtaggtcaggtgttgaacattagttatggtatagaaaactggaatggaagaacatatttttcttgattcaataggatgatacgccgaaaaatatacagcatgatattgggagcaaaaaaggacacag

SEQ ID NO: 43870 - DNA, 239 bp, Glycine max
  unsure (1)..(239): unsure at all n locations
  Clone ID: 701043579H1
gcgtttggccttcaggttttgactnccgaagagnagaagaagagattcctgacagcgtaatcatgtgtggtgtcgtaaggcgaagggttgcttctggcagcccgtctccttggttgctaggtcagtcagctcagaaaatccggtctggcccatcagtttctgctagagcttcttccattgtggaaaaagagattgtatttcgttcaggcggatgtggatttgtccagaacttcagtcat

SEQ ID NO: 43871 - DNA, 251 bp, Glycine max
  Clone ID: 701043580H1
gaaaccttaaaaaacaagtagtgttccgaaaagatggctcagcaggaagtggtagaagggttcaagttcgaacagaggcacgggaaagagcgcgtgagagtggcgcgcgtgtggaagacgaggcaggggcagcacttcgttgtggagtggcgcgtgggcatcactctcttctcagactgcgtcaactcgtatctccgcgatgacaactctgacatcgttgctactgataccatgaaaaacacagtgtatgc

SEQ ID NO: 43872 - DNA, 243 bp, Glycine max
  Clone ID: 701043582H1
ctaatctccatctaatagtgttaatttgtctttctctatctctatcggtcatgggtgcttttgcttttgatgaggaaaactcctccaccgtggctccggcaacactctacaaagctctgacaaaagatgctgacactatcatcccaaagattattggggccatccaaactattgaaatcgttgaaggaaatggaggacccggaaccgtcaagaagataacagctagtgaaggtgaccaaacca

SEQ ID NO: 43873 - DNA, 244 bp, Glycine max
  Clone ID: 701043583H1
ggcagttctagagagagaaagagaaagatcatcagtgagagattcttcattcttcttctcattctctattctaaattcttatctaagctaacgatgatgatgaattagaaattcgtggtttccctaaaccaaactcgattcaccctctcattttctgaatttcaatggccgatcactcagattcttctcctctcgttcctccccttcccctcaccgacccttctgagatcgacctcgaagctgg

SEQ ID NO: 43874 - DNA, 245 bp, Glycine max
  Clone ID: 701043584H1
gctacatgtcaaaaacagggagaagcttctcacatcccttcgtcaacacctctccgactcttctcgttctctccatggcttcgtcctccttcaaggtggcgaggagcaaacgcgttacgacaccgatcacttggagctcttcaggcaagagagttacttcgcttacttgtctggagtcatagagcctggattctatgcagctattgacgttgcaactgggaattctatcctatttgctcctaggt

SEQ ID NO: 43875 - DNA, 248 bp, Glycine max
  Clone ID: 701043585H1
tgaaacgccagagctccatcaccggaacaagacccaggcaggtgtcgcagtacgcggagaaaggacgctatataaatatatttgtccccgatgctctctatttcagccactcgtatattcttcctccgctcaacaactataagattatcttcttcttcttcttctcttcaattcttctccaatcccaaccgcaccctcttccgtccctttcttcacacttccttcaaaccacttccttcgtctttctc

SEQ ID NO: 43876 - DNA, 247 bp, Glycine max
  Clone ID: 701043586H1
cacaaagctctccaccatttctctctctctctctcttctggtttttttattctgaatcagaaacaatccctcttcccttgaattattttcatggcttatcatccaccgccgttctacttgtttctctcatcctccttctctcccaattccttccacatcttacttttccgtcacattcgcattcaatcctgtaacactttctgacgcttagcaggtaccaccaaactcaacagcgtaggagccgtta

SEQ ID NO: 43877 - DNA, 91 bp, Glycine max
  Clone ID: 701043587H1
ctcaactccatcctcctccttttttcctttactttcttctggtattccccttagtgcgattctacctccaccttctccctaaagacccatc

SEQ ID NO: 43878 - DNA, 243 bp, Glycine max
  Clone ID: 701043589H1
gaaacatgtctgcttcaagcttacaccataacctgtctccatggtgcttctctccagtccttactatattcttctctctgcgcttcttttcaggcaatttccatcttccatgatccaaggaaggtttcatctatctttcttgcaaaataaacatttgtttgaatttccattgttcagctcaaacctctgttgttttttctcttttgtttggtgggtacccactgaacatggcaactgaagctg

SEQ ID NO: 43879 - DNA, 247 bp, Glycine max
  Clone ID: 701043590H1
gtcaccgattgatacacccttcttcgttcctcactcaccagccacagattctctcttctctattcagtaaacggctgttttgtatacgagctgtcccggtctcagcctctacatcccaaaacatcaaaacaactggttgggctccttgtatggcttcttcctcagttggtagaagagctacatattcaacacaatctgtatcgacaaatgagccagttgtatctgtagattggctttatgataacct

SEQ ID NO: 43880 - DNA, 246 bp, Glycine max
  Clone ID: 701043592H1
gctagcaatcatgtcttctcgcttagatgagtgcttgttggaggtggatgggtacggtgatggcgatggaaaggcgaaacccaaattcctgataaggaatctcagcagagtttcggaggatggggttcccatcctcaaaggcataaatcttgagatcccagagggtgtgatcgtgggagtgataggccccagtggtagcggcaagtcaacgttcttgagggcccttaaccgcctctgggagccacc

SEQ ID NO: 43881 - DNA, 248 bp, Glycine max
  Clone ID: 701043593H1
gtgcaaggcatcaccatttatgctcctgtcacatctccaaacactgatggcatcaacccagattcttgcacaaatgtaagaattgaagattgctatatagtttctggggatgactgtgtggcggttaagagtggatgggatgagtatggcataaaatttgggtggcccaccaaacagctagtgataagaaggctaacatgcatctcaccatacagtgcaaccattgccttgggaagtgagatgtcagg

SEQ ID NO: 43882 - DNA, 247 bp, Glycine max
  Clone ID: 701043594H1
gttatcttctcatatagtgcagagttagtgttgtagaagcaacctgtgtcttggtattttttttattcatagatacttataaaaagggaagcaactgagataaatttcctgaatctgtttctcattgagaagatggtggtaatgcagcattttgttgagatgggttcaggtgaaaagtctgcaagattttgttgtatgtcaaatgttatttgtattattataagaatatattgggggtgtttagttg

SEQ ID NO: 43883 - DNA, 250 bp, Glycine max
  Clone ID: 701043596H1
gtaattttggtcattgattaattctgcaattgagcagaggagccatggccaaaatcgcacttggaagcacccgagaggccactcagccagactgcattcaggccctcatcgttgaattcatagccaccttcctctttgtctttgttggcgttggttcttccatggtcgttgacaagcttggtggggatgcactagtgggattgtttgctgtggccgtggcacatgcacttgtggtggctgtaatgatctc

SEQ ID NO: 43884 - DNA, 259 bp, Glycine max
  Clone ID: 701043601H1
gcttggtcccccgatcccctcgcacttcaaaccccaacgctatgaaaactaagcgcgccgttgacgccggaggacttacccccgccgacgaaccttccttcaagcggaccaacttctccggcgagaaaactacggccgaagctgaggaggagcaagccttcgatcccgagcctcacggcggcgattccaccggtctcaaactcctcggtctgctcctccaatgcgcggagtccgtcgccatggacaacctcgacttcgc

SEQ ID NO: 43885 - DNA, 261 bp, Glycine max
  Clone ID: 701043602H1
attttaaggacaactttttttaatgccaccaatattgttggctgaatgatatatttatgctcaatctggaagaaatgaagagaaataaaaatatcttcttcatgatagaaaaataggaggtacaagcagctgaatggatgaaattatgcttaatgttagccactattttctttctggaacttaccacaatcgtgagcttgcatgagagttgtaagaagaacttgtggaatacagaggatgtgaagagggtcataagtattt

SEQ ID NO: 43886 - DNA, 263 bp, Glycine max
  Clone ID: 701043603H1
ctcgaaggagagacccactcttggtggcacgcggattaagacccgcaaacggaatattgctgcgccgctggaccctgcagcattctcggatgcagtggtccagatttatttggataatgctggtgatctggaacttattgctaagagcattgaatcttcagaccttaacttttcaagatacggcgataccttttttgaggttgttttcactgggggtcgtacacaacctggaactaccaagcctgatgagggggaccgccatc

SEQ ID NO: 43887 - DNA, 257 bp, Glycine max
  Clone ID: 701043606H1
caacatctcaatgggttcttcttctattacaacatcgcccgcaaccatgaccatggctgcgatcgtgctcctgttcacggtctttgccgtttcctccgccctagacatgtcgataatctcgtacgacagcgcccacgcggacaaggccgccactctgcgcaccgaggaggagctgatgtccatgtacgagcagtggctcgtgaagcacgggaaggtgtacaacgcgctcggcgagaaggagaagcgttccagatctt

SEQ ID NO: 43888 - DNA, 260 bp, Glycine max
  Clone ID: 701043607H1
gggacttgacgaggtatgaggaactggacaaagagactcaagatcagatgaacgaggagctctctggatggaaacttgttgtgggtgatgtgtttagggagcctgattgctcgaagcttctctgtgtgatggttggagatggggttcaaattcttggaatggctggtgttactattgtttttgcagcacttggattcatgtcacctgcatcccgaggaatgctactaacagggatgatcattttatatcttatcctggga

SEQ ID NO: 43889 - DNA, 246 bp, Glycine max
  Clone ID: 701043573H1
ctctttctctctcttacatgccggaatttcctctctctttctctctccggagaatagaataaaaaccctaaaccttcgctttgctgccacacacatcagatccccactacaacttccaagttcaggaattatgtgtcactagcgatgtccgattccgttcccaaaacgcgaaaccgtccggggccgtggccgccgggctcggacgccaaggcaatgccgcctgcttcctgggctaagaaaacaggc

SEQ ID NO: 43890 - DNA, 263 bp, Glycine max
  Clone ID: 701043608H1
cgtttatggaactcctagctattgggtgcagaaactttttattgaatccagtggagcaacatttattgactcgacactcagtacaacttcatctaataaacttgctgcatctgtaattatttggcaagattcttcagataagaaaaattacctaagaataaaggcagtaaactttggagcagccgctgagagtcttgacattgatttaagtgggttggactcaaatgtgcaacaatatggttctacaataacagtgcttacat

SEQ ID NO: 43891 - DNA, 59 bp, Glycine max
  Clone ID: 701043609H1
cggcgacatgcaactcatctctgaagcctacgatgttttgaagcacgtcggtggcttgt

SEQ ID NO: 43892 - DNA, 263 bp, Glycine max
  Clone ID: 701043610H1
gaattcggagttccgtgaggctcctgagaaggatcagatccacgcggcgacgcttttgagcttgggaggccatcgaatcgattcggcgcggaacaaggatgatgtggcggaggcgctgtcgaggcagtactgggaatataatgtgcttgactatgaggagaaagtggtagatggttttcatgatgtatatgggccctataatgattcagtaatgcaaggcaagatgccatctcgaacagatcttgaagcaaaccctggaggtt

SEQ ID NO: 43893 - DNA, 249 bp, Glycine max
  Clone ID: 701043540H1
tatctttctctcttctctctccccgcccaaaccctaactccctaccctattccgctttctctcatccatcatgaaaggaggaaagtccaagaccgaatctaagagagccgatgccaaacttgctgtgaataagaagggcgccgccaccaagactaggaaacccgccggaaaggggaaggcagcgaaagatcctaacaagccaaagaggcctccaagtgctttcttcgttttcatggaggaattcaggaa

SEQ ID NO: 43894 - DNA, 251 bp, Glycine max
  Clone ID: 701043542H1
gcaaaaagaaagaatcccaggcgaggagaaagatggaggggaaggagcaggatgtgtcgttgggagcgaacaagttccccgagagacagccaattgggacggcggcgcagagccaagacgacggcaaggactaccaggagccggcgccggcgccgctggttgacccgacggagtttacgtcatggtcgttttacagagcagggatagcagagtttgtggccacttttctgtttctctacatcactgtctta

SEQ ID NO: 43895 - DNA, 248 bp, Glycine max
  Clone ID: 701043543H1
tggcaaatgagtgtattcttctgttcttaaaaacaagggtctatgtggacaattaacagtgagcagagaggatccacaaatttgtctggacatagtggtttctgatttacaattgcctatttgttcgttcttgccagctcaaatactactgtactaattactaggaagattatagacaaaaagcatcaaattgtttgtgattgtaatttgcaattttaactagaaaaagtatttagatctagattgtg

SEQ ID NO: 43896 - DNA, 252 bp, Glycine max
  Clone ID: 701043544H1
ctttttcgcttttgtctttctttgtcctttgattgctgccataaattaattaattaatattgtccctccctctctcctcacatcaagaagaagttagaagtccatgccgtgtcagcttgtgaagaagaaatgtgagaaggatctgggtttacacctgacctgactgttctggcagtggagtgcaacagctactatctaatctaatggggtccgagcaaaatcgatttcctctgcacgaaaggcgaaagagat

SEQ ID NO: 43897 - DNA, 252 bp, Glycine max
  Clone ID: 701043546H1
gcaattttgcctcattgagtgaatactacttacttatatacacattcattcttcaacaaacattttagtttattttttctctctttgatcaaattcccttcccatggtctctctctcttcaattaattccatttagctttccccaaatcccaaaccctttttcgcttagatcccaatccaattgggttatggacatggcttccagtccccgcaccgtagaagagatcttcaaggattacagcgccagaagaa

SEQ ID NO: 43898 - DNA, 251 bp, Glycine max
  Clone ID: 701043547H1
ggcaataaaacagcaaaagtttcaattttgtttctgttgaattttctcgggttggtttgcagtagcaatggcggagacatagtggtttactggggacaagacgagagcgagggcacattgagcgaaacatgcaactctggactatacaaaatagtgaacataggctttctggcaaaatttggcggtgggcgggaaccagaaataaacctagcaggacactgcgaccctgcatcaaacggttgcaaaagttt

SEQ ID NO: 43899 - DNA, 252 bp, Glycine max
  Clone ID: 701043548H1
gtctaaacagtcaaaaaacataatacttgttagatgaaggtaagtacgtgttaatccttcttcatcttcaacaaagtctcttctcgatctcgcgagcatggctttgcggcttttggtatcgcaggttgcaagacgacagattaaaagtgtgtttgtcacaagctatttttctgtcaataagtttggagatcgtgcagggaataggcttttgggtgcccaagagagatttcagtctagctaccttagtagcat

SEQ ID NO: 43900 - DNA, 241 bp, Glycine max
  Clone ID: 701043551H1
ccagaatgcaagtttcaagaggccacaattaaccaagacagaaatgacaaaggcttgtaacatgactaaggatctaaagaggattcttagtgagaatttccatgatgatgatgaaggagcagagcctcagactgtattatataagaacctgtggcttgaggctgaagctgcactttgttccgtctattacaaggctcgctataatcaaataaagattgaaatggataaacattcataccag

SEQ ID NO: 43901 - DNA, 249 bp, Glycine max
  Clone ID: 701043553H1
caaattctgatgttatggatttatatatttataataataataattttaaagtaaatagacatgaaggctattaatcttctcaagctgattaccccttcctcctataaaattatgatcttatgttcaaatcaattgcaataagtgtcatggggagttggagacagttgaagctaatgttgattttggttgactttgtctgagaaaccaaagaaaatgataatcaagggactaattgtgaggacctttcat

SEQ ID NO: 43902 - DNA, 248 bp, Glycine max
  Clone ID: 701043554H1
ctaactagaattttccttctctctttcataacctagtgagactctgtgtcagagtttgtgaagtgaatcccataatcatgaagaaaggaaacttgggacttggtctcaaactctcagttcctgtgtctgatcaatctaattttgccaggttcctgactgaaagtgggacttttaaggatggggatctgcttgtcaacagggatggagttcgaattgtctctcagaatgatgtcgaagctccacctcca

SEQ ID NO: 43903 - DNA, 249 bp, Glycine max
  Clone ID: 701043555H1
caacaaagaatcacatcgcaacgaatcagaggcccctttcaacgaatcacatggcagaaccgtcgtccaccgccgccaccatcgctaccgctgatcctccggttccagcgaccaaaagctgggccgacgaagcggacgaagaaaccaacgcctccaccgccgaggcagaaacctcctccgttaacctggaagcgttaaccatcgacgacaaagaaaagaactcttcaaaactcttggacgaccccgacg

SEQ ID NO: 43904 - DNA, 231 bp, Glycine max
  Clone ID: 701043556H1
caagattctaagagagattttgctgctctttgaagaagggtgtttgcttgattttggtgatgtcgctgctctcagatctcatcaaccttaacctctcagacactactgagaaggtgatcgcagagtacatatggatcggtggatcaggaatggacctgaggagcaaagcaaggactctcccaggaccagttagcgacccttcaaagcttcccaagtggaactatgatggtt

SEQ ID NO: 43905 - DNA, 247 bp, Glycine max
  Clone ID: 701043557H1
ggagagagagagagaggttttgacgcaacacactttcactgagaaaggatctctatctaccaaggagcagaataaaacccttctctctggtaagtgaataagagaatggcttcagatcggaaacttcacactttcgaggaggtggcaaagcacgaccagaccaaggattgctggctcatcatttctggcaaggtgtatgatgtcacccctttcatggaggatcatcccggaggtgatgaggttttgt

SEQ ID NO: 43906 - DNA, 246 bp, Glycine max
  Clone ID: 701043558H1
gggtagcattcttgcgcactcagttattctctctctctctctagagcgtcgtcgtttagttagggcagaaaaccccttttcggatcggtggagcgaacctcgccggcgagacccccgaggctgttcaatcggcgatcgagcaacggcgaaaagcgacgaagatgaaggttttcgtgaagactctcaagggcacgcacttcgaaattgaagtgaacccttcggacacgctttctgaagtgaagaaaa

SEQ ID NO: 43907 - DNA, 248 bp, Glycine max
  Clone ID: 701043559H1
gcggcgggagcgctcgatctcgtgacggtgcttgacgttaataacagcatgagcggcgcacagtttcacatgctaaagcgcgccatgcgtttggttatatcgtcactcggcccggctgaccggctcgccgtcgtggcttcctcggctaataccaaacggttgttacctctgaggagaatgacggctcagggacaacgcgcggcgcggcgcgtcgtggatcggctcgtgtgtgaccatggaaacagcgt

SEQ ID NO: 43908 - DNA, 251 bp, Glycine max
  Clone ID: 701043560H1
atagcctcaataatctgagagagaaacaaaaacaatgaaggtttccattgccaagttccactcccttcccctatgttttttccttctcttggccttcaacacaaaacccctcctagcagcagaaccagagccagtggttgataagcaagggaaccctttggagccaggagtagggtactacgtgtggccactttgggctgatgaaggaggcctcacactaggccaaacaaggaacaagacatgccctcttt

SEQ ID NO: 43909 - DNA, 209 bp, Glycine max
  Clone ID: 701043562H1
aaaattttcaacaaaaacatcatcccagtaaggaacctctcttccctttccaagttatcattttttcaacccatccccatcttcctccccctttttcatttcctccaatcccaaacaaaacccccaaaaaatgcaatcattcccccccatccccactctcgcatgcctttaccttactttctttacgtcactactattcctactacctt

SEQ ID NO: 43910 - DNA, 243 bp, Glycine max
  Clone ID: 701043563H1
cttccactcacaaaatccatgccttcccaaacgtaacaccagagttaaaaacaactctgcaattaaacttcacatcttatgatctccccaaggcaagaccctctgttgccccacacccacttctctaccatgttcaagctcctcaacaagaactcgcgccgcctcctccgccgtctccggtggccaattcgccgccgctcaaagcccaaagtagtagtgatcaacaagctcggaaagaacgcc

SEQ ID NO: 43911 - DNA, 186 bp, Glycine max
  Clone ID: 701043564H1
ttattattggcatttgctttggccctttggtcaggaacttagttttatgctgttcatattctatagcattgtttgtaattctaaatgaagatatggcgagaaacattgtatttaagaaatcttcctatgcatcaatatgaaaaaagtaatttgtatctaaaaaaaaaaaaaaaaaaagaaaagaaa

SEQ ID NO: 43912 - DNA, 249 bp, Glycine max
  Clone ID: 701043565H1
ctttactctctctgctaaaatgcaaggaggatttcaatcatttttgtcacacgggaatgtcattagaaatgctgttctacaacgggtgcgcatggtgaaccccctgttacagccaattgtctcttcgcggtttgaatctgttacacctgctcgcattgaggagcatggttttgagagcaccacaatttcagacatcttgaatgataaaggcaagggtgctgatggctcctggctttggtgcaccacaga

SEQ ID NO: 43913 - DNA, 243 bp, Glycine max
  Clone ID: 701043567H1
ggcaatcccatgattcaatgacagaaatgcactctgaaggaatgacttttactaacagacctgggcatacaagcagtaatgtgccatttcaagggtgggatgaccataatcaggatgctactcaccattcaaatataatgtcaataaactcactgactccagtcaatggggctgctgttcaagctggccatgcagcaacgaactcggtcttacacagaaacttggattttaattattgtgatc

SEQ ID NO: 43914 - DNA, 247 bp, Glycine max
  Clone ID: 701043568H1
ctcgaccggacaaaattgccctccatcactttccttgttagagttggtttctgcaacctaccatgcaattcctcacctgaatccgttttctattgccacgttgtggaagcgtaacgaagatgaatggcattgggaaactcaaatcgtcgagttctgaattggaccttcacattgaagattacctaccttctggatccagtgttcaacaagaacggcatggcaagctccgactgtgtgatttgctaga

SEQ ID NO: 43915 - DNA, 247 bp, Glycine max
  Clone ID: 701043569H1
tgttactaccctaacaagtttgacaaaccccaaaaaagaatcaaactttccctcaaattttcactcttttctgcaccgccagtgatgggagatgggtgcgcggttgagggcaccacggggaattccaattctaataacaataataacaataagaagaagaacaagaagaagaagaacaggggtgggagcaagaagaagatgacccacgaacaggtcttggccttcaagttagtgagtgagtgggttt

SEQ ID NO: 43916 - DNA, 248 bp, Glycine max
  Clone ID: 701043538H1
tcgctactgcgatgcgcttcagcacaatgggtgcctacaagtatgtttcggagctatggcgcaagaagcagtctgatgttatgagattcttgcagcgggtgaggtgctgggagtatcgccagcaaccttctattgtccgtttgacaaggtctactcgcccagataaggctcgtcgcttgggtttcaaggctaagcagggttacgtgatttaccgtgttcgcgtacgaaggggtggccgtaagagacca

SEQ ID NO: 43917 - DNA, 246 bp, Glycine max
  Clone ID: 701043571H1
gatttgccccctacttttttcccctctttctatttttcgttttttttaggtcttttgaagcagaagaatggacttctttactagagacataaatgaggactctatgcttagatgtccattcttgaggaacatcaatgagcctactaacttctcattcttttcacctttggctttaccaatgcctgttcgtggagctaaaggtccaatttttgaagatggtcccaattttgatttggcatttaggct

SEQ ID NO: 43918 - DNA, 246 bp, Glycine max
  Clone ID: 701043572H1
tgaagatgggaattttgagcactatagcaagcttttttggatttggaatgggaacttcaattgggctagtcattggatactatttgttcatatacttccagtcaacagatgttacggatccagtaattcaacctttgattgagcaagatgctaaaacattacaactgttgcttccagagatacccacttggattaaaaacccagactatgaccgtcttgactggcttaataaatttatcgagtata

SEQ ID NO: 43919 - DNA, 251 bp, Glycine max
  Clone ID: 701043508H1
actctttctgcttcttccaccaaagtggcatcagaaaaccaaaaatggggtgtggcaatttattcttcacaattctgataactttctcagtggcactcataacatacaatatcataatctcagccaatgcccctctcaagcaggacttcccggggccctcacgcccttccatcaaggtggatcctctcatcaagatgccactgcacagaaaatcatcatcctcggaggaatcgaagaagaggttgttgttc

SEQ ID NO: 43920 - DNA, 253 bp, Glycine max
  Clone ID: 701043509H1
ctcttctgtttcttcgaaccaaaaccctaattccctcaatctcatttttcaacctcgaaaaacctatctctctctccgctctaagttcccaacggttatcaccattcaactgctcgatccacaggggcatatttgctactgaagagatgtctcctgcttccaaatctaagtccaaagacaaaaaggccgtcaaggaagctcaaaagtcttctgccaagtcttcaggatctggtaatgctgtggctggtgtacc

SEQ ID NO: 43921 - DNA, 249 bp, Glycine max
  Clone ID: 701043510H1
ctcacggaataatattccctacaattagcagaaaaaatggttcagcaagatatccgaagggtccctggacagaacaggaggactacaaattggtgtattttgttggcatgttcggagatcgtagatgggactttatagcaaaggtatcaggtttgaaggtggagggagactgtaaataaaataggtatgaatatttggacatgctaagttatactatgaagcaccctttaaccacctcacttttttgta

SEQ ID NO: 43922 - DNA, 253 bp, Glycine max
  Clone ID: 701043511H1
tctctctctctgacagctaaaatgcaaggaggaatgagatcatttttgtcacatgggaatgtcattagaaatgctgttctacaacgcgtgcgcatggtgaaccccctgctacagacaattgcctcttcgcggtttgaatctgttacgcctgctcgcattgaggagcatggttttcagagcaccacaatttcagacatcttgaatgataaaggcaagggtgctgatggctcctggctttggtgcaccacagatg

SEQ ID NO: 43923 - DNA, 256 bp, Glycine max
  Clone ID: 701043512H1
cgccattggaaggcacatagtctgggcaagtgtgaaggcagggaacccaacatttgtgttggtgaggaacacccctggctctaacaacagggtcaatctggtcaaagctgctaatcctgaaaccaaggaagagctcattgagagcttcaaaaattcaggagtaaatctaattcagggagatatgaatgatcatgagagtctggttaatgcaatcaagcaagttgatgtcgtaatctgcgcatttggtagactacta

SEQ ID NO: 43924 - DNA, 254 bp, Glycine max
  Clone ID: 701043513H1
ctgcacaacaattcgagattccaaccatcgatctcaattttcaaccttaacctctaagaatgtcttacgcttatctcttcaaatacatcatcatcggtgacaccggagttggaaagtcttgtcttctacttcaattcacggacaagcgctttcagcccgtccatgacttgaccatcggtgttgaatttggtgccaggatgatcacaattgataacaagccaatcaagttgcaaatatgggatacggctggtcaa

SEQ ID NO: 43925 - DNA, 255 bp, Glycine max
  Clone ID: 701043514H1
ggaaattataacattaccactggatcggggcagtctgaaacagaatcctcttctaatgtgaatatcagcgcaatacttgaggaggaagaagcactaattgctgctcataggaaggaaattgaagacacaatggagattgttcgtgaagaaatgaaactactggcagaagtggaccagccgggaagtcttattgacaactacgtgacccagttgagtttcgtgctttctcgcaaagcagctagtctcgtcagtctc

SEQ ID NO: 43926 - DNA, 256 bp, Glycine max
  Clone ID: 701043515H1
ccttctcaaaccacaaagcaatttgtccaatttggatcacacactcagatacagccgtttagaaagaccttcgcatttcacttttctttctcttctcacacaagatagatatcattttctttcttctgctaccttcaaaacatcacaagaagcaacatccccctatacgagttaggtgagctcagttcaacacatcgtgtgaaaatcacataaagggagaaaattactattttgtaatttgtatgtgataaagtgc

SEQ ID NO: 43927 - DNA, 258 bp, Glycine max
  Clone ID: 701043516H1
cgcagaggaagaaggagaagaaggagatcttgagagatcaggtcgcaactcgtcatggggagagaagttacaggaatgcaagttgtggacaagaagccaaatggtgttataccagcttcaaatggtagttctaatgataaagtatgtttttctcctaaataggaagcagctaaggttcaggcaaaggatcacaaggtaaatgaatgtaccaaaactaactcttttgaggagaaaagccatgagaagatggtggtttga

SEQ ID NO: 43928 - DNA, 254 bp, Glycine max
  Clone ID: 701043517H1
cgtgcattcgtaaatagctaagaatcttgtctcctacgattcgttttgccccttttgttgccctaatttcaaccatgcctcgccgtagctccggtggaagatctgcccgtcctgctcctcgggcagctcctcgtcctgctccagttcaccatgctcctcctccagcccctgctcagagtggtggtggatctatgcttggtggcattggttcaaccatagctcaaggtatggcttttggcaccggaagtgcagtg

SEQ ID NO: 43929 - DNA, 248 bp, Glycine max
  Clone ID: 701043519H1
ggaagaagctcatgagggaggatgtctcccgagttctcggcattttaaaggtttcagctgcgattgggtttgatgctggggttttgtcttgtttggagtacttggaagcagcgccatgggcggaggatgaggaggagaaggtggcatcgctcctgtctgagcttcgtcttgaagcagttggagctggggaggttttgaagagggtttcgactggtgttgccaatggaaatgaagaggggagtgataac

SEQ ID NO: 43930 - DNA, 252 bp, Glycine max
  Clone ID: 701043521H1
cggctcgagcttttgcagctgatattggggataatagcctcagcaacaggcacagctgggggtgtagcatatttcgggtttgcaagggacacagacacgtggtgggttggaataaaatttgccatgtttacgacaagttctgtaggcatgttggtgcctccatagcagtggctttgtttggaagcgttgtgacagtcttgctcatttggctttcagcttacagcattcatagccgagtccccaagtagatgg

SEQ ID NO: 43931 - DNA, 251 bp, Glycine max
  Clone ID: 701043522H1
gagagagagagatctatctatctatcaagatggcgttgttggttgagaaaacaagcagtggaagggagtacaaggtgaaggacatgacgcaagccgatttcggaagattggaaatcgagctggcggaggttgaaatgcccggcctcatgtcctcccgcaccgagttcggcccctctcaacccttcaagggcgctaggatcaccggctccctccacatgaccatccaaaccgccgtcctcatcgagaccctc

SEQ ID NO: 43932 - DNA, 251 bp, Glycine max
  Clone ID: 701043523H1
cagaggaacactcccaaacaaaccatggacgtgggtcagatgcagagacagtggatcgactacaccaaatccctcttcctcgagggcttcctggatggtcagtttctgcaacttcagcagcttcaggatgagaacaaccctgactttgtggtcgaagttgtctctctcttctttgaagattctgaaaggcttctcaaagatctcacctttgccctgtcagtactattactatcataccactctcgttttcc

SEQ ID NO: 43933 - DNA, 250 bp, Glycine max
  Clone ID: 701043524H1
cgtgtttgagagaaaggttgagctatagcctaaagggagagacacataaatagtttctactttctattcatagatagatggctggcccaattatgagacctcagattgtgctatttggctcctccataattcaaatgagcttcgacaatggtggttggggtgctattctagctaacttgtacgctaggaaggcggacatcatcttaagaggatactctggttggaattcaaggcgggctttggaggtttt

SEQ ID NO: 43934 - DNA, 252 bp, Glycine max
  Clone ID: 701043525H1
gtaattttctgcgttgcttcgtggttaattcttcgtgttcttgtgatctttctgttggagtatttacaacactcctttgtaagtttaactaaagaggctaattaattcttcaattggaccgcagcagatggctgaggagggtcacagggttactctaaatgtttatgacttgagccaaggtcttgcacggcagctttcaatgtcctttttggggaaagctattgaaggcatatggcacacaggagttgttgt

SEQ ID NO: 43935 - DNA, 253 bp, Glycine max
  Clone ID: 701043526H1
ctttgttccttcctacttctctctctctctcgtcttcaccaatggcgtcgtcgtcaccaccaccttctctgttcttcctcctcctcctcgctctcttcgccgccacggcatcctgcctcacctgcaccacccaaaagctcaccgactccaacaaaaagctcttctccaactgcctggaccttccctcactcgattccttcctccactggacccacgaccccgccaacgcctccctctcggtggccttcgtggc

SEQ ID NO: 43936 - DNA, 254 bp, Glycine max
  Clone ID: 701043529H1
ccccaaaaagcacaagcctggtaaaacaccaaagacacccacagtacccgttgttaagccaccagtcacaatccctcccattgttaatccaccagtcacaatccctcccattgttaatccaccagtgacagttccacccgttgtgcttccaccaatagtgaagcccccgggttttctccctccaattcttaacccaccaagtacaccaacaccgtcgccggggaagggagggaacactccatgtccaccaccaa

SEQ ID NO: 43937 - DNA, 248 bp, Glycine max
  Clone ID: 701043530H1
gtttttgtggaggtgctttttaagtgcagtaatttggcttcctagaagtgaaaactcatgctttcatattgcaggatttggacgtgtttcatctagttggttacctaactggttcctaatgtccatgacaggagtttcttcttcagggctattcctgactttccattttggggattcaagagttatggaagaaacacctaatttttctccttttcttttggttaatcggtaatctattgtgtattata

SEQ ID NO: 43938 - DNA, 247 bp, Glycine max
  Clone ID: 701043532H1
gcttgtctgtcacgagactcatacattgtgctgccaattatagtaactctctatgtctctttccatctctcaagttctgaagaagaaacatgtgtggaggtgctatcatctcagacttcattggtgtgaagcgtggccgcaacctcgccgcgcaggaactatggtctgagcttgaccctttctctgacttccttggcttcgataccaccaattccaaaaaccaaccacccctgcagaaaattccaga

SEQ ID NO: 43939 - DNA, 250 bp, Glycine max
  Clone ID: 701043533H1
gtttgtttccactttgcaaatcagtgtgtacccaggaatctcttgattgagaaagtgtgttagggtaagagttgtgtcgtgtccacgagacactgggagaaagaaagtgtgtgtgagttgttgtaaactgaattttcatttttctttagccatgagcacacttgttcgcaacaccaccctcaccttcagccgcagaaacagatacgagcttcttggtttgcagggcaaagacaagatggtcaagtccatc

SEQ ID NO: 43940 - DNA, 246 bp, Glycine max
  Clone ID: 701043534H1
cgatcagatcctcttcagattcggatcaccgccgagtccatgagcacgccagcgatttcagggggcacgggcctcttctctggattcacgcgtttatgcaagggtcttgcggtagtgcttgtctgccgtcacattgcggttcagtttatcccttcagctgttaactatcttgctcttattcccgccaggacaatcccatttgcctggactctcattacagctggatatgtcgaacaatctcatata

SEQ ID NO: 43941 - DNA, 180 bp, Glycine max
  Clone ID: 701043535H1
aaaaattgtagctgatgttattcatgctagctcttcaaatcatattatatcctataatctgctaccttgaagataacaacaataaggatcatccttgttatatgttccatctgtttgcattatgtttcttaataaagaatacaaataaatcttgatgcaaaaaaaaaaaaaaaaaagaaa

SEQ ID NO: 43942 - DNA, 244 bp, Glycine max
  Clone ID: 701043536H1
cgtttatcacactccaacaacgcctttcgctcttaccaccctcgcgggtcattttcttgggaaaactcgttttcaccaagcaaatcgatttccctggaaacaaacagtcgcgaatctccgatgcgaatcgtttcactttaattcgatgatgatcgccactatatgccgccctgtgcgttccccgtgggaggaaccaatggatcgctgcttccgattttgtccatgcctcgccgatcctggtcga

SEQ ID NO: 43943 - DNA, 250 bp, Glycine max
  Clone ID: 701043537H1
caagagcgaaacgtcagagaagatggaaggagaagagggttctcagcagccacagttggtgctcgcggacaagctattccttctccggcaacccgatgtgcaagacattgacaaggttcgctacaaagaggatgtcttcactcatgtcaaggaaaacgatatggtccctctgtacgaaaccctagtcgctgattccgtgttggacttggatcgtgcccttttggactctatgcgcgctaaaattgacgac

SEQ ID NO: 43944 - DNA, 252 bp, Glycine max
  Clone ID: 701043506H1
ctagacatggagaaggaaatggaggctgctttagttcatgtggagacgacccagcaacacatgaatccacatgtactaaggcgcaagggtggcttcattaccatgcctttcattatagcaaatgaggcactagctaagctggctagtgttggacttatgccaaacatggtattgtatttgataggggattacaggctccgagtactgaaagcaaccaaaattatgttctattggtttgccgctaccaatttt

SEQ ID NO: 43945 - DNA, 237 bp, Glycine max
  Clone ID: 701043467H1
gcaaaacctaaattctgagcggctccatatccgtcacttatctcaccaaccataaaatatactcatggccgagcacggttttgatggacatgatgtaggatatgtgcctgaggaccctaattttcccagaatcattctgatgaacatgatgtagggactgtgattgatagctccggatttcctcacctgctacctgatgaagatgatgcaggcaatttgatggaggacgccaatttt

SEQ ID NO: 43946 - DNA, 238 bp, Glycine max
  Clone ID: 701043468H1
caaaacggacgcttttgttattcttcgtgtcttgttgtgtttttcatctgagatgtgtggaggagctatcatctctgatttcattccggcggcggcgatcgccgggtctcgccgcctgaccgccgatacctgtggccggatttgaagaagcggaagtctgacttggacgttgacttcgaggctgatttcagggattttaaagacgattctgatatcgacgacgacgacgacgatcacc

SEQ ID NO: 43947 - DNA, 235 bp, Glycine max
  Clone ID: 701043469H1
gttaagggctgcactataccagactgtctcagggaattaggcagtgcatctatacctattgtggtcactggggtctcactactgtgccttttggaacgtgctaacgccgcaacttactccgttgaatgcccgggggatagacctcaacactaatgcatggcccaatggaaaaagatcacagctggtgatatctaatctacactatgactcaagaccacaatgtggttgctgtgga

SEQ ID NO: 43948 - DNA, 233 bp, Glycine max
  Clone ID: 701043470H1
ctcttcttcgtctcaaacctcttcgatccttcgattcattccatttcttccaaaatggccaaagacccagttcgcgttctcgtcactggagccgcaggcaaattggatatgctcttgtccctatgatgccaggggagtgatgctgggtcctgatcagtccgtgatcctccacatgcttgacattcctccagcagcagagtcgttgaatggggttaacatggaaatcgtggatg

SEQ ID NO: 43949 - DNA, 238 bp, Glycine max
  Clone ID: 701043471H1
ggaggcaagagaataactacaagagtacaagattctccctgatgatggggcacaagtatttgtggttggtcttttgcttgtgggctttaacatgctcacttcttccttctttctcctttggactaatagaattggtttgaagaagagagatctagatcttgatagtatcagagcagctagtatggtaagagaaaagccaagattaggcagacctgtgttgggtgcgtatgatcatgat

SEQ ID NO: 43950 - DNA, 237 bp, Glycine max
  Clone ID: 701043472H1
atcaaaattcatcgaagaagaaggagaaggagatgtatagcaatttcaaagagcaagcaatagagtacgtgaaacaagcggtagatgaagacaataagggaaactacgcgaaagcgtttcaactttactgaacgcgttggagtatttcaaaacgcacctcaagtacgagaagaaccctaagatcaaggaggccatcactcagaaattcaccgagtatctccgccgggccgaggagat

SEQ ID NO: 43951 - DNA, 246 bp, Glycine max
  Clone ID: 701043473H1
tccaaagtttgtatagtgtaggatttgttggtattcgtgataaaaacacctcatcctattcattttgccatgacgggcgaactccagataaaggttttgaaagtaatgagaaattattaattcatccatgttactgcttggtttgaatctaaatcgtaatgcacttgctccagaggaagcagaggagataaatgacgaatatgatattaatattatttcagataattcagccattagaaataaaac

SEQ ID NO: 43952 - DNA, 240 bp, Glycine max
  Clone ID: 701043474H1
ggggttttggaacgtgcaagatccggtgctctaatctctgcattctgtgatggctccaaaaccgataacgagtcccgtccccgattcgtggtaccccacgctctccgtcttcaccctcgccatcggctcgtcttaaccgcctctttcttcatttatgaagcaacatcttctaggaaaagtcgttcacttgttcaggagctgacaactggtgcagtggcttcagtcttcttgggttttggg

SEQ ID NO: 43953 - DNA, 240 bp, Glycine max
  Clone ID: 701043475H1
ctcgagccgaatcggctcgagtgaaggttgagtcttgcgtacacacaagcatgaaatgtcgacaatgttaatataacagaaaacataacaaagaaataagagctgaaccagatcaagctatttcagacttgagacaaattctgaaatagcttgatctggttcaactcttatttctttgttatgtgttctgttatatgaaggttgagtcttgcgtacaccaaagcatgaaatgtcgaaatg

SEQ ID NO: 43954 - DNA, 241 bp, Glycine max
  Clone ID: 701043476H1
agaaggctcatgaagaagctttggctaagtacaaggagatagaagaacaactacaaaggaatgagagcttagctgctgataaagacattaagactaagcaggagagaaatttggcagctgctgctgaaaattagctgagtgtcaagaaaccatatttcttcttggcaagcagttaaaatctctgcatcctcaaacagagccaatgggatctccttattcaaaggccgaaggcttcacagag

SEQ ID NO: 43955 - DNA, 238 bp, Glycine max
  Clone ID: 701043477H1
ctgttctggatcttgccatggctctttccatttttcaatctcttctgttctcaatcagcctctgcttcctcgcttcttcttttcaagatcttcttcttctctccgttaatgcgcaatcacacaattcactcaaccttcagttacgccaatcaactacgatctctaccattccagtgacaatttgatggaggagatcagggccttggtccatcgtcacccggataaactcactacggag

SEQ ID NO: 43956 - DNA, 238 bp, Glycine max
  Clone ID: 701043478H1
gtggcctctctctctctctcagccgtcgcagtctctgccaaacactcgctcatccaaaattatgatcatttctgtgccgtaaattcgccggcaacacgagatctcaacttctcgcgccgttttctttccccctttaaaaaaagtacaagttcaggttaagttggggttccatggcttcggagacgaaggtcgtgaatctggctgaggaagccaagctcgccggagaaggtgtaacgac

SEQ ID NO: 43957 - DNA, 243 bp, Glycine max
  Clone ID: 701043480H1
cgcgatcgtgcgagtgattggtttgaaaaacaattgcactttctgcggcgtcttccgtcgacaggcccttgaccgaggtgcttctctcttgaaagtggacaaagtcgttactgggcacaatgccgatgtattgccgagaccgtcctcctcaacctcctccgaggagatgttgcccgattgagtagatgcacctctataaccaccggtgaggatggccccattccccgatgcaaacctttcaag

SEQ ID NO: 43958 - DNA, 251 bp, Glycine max
  Clone ID: 701043481H1
tcttctgcatgcccttggttatagcagccattgtcgagagcatgggccgtttcaccatccaagtgatgggtttcttcttcatgacagtcttcatgtttgctcttgctataccttacgatcattggaagaaccacaacatattggctttgttgttatgtactcattcacattcttcttctccaactttggtccaaatgccaccacatttgttgtgccagcagagattttcccagcaaggctaagatctactt

SEQ ID NO: 43959 - DNA, 62 bp, Glycine max
  Clone ID: 701043482H1
agtccatttctttccaacacacactttctctctctatctctctctctcgctctctctgggtg

SEQ ID NO: 43960 - DNA, 237 bp, Glycine max
  Clone ID: 701043483H1
ctctgttcagtttcaatatggcgaacacactatataacggcgccacatgccgaatccctctccgtgatgaatccctggccttctctcgccacgtttccagatccctctctttcctcctcaaaacagtgcgggaaaacaatcatacgcatttgcggttaaggcttcttcgcactctgacttcgacgttgacctttcgctcagtccacgtgtcaatgccgtcaagccttccaaaaccgt

SEQ ID NO: 43961 - DNA, 237 bp, Glycine max
  Clone ID: 701043484H1
gcttctcactgatctccattcccattccatggcttccactgaatcatcccctttcaagaaaattcagattcaaagggatgacactacatttgacgcatatgtggttggaaaagaggatgctcctgaattgttgtgattcaggagtggtggggtgtggattacgaaattaagaaccatgccgtgaagatttctcagcttggtagtgggtttaaagctcttattccagatttatacaga

SEQ ID NO: 43962 - DNA, 237 bp, Glycine max
  Clone ID: 701043486H1
attcgagattgctcgatccaccaaagcgtacaagacgattctccagaaccttccctacatattcgttggcacgtgcgagcggttgcagagcatcgtggcgctcgtgtcggaggcagcgaacagagctgaagaagaagggaatgcacgtgcctccatggaggagaaccgaatacgtgaaagcgaagtggctctccccttacacgcgcactcacgatatcaaagaggagaagaagaagg

SEQ ID NO: 43963 - DNA, 234 bp, Glycine max
  Clone ID: 701043487H1
ctttgatcaatacgatgttgatttgattgtgttttgtttggtttcatcgatcttcaattttcataatcagattcagcttttattatctttacaacaacgtccttaatttgatgattctttaatctagatttgctctaattagagctttttcatgtcagatccctttacaacaagccttaattgttgattcattaatcgtagattagggctttttttcattgattacttcagatc

SEQ ID NO: 43964 - DNA, 239 bp, Glycine max
  Clone ID: 701043488H1
gacaaataagacatagatttccagaagctgttgtatgtggtctttaccggagtgggaaaatatacttccacccaaacgatggtgaaattctgcagcaaaccgacaaagtattgtttattggatccttcgggatacaaatactaaaaagccagaagtaatcctagatgggaaagaaggaatgtatgacattcataatgaggaaatacttgaacaggatgtggaacatgccattgaattga

SEQ ID NO: 43965 - DNA, 236 bp, Glycine max
  Clone ID: 701043490H1
ttcaaaggtaaggtaggttaacactcttcttcatcgtccgcaatgggacgtgtgatccgtgcgcagcgtaagggagcaggctcggtcttcaagtcccacacgcaccaccgcaagggccctgctcgttccggagcctggacttcggggagcgcaacggctacctcaagggcgtggtcaccgacgtcatccatgaccctggccgcggcgcgccgctcgccaaggtcgccttccgccac

SEQ ID NO: 43966 - DNA, 236 bp, Glycine max
  Clone ID: 701043492H1
cttgagactaataatggatggtatagttcaactgcagaggcaacttgttgattatactgcttccctatttcatgagggttttctagatgaccaatttaaccagcttcagcaacttcaagatgaagcaacccagattttgtcgttgaagtggtgactctcttttttgaagatgcggagaggcttcttaatgagctcacaaaaacactaggccagccaagcattgattttaaaaggtt

SEQ ID NO: 43967 - DNA, 236 bp, Glycine max
  Clone ID: 701043493H1
ctccgcgtgtgtgtatgtgtgtatactctctcaagtacgcacatacatacacatccattcgtacataaatacttatatctcttcttccttcgccgttaattctctgaatccctagctcttctgtctccgatccgatcatggcctcgcttgtcaacaacgctaacggcgccgtcaatggttttcctggaatatcccagaagctcattatcgataccgaccctgggatcgatgatagc

SEQ ID NO: 43968 - DNA, 240 bp, Glycine max
  Clone ID: 701043495H1
cttcactcccattttttcaaaacattcaacaatgtcgtatttctcacggggacgtcgcgacgacgacgacacggtggacgactacgacgagtacgaccccaccccatacggcggcggctacgacatcacctcacctacggccgccccgtctctccttcagaagaaacctgctacccactcggagcctcttccgatgaaaacttcgattacgatcgcccccagtacacctcttacgctgaa

SEQ ID NO: 43969 - DNA, 252 bp, Glycine max
  Clone ID: 701043503H1
ctccgtacattctaggagggatcatggcttgtagttttgcatttttgtatgttgtgtacagttttggagcaaagaaggtcacagattcaagttcaatacatgtaaagagtaatgagtgtgcaaagacatcatcagaaggtggaatatgttcttcagatgaggatgcaggaagtgctgacatcatcattgtgggtgctggggttgctggtgcagctcttgcttacactcttggaaaggatggacggcgagtgc

SEQ ID NO: 43970 - DNA, 250 bp, Glycine max
  Clone ID: 701043504H1
attctagttctggattccgactagccgcgttgactcggttccgtttttcattctcgcggatctaatattaaggaatagcttaagggcacattacaatgaaggcattgattctggttgggggatttggaacaaggctgaggccactgacactcagtttccctaagcctcttgttgattttgctaacaagcctatgattttgcatcagatagaagcccttaaggccattggagtgactgaggtagtgctagc

SEQ ID NO: 43971 - DNA, 240 bp, Glycine max
  Clone ID: 701043466H1
ctcaagaatagtgaatctcctggcaacagcagcaacaatctaccacttagcatgaatcggagcccctcaacttccgttactcctatccctgataagtactgttgtctctctagagaagatgtgctcctttcatcatcggttgtcttggcgcattggctccccttcctctcacttccattgctgctcttgaagcaattaattcaaactacaactatattgaatcttctactccagccattg

SEQ ID NO: 43972 - DNA, 244 bp, Glycine max
  Clone ID: 701043437H1
aatatcctcttagatgagaactttgttgctaaagttgccgattttggcctctccaagactggtccttctctcgatcaaacccatgtgagtactgctgttaagggtagttttggttatcttgatcctgaatattcagaaggcaacagcttactgagaaatcagatgtgtattcatttggggtggtgttaatggaagtgttatgcacaaggccagccttgaaccctgtccttccaagggagcaggt

SEQ ID NO: 43973 - DNA, 244 bp, Glycine max
  Clone ID: 701043438H1
gaaagatggtactatcaataaaacagcgctacagatattgttcagaaatttctgtaccaaaaaagtaaacactgaatttattgcactggctcaaaccccctcttcctttctggctcacatgcacttctttgtcttctttgaagttcatctatccacacatacatatccctttagcctttattacaagcctcagatataactacttcacttgttgtgactaagctcactaatcattatcatcatt

SEQ ID NO: 43974 - DNA, 245 bp, Glycine max
  Clone ID: 701043439H1
gtgaaagagaatccgaggcgaagagaagagaaaaattaagatggaggggaaggagcaggatgtgtcgctgggagcgaacaagttcccggagagacagccgattgggacggcggcgcagagccaagacgacggaaggactaccaggagccggcgccggcgccactggttgacccgacggagtttacgtcatggtccttttacagagcagggatagcagagtttgtggccacttttctgtttctata

SEQ ID NO: 43975 - DNA, 240 bp, Glycine max
  Clone ID: 701043440H1
agctgagcgaatcggctcgagttgatgtgggtgctggtagtggtcttttgtcattatttgactgctcaagctggtgcaaagcatgtttatgctgtggaagcatctgaaatggcagaatatgcgcggaaactatagctggaaacccaacactggctcaacgaattacagtgatcaaaggcaaagttgaggatgttgaattgccagagaaagcagatattctgatctctgagcccatgggca

SEQ ID NO: 43976 - DNA, 247 bp, Glycine max
  Clone ID: 701043441H1
atctttctctcttctctctccccgcccaaaccctaactccctaccctattccgctttctctcatccatcatgaaaggaggaaagtccaagaccgaatctaagagagccgatgccaaacttgctgtgaataagagggcgccgccaccaagactaggaaacccgccggaaaggggaaggcagcgaaagatcctaacaagccaaagaggcctccaagtgctttcttcgttttcatggaggaattcaggaa

SEQ ID NO: 43977 - DNA, 244 bp, Glycine max
  Clone ID: 701043442H1
ccattttcaagctctcaacgccatctccagctgcttccttatcagaagcgcttcgccccagagattctcgcttcctctccttcaatccttcttccaacgctattaattacaaaattaacctctccgcttcctccgatccattcactccctccctcttaaaacctccttgcggatcaaatgctcccaaacagatgggaatggaagtcctgcaaagaggacagtgcttcatgatctttatgagaaa

SEQ ID NO: 43978 - DNA, 236 bp, Glycine max
  Clone ID: 701043443H1
ctctctcttgcaaaacctaattttcatttcttccctcaaatttcaaaatgcgtgagatccttcacatccagggtggccaatgcggcaaccagatcggcgccaagttctgggaggtggtttgcgggagacgggatcgaccctaccggaaggtacggtggggactcggagttgcagctcgagaggatcaatgtctactacaacgaggccagttgcggtcggttcgtgccgcgcgcggt

SEQ ID NO: 43979 - DNA, 240 bp, Glycine max
  Clone ID: 701043444H1
ctatgttggtgggaaagatgggtgggttttgtacccttctgagacttacaatcattgggctgaaaggatgaggttccaagtcagtgatactcttgtttttaagtacaagaagggctcggatactgtgttgtggtgaacaaggatgattatgagaaatgtaacaagaagaacccgatcaagaagtttgaggatagtgaatcggagtttcagtttgatcgatcgggtccattttacttcatt

SEQ ID NO: 43980 - DNA, 243 bp, Glycine max
  Clone ID: 701043445H1
attccttcttcctttccctcaaagctcaaactccaaaaacgctacccctcttgttgtacagtacgaggagaaagtcttcgagtttttagggttcgaaaaatccaaggtgaacaaatggcagagcatagagacataaggttgttgattcatctcaggtagctccagctacaagtagaaccatgtcatttcctctatcattccttgacttgccttatgcacgtcttctttatgtgaaacgtttat

SEQ ID NO: 43981 - DNA, 243 bp, Glycine max
  Clone ID: 701043446H1
aacaacagtaatttaccattaccccctcgtaaagcgcatagacgctctaacagtgacattccgtttgggttttccaccgttttgcaatcctctccgccgcttatccctcttcggaaccccgtttcagcgaacctgctcagttagtcaaaagagaaacaccgtgggacaggggtgttgagaataataataataataatgtagaggggtccggggagaagaaatcccctgaaggggaagtggtgg

SEQ ID NO: 43982 - DNA, 239 bp, Glycine max
  Clone ID: 701043449H1
cgcaacaaaaagaaagaatcccaggcgaggagaaagatggaggggaaggagcaggatgtgtcgttgggagcgaacaagttccccgagagacagccaattgggacggcggcgcagagccaagacgacggcaggactaccaggagccggcgccggcgccgctggttgacccgacggagtttacgtcatggtcgttttacagagcagggatagcagagtttgtggccacttttctgtttctc

SEQ ID NO: 43983 - DNA, 236 bp, Glycine max
  Clone ID: 701043450H1
gttgacgacagcgacgacaacatcgtttcctcgtcgtttcgacctcccttgccgttcgatctcaacgcgctgccgtttgatgatgatgctgccgtcgtggatgatgatctacgctgcaccgcgctttgctctgatgattatcgtgcgatgatgatttttaatttctcattttttttatctcttcaacttgattttttgttattgctatgagggaaaacatatattacaaacatgat

SEQ ID NO: 43984 - DNA, 242 bp, Glycine max
  Clone ID: 701043451H1
cacaactacacatatattcttcgacagtcaactcaatagcctatccaaaaaaaaggttgtttcagaattgagagcaccggtcgctggacggaaacgaaatggatatttgtttaattgacatgagaaagaggaaattaattagggaagaaatgtcatacagatcaaagttagtgccctataaatactaaccaaagcattgctctgcaccacaagccattgctagtttagttccatacatagca

SEQ ID NO: 43985 - DNA, 241 bp, Glycine max
  Clone ID: 701043452H1
tccaacataagtttctgagtttgaaacacagcataaacaaagcaaaatatgaatgccactctccctttttaaatggaaacaaagctgaagacaccacacgagcaatcgatagataacaaactaaagataagtgagagtgagagacatgtataggttcagcaacacagtaatcgggttcttgaacttgttcacacttttagcatccataccaataattggagcaggtctatggatggcaagg

SEQ ID NO: 43986 - DNA, 240 bp, Glycine max
  Clone ID: 701043453H1
attctctgtgttgtgttgtgtacttgtgttaattgtgttgttgttgtaggaaatttaagtgaagagagaatgatgatgaagtctgctatgtgtgcattggtgcttgtggcactggttgtggttgaagtgggcccatggctgaggctgcggtgacttgcaacccaacacagttgactccttgtcttccggcaattaattcaggttctgcaccttcgagtgcttgttgccagaagctgaagg

SEQ ID NO: 43987 - DNA, 242 bp, Glycine max
  Clone ID: 701043455H1
atagtttaacagcaaatagaacccttgcgaatcaaaaccttcctgctcctttcttcaacctcactcaacttaaagctgcctttgctgttcaaggccttgacactaccgatcttgttgcactctcaggagtcattcatttggcagagttcgctgcttattcattcttgaccgattgtacaatttcagtggtactggcagacccgatccaactcttgacacaacttacttaaaacaattgcgcc

SEQ ID NO: 43988 - DNA, 243 bp, Glycine max
  Clone ID: 701043456H1
taaaaaaggaaacgtatagaaaaagcttctccaaagaatttgaaggagaaagattcattcatgttcattttttccttttccccttcgtccccatcaagtttctgattctctcttttcacttcctttctcttcttcattcttctttctcttttcaactattttctttacatttttttctttttctctcgcttttttcgcgttcactttctctactctgttttacgcattttatttattgttttg

SEQ ID NO: 43989 - DNA, 242 bp, Glycine max
  Clone ID: 701043457H1
agctagctaggttgaaaatagtttggttttgtagtaagtgaggtgaggtgccaaaatggtgaagataactcttggtactttcgatgactcttttggtgttgcctctcttaaggcttatttggcagagttcatgcaactctgattttcgtgttcgctggtgttggttcagccatcgcttacaacgagcttacaaaagatgcagccttggatccaacggggctggtggcagtagctgtggccca

SEQ ID NO: 43990 - DNA, 240 bp, Glycine max
  Clone ID: 701043458H1
tcagaacctaggcaggtcgattgacataacacccgaatccaagtgaaacgaaaaacactcatcatcatggattcagttgcattaaatggcaaaagcaatgataagcctcttcacgttgccatgctcccaggctggccatgggtcacatatacccttacttcgaagtcgccaagattcttgctcaaaagggtcactttgttaccttcataaacagccccaaaaacattgaccgcatgccca

SEQ ID NO: 43991 - DNA, 241 bp, Glycine max
  Clone ID: 701043460H1
cattaccctcacaaagtaagcaatggcataccaaaactacaacaactatgggtggcgatgcccctctgacgagtaccaagtgtacgaccccccagtagaggcaacatatcctaggcaaaatcatcacagaagggtcatgtggcatctcagaaccaactatgaggattctatagctgaagtagaatccaacgttgaggctcgagaacataacagcaggttatggaatcacagtgcttacaaa

SEQ ID NO: 43992 - DNA, 241 bp, Glycine max
  Clone ID: 701043461H1
cctcaaagcaacacaagaacactctcttgaacattcatggatccagtgagcgtgtggggtaacacgcccttggcgacggtggatcccgagatccatgacctcatcgagaaggagaagcaccgccaatgcgcggcatcgagctcatcgcctccgagaacttcacctccttcgcagtcatcgaggccctcggcagcgccctcaccaacaaatactccgagggcatgcccggcaaccgctacta

SEQ ID NO: 43993 - DNA, 244 bp, Glycine max
  Clone ID: 701043463H1
ggaagggcgaagttgaaaaaccaaaacccttggcgagtgaagccctactcactagactacacacttcgcaatggcggttgttgctcaaacccctgacatcgccggcgagcggcagtccggccaagacgtcgcacccaaaacgttgtggcatgccaagccgttgccaacatcgtcaaaagctctttaggccccgttggcctcgacaagatgctcgtcgacgacattggcgacgtcaccatcacca

SEQ ID NO: 43994 - DNA, 243 bp, Glycine max
  Clone ID: 701043464H1
ctcaccccaaaacccaaaaacctttccttttactttttctcaaactgaaacataaaaaatggagggtcttattccttttgtttacaaggctatcatgcaatccaagggcgacaaagagggtcatccttaggatcatggctttgtgagtctccttactcatacatgagacttcctggtgactcgggtaggtttcaaattcaagcaccagctgctgcttcaccctcttccaccaaccctaattct

SEQ ID NO: 43995 - DNA, 248 bp, Glycine max
  Clone ID: 701043465H1
tacgactctcgcccatgtctcattcctcactggttcttcgtcaccttcccaatctacaattttagggttcctttaatctcgttattcctcttcactcccaaactccgttcactccaacaacactctgatttagaaatgatggaccagctggtcgaggtggtgctggactggacatgtttctgccaaattatacattgggaaaaacacgtgggattggatcttttggcaaggtcacaattgcagaacat

SEQ ID NO: 43996 - DNA, 242 bp, Glycine max
  Clone ID: 701043436H1
aaatcaattcagcattagagcccttgtggcatgagcttagctgttgcataagcaagatagaatcctactcagagtctgcatctgagatttcgacatcttctagtacctttgtgtctaaaccatctggtgtatgcctccacttcctgctggctctcaaaatatcttaccatacattgaatctttcttcgtggtttgtgagaaattgcatcctgctcagccaggtgatagtcatgactcaagta

SEQ ID NO: 43997 - DNA, 239 bp, Glycine max
  Clone ID: 701043407H1
gagaaagacaaatggcaacaagcgaagaagtggttgccgcgggcggaggagcccgctggaggcagggctgaagcacaaactggagagaaaatggacgttttggtgcgacaaccaatccaaacccaaacaggggctgcttggggtacctctcttcgcaaggtctacaccttcgacaccgttgaagagttctggtgtttgtatgatcaggtattcaagaccagcaagttgcaaatcaatgc

SEQ ID NO: 43998 - DNA, 247 bp, Glycine max
  Clone ID: 701043408H1
caggacttggaccagaagaaaacctaacagagagtggcagttcttataagcctcagatatttaccttccgggagcttgcaacagcaacaaaaaattttagggatgaaacctttattgggcaaggtggatttggcatgtttataaaggcacgatcgggaaaataaatcaggttgtagctgttaaaagacttgatactactggtgtccaaggggagaaagaatttctggtggaagttctcatgctttcc

SEQ ID NO: 43999 - DNA, 242 bp, Glycine max
  Clone ID: 701043409H1
gtgacttcaaaggggtagctatgatcacaaccagtgaccccagtcacggtaaatgtatctttccaggaagtaagaatttaaccaacaagacaaaggaagtggtgaacactactcaatcaagcaatgcaggggataattaaggttcagaacctttagaagcatgaaaataagtgcaatcaacaacattttgcacaattactttgctgctttcaccattttgttgttattccttctgtgaggtg

SEQ ID NO: 44000 - DNA, 248 bp, Glycine max
  Clone ID: 701043410H1
cggctcgaggacaccacaaagtgtaacttgagtgattagatctgatgagtgcagaaagaagggaggattgttggtgatcgatcatcgatcatcgatcatcgatcatcgatggcgtctgctagccttggaagtggtgggtgggcagttccaggtctgttaatggtggcttcaggggttcttccagttccgtcgattggcttggcagagagatgcttgagatgtctttgagagaccacgaggacgttaga

SEQ ID NO: 44001 - DNA, 248 bp, Glycine max
  Clone ID: 701043411H1
cttcctcgtaaaagataactcccggtcggcgtgcatagccgccgattgaggcaaaaaaaaaacacaaaacacactgtagctcatcacagccaaacgcggcgtcaacgatgacgagcttctgaaattccaacttcgccttcttctctgtgtatattctttttgatttatttattattatttctattattttttcggtgaggttagctccatgcctagtcccaagagcagccgcagcggccagatcgaga

SEQ ID NO: 44002 - DNA, 247 bp, Glycine max
  Clone ID: 701043412H1
gttcttggaaacaagtatcaaagcaaattgcttgaagttatagatgccagtgagttgccagaatttctgggaggtacctgcacttgtgaagatcagggaggttgccttagatctgataaaggcccctggaaaaacctgatatattcaagatggttctcactggtggagcatggcggtcaaaacaagttgtaaaagttcttaacaatgaaaggaaggttattgtgtatgccaagccaggatacccgat

SEQ ID NO: 44003 - DNA, 244 bp, Glycine max
  Clone ID: 701043414H1
ggtggaggaggaaagctggatgagttccaacctcatcccgtcacggagcaacttcccggtgttgatgactgtgttaccagatctcctgcatggcctgaagggattattcttggctttcagcattacctcgttgtcttgggtccattctcattctttccaccatccttgtccctctcatcggtggtggcaatgtggaaaaggctgaaacaattcagactctactttttgttgcggccattcacac

SEQ ID NO: 44004 - DNA, 245 bp, Glycine max
  Clone ID: 701043415H1
ggaaaaactttttactgacaccttggctaaaaccatggtggaacctcggcgtcgttgtttcactttacctgctgttgatttaaggaaaaaagcagttggaggcattatatatattcgagtgatttcagcaaataactttctaggagttgctttaagacatgtaggaggcaaccaaatggtacatccaatggttgttcagaggataattttgatgataaggacctacaaacatttgtagaggtaga

SEQ ID NO: 44005 - DNA, 252 bp, Glycine max
  Clone ID: 701043416H1
attcaattctgttcatcctttgcttcccaaagaaagagaaaataaaaagcaatgggtagccttgaagcggaaagaacaacagtaggattggcagcaagagacccttcagggattctctccccatacacctacaatctagaaacacaggccctgatgatgtttacataaaagttcactactgtggaatttgccattctgatctccaccagattaaaaatgatcttggcatgtccaactatcccatggtcccag

SEQ ID NO: 44006 - DNA, 246 bp, Glycine max
  Clone ID: 701043418H1
cttgaatcttcgttatccttctttttttctccttgaactcgaatattcactatggcagatgaggtggttctgctagatttctggccaagtccatttgggatgagggtcaggattgcacttgctgaaaagggttcaaatatgagtccaaagaagaggacttgcagaacaagagccctttgctcctcaaaatgaacccggttcacaagacaatcccggttctcatccacaatggcaaacccatttgtg

SEQ ID NO: 44007 - DNA, 246 bp, Glycine max
  Clone ID: 701043419H1
aaaagaataataattttcatctaaaaaaaaaccaccgttgaatttgacagtcccggcgaggcatgttcttgctccgagtccactcagtggaagaggagcaccctctggatccccgaaccatcttccaatcccaaccaacaaccctaaattcagccaacgcagaggcgcgctccacttgttccgaacctcttcccactcctctccctcttctcttctcttcatcctcgccgtccccaactacctctc

SEQ ID NO: 44008 - DNA, 244 bp, Glycine max
  Clone ID: 701043420H1
gtttgaggaaaagatagctaaggagaacagaggcatgctgattaagggatgggcgccgcagccgttgatcctgaaccaccctgcggtgggaggatttttaacgcactgcgggtggaacgcggtggcggaggcgtcagctccggggttccgatggtgacaatgccggctttcggggaccagtactataacgagaagctgataacggaggtgcacgggttcggggtggaggtgggggcggcggagt

SEQ ID NO: 44009 - DNA, 245 bp, Glycine max
  Clone ID: 701043421H1
cgattattgatcaggatctaatagcaggtggtaatgagagttcagcagtaacagtggaatgggctatcacacagcgattgagaaggccagagattttcgagaaggcaacagaggagctagctacggtaataggtgagatagatgggatgaagagcaggacattgtatatttaccttatgtgaatgccattgcataggacgcaatgaggctgcaccctgtcgcaccaatgttggggtcaagactag

SEQ ID NO: 44010 - DNA, 246 bp, Glycine max
  Clone ID: 701043422H1
cagagatcttcttcaaggatatttggccatccagtgaagaaatagcaaatgttgtacaatcaagtgtgctgcctgatatgtttagggacacatataatgcaatcacccaagggaatcccatgtggaataatttactgttccaacgggcactctttatgcttgggaccctacatcgacttatattcatgagccaccttattttagagatatgagcatgtctcccccaggctctcatggagtgaagga

SEQ ID NO: 44011 - DNA, 245 bp, Glycine max
  Clone ID: 701043423H1
gaaaaaacctttttgtggggtcttttcgggaattaaccaacaagcgtgaaaggaagttttagagtgtcattgaaatgtttcactgttcttcgtgttaaagatgcttgcgaagactggatacctgcgtatttggtaattttatagtttattgatatttatatattagagatggagatggtctgaaatatgaggagagctatatttcctctttatgctactgtaatatttttattgttaatttattt

SEQ ID NO: 44012 - DNA, 247 bp, Glycine max
  Clone ID: 701043424H1
tgtttacacactcaaggagatggaggaggcaacatgttcattcagtgatgagaatctgcttggtaaaggaggatttggcaaagtctaccggggaactttgcggtcaggagaggttgtagcaatcaagaaaatgagttgccagcaattaaagcagcagagggggaacgtgagtttcgtgttgaagttgacatcttgagcagacttgaccacccaaatcttgtttctttgataggctactgtgcggatg

SEQ ID NO: 44013 - DNA, 248 bp, Glycine max
  Clone ID: 701043425H1
acccatcaaaccacacacctcacctattagaagtaacaaaagaccctccctctcaaaagaataaacaagtataaaaaagaaggcacttccctcaaacagaaactaccctctatctctctcttttcaagccttaaagagtaaaaaagagtgaagacaggaaagaaaggagcaccatttttggtttgagaaacataattagcaagagagttcaaatggggcagagagagtttaatggggtggtgttgatg

SEQ ID NO: 44014 - DNA, 245 bp, Glycine max
  Clone ID: 701043426H1
gttaggttacctctgtgacatttgtgctgctagttcatatatttccggctgacaccgagaaggaaagcaggaaaaaaacaaaaaggagcagatgggtagctcaggtttctcatggaaattggcggatcatccaagcttccaaagggtaagactgtggctgttgtggtattggatggttggggagaggccacacccaatgagtacaactgcatccacaaggccgaaacaccctgcatggattcact

SEQ ID NO: 44015 - DNA, 244 bp, Glycine max
  Clone ID: 701043428H1
gaaaagcgctacaaaagaagcaatctctatccttcacaagttccttgggtcgggtcattatcacactttaaacaaccctaatgaagaagatactacttctaagagaaggaagatatgcacacaagatgctgcgaggaatgtttcgacgagtctcccactgctaactctggagctgatggtaaactttcaagtcctgttaaagcagaggcagagaaagacggaatagctaatctttctttggtta

SEQ ID NO: 44016 - DNA, 242 bp, Glycine max
  Clone ID: 701043429H1
gtagattttcgtagcaaaataccaataaataaaggcaccaaacaaagatcaaacgcttggaggaaacattcaccatttttctcttttccgttctgttctgttctgctttgcccctcttttctcccaatgactctcaccattctctctctttccaactcctctgagcctcgctcgttaggttctctgtctcttctcggagacccacaaaacaatttcttatttatttccttctcaaacaaaga

SEQ ID NO: 44017 - DNA, 245 bp, Glycine max
  Clone ID: 701043430H1
gggaaacaggtgcagctctctgagtccgagatccgtcaactctgcgtcaacgccagacaaatcttcctctctcagccaattcttctcgaccttcgtgctcccatccgcgtctgcggttttacggtccatttaaaaaaccgtggatgtacttcgtgttctagtgtagataagggattttggctgaggggagtgcattttaggatataaaatccaataatgtcccatcttcaatcccttgttcctaa

SEQ ID NO: 44018 - DNA, 247 bp, Glycine max
  Clone ID: 701043432H1
tgctggtgttcacttatgactctgcgatactccaatctccagcctgatgctacgcatagtcacccctactatgatgtcgtcgtagttataatgacgaagcggcgtcgttttgactgggaagtgaggtttgttctgtctccaacaaggcgaatcgtgtggctgataggctcgccaacgatgctcggaaattggcttgtgatgatgtttgtgaggagtatcttcatcccccggctaactgtaaccagtt

SEQ ID NO: 44019 - DNA, 245 bp, Glycine max
  Clone ID: 701043433H1
cctcgagccgaatcggctcgaggcattcttctgttatagtcttcacctgcactctccttctcttcttttctccgtcaattcgtgcctccgacgatgacgtggcgctgcacgcgaagaagctcatcagagacctaacttgttccccgacgctgacgtcaacatcgttcccgttgctaattgcaccctccaaccccgcaggatcgtcgagaagcgcctgaggttcccgaagctgctagcttcggatt

SEQ ID NO: 44020 - DNA, 243 bp, Glycine max
  Clone ID: 701043434H1
tttatgaggcagcactaatttatatagcaagctagctaggttgaaaatagtttggttttgtagtaagtgaggtgaggtgccaaaatggtgaagataactcttggtactttcgatgactcttttggtgttgctctcttaaggcttatttggcagagttccatgcaactctgattttcgtgttcgctggtgttggttcagccatcgcttacaacgagcttacaaaagatgcagccttggatccaa

SEQ ID NO: 44021 - DNA, 247 bp, Glycine max
  Clone ID: 701043406H1
tagaaagagaaggaaaaaaaaaaacttgtgtttcttgggaagccatgagcaccaccgagagtcaaagatataagggcacagtgaaatggttcaacgaggagaagggtttcggtttcataactcccgaagatggtggtctgatctcttcgttcactacagtgcgatccaaaccgacggcggcttccgcaccttgtcggagggtcagtcagtagagtccctcgtcactcaggacgacagcgggcgagcc

SEQ ID NO: 44022 - DNA, 241 bp, Glycine max
  Clone ID: 701043435H1
caagctagctattagttcgattttgtagtaagtgaggtgccaatatggtgaagatagctcttggtactttggatgactcttttagcgctgcctctcttaaggcttatttcgcagagttccacgcaactctattttcgtgttcgctggtgttggatcagccatcgcttacaacgagcttacaaaagatgcagccttggatccaacggggctggtggcagtagctgtggcacatgcatttgca

SEQ ID NO: 44023 - DNA, 269 bp, Glycine max
  Clone ID: 701043372H1
gcttattgcagattaattctatgttgcaatagttcttctagagttacagaagcaatccgctctcgatgtctcaatgtgcgaataaatgcaccaagtgaagaacagattgttgaagttttagaattcattggtaagaaggaaggctgcaacttcctcctggttttgctgctcgcattgtggagaaatcaaatcgaaatttaaggagggccatattgtcatttgagacttgtcgtgtccaacagtatcctttcactaacaaacaaacaatt

SEQ ID NO: 44024 - DNA, 261 bp, Glycine max
  Clone ID: 701043373H1
cttcaattcattctagttctggattccgactagccgcgttgactcggttccgtttttcattctcgcggatctaatatcaaggaatagcttaagggcacattacaatgaaggcattgattctggttgggggatttggaaaaggctgaggccactgacactcagtttccctaagcctcttgttgattttgctaacaagcctatgattttgcatcagatagaagcccttaaggccattggagtgactgaggtagtgctagccat

SEQ ID NO: 44025 - DNA, 235 bp, Glycine max
  Clone ID: 701043374H1
gcatattttgatgagtacgattatcgggtgaaacttctacagaaaaagcaatggagagaggagttgagaaggatgagagagatgaagaaaaaaggtaacacaaaagaaaatgactatggttacatggaagaagatgatcagagaatggaagtccagcagcagtgccagttccattgcctgatatggccatgccaccatcctttgacagtgacaatccagcctatagataccggtt

SEQ ID NO: 44026 - DNA, 270 bp, Glycine max
  Clone ID: 701043377H1
gatgtaataaagcaagaggtttcccaaagtggcagcttatatcaccatggacatgatcaggaatttcaggtttctggggcaccttggtcacatatggtgccaatttcttcttcccctaggtctagtgttgctagcttcagtataataatttattggatttcacttacaacaagacagatcataggaagaaccaactaccagatacatccgagtgtaatagcacagccactgctggagtttacaagaagactaagagccaaccatcttcaa

SEQ ID NO: 44027 - DNA, 270 bp, Glycine max
  Clone ID: 701043378H1
ggaaaattagcctcacaaaagcaaagatcaaacaaaccaaggacgagaacacgatgttgcttgaacttgcacttggtttattggttttggctctgtttctgcacttgcgtcccacacccactgcaaaatcaaaagcacttcgcatctcccaaacccaccaagcccaaagcctcgtctccccttcataggacaccttcatctcttaaaagacaaacttctccactacgcactcatcgacctctccaaaaaacatggtcccttattctctct

SEQ ID NO: 44028 - DNA, 270 bp, Glycine max
  Clone ID: 701043379H1
cagaaacagtttttccagacaaaagccgttttgccaaatgctgtttgtagtacttctcaaaaacatctttttcttgcaggtatcggaatagcatcatcaccttgtcaagggtaacttctacatcatcctcactaacccctttagacctttccggagtttatcatctacaaatagtgaaatgaactctggagaacgagggttcaagttgatgaaatattcaaatgaggaattcaatgcattctggaaagacttgtcattgacgaatgccaa

SEQ ID NO: 44029 - DNA, 272 bp, Glycine max
  Clone ID: 701043380H1
ctcgagccgtttttatggaaaaaaatattgtagcaatttcgtcgtagaaacaaaattccccacttttcggcacgccgttgttgaatttccaatctgtgattttcttcttcttctatttatacgtgataattccaaaaagcctacgcgagagattcatcagcttttcaattattcctcgaattattttgaaggaatcatccaaactgcttgaactattcatcatcaacaacctcacgctgttatagatattctctctctctctctctctcaca

SEQ ID NO: 44030 - DNA, 263 bp, Glycine max
  Clone ID: 701043382H1
ctcgagccgctagacaacctgacatccaccatagttatggtttctctgttgcggaaattggaccctccatcagagtaccgaaagattcttggagctgttgttgtaatagcagcaaatgcggggggtgcatggactcctatggtgatgttacaactactatgctgtggatacatgggaaattatctacagttcaaacgtgaaggatttgtttgtaccttcagccgtttctctaagtgttccccttggtctctaatgtccctgac

SEQ ID NO: 44031 - DNA, 262 bp, Glycine max
  Clone ID: 701043383H1
ggttgctagtgctacagcaacatttgtgatgatgttttcatcatctctgtcagtggttgaactctaccttctcaagaggttccccattccttatgcattatacctcacctcagtgtctgttttggctggcttctggggcaattctttgtaagaagattgattgcatgccttgggagggcatcaatcattgtattcatcctctcaggtgtcatttttgctagcgccctcaccatgggtgtggttggcattgagaacagcattc

SEQ ID NO: 44032 - DNA, 265 bp, Glycine max
  Clone ID: 701043384H1
tccaattctgctttcatttatgtggacaaacgaaaggtttctgttgaggtacaagctcatttagtggagaatggaattgaaattcgagagtatacagctgtaagctctgatacgacattgcttgcaactgatgagcttattctgtatctaccgccaaggttgctttagctgaaacagaggtccgaaaaattcccaatgaaactgctaagcatgcaaatggtgaacatcaagcagaagaaaatagtaatgacctcatatgggctga

SEQ ID NO: 44033 - DNA, 259 bp, Glycine max
  Clone ID: 701043385H1
cacagttcacacaataataacatcttcattcgtttacccacttttctttacgaccttattccttcgattctgtcttagaatgacgaattcactatctccctgaaaccatgactgtgagggacagtcatcatcattgagcttacccagaactaaaaaagcaatctttatcacatatcacaattcacaaagcttctgtggttgatgggtagaaggggaatccaactgtttgatgagaaaagagatgtctttttctctgtct

SEQ ID NO: 44034 - DNA, 267 bp, Glycine max
  Clone ID: 701043386H1
aagtgttctaagagtgagcaacttcaaaacaccatagtgagaaatgacttccaagggtgcaattctcttgtgtctcaatgttctcttcttcactgtggttagttccacatatgttccatgcaacccaccccccaaaactccaaacacccacctgtcccaaagccaccttccccaaagcaagtttcttgccccaaggacactgttaagtttggtgtgtgtgctgatgtgttaggtttgattaacgtgcaactagggaagccaccaaaa

SEQ ID NO: 44035 - DNA, 268 bp, Glycine max
  Clone ID: 701043388H1
ctcaccacctctagtttatgatatcttcatttctctctagttgtttcaagggaagaacaagtgctatttgggaaccacattgaagaagtgagaaagaggaagctccaaaagcataagaaaaataagactgaagatggaaaaagtctaaattactatgtgctacttcttgtacttggtcatttcctttgttcaggttcaagtaggacacagaaggaagcaccagtacatatgaatgtactaaggcataatgaagaaaaacaactaaaat

SEQ ID NO: 44036 - DNA, 262 bp, Glycine max
  Clone ID: 701043390H1
gcaaacataacttgcagtaatggcttcaatgaataaccaaaaagaaattgagctctttgagggccaatctcttctgtacatgcagctatatgggcacctaagacctatgtgtcttaagtgggctgttcaactaggtatccagacataatacagaaccatgccaaacccatttctctttctgacttggtctctactcttcaaattccaccagctaacgctgcttttgtgcagcggttcatgcgcttcttggcacacaatggaa

SEQ ID NO: 44037 - DNA, 266 bp, Glycine max
  Clone ID: 701043391H1
ccaattttgcatgtacaagaaactgtcattaatactatccgattttgcagagaaaaaaaatccttgtgcttgttaatcttttgttggaaaatcatgcttctaaatgtaaagcattaaaaatctatcagtgaccaaatcacatggtggtttttatgtttctgaatatattcgcacccgattctgcagctatttgcttttgatacagtacacaagaacctatccccaaagcctggagagcagtccaaaatcccaattcctgcatcttt

SEQ ID NO: 44038 - DNA, 270 bp, Glycine max
  Clone ID: 701043393H1
atccaatcatttcctgaaagacaaaaacaaaaacaaaataaaaatcgcgttcagacacactcacaattcacacaccaacaccaccactccccaatctctaacttttcccgagaaaattataatttccattctcttttctcctcagattcccggaaaatatagtattcacaacgttatattttggcaccgccaagctccaattcaatccgtcgtcgttttcgcgaattccgaatgcgtcgacttcgggttggagaatgagttctccgtgct

SEQ ID NO: 44039 - DNA, 257 bp, Glycine max
  Clone ID: 701043394H1
ataagaagaagaggagagggaagatgatgatgatgacaatggaggggatgatggacaagggggtgttggatgatgtgataagaaggcttctggaagggaaaggagggaaacaggtgcaactctctgagcggagatccgtcaactctgcgtcaacgccagacaaatcttcctctctcagccaattcttctcgacctccgtgctcccatccgcatctgcggtgatatacatggtcagtaccaggacttgctgaggcttt

SEQ ID NO: 44040 - DNA, 271 bp, Glycine max
  Clone ID: 701043395H1
ctttaaacctctctctctctcaaattattcgaaatccaaaaaacaaaaacaagtttcttattataaaaaatgaaacaaatagaaatggaaagtaacgcatcagcactagcaaagaaagtttggagcatggtacgtgtggtgtgttcatgcttcgaaaaggcataacaaaggggaagctcatgatggacctcaacatgatgctgaaacgccgcggcaagctcgccggcaaagccattgccaacttaatgtcgtcccaccaccaccacaaccg

SEQ ID NO: 44041 - DNA, 251 bp, Glycine max
  Clone ID: 701043401H1
atcagaatcgcgtttgggagaagaagagcaaaatcgctgtgaaaatgagcggaacggtgaagaaagttagcgatgtagcattcaaggtgggaaggaacatcgattgggatggaatggcgaacttctggtctccgataggctcgcagggagttctccaatctccgtcgcgctttcgacgaggttaactcccaactccaaaccaagtttagccaggaacctgagcccattgattgggattactatagaaaggg

SEQ ID NO: 44042 - DNA, 235 bp, Glycine max
  Clone ID: 701043402H1
cctgggtaacagcagtcattcttaatctcatgtgacaaataatgatcatcgtgaatggtaacgttgagtgtcctaatgtgaagtacaccgagactgagattcagtccgtgtacaactacgaaacaccgaacttgttcacgagaacaggaatggcacctatcagtggattgtcaaacccaaatctgtcaaatacgaatttaaaaccaacatccatgttcctaaatgaggggtaatg

SEQ ID NO: 44043 - DNA, 246 bp, Glycine max
  Clone ID: 701043403H1
actcgagccgattcggctcgagacacaacatttacattactctcacactttctccaatatgcgttcttctcgaaatgagacttatgcacttatgctagtggtggtggttggctccatagtggcttcctgtggtgcaacttcaaccaagactttgatctaacttggggtgatcagcgtgctaagatattcaatggtggtcagcttctatctctttccctggacaaagtctctggctctggcttccaa

SEQ ID NO: 44044 - DNA, 247 bp, Glycine max
  Clone ID: 701043404H1
gctcattattctccactcacattcattcattcactcaccccaaaacccaaaaacctttccttttactttttctcaaactgaaacataaaaaatggagggtcttattccttttgtttacaaggctatcatgcaatcaagggcgacaaagagggtcatcctataggatcatggctttgtgagtctccttactcatacatgagacttcctggtgactcgggtaggtttcaaattcaagcaccagctgctg

SEQ ID NO: 44045 - DNA, 254 bp, Glycine max
  Clone ID: 701043405H1
gaggtcatcatccgcagctgctgttattcgcaccgcaaacaaacagtgagccatggccgtcggaaagaacaagcgcatctccaaagggaaaaagggtggcaagaagaaggcagctgatccctttgccaagaaggattggttgacattaaggccccttctctttttcaagtgaaaaatgttggcaaaaccctcgtctctcgtacgcagggtaccaagattgcttctgaaggacttaaacatagagtgtttgaggt

SEQ ID NO: 44046 - DNA, 265 bp, Glycine max
  Clone ID: 701043370H1
atccctagctctgtcgttccgtcgttgacgatggcgtttcgggtgcgaaccctgacctcctctctctctttcttctctctctcttgtccatcgcttccgccaatgtcttcttcgaagagcgtttcgatgacgggtgggaaatcgatgggttaaatcagattggaaaaaagatgagaacgtggctggggagtggaaccacacctctggtcaatggaatggagacgctaatgacaaaggtattcaaaccagtgaggattacagattc

SEQ ID NO: 44047 - DNA, 273 bp, Glycine max
  Clone ID: 701043341H1
ggcgtcatcaagtgttagggaggacaaataccgcccctttatgcgcgaagacagtgagaagaacatcaaatggagatatggtgctcctccaaattatgacgttgtcaacaaattatttgatgaaggcagaaccaaggtatggcctcgggttcacttgaagaaaaggtgcagactttagtgaagaattgggagatggaaatgttccacaaggaggatttcaaggataacagatcagtggacccagagaaatacactttcagcctaaacggaagg

SEQ ID NO: 44048 - DNA, 273 bp, Glycine max
  Clone ID: 701043342H1
atttgtaaacacacactatcaaagcaaatggggtgctcattctccgggttgaacgcactttacgactccgtgaacggcggaggtgatgtttggatcaacgagaaccgtttccgcatcgtgcgccagtacggagaaggtggcttccctacgtctacctcgtcaaggaggctcccgacgactccgccgccgctggcctcgccaagaagctcaaaggctcctctcatctctccgatgatggaccttatgctatgaaaaaggtcctcattcagaaca

SEQ ID NO: 44049 - DNA, 272 bp, Glycine max
  Clone ID: 701043343H1
gaaaatctcattccaccaagtaagaggagctggatacctatggagtatgcccctcaagaaagcaaacttctgacacgtcaagtgatgacccgagacatcatagaattttttgtcagaaacatggtaaatgaacatttgggtgcaactgcaatgcacatgtggtacatgctgattccagtgactatggtgccttggatgaaaaatgcatacacttggccgagctagcagccactgctgtcgattttccaaagaccgggaagcttgtcactatg

SEQ ID NO: 44050 - DNA, 269 bp, Glycine max
  Clone ID: 701043344H1
gaacgggttttgaagaagaagcagttcaattgatcaactcagatttcagggacctaagtctagctgctaatagactcgcccatcatgccatcaaacttggtggcattggctttggagcctctattttcggattgtctgctgccatgctgctatttatctgttgattttggatcgtacaaactggtaaacatatattctcacagcactactcattccatacattttcttcagcttgccttcagtaattttcgacgtcttcaggggagagc

SEQ ID NO: 44051 - DNA, 274 bp, Glycine max
  Clone ID: 701043345H1
catgaaatccctccttggcctttcttccttctttggttctggttcttgctctgtgtcctgctgttttctgctcttattcgtaacacttcggctattctgttcgtcgcttagacgagtctcacagatggggagagatggaaatgggaacacaacgatcgctttcactccattcaccagtacgagaccgatgatctgaccggtgcggttcataaccctcgatcttgtcgagaatgggtggttttgtttactctgacgttgatgctgcttataagtg

SEQ ID NO: 44052 - DNA, 129 bp, Glycine max
  Clone ID: 701043346H1
tgattgagtcaccagaagttggtggaccttctattagctgaaagaattctaacatttttctcccatgatagataatttgttattgtttaccctttccaagctattatgatagtattttccctatgtaac

SEQ ID NO: 44053 - DNA, 274 bp, Glycine max
  Clone ID: 701043347H1
gctcaagtgatctcaatgtgggaacctgaataaaattattttatatactgtaatataattaataatcccagaatatttttatcgtaataattcaaggagagtcaatgaattggccttcctagttcaacaattttgtatttgacgttgtggaccatcctacatttttacatcttcagtatttttctactatctttagtgtatattatgtatatatttttatacattatctttagtatattaattaattaatctattaagtacgttttgttttatg

SEQ ID NO: 44054 - DNA, 274 bp, Glycine max
  Clone ID: 701043348H1
gaagaaataaaagtgaagttctaattggtgttattgagcagatagcatggagccacagtgtagaatcaagaaggatgccactgaattgatagggaataccccaatggtatatctgaacaacattgtggatgggtgtgtagcccgtatgctgctaaattggagtacatgcaagcgtgctgtagtgtcaaagataggattgctttgagcatgattgaagatgctgagaaaaaaggccttattacacctggaaagactgttctggttgagtatacaa

SEQ ID NO: 44055 - DNA, 265 bp, Glycine max
  Clone ID: 701043350H1
aatttccctaggggcttaatatctcccctcacttgtgcctagccttatgtcatagtattatcattcattctcatctttctctcttctctctccacccaaaccctaactcccgaccctgttcccctctcgtatccgtcatgaaagaggaaagtccaagaccgaatctaagagagccgatcccaaacttgctgtgaataagaagggagccgccaccaagctaggaaacccgccggcacagggtaggcagcgaaagaccctaacaagc

SEQ ID NO: 44056 - DNA, 267 bp, Glycine max
  Clone ID: 701043352H1
gcggcggaagtccttcccacgtgctcactgggtaggtgtcaaattttgtcaatcggaaacacccggcgccggaaaagcagtgaaagtgtcggagccgatgaagaaaagtcgccgaggaccacgctcgcgtagctcacagtacgaggagttactttctacagaagaactggtagatgggaatctcatatatgggattgtggaaagcaagtgtatttgggtggatttgacacagcacatgcagctgctcgtgcgtatgatagagcagct

SEQ ID NO: 44057 - DNA, 270 bp, Glycine max
  Clone ID: 701043353H1
cttcgtctcaaacttcttcgttccttcgattcattccatttcttccaaaatggccaaagacccagttcgcgttctcgtcactggagccgcagggcaaattggatatgctcttgtccctatgattgctaggggagtgatgctggtcctgaccagcccgtgatcctccacatgcttgacattcctccagcagcagagtcgttgaatggggttaaaatggaattggtggatgctgcattccctcttcttaaaggtgttgttgctacaaccgat

SEQ ID NO: 44058 - DNA, 172 bp, Glycine max
  Clone ID: 701043354H1
gtcattgatctggcttcatgaaacacaattacaagatggaaatcagaacttaaacaaattaatttctttgatttgcagcaggggaacaacaaaattaatttgtttaagttctgatttccatcttgtaattgtgtttcataaattcattgatctggcttcatgtttgttgcac

SEQ ID NO: 44059 - DNA, 272 bp, Glycine max
  Clone ID: 701043355H1
gtctagaatgcctctattctcctctgtcggtcacacacagcgatagatagataatagagaagagaagcattcataggcgccaattgtgagtgagacagaagtttctgttttttctacttttccatttttttgggagagagagaggagagatctgattcttcaccataactgtcattgctttgcttctctcactcagcacaagttgacaagaagggcattgccatttcaatcccatacaaaaagcacacaccccaattcaccaccattttcct

SEQ ID NO: 44060 - DNA, 272 bp, Glycine max
  Clone ID: 701043356H1
cgtgtcttcccccaacgaaaccaacgaggaagcaagggggatcttgaattctgcgcttaacgcttcgaatctttgaattcattcaaagatctccctctacgcatatcagggcactatggctgccacggtgaaacaaatgtctttatcgtgtcactgttgggtgtggtgtccttcattttgggagttgttgctgaaaacaagaagcctgtggctggaacacccgtgcctggttcggatggtatctctgtcacctgcaagtacccagccgatcc

SEQ ID NO: 44061 - DNA, 192 bp, Glycine max
  Clone ID: 701043357H1
tctggctcccgtggttggtactgtggaaacattccttgggaggccatggaaggagtactcaaggactgtttatatgcagtctttcatggatagtttgatagctccggctggttggcatgaatggaatgggaatttttcactggcaccttgtactacgcagactatgataacacaggtcctggttcaaacact

SEQ ID NO: 44062 - DNA, 269 bp, Glycine max
  Clone ID: 701043358H1
gcaactcttagtgcaggtgagaggcgtcacgatgatagcccagatcacaccatatttgttggagacctggctgccgatgttacggattatcttcttcaagagacatttcgggcacgatatccctcaattaagggggccaaagtgtaattgataggctaactggacggacaaagggttatggttttgttaggtttggagatgagagtgaacaggttagagctatgactgaactgcaaggggttctttgttcaacaaggcccatgcgaatt

SEQ ID NO: 44063 - DNA, 271 bp, Glycine max
  Clone ID: 701043360H1
gtttcttcttggtggatccattcagatctcatccacgatgtgttgcatttgtctttcacgatgctgaacccgaagccgcgcttcttctaatcacacgacgactcattccgtatacttcacactctcgtcaacaatggccgatgtgccggagccacagtgagtccctctatcggtgacaccaacgctgcgcagaagaatgtgttcgatttgggagcgtttgttggagacctaactttggaagatgatccaagcagcgatgatatatcattgg

SEQ ID NO: 44064 - DNA, 273 bp, Glycine max
  Clone ID: 701043361H1
gttccttccattcctttcttccggatcacagggaaaataaaaaacaatggagttggacttgacaccaaagacagcagaagtgttgtttgagggagatggtggaggttactacacttggtggagttctaaagtgccactgctggcaagaccaatgttggtgctggtcggttagtgcttcagcctcagggctttgctattcctcattattcagatatatccaaagtaggttatgtgcttcaagggaacgatggcgtactagggatggccctccgc

SEQ ID NO: 44065 - DNA, 272 bp, Glycine max
  Clone ID: 701043362H1
atcagcagcaacagcagcagcaacttaaaaacttgcctgttcagcagcagttaccaaatgtcatctctcctatgtctaagtctgcatgggaggagattgagactgggtacctgatgcaatctcctcccatgcaagccctagcttacattgtcagcagcagagctttcctgaacctatgaggaatcatatttccggttctgatgtttcccctatccagagtctactagggtcattctcccaggatggaacatcccagttacttaacttgcgtg

SEQ ID NO: 44066 - DNA, 275 bp, Glycine max
  Clone ID: 701043364H1
gctaatttctctcgttgtcatattctagtttcaacttatggagtttacctctaataatatgcttccttttgtttcaatgttttggcttgtgttcctaagtcctttagtgaactgtcaactttattataatttctatgactcacctgtccaaacctgaccggaattgttcgatccaacgtgtggtcagctatggccaaggatgcaagaattgctgcttctctcttgcgccttcatttccatgattgttttgtcattggatgtgatgcatctgtgct

SEQ ID NO: 44067 - DNA, 138 bp, Glycine max
  Clone ID: 701043365H1
tctttttccttcaagtcactaagataatggcaagcatttataacattccatcacacataaaagctctgggtctattatgaatatggaaacatagaagagattctcaaatttgaatctaacatacccataccagacatc

SEQ ID NO: 44068 - DNA, 261 bp, Glycine max
  Clone ID: 701043367H1
cacaacaagactagttgttcacaatgaaaagtcgaatgagacaagcacatggtttggtgaacttatagaagttcatgcaacaactcgaggtggtcaccataggggtaaagtagattagatctacagttgctcctgatgtacacctccaatggatgctgaggagtatgctgagtgtgaggcatgggtacaggactttcctgcccttcgtgaagccatgaagaagagagggattgtggatatggatctcgtgatggtagatct

SEQ ID NO: 44069 - DNA, 266 bp, Glycine max
  Clone ID: 701043368H1
gaaaatcactgttaaataaacctaatctttgtttagcttgttttgcaccttgatgaatggagcctgcaaccgagaagagagaggattttgggaagttgcagtacggatgcgagcactataagagacgatgcaaaattcgacaccatgctgcaatcagatttttccatgtcgtcactgccacaacgacgccgcgaactcatctagcaaccccgcagatcgtcatgaacttgttagacgcgatgttaagccagttatatgctctgtct

SEQ ID NO: 44070 - DNA, 268 bp, Glycine max
  Clone ID: 701043369H1
ttttcctccatttccttcttcgctagattacccagatctacgacgagtctctgctatgaattaattctcatatctcaaaatcattcaccgttttcatttcattctaactaatctttccagaaccctcgaatctcttctttgaacgtgcaaagatttttgacttgaccgaatgctgttgcggttgaaatcggtgtgagaaatagggtttcgacgatgccttcgcttccctttggactccttctacgccatttggtcccttccttggccc

SEQ ID NO: 44071 - DNA, 272 bp, Glycine max
  Clone ID: 701043340H1
gttttattcttctctccctccttcattttcatttacttctctggaggtatataactattattcttttgtttttttaaaacataaaaattgtttaaatcttttgccatgggaacccagattttgcggcctcaggactgtttcgtagacgaatcatgtctcctcccgctgacttttcccggcggaggagttccggtaactactgtaattattattaccacagcaaccatgttgccacttccaggtcgtgccggacaccggttgcccgacccgat

SEQ ID NO: 44072 - DNA, 274 bp, Glycine max
  Clone ID: 701043310H1
cacaaaccttcttccaagtgttcttcccattattctacattgtcctctctttggttctctattatttattaattgtgcactccttttggttctctaatatttatttccaccgttttcttaaaacaaaagcctcttcaaattctccaacactaataaccaaaatggccactgaaaagcttagaagttgtgcaaacttccttgagaactctaaaccctactttgccatgattgctatacaatttggctatgcaggcatgaacattatcactaagat

SEQ ID NO: 44073 - DNA, 276 bp, Glycine max
  Clone ID: 701043311H1
attttctctactgataatcgggaagatttctttaataatcttcccagtcctaaagctgataccccagtatctacttctgccggcaactttgctgttgtggaaaatgccaatggttcagagacaatccaagatgatgtggaagtggagggagcagtgatccttcatttgacgacagtgttcagcatgctttagttgttggggactacaagggggcagttatgcaatgcatttctgcaaataaatgggctgatgcattagttattgctcatgttggga

SEQ ID NO: 44074 - DNA, 276 bp, Glycine max
  Clone ID: 701043312H1
ctctcttcacaaacggtgccggaaaagtccattctttttctcaattccccggcaaaacaaatgcgacccactttctagaacctcgccgtgtgccggaaagttcactcctttctcacttttccgcagcaatgtcaatcttcgacggagcttcatgaacacgcaactctccaagcacacttcgatcttcggcctccgtctctgggtcgtgatcggaattctcatcggagtcttcatcgtcttcaaggtcttcctcctctacctctgccttgtctctcg

SEQ ID NO: 44075 - DNA, 279 bp, Glycine max
  Clone ID: 701043313H1
tgaattcagagaaggtcctgctctaccagttcttgatgaaatgattaaagatgagaagaaccatggaagctatgacttcatctttgttgatgcggacaaggacaactacctcaactaccacaagaggttgatagagcttgtaaaagttggcggcgtgatcgggtacgacaacaccctatggaacggatctgtggtggcaccccctgatgctcctcttaggaagtatgttaggtactacagggacttcgtgctggagctcaacaaagccctcgctgtgga

SEQ ID NO: 44076 - DNA, 280 bp, Glycine max
  Clone ID: 701043314H1
ggtgtctcatcatacaaggtttcctgggtgccagatcccgtcaccggttactacaaaccggaaaacatcaaggaggttgatgttgccgatttgcgtgctacccttctccgcaaaaaattcaacaactaatttcaacaattttaattttttccaaaccttgggtgattgattcgttatggaattaattttgatactcatatgctctgcccaccttcattatacgattgctatagttttacaagtcagtagaataactattagcagctaataagaattgtaa

SEQ ID NO: 44077 - DNA, 276 bp, Glycine max
  Clone ID: 701043315H1
ccttgatataggaatggctcaaatgtaaagggatattatgtatggtctttgttcgacaattttgaatggtcttccggttttacatcaagatttggaatgatttatgtagattacaaaaatgatttgaagagatacaagaaattctctgcatatggtttgagaattttctgaagaaagaaaccaaactatatggttctagcaaatagtattatgaaatttgtttacaaaatagttatatatatttgtaaataattatttgatttgtatttggtcatt

SEQ ID NO: 44078 - DNA, 153 bp, Glycine max
  Clone ID: 701043317H1
aatcggctcgagctgagcgaatcggctcgagggctgaggtaaaggaagatcttacagctgaggaggcatctgaaagtaagaagcataaacttgcagagttggggaatgccttgcttacagatccagagtccaatattaaatttctgaaggaga

SEQ ID NO: 44079 - DNA, 277 bp, Glycine max
  Clone ID: 701043318H1
cctcaatccaactatgcttccttacattatcttacatctttctaatccaagttatccatttgttcgtctgtgtcgtggaagtgggttggttcataattccttcgctctctgagatcgtggagaatctcgtaatttgaagctaccaccattgccaaagttgagatttttacgcacctaagagtaatgcaagaccttttaagaaagattaggtactgggtatcttgtattccaactccatcaggatgttggggaggaaagagatatggccgtcgctagc

SEQ ID NO: 44080 - DNA, 275 bp, Glycine max
  Clone ID: 701043319H1
accggaatcagaggctccccctaacttctggggccacaccccggaagaagaatactacacctcccaaggcgttcgcaacaccaagtcccacttcgaaacccccaacggcaaaatcttcacccagtccctcctccctctcaacctccaacccaccaagtcaaagccaccgtctttatgacccacggctacggctccgacaccggctggctcttccagaaaatctgcatcaacttcgccacctggggctacgccgtcttcgccgccgacctcctcgg

SEQ ID NO: 44081 - DNA, 271 bp, Glycine max
  Clone ID: 701043321H1
ttggtgcggaacagtgtatgctggagctaacttccgtacccctgttgagccctactaaagttttcaagtggaaaaaacctggagatccccacgagtttgagcaatgagatttggatgcgcggttttagttgtgatcaataagtcgaagttagaacaatagtcttggtataaggaccttgccaataattttttagttctgattcacagagctaagacagttccgtcttagactttaaaagttttgatatttagctttaatacttgaagttta

SEQ ID NO: 44082 - DNA, 276 bp, Glycine max
  Clone ID: 701043322H1
tgttgatccatctcttgtttcttgctttctttcttcaccatgtcacttgctgggaaaatcaccactgaaatcggggttcatgcaaccgctacaaagtggttcaacctcttcgcaacacaactccatcatgttcaaaacctaactgataagtgcatggaaccaagctgcatcaaggtgaagactggcatcacaacgagacagtcaagcactggacttataccatagatggtaaggttacaacatgtctggagagtattgaatccattgatgaacaga

SEQ ID NO: 44083 - DNA, 278 bp, Glycine max
  Clone ID: 701043323H1
cgattgctagaatggaatttcgatgctcagtcatctcttttaccattctcttctctcttgctcttgcaggagagagccatgtccatgcatcgctacctgaggaagattattgggaagctgtttggccaaacactcccattcccactgcctgcgagagcttctaaagcctctccctgcagcgtgttgaacgcgatgaactccctaagcaaattgatgatacacagtacccaaaaacattcttctataaagaagaccgtcatccaggcaaaacaatgaaa

SEQ ID NO: 44084 - DNA, 279 bp, Glycine max
  Clone ID: 701043324H1
ctacaaatcccctccaccaccaacgtcgcatcctccaccttaccactatgtgagccctccaccaccttctccatctcctcctccaccataccattacacatcaccacctcctccttccccagctcccgctcccaagtacatttacaaatccctccacctccagtttacatatatgcttccccacctccacctatctacaagtaagttcgaattgcggaagaccattcacgataaatcatgttctagtttttatcgaggaataaaggcaagctctatttg

SEQ ID NO: 44085 - DNA, 272 bp, Glycine max
  unsure (1)..(272): unsure at all n locations
  Clone ID: 701043326H1
gctgtggctgggataatgtctgatgcgaacatcctaatcaataccgctagggtccaagcacaacgctacacatacgcctatcaagagcccatgccagttgagcagttagttcagtctctctgtgataccaagcaaggttacacccattcggtggtcttcggccatttggagtctcgtttctgtttgcgggatgggacaaaaactttggctttcaactttacatgagtgaccctagtgganattacggtggctggaaagctggagccattggg

SEQ ID NO: 44086 - DNA, 274 bp, Glycine max
  Clone ID: 701043327H1
ggtgtctccatgttggatctctctcatttcttcttcaacttagtgttctccttcaacactctaactctaagtcacttttgtcttctccttcactctcttcaactcaaacctcacatgggttatggtgttgtgttgttattagcttgactcactcccaacgtctcttttctctttgttttgattgcaatattgtaacgctcgcattccatttattgcttcctttgacttggcttccttcctttgcaagagtttttctttttccttctcttctctc

SEQ ID NO: 44087 - DNA, 275 bp, Glycine max
  Clone ID: 701043328H1
caacagtagcagaaccgaacccatagcccaaaacatcatcaaactcatcagcaatctctgcttctccgtctttgtcttctctgtcttaatcttcaccgtcatagccataacctaccatcccccagacccatggctcgagtccacccctccctaaccaacctcttcacccaatcacaaaatgccactttccgaatcgactcctccgtcctcaaaaccggcgaagacctcgctccctcgccgcaagaccctcccctcccgtcgccgccaccctccgc

SEQ ID NO: 44088 - DNA, 277 bp, Glycine max
  Clone ID: 701043331H1
ctcccctcgcaaggaactcaaggtcaccttccccatggaaagctcagtcgagatcgagatctaggtcaaggtcgagatctaggtcgaggtctaggcctagacaaaggccaagatcgcgttctagaagtcgtggcaggtcaaggtcaccattcgtggaaggtcaaggtcaccaattcatggaaggtctgaacctacaaatcctggtgacacactttatgtaactggtctatcttcgagggtcaccgaaagagacctagaggagcatttctccaaggaa

SEQ ID NO: 44089 - DNA, 280 bp, Glycine max
  Clone ID: 701043332H1
ttcttcgcaaccactactactcactcactgcagatctcaattgcatcgctgtccatggctaccatcgttagcatcaaggcccgccagatcttcgacagtcgtggcaatccaactgtcgaggtggatttgacttgctccgatggtacttttccagagctgctgttccaagtggtgcatccactgggatttatgaggcccttgaattgagagatggaggatctgactaccttggaaagggtgtatcaaaggctgttgacaatgtgaacaccgtcattggccc

SEQ ID NO: 44090 - DNA, 191 bp, Glycine max
  Clone ID: 701043333H1
ctcgagccgctttccaaactctcttcttcccttccaagacccttttgaagcaaccgatggaatttcagtttcttcccagattctaccttcttgtttccttatccattctgttccttgcaccctttcacgctcaagctaaaattaaaggacttactgcgataagaaggcagactatgctgtgaaggtgtctg

SEQ ID NO: 44091 - DNA, 252 bp, Glycine max
  Clone ID: 701043334H1
gcaagaaggaagtgttgttggaggaaagaggcagagctgcaatcaccagagtggaagcgcgaaacggtcctccccggctttccattttttctcttctgatgaaattttagttcatcccagttgctgattgagattgaatttaaattgaaaaagcgtacttgtgccactgtacttttagagtctgcgggtaaggggctagcctatcgtatgtttgcgtagatctagtgtccgtgaacgcgttaccatttcacc

SEQ ID NO: 44092 - DNA, 271 bp, Glycine max
  Clone ID: 701043335H1
cgatcagatcctcttcagattcggatcaccgccgagtccatgagcacgccagcgctttcagggggcacgggcctcttctctggattcacgcgtttatgcaagggccttgcggtggtgcttgtttgcggtcacattgcggttcagttatcccttcagctgttaactatcttgctcttattcccgccaggacaatcccatttgcctggactctcattacagctggatatgttgaacaatctatatatggggtagtggtcagcacattaagtct

SEQ ID NO: 44093 - DNA, 272 bp, Glycine max
  Clone ID: 701043336H1
ctggtgtgcctgctgttgttcagtttgttctcatgctcttcctccctgaatccccaagatggctttttgtcaagaataggaaaaatgaagccgttgatgtgctttctaagatctttgacgttgctcgcttagaagacgaagtcgatttcctcactgctcaatccgagcaagagcgccaaagaaggtcaaatatcaaattctgggatgtttttagatccaaagaaatcagactggcattcctcgtcggtgccggacttctggcttttcagcag

SEQ ID NO: 44094 - DNA, 259 bp, Glycine max
  Clone ID: 701043337H1
gtttcgttccgtttcaatggggagcgaagagcagaacggcgaattctacctgcgttactacgtcggtcacaagggcaagtttggtcacgagttcctggagttcgagttccgcccagacggcaagctccgctacgccaacaactccactacaaaaacgacaccatcatccgcaaggaggtttacctaacccccgccgttctccgcgagtgccgtcgcatcatcgccgagagcgagattatgacggaagatgataacaact

SEQ ID NO: 44095 - DNA, 88 bp, Glycine max
  Clone ID: 701043338H1
cagaaagacagtaagtgagagaggagcatggcagttgttgaaagaaggagggaattgatattcaggtcgaagcttccggatatctaca

SEQ ID NO: 44096 - DNA, 276 bp, Glycine max
  Clone ID: 701043309H1
caaacttcaacaacaatttgatagctacgtgtcccaatgccgagtcccccaacaccgttaatttggacgtgagaacccccgtgaagttcgacaacatgtattacatcaacctcttgaaccgccaaggagtgttcacttctgaccaggactcgcgggcagccccaaaaccaaggaaatcgtgaaccagttcgcttcagaccagaaactgttttttaagaaattttccgatgcttttgtgaaggtgagccagctagatgtgataacggatcgtattgg

SEQ ID NO: 44097 - DNA, 245 bp, Glycine max
  Clone ID: 701043265H1
acgaagttgtttctcaatatggagagttgatatgggatctcttggtatcaggggtgaagcctgatgacatatgttcacaagttggtttatgttcttccaaaaggcatgaatctaagagtgctggaattgaaatggtgactgaaaaggagcagggagagttgacggcaagagataatcctttgtgttcttcttgtcagatgcttgttctttggatccagaatcaactaaaacaaaaggcaacgaag

SEQ ID NO: 44098 - DNA, 217 bp, Glycine max
  Clone ID: 701043266H1
cgctctactccttgtttgaggagtctctcagcggccttgccacaatccgcgccttcaactggcagaaagcgctgaacgacagaaactacgaactcctggatcgctcgcagcggcccttctacctcttgtttgctgtccagcgttggctcactcttgttctggatctggtcgtcgctgccattgccgtactgctgatggtgctagtggttacgctccg

SEQ ID NO: 44099 - DNA, 191 bp, Glycine max
  Clone ID: 701043267H1
ttggttttcttttcctatccactctcaacatagcagcagcaactgcttcagtttctattttcagtagtttgttccaagtttctgatcaatggaacatagtttgaaaagaaagtctccagagagtggagacaatttactcttcaacagattttctctggatgaccttaatgaagatctcttggagagggtac

SEQ ID NO: 44100 - DNA, 144 bp, Glycine max
  Clone ID: 701043268H1
ctaaactgtaacataacagagcttgagccttgatccttgtatctcgagtcacgagccaccctcagacgtagtcaccaacactgatcaacgcgactatggcatctgcgttcgacaagctcgtcgactcccccatgtaccagagac

SEQ ID NO: 44101 - DNA, 163 bp, Glycine max
  Clone ID: 701043270H1
gcaacacaaagcagcacctctgtttgataggcttgtgtttgataagacaaaactagctctaggtggacgtgttcgcatcctgttatccggagctgctcctttgcctaggcatgtggaagagtttatgagggtcactagtggatctacattatcacaaggtttt

SEQ ID NO: 44102 - DNA, 160 bp, Glycine max
  Clone ID: 701043272H1
ctcggatcatcaaaatcagaaagaattgggggaatggagaacaaccagcaacaaggcgctcaagcccaatcgggaccgtaccccggcggcgccgtggaagtgcaggtgcaggtgcaggtgcaggcgcggccccgttccagcacctgctccagcagcagca

SEQ ID NO: 44103 - DNA, 197 bp, Glycine max
  Clone ID: 701043273H1
gatagtgtgggagagagaagagcggaagagaaaatgacgaccaggttcaagaagaacaggaagaagagaggtcacgtcagcgccggacacggccgtatcggaaagcaccgcaagcatcccggaggtcgcggtaacgccggtggcatgcatcaccaccgtatcctcttcgacaagtaccatcctggtttcttcgggaa

SEQ ID NO: 44104 - DNA, 214 bp, Glycine max
  Clone ID: 701043274H1
cgatgtcagatcttgaggctcacttgcgccctaagaggaagaaggtttgggtggactatttcgttcagtttcgatggatccttgttatttttgtggtccttcccatctccttcaccatttatttccttacataccttggggatgtaagatctgagtggaagtcctataagacgcgtcagaaggaacatgatgagaatgtgaagaaggttatcaa

SEQ ID NO: 44105 - DNA, 230 bp, Glycine max
  Clone ID: 701043275H1
caaactataggagggttaaggagcaggcggcggttgattatttagagttaaggtccgtggctcagggtgtctctagacaaagagaatttgacctttgtggcaaggaaagagagaattttgtgccttgttacaatgtttcagccagtttgttagcagggtttaaagacggagaggagtttgaccggcattgtgaactgttagttgaagcagagaggtgtttggttcgccct

SEQ ID NO: 44106 - DNA, 162 bp, Glycine max
  Clone ID: 701043276H1
cagaagatcgatctggtagaaacgatgaaggaactatgggcacaaatggggtcactaatggccactattgtgttcatgtacacaatctttgagcgcttcttccctccacacttgcgtgaaaaacttcaagcctatactcaaaaacttcacaaccatttcaac

SEQ ID NO: 44107 - DNA, 234 bp, Glycine max
  Clone ID: 701043277H1
caaagatggaaagaagctatctcatctaaccatgtgaagttggttgttacacctgattgtcaatcttctaatgcggacagatttaacattcttgcaaatacagagaaccgattgcctgcaacttctggagttgctaaatccaaacccaaaacaaagcctgagaagggaatgaagataaagtacattcccaaacaaaaagaagcaacctagtaagaagaaacaagaagaaattgg

SEQ ID NO: 44108 - DNA, 237 bp, Glycine max
  Clone ID: 701043278H1
cctccccacaaatacacacagaaagttgggaggtggtggtagctgctgcgaagcgttctgcaaccaataatagctttcgcagcaaaagcaacgattcaaattcaacctcctcagatggcacattctttctcgccagccaaacgcgcccttgcctttgcccttcaacggcgagggtacgcagtggcgtctgatgcttctccttcgatgagagggggattggatagcattagtgtaatg

SEQ ID NO: 44109 - DNA, 234 bp, Glycine max
  Clone ID: 701043279H1
cctaggtctattcttaccttgcgcggtggaccgagttgacggtgataagctcctcccttctcctccgccagatctcatcgtcgccgtcgccgaatttctccttggcgttttgtctccgcctctcactctcgttgaagcttattaagtaccgatagcatgtgccggcaaaattctccggtacaccatgccggtgaagaagaaattgcagctgatgatagccttttgatttattgc

SEQ ID NO: 44110 - DNA, 225 bp, Glycine max
  Clone ID: 701043281H1
gggcaaagatggttctgactatattaccttgagagtctcagatgtcatggctgttctctcctagaacaacttgctttgggttttgtaacttgaaatttttgtgtttatctcgagaaaacgtggattcttttaatcgtaaggacttttgaaaaatagtttattgcaatctgttccgtagacaatctctttttatctttgaaaaaaaaaaaaaaaagggcggccgcc

SEQ ID NO: 44111 - DNA, 200 bp, Glycine max
  Clone ID: 701043284H1
atttcttttctgggggagcaaagatgggtgtgtcgaaattgggttttttggggcttctttttgctgattttctctttgcagttggagctgtggagctgggcaggaaccaacccactgaaagaatttcaggtagtgctggtgatgtattggaagatgatccagtgggaaggttaaaggttttggtttatgacctcccaggt

SEQ ID NO: 44112 - DNA, 154 bp, Glycine max
  Clone ID: 701043285H1
ctagtgattccacaacgtgtcctaactctgaagtccccttactcttggttattctactcttctttctcctcctcagaacctcaaacaccaaaaccaagcattacaattcccaatttcacagaaacaccagaattaataaaacacataacaacaa

SEQ ID NO: 44113 - DNA, 163 bp, Glycine max
  Clone ID: 701043286H1
gtctttgtgtaccacaaggaaatctcgagacctttgacttgccacagatttgggtcccctgatatggatgacgctgaagatgaggctggatcgtacttcattagtgctgtatgctggaagagtgatcgccccactattctaactgcaaatagtcaaggcacca

SEQ ID NO: 44114 - DNA, 211 bp, Glycine max
  Clone ID: 701043287H1
gtcccctaataaacaaagaccaaaccaaccctttttatttgaaagcttgtaaaggggcacacccctttctctctcctccttccccctttaatttccttttccttcttaattgtcttaatttcccttgtattctggtaatctagctaaccctttttatttccattagccacgatatcatcaccatcgccaccttctaggtgggatccagggt

SEQ ID NO: 44115 - DNA, 131 bp, Glycine max
  Clone ID: 701043288H1
ctgtctctctcgaacacaatgtccaactccaccaccggcaccaccgaggccttaccaccgaagcccacctgggtcctcccataccgaaccgagaatctccgcgaggtctacaccctaagccgaaagctcgg

SEQ ID NO: 44116 - DNA, 150 bp, Glycine max
  Clone ID: 701043289H1
aatcaaagttccgcttccctccgcagagactggacgatctcgcgagccatgaatgctagacgagacaatcgtaacaatagagtttccctttttgatggtattgagcagggtggcatcagagcatcatctgtttactcctcttctcatgaa

SEQ ID NO: 44117 - DNA, 165 bp, Glycine max
  Clone ID: 701043291H1
ctcgagccgatgagaagcaacaccttagctgtttcagataatagaagatcgtcagtgtcttgggatcaagcagctggacgctttgtctcgtcctcatcaagaggtcccggaacagaattattgtacacgggccgttctatattttttggcagccccgttgtgaat

SEQ ID NO: 44118 - DNA, 233 bp, Glycine max
  Clone ID: 701043293H1
cggctcgagattttttttcctatcattactttcagctttacagatacgcaacttcagtgtggccctggcttcgagcagccttgcgcttctaaatctgaaaatccaggtttgattgtttaacacagacataaagactgggtattatgttttggtacatacaaaagaatatgtaatttaacttgaagaatatgaactagaaataaaaaaagattagctaattagtagctatttaa

SEQ ID NO: 44119 - DNA, 208 bp, Glycine max
  Clone ID: 701043295H1
tttgagtgtaaaataacagagtatagtgtagggccttgttcttgatactgtgctaaatttgttggatggcggagaaatcatgcatcaagcgccttcagaaggaatatagagccctttgtaaagagccagtttctcatgttgtggctcgtccttctccaagtgatattcttgagtggcattatgtgttggagggaagtgaaggaacact

SEQ ID NO: 44120 - DNA, 236 bp, Glycine max
  Clone ID: 701043301H1
tccccatctcagaaacaaacagaaccaaaccaccaccaccattataatacactccctgcaaaccctagaaacccaataatttgggggaacctcaacccaatcccagaaaccaaaatcggcctcgcaatttaacgaaaccgaggaagagaaatctgggcacccttcaaaattcgagatttccccgacaaaatgtcccaactgaagccaatgtcgcatatgacagtggcccttcgacc

SEQ ID NO: 44121 - DNA, 274 bp, Glycine max
  Clone ID: 701043302H1
gttggggtttgttttgtggcccatgatataactgctcagaagaatgtcatggacaaatttacgcgtattgaaggtgattacaaggcaattgtacagaaccgcaatccattaatccctcctatatttggcacagatgaatttggctggtgtgtgagtggaatccagctatgacgaagttaactggatggaagcgagaggaggtgattgaaaaactgcttggggaactttttttggacccccatatggctgcttgtcgcctaaagaatcaagaagc

SEQ ID NO: 44122 - DNA, 271 bp, Glycine max
  Clone ID: 701043303H1
gtggtgaacaggctcccgaggcagagtatgaggaagtcaagaaatgacatttaggcgtggttttgtagcatttgtttcttattaatcatcacataattgcaagaatacaaggttacttcttttgtatctaatgttgaaaaccattttttgctggaaggctctttaatttgtagcacttttggagtccaaagttccgaccaaaaaaaaagtgaaagatataaaaaaaaagggggggcgccccactaggggccccactcgccgcgaatttttt

SEQ ID NO: 44123 - DNA, 239 bp, Glycine max
  Clone ID: 701043264H1
attcttcaaaaattatcgtgtattcactggcgtcagtaggagtagaacataaagttcagttttttgcatcgtttttattaaaatttgttggcgaacaaaacagagaaaaaaaaaccagaaaattgaaatttcttatccgttttggcgaattgaactgcgtgttcaattgggttgttgaattcgaggcagagggaaccgcgggtgtacaaggaatttcgattctgctgttgttagaaacg

SEQ ID NO: 44124 - DNA, 276 bp, Glycine max
  Clone ID: 701043305H1
gataaatataaacattacaagaagctatggaaaccaactcagtttccaagcttctgttgcttgtcttcagtgttctctttgttggttctgagttgatccattgcagtgtcacctatgataggaaggccattctcatcaatggccaaagggaatcctcatctctggctccattcactaccccagaagcacccctgaaatgtgggaggatctaattcggaaggcaaaagacggaggccttgatgtcatcgacacttatgtcttttggaatgttcatga

SEQ ID NO: 44125 - DNA, 280 bp, Glycine max
  Clone ID: 701043307H1
accgcccccaaaatctcactcttctgccttctcttttctcttctcttcttcctccaaaacaagtaaacaaacaacactctcacattcaccacaacacaaacacaaacacaaacaaagacaacaaccttgtttgtctgcaatcaaaaccttcaagctggcgttcgagaaccaagacacccctgtccgagaaatcaagcccaagaaccggagaatcatgggtgctggaggccctgatgacgaggacaataggtggccaccatggctgaaacctcttctcaaa

SEQ ID NO: 44126 - DNA, 279 bp, Glycine max
  Clone ID: 701043308H1
gaggaggcactgtggcagaagtcttaggagtgtaaaacagagacgcaaaatgaagacgattctatcgtccgagaccatgaatattcccgacggcgtgagcatcaaggttcacgctaaggttatcgaggttgagggccctcgtggaaaactgtgcgagacttccaccatctgaacttggacttccaacttattaccgacgatggcggtaaaaggaagctcaagattgattcttggtttggttctcgtaaaacctccgccgccatccgcaccgccctcagc

SEQ ID NO: 44127 - DNA, 170 bp, Glycine max
  Clone ID: 701043222H1
gcaaattgatgatacacagtacccaaaaacattcttctataaagaagaccttcatccaggcaaaacaatgaaagtacaattcaccaagcgtccctatgcacaaccttatggtgtatatacatggttaacggatattaaagacacctctaaagaaggatatagttttgaag

SEQ ID NO: 44128 - DNA, 207 bp, Glycine max
  Clone ID: 701043223H1
cctttgttcactcttcttctcttgcggctagggtttagcgagctcttctagatttaaggaagatgggtaaggaaaaggttcacatcagtattgtggtcattggccatgtcgactctgggaaatccactaccactggtcacctgatttacaagcttggaggcattgacaagcgtgttattgagacgtttgagaaggaagctgctgaga

SEQ ID NO: 44129 - DNA, 145 bp, Glycine max
  Clone ID: 701043224H1
agccaaagagtattttgagaaggctgctgataatgacgaggttggcggccactataaccttggcgtcatgtatctcaaggggattggactcaatagggatgttaagctcgcctgtaagttctttgttttcgccgctaaccatggc

SEQ ID NO: 44130 - DNA, 226 bp, Glycine max
  Clone ID: 701043225H1
attgggagcactcaacctaaccattcaagttgtgaaaccacatcgcaagaaaattcacaagcgatggatccgaagctgaaagaggtttctcagctcttcgatcgcttcaaggcttcgtttctccggaacgacttcgataactgttccaatctcctttctcagctaaaggtgttacttacaggtttcagaagcctgccaccgttgtttgcagatacacctaatgcag

SEQ ID NO: 44131 - DNA, 236 bp, Glycine max
  Clone ID: 701043228H1
tttcagtttcagaaagaaagcaaaagcaatagcaatgggttggatcggtgagactgttgattccatcaaatctcttcagatccgccaggtcctcacccaggctgtgagcctaggcatgattgttacgtctgcactgataatatggaaggcattgatgtgcgttactggcagtgaatctcccgttgttgttgttctttctggaagcatggaacccggattcaagcggggagacatct

SEQ ID NO: 44132 - DNA, 215 bp, Glycine max
  Clone ID: 701043229H1
cggaaagatcaggctttgctttgctttgtgtgagatctgaagaagagaggtatggcaaaaagggtcttcttgtacaaggatttggttccttttggggccatggtgaccatggaatgcctcaacgtagccttgaatactctgttcaaagcagctaccttgagagggatgagttaccatgtctttgttgtttatgcttatgctgttgctgctattgt

SEQ ID NO: 44133 - DNA, 211 bp, Glycine max
  Clone ID: 701043231H1
aaagccccttcttttcccttcactccaggtatggaagctgttggggttgtgacagctgtgggtgctggactcactggtaggcaggttggagatcttgtagcttatgcaggtcaaccaatgggttcatatgctgaagagcagatacttcctgcaaataaagtagtccctgttccttcgtcaattgacccagctgttgcagcatccatcattc

SEQ ID NO: 44134 - DNA, 244 bp, Glycine max
  Clone ID: 701043232H1
gtgaactaatgcttggccagcctctattccctggtgagagtggagtagatcagcttgttgaaattatcaaggttttaggtaccccaacaagggaagaaatcaagtgcatgaatcctaattataccgagtccaaatttccacaaattaaagctcacccatggcacaagatctttcacaagcgcttacctcctgaggctgtggatctcgtctcaaggctactgcaatactctccaaatcttcgatg

SEQ ID NO: 44135 - DNA, 198 bp, Glycine max
  Clone ID: 701043233H1
acaacaaccgacaacaacaacaacgttgaggataacatcatcatcatcaacgttgttgttgttgtggttgttgttcgtcggaggaggaagtgagtagactccgtctaaggcttccaactgctcgaaacatcgataacaacaacaacgttgatgatgatgatgttatcctcaatgcggttccgtgttacgttatagctg

SEQ ID NO: 44136 - DNA, 239 bp, Glycine max
  Clone ID: 701043234H1
ctcgagcgtggaacccggctcgttgcttcattaaacaatgtctcttttgtgatgcaccaaactgcacttctccaagctcactacttcagtatctggggggttttcaggactgattttccagaccgccctccatcccctttcaactttactggtgcgcccctaactgccaatcttgccactttaactggcactagagttagcaagattgctttcaattccacagtggagctagttttgca

SEQ ID NO: 44137 - DNA, 237 bp, Glycine max
  Clone ID: 701043235H1
gagcccaagagaccctcagacaagcctttgaggcttcccttgcaggatgtctacaagattggtggtattggaacagtgccagtgggacgagttgaaactggtgtcttgaagcccggtatggtggtgacttttgctcccactggcctgacaactgaagttaagtctgtggagatgcaccatgaagctctccaggaggcccttccaggtgacaacgtaggatttaatgtgaagaatgtt

SEQ ID NO: 44138 - DNA, 223 bp, Glycine max
  Clone ID: 701043236H1
tggaaactccttcaacaacaaagatattgccagaggactatgttcagagagtgaagcatgttcatgaatctggtggttatgggtctagagggtatgcatatgactggaagagagaggaagcaaataaaaaccttctgcgaacccatacaactgctgtttcctccaggatgctttaccaattagcacagaaaccatttgcccccaaaaaaatatttctctatag

SEQ ID NO: 44139 - DNA, 162 bp, Glycine max
  Clone ID: 701043238H1
cagaatcacactttccaaagcatgttgaacgtgatttctatgagattgattttgaaggtgattcaaagccaaaccaaaggcaaccttaatcattgtgctgagaccggggaatctactgttttatatctctttggccagaacaatgacagaagttaaaaagtt

SEQ ID NO: 44140 - DNA, 156 bp, Glycine max
  Clone ID: 701043240H1
ctttcatggcacatgaaggctggaaccatgtgtgaattttccaagaaggagtttattgaaggtttacagtctttggggattgattctctggataagttccgtgaaaagataccatatatgcgctctgagctgaaagatgaacagaaattccgcgag

SEQ ID NO: 44141 - DNA, 215 bp, Glycine max
  Clone ID: 701043242H1
cctttttgtggcggatgttaacacccagttgaagaacaagaacatcaccactgatatcaaagtggacaccggttccaatcttttcacaactatcactgtcaatgagcctgctcctggtctcaagactatttttagctttagagttcctgatcaaaggtctggaaaggtggaagtccagtacttgcatgactatgctggaataagcaccagtgtgg

SEQ ID NO: 44142 - DNA, 232 bp, Glycine max
  Clone ID: 701043245H1
cagatcagaaccttggccatggcagcgttccagaagatcaacgtcgccaaccccatcgtcgagatggacggagatgaaatgactagggttatctggaagtcaatcaaggacaagctcattttgcccttcttggagttggacatcaagtattatgacttaggccttccttaccgtgatgagaccgatgataaagttacaattgaaagtgcggaagaactctcaagtataatgt

SEQ ID NO: 44143 - DNA, 239 bp, Glycine max
  Clone ID: 701043246H1
ttcacagttagcacttagcagactctgctgcagtgaggtgaggggaggtttgtttgttgtttcgtttttcctttcctttccgccagaatccgttgagaatggcgttgccggtagtcgtcgatgcagagtacctcaaggaggtcgacaaggctcgccgcgatctccgcgcactcatcgctaacaggaactgcgctcctctcatgctccgattagcctggcacgatgccggaacttacgat

SEQ ID NO: 44144 - DNA, 191 bp, Glycine max
  Clone ID: 701043247H1
ttgcaatcaaattagttcattctctttgcgcagttccctacctctcctttcaagatgcagatcttcgtcaagaccctcaccggaaagaccatcaccttgaggtggaaagctctgcacatcgacaagtcaaggcagatccagacagaagatcccggtagaagctatctgcggacagtcagcgcgactgcgta

SEQ ID NO: 44145 - DNA, 239 bp, Glycine max
  Clone ID: 701043249H1
aaaagaaagaaatccaacccgtgaagaaagcaaagcaaataataataataataaaaaaacgtttacccccttttgtctgcgcgtgcgtgtggatctggcaagaaaacaaggaagggagggttcattgcggatctgaattcgcagtgttagggctttgaagggtttttccattttcttcaatggccacgccctttcccattcccgtcaccgcagctcaggttggaacgtacttcgtagga

SEQ ID NO: 44146 - DNA, 233 bp, Glycine max
  Clone ID: 701043250H1
ctgcacactacactgcccagtggccacccgccactgcattcatcccacactccaaacattaattctcaggaaaaaaaacaaaacaagcggcgtgatggcggcgaaacggcttattgtcgtcgcggagagcaccgccgccatggggccctattgggagaccattctgagggattatctcgacaagattatcagatgttttggtgaaaatgactcaactgtgcagaactcttgtt

SEQ ID NO: 44147 - DNA, 230 bp, Glycine max
  Clone ID: 701043251H1
cttctctcacctcacaacagaagcagcaatgaagacgaagatgatggcaagcaccgccatctccgtcgtcttcgccgcgctcttcctcttctcctccgtccactccttctacctccccggcgtcgctcctcgcgattttcaaattggtgaccccctctctgtcaaagtgaacaagttatcatccaccaagactcaacttccatatgactactacttcttgaagtattgca

SEQ ID NO: 44148 - DNA, 168 bp, Glycine max
  Clone ID: 701043252H1
ggacaattcattcatataattaattttctctcttcttcttctttctccttttccttattcacattagatcagactatggatcgcccaacactatcatcattattttcattcctactaacacttcatctatcattatcaggggtaatttcagcaacattcactctagtt

SEQ ID NO: 44149 - DNA, 166 bp, Glycine max
  Clone ID: 701043253H1
aaccctgctcgtagtcttggtgctgctatcatcttcaacaaggaccttggttgggatgatcactggatcttctgggtgggacctttcattggtgctgcacttgcagcactctaccaccaggtcgtaatcagggccattcccttcaagtccaagtgattcaatcaaa

SEQ ID NO: 44150 - DNA, 171 bp, Glycine max
  Clone ID: 701043221H1
attttctaatctctctctctcccacctttcacactctgtttttcctctccctttctcatccttctcaacacaaaatacacccttctacatggcgactcaagctgagttcgaatatgaagaggcgagttaagctgagatcaaatatgatgaggaatacgtacagaattctcg

SEQ ID NO: 44151 - DNA, 166 bp, Glycine max
  Clone ID: 701043254H1
ttgcctcagagctatacctacatgccatcagcatttcagcaggcttttcctggaaatagcacataccaccaatctctggcagccatgcttccacaatataaaaatagcatttctgtcagtagcttacctcagtctgctgctgttgcatctggatatggtttgggaa

SEQ ID NO: 44152 - DNA, 166 bp, Glycine max
  Clone ID: 701043255H1
gcgagaggcgttctatatattattgaattgacaatgaggcctgctcttgctttgcttcctcttctatttgctttcttgttagctgccactacagaatcaagaaaagatacaggggaatattggaaaatgatcatgaaagatcaggaaatgccagaaggacttcaag

SEQ ID NO: 44153 - DNA, 231 bp, Glycine max
  Clone ID: 701043257H1
acaagatggcttcttttcatatccaatattcattccttgtgcttgtgcttgctatggtgatcacattgatgaaccctaccaatgcaaccctctctccccatttctatgataaagtttgccctcaggcattgccagttataaagtcagtggttcaacgagcaattatccgtgagcgacgcatcggagcatctcttctgcgcttgcatttccatgattgtttcgtaaatgggt

SEQ ID NO: 44154 - DNA, 235 bp, Glycine max
  Clone ID: 701043258H1
tgagcattcacatggaaacttgatcccacccccacctgcactcctaactcaatatcagagtccttgttcaagagagcttatgtcaaaacaagtgtcagcaaaaacttgtgaggctgtgaaaccaaaagatggtgactgtaagctatttggcttctcacttatcagtggccctactttaccagagccttctttatcacaaagaaatgtgagtgaggctgctgatcagatgcatctt

SEQ ID NO: 44155 - DNA, 236 bp, Glycine max
  Clone ID: 701043261H1
gaaaaaaccccactttctctctttcactagctccgttcaagttctaactaagcacttcgtcgctgcttttgcttctgtagaagatgtctctgcgagtgctgaaccctaacgccgaagtgctgaacaaatcggcggcacttcacatgaacatcaatgccgccaagggtctgcaagatgtcctcaaaaccaacctcggtcccaaaggaaccatcaaaatgctcgttggtggtgccggt

SEQ ID NO: 44156 - DNA, 233 bp, Glycine max
  Clone ID: 701043183H1
ggcaatagcagagcagcgactcacactggtcttcgcttctcattcatcatttctcacctaaccttctcttcctctcagtctcagatcagaaacctccgccagccatggcagcgttccagaagatcaaggtcgtcaaccccatcgtcgagatggacggcgatgaaatgactagggttatctggaagtcaatcaaggacaagctcattttgcccttcttggagttggacatcaag

SEQ ID NO: 44157 - DNA, 235 bp, Glycine max
  Clone ID: 701043184H1
ctctcgagccgaatcggctcgagcttagcgtgacggagatggttgcacggcaccacgctcacgcggtggggcccaaccagtgatgctccttcgtgatccaggcgatcgacgcgccggtctccgccgtgtggccggtggtgcggcgcttcgacaacccgcaggcctacaagcacttcgtaaagagcgaccaccgcctcaggaactaccggtccgtcaccacgctccacggcgacgg

SEQ ID NO: 44158 - DNA, 229 bp, Glycine max
  Clone ID: 701043186H1
gaagctgtagacaactctagcaaaagtgtccacagattagtatacacatgaagtccaattttgctgttttcgtagtcttctctcttctcctgattgccaacttgagctgtgcaaggaaagacctgggatggtattggaagaatgtgatcaaggagcaacctatgccacaagcaattaaagaccttgttgaggattcacaagcatcagctgcagggaagaaggatcgttt

SEQ ID NO: 44159 - DNA, 233 bp, Glycine max
  Clone ID: 701043188H1
ggaagagactattcaattttcaattattcattgggttctctgaaatggagagagatttcatgggtctcaacttgaaagaaccactagctgtggtgaaggaggagatgaacaatgatggctgcaaaaactctggcttcaaaaaaggtcggattgcacagtggccattctcgaacaaagtatctgcccttccacatttgatgtctttcaaggctactcaagatgataagactaag

SEQ ID NO: 44160 - DNA, 232 bp, Glycine max
  Clone ID: 701043189H1
gtttctatgtcttgtcatatgttctaagaaggcaatgttgggctactaaccccactctgctgacaattggcgtgagcgacatctgtagcttttatgtccacggaggaatcaatgcacctgtttttggtgggtcttgttcgtcttcaactggaaactattacctactttggtcagatcactggggctaaccctacaattcctggaatgtttccaaatatgtttccgttggcta

SEQ ID NO: 44161 - DNA, 235 bp, Glycine max
  Clone ID: 701043190H1
tttcttttctactactctgtttactgtcacggtaaaaaaatatatatacttgcgcggtccagtaaaagtaaacaacgcccccacaatttcgggtagcggatatcttgtcctttgcccggcatgataaagcagtgtttggtgggagtagttatgcatgaacaatgatatttggttgttaaattgacttgcccacataagtagcaccttcattggtcacacagtatatatgaccaca

SEQ ID NO: 44162 - DNA, 239 bp, Glycine max
  Clone ID: 701043191H1
ctctgttctttctctctcaaaggaaagaaaaggaaagaaaagaaaagaaaaagaagagagtgtaggtaaacagaagcacacactacacagttaccacaatcaggttcaaacgcacagatctgggagaagagaagaagaagaagaagaagatgggacaggatcagaaccagagatcgctgatctacgcgttcgtgtctcgcggcacggtgattctcgccgagtacactgaattcagtggc

SEQ ID NO: 44163 - DNA, 235 bp, Glycine max
  Clone ID: 701043192H1
aacagaacggatctctctctctgtcaaatccaatcatttcctgagagacaaaaacaaagtcaagatcgcgttcagatacactcacacacaaacaaaaccaccaatccccaatctctaacttttcccgagaaaattttagtttccattttcatgtctccctcagattcccggaaaatatattcacaacattaatttcgcacgtcggcctctgccaactatcaagctccggcttcct

SEQ ID NO: 44164 - DNA, 232 bp, Glycine max
  Clone ID: 701043193H1
ctcgagccgctcgagccgaatcggctcgagcaaagaccaaaccaaccctttttatttgacagcttgtaaacgggcacacccctttctctctcctcctaccccctttaatttccttttccttcttaattgtcttaatttcccttgtattctggtaatctagctaaccctttttatttccattagccacgatatcatcaccatcgccaccttctaggtgggatccagggtcaac

SEQ ID NO: 44165 - DNA, 236 bp, Glycine max
  Clone ID: 701043195H1
tctcaactttcctaactttagcaaccatccaagaagttgatcagttccttgtctctccttgaattataaaaccattcacagtcttgaacccaatttcactctttgcacctcaaacaccttataagcctcaatttcacaaccaaaaatgcaaagttcaatctcacaatctgagatttgcatcactgattaccttctaccccaagaagttccatctcaatttcaatttccagatatga

SEQ ID NO: 44166 - DNA, 108 bp, Glycine max
  Clone ID: 701043196H1
agagaacttcaagtgagggtgagagtgccacaaatctagagctagcactagtactctaaaagcctactagagtcttcaaaatatgaccatgcatcgcgagtcttgggc

SEQ ID NO: 44167 - DNA, 179 bp, Glycine max
  Clone ID: 701043201H1
aaaaaaaccacagcttcatattatatatctagctcttcattttctcttgttcaatcaaggttatgctttaaaattctgaaactcacagtttcaggcaaattttagcctaaagatctgtgcgttgacccttggcaggttcagcttttggaggggttggagtggttcttccacataagcca

SEQ ID NO: 44168 - DNA, 226 bp, Glycine max
  Clone ID: 701043202H1
gaaagatgcaggattaggtgtgtggatagggagggtccagcgtacgtacctacctggcttctgttctttctacccacgacttttctctcaaaccaaccacatcattcaactattgcactgccaaggtttggacagtgttacgtgcttcacgaaacatgacctctgctcacgaccttactgataatgaagatgatggacagcagcagtcagaatcacaaattcagtc

SEQ ID NO: 44169 - DNA, 231 bp, Glycine max
  Clone ID: 701043203H1
aataacatagcatagagtgagaagtgagaagagaaaaatggcaatctccatacccagtagacaacttttcatagatggagagtggaaagtccctcttctcaacaaccggtttccgatcatcaaccccgctactgaagacatcatagggcatattccagccgctactaaggaagatgttgaccttgcggtggatgctgctaaaaagagccttttcccataacaaaggcaaag

SEQ ID NO: 44170 - DNA, 212 bp, Glycine max
  Clone ID: 701043204H1
cttttggtttttgcagaaagacgaagactgtggaagaggtacttgaaaatatatatcaaacctggttggaagaaaggcacaaaaataacatttcctgggaaaggcaaccaagaagcagaagctactgctcctgacgatctaatctttgtggttattgaaaaacacatgctttgttcaagagagatggaaatgatttggttgtcacacagaaa

SEQ ID NO: 44171 - DNA, 153 bp, Glycine max
  Clone ID: 701043205H1
gaagatccgaacttctgtcactttccacagaccgaggacattgaagaaggataggaaccccaagtaccctcgcattagcgcgcctccaagaaataagcttgatcattatcagatcctgaaataccctctgacaactgattccgcaatgaggag

SEQ ID NO: 44172 - DNA, 168 bp, Glycine max
  Clone ID: 701043206H1
cgtttctctctcttcggtcagaaacatgaatttggaaacgcaaccaggaacggcgtcgtattggtgctacagctgcacccgtttcgtgcacctctctgtccaaagcaccatcgcctgcccccactgtcaaagcggtttcgtcgaagagatccgtgccggcgccggagc

SEQ ID NO: 44173 - DNA, 168 bp, Glycine max
  Clone ID: 701043207H1
ggcctgtgctgtgctctgaggggccatagtttgggaccctttgaaccctaatctccacccaaacccattttcccgggaaattgccttggaaaagaaagagcgaagaggaaaatgcagaatcacaggctgaagcagcagcagcagcagcaacaacaagctcttatgcag

SEQ ID NO: 44174 - DNA, 170 bp, Glycine max
  Clone ID: 701043208H1
gactcagtgagtgagcgagcgagcgagttactcatggcgaacgcggcgcttcggaacgtgaaggtgctcccgaactcggcgaatatggaggaagcgcgtcaccgagtcttcgaattcttcagaacggcctgcagatcgctaccctccgttatggaaatctacaacctcta

SEQ ID NO: 44175 - DNA, 155 bp, Glycine max
  Clone ID: 701043209H1
ctgttctcagcttcacctgtctttttatgtttcgaaaattttggcaaggaatctggaaattcactgttagcaacaaggcttataggtgacgttgcagaagatggactgaaaaaatgaaaaactatttcttagattctgaaacttaaaagtgtgtt

SEQ ID NO: 44176 - DNA, 234 bp, Glycine max
  Clone ID: 701043210H1
attggtgcaaatggcgttcttcagaagcgtttctgcactttctcgacttcgctctcgcgtgggccagcaatctaatcttgcgaattcagttagatggctccaaactccgagctccagtaacactgatctttattctgagttgaaggaactagttccagagtatcaggaacgtgttaagaagctgaagaaagatcatggaagtgttgaattgggaaaaattactgttgatatggt

SEQ ID NO: 44177 - DNA, 240 bp, Glycine max
  Clone ID: 701043211H1
aattacatagcctcaataatctgagagagaaacaaaaacaatgaaggtttccattgccaagttccactcccttcccctatgttttttccttctcttggccttcaacacaaaacccctcctagcagcagaaccagagccagtggttgataagcaagggaaccctttggagccaggagtagggtactacgtgtggccactttgggctgatgaaggaggcctcacactaggccaaacaaggaa

SEQ ID NO: 44178 - DNA, 242 bp, Glycine max
  Clone ID: 701043214H1
cccagttactcgctcccactcccttcatcctcggcaagcgcatacgcaccgacgaagactcttccaaagacgaagctgtttccgtgggcccctctctcgtggggccgtatgcccctcccggaccaggggtcgtcccggcctggcccgatttcggacaaatttggagttttgtcgccgccgctgctgctcccgaaatggtgtcggtgccgcagcagcagcagcagcaggcttcgttgttcgct

SEQ ID NO: 44179 - DNA, 228 bp, Glycine max
  Clone ID: 701043215H1
gaatgaaaatataaagaaagagaagagagaaataattttccgggaaaattcaagttccaatcggaaccggaaatgaatagggtttggtttctactattccttctgctgatctcgaaatgcgatcatgtgtggagctcttacgcgggttccgctagctccgtcatcaacccttccaaggtcaaacagatttcctggaagccaagagctttcgtttatgaaggtttcctc

SEQ ID NO: 44180 - DNA, 246 bp, Glycine max
  Clone ID: 701043216H1
cggctcgaggagctctggaactccactcgtgatccaacacgatagagagagaaaaagggtcttgcctttttttctgcttttgatttgactctttacaaatacaaataaataataaaatcccatcaagaagaaataaatatcaagcccaacccagtgcagtgctgcagggactgtcactgaactcaaaaatgaactgtcttcggaatctttctcgattctctgttttgcccgaaacacctgttacgc

SEQ ID NO: 44181 - DNA, 233 bp, Glycine max
  Clone ID: 701043217H1
cgaagttgtttctcaatatggagagttgatatgggatctcttggtatcaggggtgaagcctgatgacatatgttcacaagttggtttatgttcttccaaaaggcatgaatctaagagtgctggaattgaaatggtgactgaaaaggagcagggagagttgacggcaagagataatcctttgtgttcttcttgtcagatgcttgttctttggatccagaatcaactaaaacaaa

SEQ ID NO: 44182 - DNA, 78 bp, Glycine max
  Clone ID: 701043218H1
gtattccgaaaggacagatagttttgtaagacagagtgaggtccctcctaagccaatcaaacaatctttgtctgccat

SEQ ID NO: 44183 - DNA, 238 bp, Glycine max
  Clone ID: 701043219H1
gctggacttgtgcaataaacgaacaacaaacagagacactggttctcactttacgcgcaagcgaatcaatcacgccacgccaagccaagccaaagccacaatttcacctatccaattattcacgacatgtaacaaaacgacaatcactttcgtcgttcgccaaattcgattgcagagttcggccatggcgctccgaaacgacggaagaaaaatttccttcgaggttctcagcgtcgag

SEQ ID NO: 44184 - DNA, 151 bp, Glycine max
  Clone ID: 701043220H1
aatcgatgattttgatgtggaagaagaggtgagacctgattttccttgcccgtattgctatgaagactttgacatcgcgactgtgtcttctcatcttgaagatgaacattcttgtgaatcaagactcacgatttgtcctatatgcgccgtt

SEQ ID NO: 44185 - DNA, 151 bp, Glycine max
  Clone ID: 701043143H1
ataatatcatagcagaggcttttatctgcggttcaaaagtagttttttggataagaccaacgtgtcactcatttattgacttcaaaatagatgagtgacacgttggtcttatccattttgaagtcaataaatccattttggcttccattat

SEQ ID NO: 44186 - DNA, 240 bp, Glycine max
  Clone ID: 701043145H1
aacggagccctctcttcaggtcaccatctagactgcaatcatggctgatggatcacagcatccatcagttgttcagaagctagcttgacagtcgtacctggtgtccaggcttagccccaactttaactctaggaattattctgcaactggtgcttacgtccatggcggaatgcactcgcctgggttggctgttgtgtcacctggatctccagttactgttcatgctccagcagagaaagg

SEQ ID NO: 44187 - DNA, 237 bp, Glycine max
  Clone ID: 701043147H1
gagagacataaaaaataaacatatattgagaatggagggttgtgtgaagaagttgctatgccttgttgggtttgtggtgcttgtgagtactattggtggggtggagagtgctggtgaatgtgggaaatctacaacccctgataatgaggcttataagcttgcaccatgtgcctcagcagcacaagatgagaatgctagtgtttctcagagttgctgtgctcaggtgaagaaaattgg

SEQ ID NO: 44188 - DNA, 238 bp, Glycine max
  Clone ID: 701043150H1
cttctctctctttctccggcgacgatctcagattccggtcactgctctcgccggcgatcccttattcctccgtcctccgtcgagtcctttccgattcgaatcgttcccagccttgtgccaccatgaatcccgaatacgattatttgttcaagcttttgctgattggagattctggtgtaggcaagtcatgtcttctcctgaggtttgctgatgattcataccttgacagctatatcag

SEQ ID NO: 44189 - DNA, 235 bp, Glycine max
  Clone ID: 701043151H1
gtttctgtctctgtgtttgcggctgaggattccgaacgagcgaccttcttcgtttctcgcaaagtttaagtcctcatgggtaaggaaaagactcacatcaacattgtcgtcattggacatgtcgactctgggaagtcaactaccactggtcatttgatctacaagcttggaggtattgacaagcgtgtgattgagaggttcgagaaggaggctgctgagatgaacaagaggtcat

SEQ ID NO: 44190 - DNA, 237 bp, Glycine max
  Clone ID: 701043152H1
atcatcacttgctgcttgttgttcaacatcaaataccctattggacttggagcttattagatcaatctctttcaaaaaaaaagttttcccatgacttcttgttcttctattacaatatcctcaaggaaactgcgctatgatctctattcctattcatacaaagaagactccaacaccccattagtgataaatgttctggcttcactcattgagaggagcatggctagaacacaaagg

SEQ ID NO: 44191 - DNA, 169 bp, Glycine max
  Clone ID: 701043153H1
ctctcccacttcacttccttccgttccctccttcaattcaactccagtaacgggcttccattaatgctctcacccctttctgtctctctctctatttattatgtttttctgcttctttatttattcatcccccatactcgcactgtctattccgtcaatattctctttc

SEQ ID NO: 44192 - DNA, 232 bp, Glycine max
  Clone ID: 701043154H1
cttccaaataccccaatgcccaaagcaatcatagactttctaaaccttgatcaacttcctctttggtatggtgctaaggaaacccaatctacagatcaaatattcctgtatgatgctaagaaaacccaatcaacagatcaagttcctcctatcttttatggtgataagaaaacccaatcaacagatgaagttcctcctatcttttatggtgctaagaaaactcaatcaatag

SEQ ID NO: 44193 - DNA, 232 bp, Glycine max
  Clone ID: 701043155H1
cgcaattgtttggagctggtgaaggtgaatgttctgttatcatgctatggacatatgctttggcctcagttgcagtcactttttggacaacttacttcatgtggcttgtggcttaattttgtattcattgctatctatggttattttttatttatttttaaattttgccttataagtatctcttttcagccaggggtaggaactgcctacactatctgtagttttatacaaa

SEQ ID NO: 44194 - DNA, 237 bp, Glycine max
  Clone ID: 701043156H1
tttttcttaaatcctatacaaaacaggcgcattcagcactatttcccagatccattaaagttttggcaaagatagcaagcttagaatcccttcataaactggaggaaatagtgcaagctctctgatgggatcatggtggctcggggtgaccttggtgtcgaaataccacttgaacagattcctacagtccaagaggatataatttacgtatgcagacaattaaacaagccagtgatt

SEQ ID NO: 44195 - DNA, 239 bp, Glycine max
  Clone ID: 701043157H1
gagaaatcaggctctaacagtcctaaatctgctttgaagtttgtgaagaccacatctcagtctgcagctcaatggagcagtactaattcaagaggaatgacaaaagatgtactcaaagacaagttctatgacaagactaaagcttcacgaaggtctccacccaaagaaagttacatggcttcaagaaggtctccacccaaagaaagtaacatggctccaccaaggtctccaccaaaaga

SEQ ID NO: 44196 - DNA, 240 bp, Glycine max
  Clone ID: 701043158H1
tgatcttgaaagaatttgctccatctattcccgagagaaacatttcttgtttgactagattggaccacaatagggcactgggccaaatttctgagagactgaacattcaggtttctgatgtaaagaatgtcattatctggggcaatcactcatcaacccaatatcctgatgttaaccatgcaactgttggggagaagcccgtccgcgagcttatagctgatgatgcctggttgaatggtg

SEQ ID NO: 44197 - DNA, 239 bp, Glycine max
  Clone ID: 701043161H1
gaaaagagaaagagaagaagaaatccgtgatctccattttcttccttagcacctaacaaagcaaccattctaaattgcaagataccctagccctctctctctatctctcttcaatcccactgaacttcttcacaactttgggatttgaattaacgagagaaccagcaaaactggggaaagattttggacatttctgatccgggttttgcatctttccatcatcatcaccatttactttt

SEQ ID NO: 44198 - DNA, 237 bp, Glycine max
  Clone ID: 701043162H1
gaagtatcagatctggagcaggagaatagcgttggcagcgtttgcgtttgctctgctgttccaatcggcctcagcagacgacgtcgttgtgctctctgaagataacttcgagaaggaagttggtcaggacagaggagctctcgttgagttctatgctccttggtgtggacactgcaaaaagcttgctccagaatatgaaaagcttggtagcagcttcaagacagccaaatctgtttt

SEQ ID NO: 44199 - DNA, 238 bp, Glycine max
  Clone ID: 701043163H1
tctcgcacgaatcggctcgaggaaagagagagaaacatcgagcagcagttctgttctagggttacacttgtttccattgctggtaaagaatctccaatcttccaacactgcgtcactcgctttgttcccaattcagtccacaatttactttttccactttcccctaacctcccactcggaactcgtcgttacctatcgataatgaatttggggttacctcgctcacatccatcggtgt

SEQ ID NO: 44200 - DNA, 236 bp, Glycine max
  Clone ID: 701043167H1
cgaaaacgaaaacgaaaacgacgacaagtcgttcattccctgcgaaaaccgaattaccgaaaccctaatcaccactccgagaaccaaagattcgcccaatccgaagacccaaacctcaaaaaatcagaccatgaaaagcgtagaggtggccaagacggtgctcgaggtcgccgacgtggcttggaccgccgtcgaacacacccaccattaccgccaccgctgcagtcatcccgtcg

SEQ ID NO: 44201 - DNA, 231 bp, Glycine max
  Clone ID: 701043168H1
attttctattccccaaatctcctccttagactgccaacccaatatagccattggatcgaattcagtctgaattcggtctaatggtttgggagttctaattaagtctaaggaacagaattctgtacatatatatatttagaagatcacagggtgcttgatcagtggtgtatcaggatggacaaggtgacgaggttggcttctgaaaagggtgtggtgattttcacaaagagc

SEQ ID NO: 44202 - DNA, 233 bp, Glycine max
  Clone ID: 701043169H1
ctcgagccgcaaaacactaaaacacacagcaatggagatattatcacaaatgtggtctctgttagggttacttaccgttctccagaacgttcttccatcgcagcttctctccttgcttcattctctatacgaatctctgcaagatctactttctccgtattcgtatttcgagattcctgaattcaacggctactgcggcgtcgaactcaacgacctctaccgtcatgtgcacc

SEQ ID NO: 44203 - DNA, 231 bp, Glycine max
  Clone ID: 701043170H1
tggaagactaagagaattaagagttgttgatattctaaccgtttattatggaatagaaaattcttttctggatttagctcctaatgttgtgcagtggtagttgggatcttacaacacccagatacttcttatggtgttccttgcaatcgttgggatgctgttagctggtttctttggttaccatgctaatctttgccttaccaacactaccactaatgagacttttaagtg

SEQ ID NO: 44204 - DNA, 211 bp, Glycine max
  Clone ID: 701043171H1
cgaaagcgattttgagggaagaagaggatgaggccgatttttgctgggaacttggagtatgatactcgtcaatcagagctcgaacgcttgttcgcaaagtatggaaggattgaccgcgtggaactgaaatctggttttgcttttgtctatcatgaggatgagcgtgatgcagaagaagcacattcgtgcacttgacaatgttccatttggt

SEQ ID NO: 44205 - DNA, 236 bp, Glycine max
  Clone ID: 701043173H1
ctcttccattcacaaacttaaaccttactttcttgtaaactttatgtgattgattctgagaatagaactaagagggtatagacatggctaacgcaattgcagcttcttcataggttctgcttctggctttccccactgtatatggagctgaccatgaagttggtgacactagtggatgggccctcggagttaattataacacctgagcctctgggaaaactttcacagttggtgac

SEQ ID NO: 44206 - DNA, 237 bp, Glycine max
  Clone ID: 701043174H1
gtcccaccaatgcgtcactccattgtaatcaaccttggtgaccaacttgaggtcataaccaatggcaagtacaagagtgtgatgcaccgagtgattgctcaaaccgatggtaccagaatgtccatagcttctttctacaaccctggtgatgatgctgtcatttctcctgcaccagccttggtgaaggaattagatgagacaagccaagtgtacccaaaatttgtgtttgatgattac

SEQ ID NO: 44207 - DNA, 240 bp, Glycine max
  Clone ID: 701043176H1
tctcgagccgaatcggctcgagatttgataatgtatttatgaataacatgatttaacatattaccatggatggcaggctaagcactcatgcaattgttgagccatttgtcatagcaacaaacaggcaactgagtgtggttcaccctatttacaaacttctgtttcctcactaccgtgacaccatgaatattaattcacttgcccggaaagccctggtcaatgcagatggtattatagaga

SEQ ID NO: 44208 - DNA, 241 bp, Glycine max
  Clone ID: 701043177H1
aagattcctaattgattaaacctaattctcatttctacatcgttcgattcttctcctcctaaacatgcagatacttcgcgaaaactttgaccggtaagaccatcacccttgaggtggagtcctccgacaccatcgataacgtgacagctaagattcaagacaaggacgggatcccacctgaccagcagacacttatctttccgggtacacagcttgcggctggtcgaacccttgccgacta

SEQ ID NO: 44209 - DNA, 241 bp, Glycine max
  Clone ID: 701043180H1
cccagtgatctcagggctgccaatgaattgctaaagcagattaggcaacactcttctcccattggggatgcatcacagaggttggctcattactttgccaatggcctcgaggcacgcttggttggggatggtacaagtacccaaggaatgtatacttttctgagctctaagaacaacactttttctgagttactcaaggcataccaggttttcagttcctccagccctttcaagaagtttg

SEQ ID NO: 44210 - DNA, 237 bp, Glycine max
  Clone ID: 701043142H1
atcttcttcatctttttttgtcccttcgaaaagctaaggaattggtgcattggtgtatgacatgaagccttctgcaaggagttcatagattttctcttcttagaataatcaattagaaccaccttgaagttgagacaagagtaattgcagccttattttaattagacaatatcaggacaaatcactattcaagagatatgatgatcactatggatgtacaaggtataagatgggttg

SEQ ID NO: 44211 - DNA, 241 bp, Glycine max
  Clone ID: 701043110H1
gaggctgcttctttggatctgaacaatgcctctggctctggatctttgccgcgccttcaaacattgaaaaagacttccatttcttctcgaaggtctggtactgccactttccctagtcctggtacactcaattatcgcgttgcaatgcacaagggatggagctccgagcgagttcccttgcatgcaggtgctacccggaagcacgttttgccgttcaacaatgggaaaacattgccgtcaa

SEQ ID NO: 44212 - DNA, 243 bp, Glycine max
  Clone ID: 701043114H1
gaaaaaagtgacaagaagtgaagagaatgcgggttgtttgttgttccaattcaggcgtgagtgctttccctagttgtcttagattccctccactgatcgcaatttcaacaacaccctcttcgatccgctttctaaattctccacccctccgttccactgcttcgtgtaatttccattcaacatctctctctccaatcttcaatcttcaatcttcaatcgcgactattctaacataatacgatt

SEQ ID NO: 44213 - DNA, 245 bp, Glycine max
  Clone ID: 701043116H1
cttgacctcaactttctcgacaagaggctctctgtcggtgttctctcccttccctttggtgtcgtgtctttcaaatggcgaacgtttgattcctctgttcaatcgggttttggtggagaaaatcgtgcctccatcgaagaccaccgctggcattttgttacccgagaaatccaccaagctgaattccggaaaagttattgctgttggccctggctttcacagtaaggatgggaagctaattcctg

SEQ ID NO: 44214 - DNA, 239 bp, Glycine max
  Clone ID: 701043117H1
cgttacctttgtcaagtttcaacgctccaactatccatggcaaaccgctggctcagacccgaggtgtatccactgttcgctgcggttggtgctgctgttgggatctgtggattccaactggttcgtaatatctgcatcaaccctgaagtcagggtgaacaaggagggaaggaaggcaggagttttggagaactttgctgagggagagaagtatgccgagcacttcctgaggaagtatgt

SEQ ID NO: 44215 - DNA, 241 bp, Glycine max
  Clone ID: 701043118H1
cactacggtaatcaactggcaaatacttggacaatggcctcagaaaatggagacaaactagagcttgctttcagtgctgttcctgatcccaagcccaagaaggattgggtcattttgtcccttagggtggtcgcattttttgccacagcatctgctacacttgttatggcattcaacaaacaaaccaaaggcatggtagttgctaccattggcaccaacccagtaacaattactcttactg

SEQ ID NO: 44216 - DNA, 240 bp, Glycine max
  Clone ID: 701043119H1
tgcaggcccacctggatctgggaaaggcacccagtcaccaatcataaaagatgagtactgcttatgccacttagctactggtgatatgttaagagcagctgtagcagctaagacccctcttggtgtcaaggctaaagaagctatgaataagggagaacttgtttctgatgacttggttgttggcattatagatgaagcaatgaaaaaaccttcatgtcagaaaggtttcattcttgatgg

SEQ ID NO: 44217 - DNA, 241 bp, Glycine max
  Clone ID: 701043120H1
gtggtttcagtgagtgatcggtgttcacttgatccttcataagtcgtcatcatcatcatcatcatcaccgttgattgaagaagatgccgatcagaaacatcgccatcggaaggcctgaagaggctactcaccccgacacgttgaaggcggggttggctgagttcatctccaccttgatcttcgtgttcgccggttcaggttccggcatcgcctacaacaagctcaccgacaacggcgccgc

SEQ ID NO: 44218 - DNA, 239 bp, Glycine max
  Clone ID: 701043121H1
cttcgtctcaaacttcttcgttccttcgattcattccatttcatccaaaatggccaaagacccagttcgcgttctcgtcactggagccgcaggcaaattggatatgctcttgtccctatgattgctaggggagtgatgctgggtcctgaccagcccgtgatcctccacatgcttgacattcctccagcagtagagtcgttgaatggggttaaaatggaattggtggatgctgcattccc

SEQ ID NO: 44219 - DNA, 132 bp, Glycine max
  Clone ID: 701043123H1
ctcgagcgattcggctgagtgtttatcactatcacttcccactcctatctctgaaggcattctcgttcattttgtacttttatcttctctttatctccctcaacaagattcctataaagttcgtagcggctt

SEQ ID NO: 44220 - DNA, 236 bp, Glycine max
  Clone ID: 701043124H1
ctcagatcccacgggtgacaagttacaggattggataccagaaatggcattccatgtgaagaaaattgatccaaagcacctagtggaggttggagtagaaggattttatggctcatcaacacctcagagaactcagttcaatcccaacacatatgctacacaggttggaactgattttatcagaaaccacctggttcttggagtggacttcgcttctggtcacatatatgctgact

SEQ ID NO: 44221 - DNA, 243 bp, Glycine max
  Clone ID: 701043125H1
ctcataggctcgtgtaagaagtaccgatcctgcatagtattaacttggcttgactcctctcatcagaagaaagcgataaaagcaaaaatgcaatctatgtccctgacgctgagcaagaggctctccaattcaaagcctctcttcagaatctcttccaacctcgtcgctcacgcatcctccgccacaacctctccgccgccaccttcgccgccagtcccctctccatccgccctcaacagcctc

SEQ ID NO: 44222 - DNA, 243 bp, Glycine max
  Clone ID: 701043126H1
agtcactgctctgtttcaccaagtttgggcgtttaaatcagaaccaaatcgtgttctcttccattggcaaacatggcaactcaaatgagcaagaagagaaagtttgttgcggacggagtgttctttgccgaactgaacgaggttctgacacgtgaattggcggaggacggttactccggcgtggaagttagggttacgccgatgcgcaccgagatcatcatcagagccaccagaacccaagct

SEQ ID NO: 44223 - DNA, 244 bp, Glycine max
  Clone ID: 701043127H1
gatgtacaagttttgggttccatgagtgttcttgccactctactgcaaactaaagaacttgatgaatcaatgctagataggcttggacttcttccacaacgcaaacagcatcagaaacagttattgcaagctttggttggtgaggcgtcaggtgaagagcaacttttttcttctgaaaatagcttgatgagggatggcagtggatgtgagcctggtgtctatcttgaaaagatcaaggagcagt

SEQ ID NO: 44224 - DNA, 245 bp, Glycine max
  Clone ID: 701043128H1
tgtcgtttaacgctaaacgacattacctccgcaaccggtgaacggcagaagaagtaaagcgagaaaaccgatattcgcactttaccgcacccagcgactccgcgtggttttggcgaaaacttctagaacattcttccatggaggttatcagggttctagcggcggcgatcgtggtagcggtgcttgcggcggctcttccggcggacgccgacgacgacaaccgagtattcgcgccgtgcacggac

SEQ ID NO: 44225 - DNA, 243 bp, Glycine max
  Clone ID: 701043129H1
acaaaaccctgaagaaagacacagccattgtttacttttcattgattgagccaaagctttgtattttctgcgataattttccattgggtggaagaaagtctcaacctttattcgaaagagcaaggatctgagttgagttgagtgatcatgtgtggtggtgcgattatctccgacttcataccggcaggtcccgccagcggggcgcggcgcgtgaccgccgacatcctgtggccgagtttgagg

SEQ ID NO: 44226 - DNA, 243 bp, Glycine max
  Clone ID: 701043130H1
gtttcagtgagtgatcggtgttcacttgatccttcataagtcgtcatcatcatcatcatcatcaccgttgattgaagaagatgccgatcagaaacatcgccatcggaaggcctgaagaggctactcaccccgacacgttgaaggcggggttggctgagttcatctccaccttgatcttcgtgttcgccggttcaggttccggcatcgcctacaacaagctcaccgacaacggcgccgccactc

SEQ ID NO: 44227 - DNA, 241 bp, Glycine max
  Clone ID: 701043131H1
tcaagcttcagcaagtgcgttttggaagcagagaccgaaatacttcgagatggcccgtacaaagcgaactgctcgtaagtcaactggaggaaaagctcccaggaagcagcttgcaaccaaggctgcacgtaagtctgcaccaacaactggtggtgtgaagaagcctcatcgttatcgccctggaactgttgctcttcgtgagattaggaaataccagaagagcactgagctcctaatcagg

SEQ ID NO: 44228 - DNA, 244 bp, Glycine max
  Clone ID: 701043132H1
aacgaagctttcttgagttgagttaacagcatggagagggaggaagatgttaaggttggagcacagaaattctcagagaggcaagcattggggacaggagctcagggtgacaaggactacaaggaggcaccaccagcacccttgtttgagccaggggagttaaagtcatggtctttttacagagctgggattgcagagtttgtggccacattcttgttcctctacatcactgtcttgactgtca

SEQ ID NO: 44229 - DNA, 241 bp, Glycine max
  Clone ID: 701043133H1
attccacaacagtgggagggagatccaaaaagagagagtggaaaagatggcgcggttgatcacagtggtgtggtgcgcggtggcggtgctattatgcgccgcggccggtgcgtcgtgggtggaggaggcggcgaacccgatacgaatggtgtctggcgtggaggcggaggtggttcgggtgatcggggagtgccggcgtgcgttgaagtttgctaggttcgtgagcaggttcgggaagagt

SEQ ID NO: 44230 - DNA, 241 bp, Glycine max
  Clone ID: 701043134H1
aaggtaggaacacgactttcaaaccagttcattgaacctccaaaatgaatatctacaaatgcacttatttccactgttagctataagttcctatggtacaatttggcctatagctacatgggtgcaccaagctcatttgggcgatttggctgagccacctctccagctgcaacggcagcttgccttcgttgcctctcacgtagatacagcacagttaagaggcatacaaagagggtcagaa

SEQ ID NO: 44231 - DNA, 238 bp, Glycine max
  Clone ID: 701043136H1
gctcttctctctagagctgctgcgttgctaaaacgcaccggtttgttcctgttctcgttcaaaagaaaactgacacaagtgaggcttggtgcataaacagcaatggcagaaaaaccccaaccggttcgggttctctactgcggcgtgtgcagtttgccccccgaatactgcgaattcggatccgatttcgagaaatgcaaaccctggttgatccaaaacgtccctgacctataccctg

SEQ ID NO: 44232 - DNA, 174 bp, Glycine max
  Clone ID: 701043137H1
cacacatgcatggattctttgattttcatcttctctcgcgttttctgattctgatcttagggttccttatcccccaactttattgcttcctcacgcgtctttatctttttttcttttcgttgatccaaccttttccactaaagcttcgattttttgctttttatttgtgtttta

SEQ ID NO: 44233 - DNA, 236 bp, Glycine max
  Clone ID: 701043138H1
cagatttgctcataataggagggaatcgaatcgaatcgaatcgaaaggacagtgcagaatggctgacatgccgttgccggcgctctttgagcaagcccgcaagatccacgccgcagccaccgattccggcgccgaccaggaggttgtgaagaaggggtgcgaggctctgcatagatgcgaggacatggtcaataatctaggtttgttctctcccaacgagaccaaagaagatatca

SEQ ID NO: 44234 - DNA, 249 bp, Glycine max
  Clone ID: 701043139H1
ctcttccgtgcacagcttgaacacaccgcgtttcggagagagacgtcgcaatggggaggaggcctgcaaggtgttatcggcagataaaaaacaagccataccccaaatcacgcttttgccgtggtgttcctgatcctaagatcagaatttatgatgttggtatgaagaagaaaggtgttgatgagtttcccttctgtgttcatctggttagctgggaaaaagaaaatgtttcaagtgaagcattggaag

SEQ ID NO: 44235 - DNA, 234 bp, Glycine max
  Clone ID: 701043140H1
accgtttcgaaccctgtcaaggagcaagaaacatcgaattcgattgttgctggtagcaacagttacgtgacctacttagtcaccacgaagacgaacattccggaattcggcgcctccgggtcatgttcgctgtccggcggcggttccgtgacgtggtgacgctctctgatcggctcgcagaggcgtaacgcgggtttttcatcccgctcgcggcggacaagagcgtggtggaga

SEQ ID NO: 44236 - DNA, 240 bp, Glycine max
  Clone ID: 701043141H1
gttagatctgtacctgcctagccattgatttggaaaagtccaagcttcaaagatgagtaagcttcagagtgatgctcttagagaagctatctcaggaatcatgactgattccaaggaaaagaacaggaaatttgtggagaccattgaactccaaattgggctgaaaaactatgatccccagaaggacaagcgttttagtggctctgttaagttgcctcacattcctcgccccaagatgaa

SEQ ID NO: 44237 - DNA, 238 bp, Glycine max
  Clone ID: 701043108H1
gagagagagagaggcgcgaaaatgagcggacgtaggggaagaagaagggagcgagctttgtgatcgattgcgcgaagcggtggaggataaaattatggacattgcttctctggagaagttccttcaggagaggattaaggttggcggcaaggccggtgcactcggcgattccattactgtcactatggacaagagcaagatcaccgtcacctccgacagcaacttctctaaacggtat

SEQ ID NO: 44238 - DNA, 181 bp, Glycine max
  Clone ID: 701043053H1
atcaaacatggctagggttagtgctttgtttcactctttgctcttgatttcttcccttgtattggcttctcaaatccatgtttcctctgggaaactagtccctggactatcatggaattactatttgttgacatgtcccaagcttgagaggattataaggaagcatcttgaggatgtcttc

SEQ ID NO: 44239 - DNA, 183 bp, Glycine max
  Clone ID: 701043054H1
gcggttcaggaaactcttcttcgtcactgtggttgaaaatcgaatcctttctctctctctctcttggcaataaagtgaaacgcatcagagaaattcaattcaatggatgcaaatcgcgagcaaattgtggacgttgggtcggtggtggaagccgtttctgctgacgacggtgacgctcctctc

SEQ ID NO: 44240 - DNA, 184 bp, Glycine max
  Clone ID: 701043056H1
ctcttctccatcgcgcgtaagaaacacattttagttgctactaatgggaactgttgaagctgcaaacaaggatgcaaatggaagtctcctagagaaaaatccttcagttgtttttgtgttaggtggcccaggaagtggaaagggtacccaatgtgcaaatattgtccaaaattttgggtatact

SEQ ID NO: 44241 - DNA, 182 bp, Glycine max
  Clone ID: 701043057H1
ggacgaaatggagtatgttgttgagccatgttgcttggcttggcttaaagttgaattgaagagagaggatctgatctggagtatgttgctgatgataatgaaatggcggaagtagaagatgacatgtatttccgtggtagagtgtttggtgattcagagtccgaatcagatgacgatgatga

SEQ ID NO: 44242 - DNA, 182 bp, Glycine max
  Clone ID: 701043058H1
gatgggtcgaactttcgtatttcgggcccacccaagttcttcgccggcggcgagtcggagagttcgtcgtcgatcggaacccctgatgacagcgacaacgaggaggaggaagaagtgcagagccagttaaagatacgaactgggttgggttctttggatgctttggaagaatctcttcccat

SEQ ID NO: 44243 - DNA, 184 bp, Glycine max
  Clone ID: 701043059H1
gtctaggggaagcttatatgactttctgcacaaacaaagaggtgtatttaagcttccatctttgctaaaagtagcaattgatgtttccaagggaatgaactatttgcaccaaaataatataattcacagggacctcaagactgccaatcttctgatggatgaaaatgaagtggtcaaggttgct

SEQ ID NO: 44244 - DNA, 183 bp, Glycine max
  Clone ID: 701043060H1
tttagagaaacacaaagagaatataaagtcagctgaagctcccagccccatcttaaagatattgaaaagcgaatttgaatgtcttcctgcctacatgaagggactaacatcatgggaggatctagtcgtggctgttgataagattaattcaagcctaagcaagaagaccaatggatgcagcta

SEQ ID NO: 44245 - DNA, 184 bp, Glycine max
  Clone ID: 701043061H1
ctctttctccgagaacaaaaaaaaaaacgtgattcgctcttctcttcgaataaaccacaaaaccagcaaacgagacgaggactgagataagatggggttgtcgttcacgaagctgttcagcaggttgtttgcgaagaaggaaatcaggattctgatggtaggtctcgatgctgctggtaagaca

SEQ ID NO: 44246 - DNA, 186 bp, Glycine max
  Clone ID: 701043063H1
gccactttcttcgcccaaacctccttcccctcccactctctctccaaaaccttcgatacccatttcgcccctgccccgaaagtcaacgtctttgtgaacttcagggcgaggaggcacgttggggtgcgagtttcgaacgcgctgatcgaaccagatggagggaagctcgtggagcttgtggtgacg

SEQ ID NO: 44247 - DNA, 187 bp, Glycine max
  Clone ID: 701043064H1
cttattctatagggctatattccttcgctgaagggtttaatttgcgccatggcttctctcttcgcgagaaccaagaggttctcatggactactcttctgcttcttctggagctattcacaatagtccttcacacggcagatgctcaaattggtgtttgttatggtatgatgggcaacaatctaccac

SEQ ID NO: 44248 - DNA, 184 bp, Glycine max
  Clone ID: 701043067H1
gttggggtaggtggtggtggcgccgaaccgcaatggagaagccatcgtcgtcgtcgtcgtcgcgaagaaaatcgagcacgaaggtgaaagcttcaaccgatgcgaacacgaacctgagcatgctcaacgaggaccttctccagaacattctagcgaggcttcctgctctgcatttcgcttccgc

SEQ ID NO: 44249 - DNA, 183 bp, Glycine max
  Clone ID: 701043068H1
caccgattgctagaatggaatttcgatgctcagtcatctcttttaccattctcttctctcttgctcttgcaggagagagccatgtccatgcatcgctacctgaggaagattattgggaagctgtttggccaaacactcccattcccactgcactgcgagagcttctaaagcctctccctgcag

SEQ ID NO: 44250 - DNA, 183 bp, Glycine max
  Clone ID: 701043069H1
actcgagccgcatcggctcgagcggctcgagccttaaccatcactggcacataggtgtttactgctacacactagaagaatcatggaaggtctcaagagcctcttcttagccatttttgttgtcttggcttccgcattgtattcagccaatgccaaaatccaggagcatgaatttgttattca

SEQ ID NO: 44251 - DNA, 182 bp, Glycine max
  Clone ID: 701043070H1
gcgagcgagcgagcagtttcaaagagaggatttgggattgggaaggcgagggattgcgctgcgtctcttcctcttctctttcgattcatccctcattcataatcttccaatccaacaacctcagcctcacactcacacatacacacatctgaacgcgtatcgtccctcccatggcttcaaag

SEQ ID NO: 44252 - DNA, 179 bp, Glycine max
  Clone ID: 701043071H1
cgacgaaccatctcaaatccgccaccacataatgtaaatgtactcgaatgcgaatgtgaatgtgaatgcgcttctgtgcggtttcgattcagatccagattcatggggatttgcttcagcattgaagacccaaacaacgtctccatctccgattcgaacgccaagcctaataaacctgc

SEQ ID NO: 44253 - DNA, 183 bp, Glycine max
  Clone ID: 701043072H1
aaccttgccctcgtcaaagaataaagaagcaaaaaactctcacacagagaaagagacttaaaaaaaaacgggatttgttttgctgggttgggttgtgtgaattgtgaaatgcgggtgacggagttgcaacgtgccacggcggtgtaagatcttccggcggcaacgagcatttcttcggcgaga

SEQ ID NO: 44254 - DNA, 180 bp, Glycine max
  Clone ID: 701043074H1
gtaactgccttctcacccctgaggaagggtgctagtaatacccttaaacttgcagaagtctctaagcttctgttgttgccacccaaggttagagatttctgcaaggaaaagggtattactgtaactgccttctcacccctgaggaagggtgctagtaggggtgctaattttgtgctggac

SEQ ID NO: 44255 - DNA, 179 bp, Glycine max
  Clone ID: 701043075H1
ctcacattggttattgatctcagtgaagatagagatttgcgattcgcaatggcctcttccgcgacaatgcggttctccgcgacctccatcggagccgaggcggctcttcctcgccgcaactccgtcgccggattcatcggcgtcgcggcgagatcctccgccaaatcgaggcttcgctt

SEQ ID NO: 44256 - DNA, 182 bp, Glycine max
  Clone ID: 701043076H1
cgccgcctcgctccacttctctccgcacgccgatctctctcgcaccgtcctcctcataccgcttcgtgaactcaacatgtcttttgtcaaagagtatattgctgaaagcaagcctcttgggggtttaatatttttgcttccccggatgttcagttttgaaaacaaagatggtatgggaagta

SEQ ID NO: 44257 - DNA, 181 bp, Glycine max
  Clone ID: 701043077H1
ggcgcgggtcgaattgggaagcttttgctccagaggctgaagccttttaactgtaatcttctgcactatgatagacttaggatgaatactgatttggagaaagagattggagcaaagtttgaggaggaccttgatgcaatgcttccaaagtgtgatgtaattgttatcaacatgcctctta

SEQ ID NO: 44258 - DNA, 181 bp, Glycine max
  Clone ID: 701043079H1
tttttaactacttacttcccactttacccttctcaactctcttactgttactattactgttactccacctaaatcaaaattcaaacatacctattgcatttgcagatagattgaatgttgtgaacaaacaatgggttcatccaaggccttatgcagtgtttctctgctccatttgttcata

SEQ ID NO: 44259 - DNA, 182 bp, Glycine max
  Clone ID: 701043080H1
gtcggcggagtaacactatcaaattcagagcagctgcagagagaacagaggattctgtcttctctgttttctcctcacatagttacctacaaaggctgcaacataacagaggacaacaacaccctttggttcaacctcttcatggagtacatgccctttggtactctctctcaggaaagtca

SEQ ID NO: 44260 - DNA, 183 bp, Glycine max
  Clone ID: 701043082H1
aaagaggagaaggtatagactatagagagagagagagagagagatctgatccggagcgatgagtgagagtgagaagcagagagtaacggggaaggtgaagtggttcgatgaccagaagggttttggcttcataaccaccgacgacagcggcgaggaattcttcgtccaccagtcctccatccg

SEQ ID NO: 44261 - DNA, 180 bp, Glycine max
  Clone ID: 701043085H1
gcacaacacacggagaaagtgagaatggagttggaggagcagcgagtgaggcaatcaagaatgttgatagcggcgattcaagaagccgtggcgaagaaactgaaggagaaggacgaggagattcagcgcgtggggaagctgaattgggttctgcaggaacgagttaagaacctctgcgtg

SEQ ID NO: 44262 - DNA, 181 bp, Glycine max
  Clone ID: 701043088H1
tttctcttctcttctgtcgaagaagaagaagcagaagtagttacagaaacatgctggagaatcttcaggctcctccgccaacggaatcggccccagtggtgaagcgctatgctcctcccaaccagaggaaccgttctgccaacaggcgcaaatcatctgatcggcttgatcggacaaacag

SEQ ID NO: 44263 - DNA, 67 bp, Glycine max
  Clone ID: 701043090H1
atcggcaaggaagattagcggtgtagggagacaggggatgagatctggtgcggcgggggtgtaccac

SEQ ID NO: 44264 - DNA, 181 bp, Glycine max
  Clone ID: 701043091H1
gcttttcacatggaaatcggctcccccgcattccttaccctcgaagactattcttccttcttcttccctaacatggatcccattcccaattccaatgtcaacaagcgtcgtgcaaacaacgaccagttcgacttaaatgactccgcattcagccacctcctcaattccatcatggatccta

SEQ ID NO: 44265 - DNA, 181 bp, Glycine max
  Clone ID: 701043092H1
aacaatatcaagacaacttcatctaattaacgatgaatcaccaacaacaatctcctgtgactgcatatccagcagtgagtcagagcaacccagcagctccaccaccacctgtgggttatcccactaaggatgatgttccttcccaacaaaatgttccaatcaaaacctctactaggggtga

SEQ ID NO: 44266 - DNA, 177 bp, Glycine max
  Clone ID: 701043094H1
aaattgagctctttgagggccaatctcttctgtacatgcagctatatgggcacctaagacctatgtgtcttaagtgggctgttcaactaggtattccagacataatacagaaacatgccaaacccatttctctttctgacttggtctctactcttcaaattccaccagctaacgctg

SEQ ID NO: 44267 - DNA, 177 bp, Glycine max
  Clone ID: 701043096H1
ctctctctctctctctctgttttctctctctcgtctcacttgaaactccacaacccaattttcttttcctatgacccaattccaaatccaaatcaccaattctaattccattcttcaggagttgaattgaattcgtgatgaagagggaccacaaagatagctgcggcggcggcggcg

SEQ ID NO: 44268 - DNA, 243 bp, Glycine max
  Clone ID: 701043105H1
cagacttggggaatttctttgctaatgctgatgccaactatctagggagagataaaagtggaggaaactaccatcccaacaattcagacaccaacatagttgatgttgatcccatggatatgtcagaaagtatgcaagaggctatgcatcgttcaaatttggacatgagtggtgcagagttcgtaagacaagaaattcccctatatgttttgccagccttgtctttaatcaaccttgattcac

SEQ ID NO: 44269 - DNA, 185 bp, Glycine max
  Clone ID: 701043051H1
ccttgatctaagttctgtttccaccatggatcttcaaaccctctacttcacatccattttatccattttcatttttatgtttttggggcacaaaataattacaaagaaacctacctcaactccaaatttaccaccagggccttggaagatacctatcatagggaacatacacaacgttgttggct

SEQ ID NO: 44270 - DNA, 242 bp, Glycine max
  Clone ID: 701043107H1
aaaaaaactaacatttttaggttgtgctcgaaattgaatgcaaaaaaatgcagaaagaagaacaagaaaaagagtatttagaatcgttgacgtgtccaagcttcaactgctactccaccgatgaactcccaggtatcgctcaaagcaggattcaaaaggacgacgcgtcgttttcggcctctcaaaatgacgaccctgacttcgagttcgccgcgtttcgagacgaacccttcgagttctcc

SEQ ID NO: 44271 - DNA, 190 bp, Glycine max
  Clone ID: 701043003H1
ctaataacaaaccaataaaccaaacccaaactgctaggttttgtttggtgtgacgcgcaggaacgccatggctgattcttcttcgaacttgaaatccgacgcgataatggagcagatgaagcagcacctcgacaccgactcaggcaaacaagtcactaacaaaattggactcgtttatcagattcagatt

SEQ ID NO: 44272 - DNA, 191 bp, Glycine max
  Clone ID: 701043004H1
attcgttgccacacccctaggttttctccctcttcatctctcccaatttctctcatcaaagtttcaacctttgataagattgaatcatggggaacgccctgagattcctctacagccattgctgcaagcccacagcagctggtgattctgaatcacttggaccacacggtgtttcctctgccaccgttggt

SEQ ID NO: 44273 - DNA, 191 bp, Glycine max
  Clone ID: 701043005H1
ctctgtttctgtctctgtgtttgcgcgctgaggattccgaacgagcgaccttcttcgtttctcgcaaagtttaagtcctcatgggtaaggaaaagactcacatcaacattgtcgtcattggacatgtcgactctgggaagtcaactaccactggtcatttgatctacaagcttggaggtattgacaagcgt

SEQ ID NO: 44274 - DNA, 190 bp, Glycine max
  Clone ID: 701043006H1
cgtgtaccctcctgagaatcagacgcagttcgccatggcatattacgtcatcaactattccaagctacgtatttgggagtttgtggagttcagcaagatgatatacctagacggtgatatacaagtgtttgacaatattgaccacttgtttgacttgcctgataactacttttatgcggtgatggactgt

SEQ ID NO: 44275 - DNA, 189 bp, Glycine max
  Clone ID: 701043008H1
ctctgcagttttcgcaaccaaaccttcttttttgtttttatacctctgcttattggattcaacgaagtgtcgtgattaaggagaacataactttttgaatcacacagagagagagagagaagagacccagtactttctgcatccaaaccaatcactactgcggataactggtaagttcataaaggggag

SEQ ID NO: 44276 - DNA, 188 bp, Glycine max
  Clone ID: 701043011H1
ctctttttctctctctccattccgtgttttcagctccggtaacctctccttctccgccgccgttgctatctccgccgtgaccttccatccctcaacgccccacagatcttcaatttgattgcttgggtcaacaatttctgtcattctcaatcatggcaactagacttcagtttgaaaataattgtgaa

SEQ ID NO: 44277 - DNA, 188 bp, Glycine max
  Clone ID: 701043012H1
ttttgattctcgttgcaatggcggatggtggtacgttgggattggagggtgtgagattagcctcttcatcaatactttcaactctaacaatgaaatcttccttcgcgaacttatcaacaatgaaatcttcatttcatttcattgcatgcttatagtcatcgtgggatgtgtgtgtgttttagatttgg

SEQ ID NO: 44278 - DNA, 189 bp, Glycine max
  Clone ID: 701043013H1
ggaggatggaacactacatcgtttccaagctgcttcaacaattttggccacagggggtcatggtagagcatacttctctgcaacctcagcacatacttgtactggagatgggaatgccatggttgcacgtgctgggatccctcttgaggatttggagtttgtacaatttcacccaaccggtatatatgg

SEQ ID NO: 44279 - DNA, 193 bp, Glycine max
  Clone ID: 701043017H1
agcgatcgtgctcctgttcacggtctttgccgtttcctccgccctagacatgtcgataatctcgtacgacagcgcccacgcggacaaggccgccacgttgcgcaccgatgaggagctgatgtccatgtacgagcagtggctcgtgaagcacgggaaggtgtacaacgcgctcggcgagaaggagaagcgcttc

SEQ ID NO: 44280 - DNA, 189 bp, Glycine max
  Clone ID: 701043020H1
gcctaagtagggttttgcagagtgtcgcgtttgtcgcattccatacgaggccgaagcgaagagtgtttgtagggtttgcgttgcgcatcgtttgagagagagagatgggaagagaaaaagagactacaaaggtagcttacgcagtggagcagcttgtagccttcaatcgatacaatcccgatattcttc

SEQ ID NO: 44281 - DNA, 187 bp, Glycine max
  Clone ID: 701043021H1
cgccgcctcccctccctccgcgcctcctcctccccggaaatcctggtctccgacaacaacggtgccccctcgccgcccccctccgatccgagctccatcgaggtggacgccgtcacggaggccgagctcaaggagaacggcttccgcagcacgcgcaggaccaagctcgtctgcactgtgggccccg

SEQ ID NO: 44282 - DNA, 187 bp, Glycine max
  Clone ID: 701043022H1
caaaggaggaagcgctaatgttgcagtagtatgtggcaagccaaaatcctcgagaatttgatagtggagtacggccctacgttagtcaagtcctcatgttgcagcagtatgggctatatttttttgcggaatatgatattaaatgcataattgactttcatgctgttcttggttcccagaatgggat

SEQ ID NO: 44283 - DNA, 188 bp, Glycine max
  Clone ID: 701043023H1
cagttggaaaaaaaaaaaaagttgttcgagatggcacgtacgaagcaaactgctcgtaagtccacaggaggaaaggcacctaggaagcagctcgcaaccaaggctgcacgtaagtctgcaccaactactggtggtgtgaagaagccacatcgttatcgtcctggtaccgttgctcttcgtgagattag

SEQ ID NO: 44284 - DNA, 187 bp, Glycine max
  Clone ID: 701043024H1
atgctgatggttatccttactattctcctccaccaccttatgaatacaagtcaccacctcctcctccttgtgctcatatggtggaggtggtggagacttgtagacgtaaggagggatatttggaatcaatgctgataagtgaaatgttgctgtggccatgacacttggttaccactccttacctgct

SEQ ID NO: 44285 - DNA, 187 bp, Glycine max
  Clone ID: 701043025H1
agttcacctctaccccttgctgatgtttattttatttttgttaaataaaacttcagtttcgattctaaattgttgccggctccagcaacctctgccaatctttaatgggtgtgattgatttctacaacactggtgctttgtgctgggttaagtccaacgccaatctgaagcagcaagtgggtttggc

SEQ ID NO: 44286 - DNA, 186 bp, Glycine max
  Clone ID: 701043028H1
ctcttctctctctttctccggcgacgatctcagattccggtcactcctctcgccggcgatcccttattcctccgtcctccgtcgagtcctttccgattcgaatcgttcccagccttgtgccaccatgaatcccgaatacgattatttgttcaagcttttgctgattggagattctggtgtaggcaa

SEQ ID NO: 44287 - DNA, 187 bp, Glycine max
  Clone ID: 701043029H1
actcgagcgattcggctcgagatcgggcgactgacacagtaaacaaaggagctggaaagctgaagctggtggttgttacagaaggccagggtgaggagactgaattcgaggtttttaacttcactggtgaagggggtgtttcattggctatgtacaatactgatgagtctattcgttcttttgctga

SEQ ID NO: 44288 - DNA, 189 bp, Glycine max
  Clone ID: 701043031H1
caacgccaacgctggcctctgttccccttcttttcaatgcctataataataacttgtcctattttttcaaccatgtcatcccagtaagcaatcgctgttagtaacatagcctctaacagaaaaacaagtagtcatcacatgcccacagcaatgacagagtcagggccaagtgtgagtttgaagcttctt

SEQ ID NO: 44289 - DNA, 190 bp, Glycine max
  Clone ID: 701043032H1
gaaaacagctgtagcaaatataccatatggtggtgccaaaggagggatagggtgtgacccagcagaattaagtatatctgaattagaaagacttactagagtttttacacaaaaaattcatgatttgattggaactcacacagatgtgccagcacctgatatgggaacaggaccacagaccatggcatgg

SEQ ID NO: 44290 - DNA, 190 bp, Glycine max
  Clone ID: 701043033H1
attgaatctcagaattctctaaaagagatctttttctgctctttgaagaaagaagggtctttgcttgattttggagatgtctctgctctcagatctcatcaaccttaacctctccgataccaccgagaaggtgatcgcagagtacatatggatcggtggatcaggaatggacctgaggagcaaagcaagg

SEQ ID NO: 44291 - DNA, 189 bp, Glycine max
  Clone ID: 701043034H1
caacgttcgaggtgctgacgtcatacgtctggcgctgccgcacgaaagcgcttcaaatccctccaaatgaagatgtgagaatgatgtgcatcgtcgacgcgcgtggaaagttcgatcctcccttcccggcggggttctacggcagctgcttcgcgtttccggcggcggtgacgggcgccggagatctct

SEQ ID NO: 44292 - DNA, 188 bp, Glycine max
  Clone ID: 701043035H1
actcgagccgctcgagccgattcggctgagaagcaacatcaccaggagtaagagagagcacaaggtggacccttttcatgtgagttttgagtgattcattgattcttctgctaccatcttcttttctactcgaaaaaggaagaggggaaaagaaattgaaacatgggttggattccctgttccggaag

SEQ ID NO: 44293 - DNA, 186 bp, Glycine max
  Clone ID: 701043037H1
cttagaattaagttagtagcgaggaagaaaaatgaaggttgtatacctcttcgttgtgctgatggctttggcatcatctgttgcctttgcttatgatccaagccccctgcaagacttttgtgtcgctatcaatgacaccaaagctggtggtctatacggtgtgttcgtgaatggaaaattttgcaa

SEQ ID NO: 44294 - DNA, 185 bp, Glycine max
  Clone ID: 701043038H1
gcaggcctagctttgtttggttttagtgtgagaaagagaaagtgtacatctttctatcatatagatatagtcatagtagtagtagtatataggtatatatatatatatatatattgcgtgtgtgagagatgcagcagcacctgatgcagatgcagcctatgatggcagcctactaccccaacaac

SEQ ID NO: 44295 - DNA, 184 bp, Glycine max
  Clone ID: 701043039H1
cctttgttcactcttcttctcttgcggctagggttttagcgcacttcttctagatttaaggaagatgggtaaggaaaaggttcacatcagtattgtggtcattggccatgtcgactctgggaaatccactaccactggtcacctgatttacaagcttggaggcattgacaagcgtgttattgag

SEQ ID NO: 44296 - DNA, 182 bp, Glycine max
  Clone ID: 701043040H1
gcagcgtgtgaaagagaaggtgagggtggtggtggaagtgctgaaggggggaaatctggtgcgggaggctcacagagaaggttgtgggtgaaggatcgttcaggagcatggtgggatgaatgcaacaaagaggattttcctgaagaagattttaagaaggcttttaggatgggaagagaaac

SEQ ID NO: 44297 - DNA, 185 bp, Glycine max
  Clone ID: 701043041H1
gttagtagcgagagagggagaaatgaaggttgtttacttcttcgttgtgctattggctttggcatcctccattgcctttgcttatgatccaagccccctgcaagacttttgtgtggctatcaatgataccaaaactggtgtgttcgtgaatggaaaattttgcaaggatccaaagcttgctaagg

SEQ ID NO: 44298 - DNA, 169 bp, Glycine max
  Clone ID: 701043042H1
tttctttcacaaccacttcgtcttctccgtttctcactagactcacatcgcgcctccatttcgctgcattccctctgcgttctccaacgaggaaactcatgtcgcacactctcgcacgtaccactctcggtctcacacatccttctaacatcgaaacacccaagacctc

SEQ ID NO: 44299 - DNA, 185 bp, Glycine max
  Clone ID: 701043043H1
acagaatctactctctattttcctagcttagattccttctccaatggctcttgccgtttccactacttcttcctcttcagctgcagcagcagcagcagcgtcgagctctttcttctcgcgccttggatcttcatcggacgctaaagctccgcaaattggttcctttcggtttccggagaggcctc

SEQ ID NO: 44300 - DNA, 188 bp, Glycine max
  Clone ID: 701043048H1
gcgattgatggttggtcacaccaccgaagaaggcttcaggaatctacatagctttttcctcagagcgttgaaaattcccacactcgctcgcttccccaaaatttcacccctttcattcaattcttccctcttctctgctactgatccatccctcgttttctccgaacaatggctgctggtgtcactgt

SEQ ID NO: 44301 - DNA, 186 bp, Glycine max
  Clone ID: 701043049H1
tcgtgccttatcgctgtggttttcatcgtcttccttctcttatatttcttctccctcctgtctccgccgtacgccgaaacaatggccgtaaaaggagagggccctgctctcggaatcgatctcggaaccacctacccttgtgtcggtgtgtggcaacatgaccgagttgacatcatcgccaacgac

SEQ ID NO: 44302 - DNA, 186 bp, Glycine max
  Clone ID: 701043050H1
ggaaatcttccgcagtgatggggaaagtgtccttcaatttccaccacctcatgtagtccaagttagtaaatctgcatggatgactgatgatgaatttgcaagagagatgattgctggtgtaaacccaaatgtaatccgccttcttaaagagatcccaccacaaagcaagctggaccccactctcta

SEQ ID NO: 44303 - DNA, 196 bp, Glycine max
  Clone ID: 701043001H1
atttcacgcagccactttagcaagctccatctatctccctgattaaaggttatctctaaggtcctagacaatcctctttcaaaaacataccgagaagagtgtggaaatgacgacaccatcattggtagagtctctagttcttcaactccatgagatctcagctgtcaaatttggcaacttcaagctcaaatctggc

SEQ ID NO: 44304 - DNA, 194 bp, Glycine max
  Clone ID: 701042954H1
cgaaaagtccgtgggatttgtgacaacacaacgctgtaaagtactcctcaattcgaaaacgcagtgttttagcattgttcctcaacacacacacaaaaaaaactcccttgtatattgttgcagctctagctagggtttcgcaagtgcgatcgaagaagaacaacgacgatggcgatggctgcagctctgcgtcg

SEQ ID NO: 44305 - DNA, 197 bp, Glycine max
  Clone ID: 701042955H1
ctgccacctggtccgactcctcttcctataatcggcaaccttaacctcgttgaacaacctatacaccgtttcttccaccgcatgtcccaaaacatatggaaacatcatatccctttggtttgggtcacgtcttgttgtggttgtttcatcacccacagcgtaccaagaatgtttcaccaaacatgatgttaccttgg

SEQ ID NO: 44306 - DNA, 196 bp, Glycine max
  Clone ID: 701042956H1
cattttcagaggaacaatggcgggtagggtttcgacgtgcttcttcttcgtgtttgctctttctctccttcttccttttcagatctccgtcgaggaatcatcggagaaagagttcgtactcacattggatcactctaactttcacgacactgtcagcaagcacgatttcatcgtcgtcgagttctacgctccatgg

SEQ ID NO: 44307 - DNA, 193 bp, Glycine max
  Clone ID: 701042957H1
gcaattgcctcttctcttctcccagaatcggtgtaggttacaggtttaagggttttgttttcatttaggtcactaatccgatatcatgaagctcgatacgactagtctcgaatcgtttcccacactgattgcacctcaaaacgacgtcgccggagaactctccgccgctccgttctttgaccttccgaattcc

SEQ ID NO: 44308 - DNA, 194 bp, Glycine max
  Clone ID: 701042958H1
gttcattcagacatatggcacacacataattcataggtatggctgttggaggtcaagatgtaatttgtgtcaaacaaaaacattcttcgaaggttccacctggtgatctaagaagacatttagaggatctaggagatattttgttttcagatttaagaagcccttctcaacaacaaaggaacaccccagaaggc

SEQ ID NO: 44309 - DNA, 195 bp, Glycine max
  Clone ID: 701042959H1
ctcatcgtttctctctctagatctctgtttctcctttttctccaaccttcgtttcaccaccacacttacattactttgtcgaaatggctccaccaattgagaccccaaacaaggtttccagctatcaacagtccccaaaccctcgtcttaacgagaggattctttcatccatttccaggagacacgttgctgcac

SEQ ID NO: 44310 - DNA, 193 bp, Glycine max
  unsure (1)..(193): unsure at all n locations
  Clone ID: 701042962H1
ctcgagccgctcgagccgaatcggctcgagcaaacataacttgcagttatggcttcaatgaaccaccanaacgacattgagctctttgagggccaatctcttctgtacatgcagctatatgggcacctaagacctatgtgtcttaagtgggctgttcaactaggtattccagacataatacagaaccatgcca

SEQ ID NO: 44311 - DNA, 198 bp, Glycine max
  Clone ID: 701042964H1
gagagaacccctattgagcttgctgcagagtcaaatgctggtggtgacagggaagtccatgctccattgactgattctaatggatgagagtgataggcaaaaatctcggagtataatacatatataaaatatggaagattggattatgtaaatttgtatttcataaattgaaaagctggtttttttgaaatgtcacta

SEQ ID NO: 44312 - DNA, 205 bp, Glycine max
  Clone ID: 701042965H1
attcggctcgaggcgggattagaaacattatggcttcctatttctgggaaagaaagtgaataagaacatcatgaaattagtattgctgagagatccaacagatgaaaatgtgatccctgttgttgaggaactgcaaaggcggttgcctcaattgagtgccaccggtcttcaacagcaaggagatggtaaagagtatcttggtgac

SEQ ID NO: 44313 - DNA, 193 bp, Glycine max
  Clone ID: 701042966H1
gtaaatatcgcttgcagtagtaatggataaccaaaatgccatcgagttctttgaaggccaaaaccttttgtacatgcagatatttggtaacctaagacctgtgtgtcttatgtgggcttgcgaactaggtattccagacataatatccaaccatgggaaacccattactcttcttgagttggtctcagccctg

SEQ ID NO: 44314 - DNA, 193 bp, Glycine max
  Clone ID: 701042967H1
cggctcgagattttctctctccctctcccacgcgccaccgccagaaagaggattttccatttctgccctccgattgcatgccgctcatccatggatcagtcttctggcctgaatctggaagatctgaaatgggaccattccttcgtcagagaattgcccggcgatccccgccgcgactcctttccccgtgagg

SEQ ID NO: 44315 - DNA, 193 bp, Glycine max
  Clone ID: 701042968H1
gattatcctaagtctttgggaatagtgctgcaatggcttcaagtcaggaggaggtgacccttttgggagctactggaagcccatttgtgtgcagggttcatattgccctcaagttgaagggagttgaatacaaatatgtcgaagaaaatttgaggaacaagagtgaactgcttctcaaatccaacccagttca

SEQ ID NO: 44316 - DNA, 190 bp, Glycine max
  Clone ID: 701042971H1
ggcgatttgcgtaattgtcaaccaccacaccaaccaagccgcgtcgttctttttagtcactgataagaacaaacttccatcgtccgcggccatgccaacgctgtcttccgccgtcactctcgccgctaaacccctctcactacccctaaaccatcgcgccagatcggcggctgcgttccactctcccaaa

SEQ ID NO: 44317 - DNA, 192 bp, Glycine max
  Clone ID: 701042974H1
actcgagccgaatcggctcgaggcgaaaagaaaagaaaaggtggggaccaagggatccaatccactggtagatgagatgaggtgcaatgagactggatcatagcattgatgatagttgagagtgagtgagttaatatgttatcattgttatggtgaaagtgaaaccaaacaccgaagctgttgagtgatttt

SEQ ID NO: 44318 - DNA, 191 bp, Glycine max
  Clone ID: 701042975H1
ctgaaattgtgaacagtattgttcttgcgttgtttcggagggtcaattgtttggttgagcaaaaatctgaaattcaatttcagttgaaagcaaatggggaatcttttttgttgtgtgaaagttgatcaatctacggtggctatgagagaaggatttggacgatttgagaaggtacttcagccgggatgcca

SEQ ID NO: 44319 - DNA, 184 bp, Glycine max
  Clone ID: 701042976H1
gcggaggcggtggaagaaggagcgatgtcagagtcgagagtgaggaagaggcaaatggcgagggcgaagaatccgagagccatgacgaagagcaatgcgatgaaccagttctgcctccgcctccgccgcttcctccgaaggcgtcgaggtgcaggttacttacggcacggttctgaagcttatg

SEQ ID NO: 44320 - DNA, 192 bp, Glycine max
  Clone ID: 701042977H1
agattccaatccttccttccttcacattctattctatttaccctttgttggtccgcgaagtttcttgtttcctccaacatataatacctcatctttctctttcaatttctctcttcgcttttttttgattcacacacaatgggtctctgggattccttcctcaattggctccgcagcttgttttttaaacag

SEQ ID NO: 44321 - DNA, 192 bp, Glycine max
  Clone ID: 701042979H1
actactcatcattgtctcaaaaaccttctctctcaacaaaacctacaacaacaacaaaaaaagagaaattttttagaacaatggaggcatcaaagatgaagtttttcttggttttggtgattgccatgttggcgatggtagcaactggggtttcagctgctgaggcacctgccccaggtccttcatccgatg

SEQ ID NO: 44322 - DNA, 192 bp, Glycine max
  Clone ID: 701042980H1
caaggcgcttggagtggataccgttccggtcctcgttggccctgttacatacctgttgctctccaagcctgccaagggagttgagaaatccttttctctcctctctctccttcccaaggttcttgctgtctacaaggaagttattgctgaccttaaggcagctggtgcttcatggattcagtttgatgagcc

SEQ ID NO: 44323 - DNA, 218 bp, Glycine max
  Clone ID: 701042981H1
tcggctcgagccaaatctccgctcgagctcacagtgagaaagagagagagagagagagaaactgagagaaattcgcaaaccctaatttcggaaagatcggcgatggctgcctccaaggatcgcgagaacttcgtctacatcgccaagctcgccgaacaggccgagcgatacgaagagatggtggaatcaatgaagaacgttgcgaatctcgacgttga

SEQ ID NO: 44324 - DNA, 190 bp, Glycine max
  Clone ID: 701042982H1
gtttctgcagcagttgagaggaggcactgtggcagaagtcctaggagtgtaaaacagagacgcaaaatgaagacgatcttgtcgtctgagaccatgaatattcccgacggcgtgagcatcaaggttcacgctaaggttatcgaggttgagggccctcgtggaaaactcgtgcgagacttccaccatctga

SEQ ID NO: 44325 - DNA, 189 bp, Glycine max
  Clone ID: 701042983H1
gcacaatgttggtgccaccatggcttgagccactcctaaacacatccttcttcaatgtgtgtcggattcacggagatgccgcgaggagcgaatgtaacatgttttgtctcgactgcaatgagaatgcgttttgcttctattgccgttcctcaaaacacaaggatcaccaagtcattcagatacggagat

SEQ ID NO: 44326 - DNA, 188 bp, Glycine max
  Clone ID: 701042984H1
gggactttgggtatattttgttggaccgattactggggcagttttagcagcatggtcttacaatgtgattagggacactgaacaccctggttttcccatttcactatcctccatttcatccaaggtgcgccaaagcattggtggaaccgaacaaaaaagcgaccaaagatgcttggtgtgaatgaaaa

SEQ ID NO: 44327 - DNA, 203 bp, Glycine max
  Clone ID: 701042985H1
ctggcttccacattgacccttaccatggtgaccgtgctgctgatctccttgttgacttctttgagaagtgcaagcttgacccaactcactgggacaagatctcaaaggctggtctccagcgtattgaagagaagtacacatggcaaatttactctcagaggcttctcactctcaccggtgtctatggcttctggaagcatgtg

SEQ ID NO: 44328 - DNA, 192 bp, Glycine max
  Clone ID: 701042986H1
cccatttcctctcagaaccctcgatcactcccacgcgctcctatatcctctccttcaccgtcgctctctccaacgatcacaacaacatcgtcatcccatggcaaacgccgcatctggtatggcagtccatgatgactgcaagttaaggtttttggagctgaagacaaagaggacacaccgtttcatagtttt

SEQ ID NO: 44329 - DNA, 192 bp, Glycine max
  Clone ID: 701042987H1
aacaacaacgacaacatcgccgtgacagatctcacttccgccctcaatgaagagaatcgcgccgacctagtcaatgctctcaagagcaagattcagagtctggctggggctcattctgatgttctggagactctatcccccaatgtcaggaagcgtgttgaatctcttagagagattcagggtaaacatgat

SEQ ID NO: 44330 - DNA, 189 bp, Glycine max
  Clone ID: 701042989H1
actttctgcgcttcttggcggcgacgcggcggcggcggcgtcttcgccggagagttctacttctagagtctcctccttccactcgtcgccgcgctggcagctctacttcaacgagatcaaagataccgataagctcgttgtgatagatttctcggcgtcgtggtgcggtccttgcaaattcatagagcc

SEQ ID NO: 44331 - DNA, 187 bp, Glycine max
  Clone ID: 701042991H1
tgctgtttgttttcccaggttttagagctccaaaccttcagatccacctcattcgtctccagatcttccttcctggataacgttttcgggttcgagaaggcacttgtgttgtttttcgtacgaaatggagactaaacagagttcggtgacggttacgctcagttacggcgctttgacgtgcgccgcg

SEQ ID NO: 44332 - DNA, 187 bp, Glycine max
  Clone ID: 701042992H1
accctcttctctctctctctctcggatttcttgcgcggtttatcatgggggatagtcagtattcgttttctctcaccacatttagcccttctggaaagcttgttcagattgagcatgctttgacggctgtcgggtctggacaaacgtctttgggaattaaagctgcaaatggagttgtcattgctac

SEQ ID NO: 44333 - DNA, 188 bp, Glycine max
  Clone ID: 701042993H1
cggctcgagaaagatgagtgatgatcaaacggcagtgcgttttggtattcttggatgtgctaacatctccatcaagctatgcaaagccctaagcaaagcaccaaatgccaagctccatgccataggcagccgttccctcgagaaggcgacggcgttcgcggctgagcacggccttcccgaggctgtta

SEQ ID NO: 44334 - DNA, 192 bp, Glycine max
  Clone ID: 701042952H1
gctaccaggagctccctatctacagtgtttccctctctttctctctctctctgctgaaaagcttcgaagctgtgttctgatccttcaaattaggttgtttgctttttttggggagttaaatggatgctaggccgtggatttggtcaatttgatctcaattgaaattttttagtatttctgatggactcgaaa

SEQ ID NO: 44335 - DNA, 189 bp, Glycine max
  Clone ID: 701042994H1
tctcgagccgaatcggctcgaggaaaaaaatgccagtgcagatattcattagaatgagaaattacataccttgggcctttgaaataacatacaggcactgaggatacaatatgctatgagaattcttattttgaagttagaatcaagaaaccttttgttagtttgatgtttggatttaacatgatcaca

SEQ ID NO: 44336 - DNA, 211 bp, Glycine max
  Clone ID: 701042906H1
cggctcgagccctcattcttattttcttcctctcttcactttcactctctctctctctcagccatcatcatgggagcagtgattctcccagatctcggcaccgagattttgattccggtctgcgtcatcattggaatagggtttcccctcttccagtgggtcctcgtctccaaggttaagctctccgctgccagagacgcttcccctaacg

SEQ ID NO: 44337 - DNA, 212 bp, Glycine max
  Clone ID: 701042907H1
cggctcgagaacaacaacccaaagataaaaagcacaacacaagacactgaactcgcactcactgggttttcaaccatggatgcgatacggaagcagctcgatgtgttgatgggagccaaccgtaacggcgacgtccgtgaagtcaatcgcaagtactacgatcgcgacgtctgtcgtctctacctcgtcggtctctgccctcacgaactctt

SEQ ID NO: 44338 - DNA, 214 bp, Glycine max
  Clone ID: 701042908H1
tcggctcgagcggctcgaggttctgaactttctgaattcttcactttgatcatcatcttcttcaattccagcaaggatgtcacagcaaggcgaatcatcggacccgaaatcggggaagaaggacttctcgaccgcgattctggaacgcaaaaagtcgccgaaccggcttgttgtggatgaggctgtcaacgacgacaactccgtagtgaccatg

SEQ ID NO: 44339 - DNA, 212 bp, Glycine max
  Clone ID: 701042909H1
ttcggctcgaggcggctgctacttcggctccatcttctccgatctcctcaaactctatcagcgcagaaccaagcctctatcaccatggggaagacacatggaatgggagctgcccgcaagctgaagtctcaccgtaggagacaaaggtgggctgacaagtcatacaaaaagtctcatctgggaaatgaatggaagaagccttttgctggttc

SEQ ID NO: 44340 - DNA, 210 bp, Glycine max
  Clone ID: 701042910H1
ttcggctcgagtcccttttctatctccctctgcaaaaacgaagtaaatgggtcggcttaatctcctacttgtgtggtcactctctttaacacttttccttaattatctacacccaacctctgcccagctcagtccaaaccactatgctaacatatgccccaaccttgaaagcatcgttagacaagccgttactaataagttccaacaaac

SEQ ID NO: 44341 - DNA, 213 bp, Glycine max
  Clone ID: 701042911H1
attcggctcgagctttggttctttttggttttcacatgccttttgattcctctagcagttgcagattggaacatactgaagctgcagacacaagctggattgaagatcagcctgaagaactattgtgaaagctggaggatgaatgtggagctgcacaacattagggacttccaagttgtgcctgaagagtgcactgaatacattggaaaatat

SEQ ID NO: 44342 - DNA, 213 bp, Glycine max
  Clone ID: 701042912H1
attcggctcgagcgcgtatttagtcctccacctccaaattgtagacgaatcattgttgcaacaaatattgctgaaacttccttgactgttgatggtgtagtgtatgttattgactctgggtatgtgaagcaaaggcagtataatccatctagtggcatgtattctcttgatgttgttcaaattagcaaagtgcaagctaaccagcgagcaggc

SEQ ID NO: 44343 - DNA, 197 bp, Glycine max
  Clone ID: 701042915H1
atctttgtggggactgcggcggacatcgttggacctcacatattgacatgtgtcagttgaagcgcgttagtgacggaatctgatggacacacctttaaaaggaggcaagttgagtcccgtcaccctctttgccccgctttattgcatctcagaggccaattctttcgccgcttcttctctctttccaacgcttcccc

SEQ ID NO: 44344 - DNA, 212 bp, Glycine max
  Clone ID: 701042916H1
ttcggctcgagcaagaacccaagaggcattacccttcttcagaggatgggaattggccttgtaatccacacattgatcatgatcattgcatctgggactgaaagctatagactcaaggttgcaagagaacatggcgtggttgaaagtggagggcaagttcctttgagcatattcattttgcttcctcagtttatacttatgggaactgctga

SEQ ID NO: 44345 - DNA, 192 bp, Glycine max
  Clone ID: 701042917H1
aaagcgggttttgaagaagaagcagttcaattgatcaactcagatttcagggacctaagtctagctgctaatagactcgcccatcatgccatcaaacttggtggcattggctttggagcctcttttttcggattgtttgctgccattgctgctatttatctgttgattttggatcgtacaaactggaaaaca

SEQ ID NO: 44346 - DNA, 199 bp, Glycine max
  Clone ID: 701042918H1
tccgttactggctttttctgtgtccttggcaaccctttttgctgattttcactgccacaatcacaatcaattgaagaaggaagaaataagaagtttctgggtaatgattcgcggttatatagcctgagctgtgccccattccatacgcaacttttcctccatcattctccttttttttctcaccttaataagtgatgga

SEQ ID NO: 44347 - DNA, 199 bp, Glycine max
  Clone ID: 701042921H1
ttcaatatgaggacacccactcacaagtcccctgaggttgaaaatgatggtgattttaaagttcatctgttctcttcatcatccgagttgcttgaaaagcttcatgaaaaatggagttcagtggagaaaccaccatacccagctatgtattctagtatttatggaggtatcatacttgatccagcaatgatggtaatcc

SEQ ID NO: 44348 - DNA, 200 bp, Glycine max
  Clone ID: 701042922H1
ttcatttcatttcactcactcactcttcgtttcgtttctctttctcactctagatctgtgtttctctctccaaccttcgtttcaccacacttccatcacttgtcgagtgtagaaatggctccaccaattgagaccccaaccaaggtttccagctatcagcactccccaaaccctcgtcttaacgagaggattctttcatc

SEQ ID NO: 44349 - DNA, 199 bp, Glycine max
  Clone ID: 701042923H1
agagtttcaattcaattcaatagcgatttagagtttccgaaaagaaattgatttcacgcatttttagtcagtatcagatggatcactttgcagcacatgaagagcaacttgcttcacagagaatgaggcagaaacttgaagaagtaaatgtggctgctcaaactaatcttgcccctgtccaagactatgtcaattacac

SEQ ID NO: 44350 - DNA, 199 bp, Glycine max
  Clone ID: 701042925H1
gggaaggttagtcaaaacattggaatttccacacttgaacatagacgatgacacaactcaacacccccaaagacaaggtcacaaaaaactcatgaaacgatgtgcttgcccactagcctctttacttctcctagcaatagtaatcatagttttaatcttcacaatatttcgtgtcaagggtcccatgatcacaatgaac

SEQ ID NO: 44351 - DNA, 199 bp, Glycine max
  Clone ID: 701042928H1
ccaagatccaacaacttctcaaccacaacgagttgctattcccttcgattcacgaaccccaaaaattaaaacattaaaaaagatatcaagtatcaaaatctaaacggcatcagcaaacatgtctcaacaccatggtgatgaaatggagtatgcggcagatgataatgaaatggcagaggtagaagaggatatgtatttc

SEQ ID NO: 44352 - DNA, 197 bp, Glycine max
  Clone ID: 701042929H1
tttgaaagcttgaatactgcatctttcgagacgtttgctgccttttgtcaacctggacttggacatctaatattggtattttatttggcatttgtgttgttttctgctgactttttatgaaattaaacataatgtttttctggttcattttttacgggaaacaattgtgcggggtccaagttttcgttggtctgttg

SEQ ID NO: 44353 - DNA, 197 bp, Glycine max
  Clone ID: 701042930H1
gtgctataatggctgagcttttctctcttcgtcctcttttcccaggtgccagtcaagcggatgagatttacaaaatatgtggtgtgataggcaatccaacctttgaatcatgggcggatggactcaaacttgcaagggatattaactaccagtttccacagcttgccggtgtgcatctttctgctttgattccgtct

SEQ ID NO: 44354 - DNA, 197 bp, Glycine max
  Clone ID: 701042931H1
ccgagacacagattcttaccaaataaacaaacaaaaaaacacacacacacacactttccattttctgtggttcttcttctcacttctctaatcttctcccccctctgttactccccgcttctctgaatccctttctgttaatcatctgtctttcacctcgtgattccaaaaagattcaaactttgaaaatttttctc

SEQ ID NO: 44355 - DNA, 198 bp, Glycine max
  Clone ID: 701042933H1
tgcacgatgatcattcgcttcaagacatagagaaaggtgcatccaaagagaaaaatgagactccaacagaatcttctgctgtaaggggtaacacaacttgtgtacctgagaatgtggaaatggatgattgcacatacaagtatatgcaagtctaccactgaaactagtagtagtagcaacaagagtgtttcaaaagct

SEQ ID NO: 44356 - DNA, 196 bp, Glycine max
  Clone ID: 701042937H1
ctgaagagtaattggtggattccagcaatggccgtggttcatggcagttgggtcaagcttgatcaaagaggagaagggcaaggagcgagaagctcacatgctatagccatagtagcacagaaggtgtatgcatttggtggcgaattcgtgccacgtgtccccgttgataacaaacttcacgtgttcgacctagaga

SEQ ID NO: 44357 - DNA, 197 bp, Glycine max
  Clone ID: 701042940H1
tccgggttcacgtttcacaatcactttttgcgcttctctcactcactcactcttcttcttcctcttcgtgtggttttctttctcgaactcgaacgaagatgcgtgagattcttcacatccagggagggcaatgcgggaaccagatcggagccaagttctgggaggtggtgtgcgcggagacgggatcgattcaacgg

SEQ ID NO: 44358 - DNA, 212 bp, Glycine max
  Clone ID: 701042905H1
cggctcgagattaagagctgttcctgttcctcctagttgtaatttactacttagtgaaatgtgaaatgacttgccttctttcttatatgccatgcttacttcaagcgctggaacatatgagacagaagatagaggcatcaaccgagaaaattcgtgtggcaaagatacaggaagaacaggcgcgcaaggtgtgggaatcagcatcaaaaaca

SEQ ID NO: 44359 - DNA, 195 bp, Glycine max
  Clone ID: 701042943H1
ctcttggcatgaccattcaaatgtcttcttttctcttagcttctcttgctgttttctttttcttctcctccctggagaagagttttgcctttcaagcagcaagaaaggaggacacagaaagcaacaatcttcatcaatatactcatcttgttcacctcagctcactccttccttcatcttcttgcagctcttcta

SEQ ID NO: 44360 - DNA, 195 bp, Glycine max
  Clone ID: 701042946H1
cctcaccatccgtatgctcgatggttggcagaaacaaatgcagtgaatgtcacattgccagaagtggtgctggttaggagaacccttgcttgggtaacaggaataatattgctcatttcaacctttatggggatatgctacctcatgaatatgccgcttacaagggacacgcttctatattctaatgtcaagctt

SEQ ID NO: 44361 - DNA, 195 bp, Glycine max
  Clone ID: 701042947H1
gttttggtttctggccatatctaatatctttagtttctttgttgttgttctccaatctgcactgaaacgtggctgaatgcctctctcagtcccagccagagcgagaatccaccatctccatggaccctcctttttcccttccatttccaaaccaaaacaaaaacgcatttggccaacccttttgcctctgaatcg

SEQ ID NO: 44362 - DNA, 197 bp, Glycine max
  Clone ID: 701042948H1
atctctttcgatcagctatgaagtaaagagaagggcaaggagagatagatagggaagaaaaatgagtgtatcattgactgtgatgaccttcaatctccatgatgatgagccacaagacagtcctaattcgtgggagaagagaagggatatgtgcataagcgttatcaccagttactcacccatcatcctctgtaccc

SEQ ID NO: 44363 - DNA, 191 bp, Glycine max
  Clone ID: 701042949H1
tctggctgtgttaatatgcgtttcagcactgtcactgagtcctctgttgcgggggaagggcaaaataatggccttgttatgaacttctacaaggaatcatgccctcaggctgaagacatcatcacagaacaagtcaagcttctctacaagcgccacaagaacactgctttctcctggctcaggaacatctt

SEQ ID NO: 44364 - DNA, 196 bp, Glycine max
  Clone ID: 701042950H1
cctcgagccgaatcggctcgagtaccacaccaaaatcaatctgcggcgtcagaaagccatggacccctacaagaatcggccatcaagcgccttcaattctcccttctggactacaaattccggtgctcccatctggaacaataactcatcgctgactgttggatctagaggtccaattctgctggaggattaccat

SEQ ID NO: 44365 - DNA, 193 bp, Glycine max
  Clone ID: 701042951H1
cgtggcgtcgtgggctgatggccggcacgagcctctctcacgtgatccaatcgacggtcctagaattgcccagaaccacccgccacgtcagaatctccgccaagagccaccgcgtctccgccacctctgaccaacgccccgcgggaccctgctgcatctacgttggccccctcgaaaccgctaacaaagagaa

SEQ ID NO: 44366 - DNA, 247 bp, Glycine max
  Clone ID: 701042767H1
attcaatggtctcgttgatgtctacaggaagacattggcatctgatggtgttgccgggctctaccgtggtttcaacatctcatgtgttggaatcatcgtgtatcgtggtctgtactttggattgtatgattctgttaaaccagttgtcctcacagggtcattgcaggatagcttttttgccagctttgcccttggatggctcatcaccaatggtgcaggtcttgcatcatacccaatagacactgtt

SEQ ID NO: 44367 - DNA, 250 bp, Glycine max
  Clone ID: 701042769H1
gagagacccttttccttctctctggctttcctttgacgcttctgacactgctccttttctttctctccgtgtcctaatggctctccccgactcttcttcctgccgcaactccctgatcccctccttcatctactcctcttcctccaaaacgctccctctacaccacatgctcaactccgcctccgccgccgccccctcccagccgccggaaaacctccacgccggatcgcgcggcctcatgattccctct

SEQ ID NO: 44368 - DNA, 248 bp, Glycine max
  Clone ID: 701042770H1
ctattatctttatcttcatctttactttttacgtacaagcactctttgagatctcgtttcaaaatttcaaccaaggctttccctctcttttaattaatattatagtgaagattggttttgtcattttaattcttacaagtttttattataagggtcctaattaatttagtcctaacattcatctgatttttttactcttgtgacagaaagttgtgctaagtgtggaactacatgatgacaaaattaag

SEQ ID NO: 44369 - DNA, 249 bp, Glycine max
  Clone ID: 701042771H1
tttacgtattgaatctcagaattctctaaaagagatctttttctgcactttgaagaaagaagggtctttgcttgattttggagatgtctctgctctcagatctcatcaaccttaacctctccgataccaccgagaaggtgatcgcagagtacatatggatcggtggatcaggaatggacctgaggagcaaagcaaggactctcccaggaccagttagcgacccttcagagcttcccaagtggaactatg

SEQ ID NO: 44370 - DNA, 249 bp, Glycine max
  Clone ID: 701042772H1
tctgtttctgtctctgtgtttgcggctgaggattccgaacgagcgaccttcttcgtttctcgcaaagtttaagtcctcatgggtaaggaaaagactcacatcaacattgtcgtcattggacatgtcgactctgggaagtcaactaccactggtcatttgatctacaagcttggaggtattgacaagcgtgtgattgagaggttcgagaaggaggctgctgagatgaacaagaggtcattcaagtatgcc

SEQ ID NO: 44371 - DNA, 249 bp, Glycine max
  Clone ID: 701042773H1
tttacccacaccctctctctctctctctctgtcacgcacagagaaaaactcagacacccacgttcacacttcgcacacaccatctctcactgttctttcttcttcctctttttctttttttttttcttttctcttaatggaatgatggaacacaacattatcgtcaacaacaacgtgatcgcaccgtttgttataaaaacctacaatatggtgaacgatcccaccaccgataaactcatcacgtggggc

SEQ ID NO: 44372 - DNA, 247 bp, Glycine max
  Clone ID: 701042774H1
gttccagagtgatgatggaagtgatgatctgtgagaatttccggtattcaccactctccatcttatcttcttctccttcacctcgttgccatctctctgttccatcttcttctttgaggattaaaccttcttcttcatcttcatcatcatcatctgtgtcttgttctctcatggagaatcaggagacccaacgcagcaaattcatggactttccgttcgtttcatctgcccagaagaacctcatggt

SEQ ID NO: 44373 - DNA, 258 bp, Glycine max
  Clone ID: 701042776H1
ggagtgtgcaaaagagcgtcgtagtcgcaaccctaatcagaagaagcgcacttcaagcgagtgacagccaccagccatgggtcgtatgcacagccgcggtaagggtatatcctcttctgctttgccctacaaaaggacacctcctagctggctcaagatctcttcgcaagatgtcgaagaaaatatctgcaagtttgcgaagaaaggtttgaccccgtctcagattggtgtcattctcagagattctcacggtattgc

SEQ ID NO: 44374 - DNA, 241 bp, Glycine max
  Clone ID: 701042777H1
tgttaatttgtctttctctatctctatcggtcatgggtgcttttgcttttgatgaggaaaactcctccaccgtggctccggcaacactctacaaagctctgacaaaagatgctgacactatcatcccaaagattattggggccatccaaactattgaaatcgttgaaggaaatggaggacccggaaccgtcaagaagataacagctagtgaaggtgaccaaaccagtttcgtgctgcaaaa

SEQ ID NO: 44375 - DNA, 244 bp, Glycine max
  Clone ID: 701042778H1
gaagaagagaaggtggtaccgccttcaattctctctctccatttctcatcctcatcatcttattatacctcttccatctccataacatccacttgtgaaaaaaacccattaatatatatcacacacacatgtatctctgagctccaatccaatccaagaccacaccttgtcgcgtcggacgaaccttggtgtctgtcttttatttttatttggatcaataagtttccccgaaaaattggggaag

SEQ ID NO: 44376 - DNA, 243 bp, Glycine max
  Clone ID: 701042779H1
gattgctagaatggaatttcgatgctcagtcatctcttttaccattctcttctctcttgctcttgcaggagagagccatgtccatgcatcgctacctgaggaagattattgggaagctgtttggccaaacactcccattcccactgcactgcgagagcttctaaagcctctccctgcaggtgatgaaatcgatgaactccctaagcaaattgatgatacacagtacccaaaaacattcttcta

SEQ ID NO: 44377 - DNA, 243 bp, Glycine max
  Clone ID: 701042780H1
caataatgccccaagatgcaagtggtgaagatattgaggttgataagaatcttgctttcctcaatcaatatgttcagcagtctctggaaaggggtgctctaccctacattccagaggatgagcgcaatggaacagtgaatgtgagcaacttcagaagccaggatcaacatgaatctgcacaacatggtctgagatttgaggcatatgaagttccaaagcctccaatgccgtcaaaagttgctc

SEQ ID NO: 44378 - DNA, 247 bp, Glycine max
  Clone ID: 701042781H1
attctcagtctctgcacacacctcagaagaacagaacagaaccaccagtgcttttcaaaaacggtttcagcaatggcgttcttaaataaaattggaaatctggtcaagaattctgctgtcaagcacatcaatcaagatttttcggtgtctaccccatcacttttccaagcaattagatccatgtcatctgcaaagctttttgtcggaggtatttcttacagcactgatgatatgagtttgcgagagt

SEQ ID NO: 44379 - DNA, 246 bp, Glycine max
  Clone ID: 701042783H1
gttcatcctcttccttctttctccaccaaaccttaaaccttaaactcgcatataacccaatcaaatttgcctttagattctcatttcccgtcaaactatctctctctctctctctaggaatccaaaatattccaactaaacctttcttccttttcatggcagatcctacccgtctttcattcagttcaatctcatacctgtatgtgtatctctaatgcaatcagttaatgaatgagaagaggaatc

SEQ ID NO: 44380 - DNA, 246 bp, Glycine max
  Clone ID: 701042784H1
cttgtggctccaacaaaagccatcatgaatgctcgtgtatcagtttaccgatggcatgagttcttccctcatgccagaaacaatattggtgtagtgattgcaatatggtcccctatcatacttgtctactttatggatacacagatttggtatgccatcttctctacaatagtaggaggcatatatggtgcatttcgacgtttgggagagattcgaacattggaattactgaggtctcggtttgat

SEQ ID NO: 44381 - DNA, 245 bp, Glycine max
  Clone ID: 701042785H1
ctaatttctctcgttgtcatattctagtttcaacttatggagtttacctctaataatatgcttccttttgtttcaatgttttggcttgtgttcctaagtcctttagtgaactgtcaactttattataatttctatgactcaacttgtccaaacctgaccggaattgttcgatccaacgtgtggtcagctatggccaaggatgcaagaattgctgcttctctcttgcgccttcatttccatgattg

SEQ ID NO: 44382 - DNA, 245 bp, Glycine max
  Clone ID: 701042786H1
cgaaaaaagacttgagatatcattttttgaaaatggtgtgtttgctgaccccggaggattaggcctccgagcattgtccaaagaccaattggacgagattcttaaaccagcagagtgcactattgttgcatcactttcaaatgattatgttgactcttatgttctgtcagagtcaagcctgttcgtctatccttataaaattatcatcaaaacttgtgggactaccaaattgcttctgtccatcc

SEQ ID NO: 44383 - DNA, 247 bp, Glycine max
  Clone ID: 701042788H1
ctgccgtcatccattttcctgctttatgttatgacagcaaactgaactaaagcagaagaagcgccatccatgtctcggcttcataagtcaacaacaggtcagcagcaacagtttcattccctacaccaaatcctctccccatacatgtcaagtgttgttgtatccgttttattatggcatgccattgctgtgcttttgctttcaaatttggcctctgctgagggcattgaggccacaaatggaggca

SEQ ID NO: 44384 - DNA, 244 bp, Glycine max
  Clone ID: 701042789H1
gctgggtgttctgaggaatattctgtcattgatcgagaaccagggcttgtggtgttagagggtgatattggtgggggattggttcttaaacgtcatatctatgttccaaagaatgttcccaatgccatccagatagactctagtataatagcacgaagtgttggagctggttctggagggttctcaaggttggtttgcttaagagttcacccaacatttagtgttttgcatccatcagaatctt

SEQ ID NO: 44385 - DNA, 244 bp, Glycine max
  Clone ID: 701042790H1
cttaacaacagcacaaagcgggttactgtctgttcaagctaccatctctctctctctttcttagtgcctccttgccagaagttaaaatggcccaagaaactttcctattcacatctgaatcagtgaacgaggggcaccctgacaagctctgtgaccagatctccgatgctgtgctcgatgcatgcttggagcaggaccctgacagcaaggttgcctgccaaacctgcaccaagaccaacatggt

SEQ ID NO: 44386 - DNA, 239 bp, Glycine max
  Clone ID: 701042791H1
gtttcctttcgccgaaaccctcgctcgcaacttctacagaatccctttcaccatggatattgaggaggacatccgttctttacagctcgattcagcagaagacaataatggggtggtaaatgcagaggatggaaggccagaagaagttgagaaatctgataagatggatgaagatccaaagcaggatgttgaggctgagccaaaggctgttgaggctgagccaaaagtgaaggataagg

SEQ ID NO: 44387 - DNA, 238 bp, Glycine max
  Clone ID: 701042794H1
gcggcactacttcggctccatcttcttcgatctctcaaactctatcggcgcagaaccaatcctatatcactatggggaagacacatggaatgggagctgcccgcaagctgaagtctcaccgtaggagacaaaggtgggctgacaagtcatacaaaaagtctcatcttggaaatgaatggaagaagccttttgctggttcatcccatgcaaagggtattgttcttgaaaagataggtat

SEQ ID NO: 44388 - DNA, 239 bp, Glycine max
  Clone ID: 701042796H1
gtttgagaagaactatgttggacaaagcttttgatctcttggatacgcataaagttagtagtctcaacaaaaatcaatgcattaggctctttgaggagctgaacaagtacaggactttgccaaaaatctctcgggaagactttgaattaatatttgatgagctcgatgatagtcatgatataaagattaacaaggatgaatttgcagatatttgcaatgccatagctttaaaatttcag

SEQ ID NO: 44389 - DNA, 248 bp, Glycine max
  Clone ID: 701042766H1
gggcagtatggtggtggagctgcgccctacatggggcactagattccacataagtgcatcagtcttttattactggcctggcgtttcttctgagttctgaagtttaaggagctgatgcaattggcgtgtttataatgaaatgctacttactgatcagaatattttaattaccaaatggagttctgttttcgccacctgctttttcttattttcttccctttcaaaatattgtagtattctgactttgg

SEQ ID NO: 44390 - DNA, 192 bp, Glycine max
  Clone ID: 701042902H1
gcttgtcaacctttgtgttgtctattgcctatgcttgtgttttcagggtgagagcagaggaaacaaagaacaagagagttatgttggctttgaatgttgattgcagggcacgtttggagccacctattccaccaacatattttggaaactgcgttggagcgagacttgcaattgctgaaacaagagagatat

SEQ ID NO: 44391 - DNA, 207 bp, Glycine max
  Clone ID: 701042903H1
cgagctggagatgatttgcagacagaggttatcatcaaccatcaagctctttcacgtcttctgaatctcttgactaataattatagaaaaagcataaagaaggaagcatgctggaccatatcaaacatcacagctgggaacaaaaagcagattcaggatgtaattgaggctagtataattgctcctttagtccatttgcttcaaaat

SEQ ID NO: 44392 - DNA, 256 bp, Glycine max
  Clone ID: 701042722H1
tttcaaaaccctctctctcgttactcgccatcactagcgagtactccttcttcctcttcgcgaaattcgtatgcgaagaaggaggtagggattcgcgctcctgctttctcagactgcctaattatcttttattctgcgaagtaactgagagattgaagatgggaggagatgattctggtttggagactgacaattttgattggaacactgaagatgagcttgaacttcagaactataactcgtcgtcttcatgttt

SEQ ID NO: 44393 - DNA, 254 bp, Glycine max
  Clone ID: 701042723H1
agaaggtgaaggaagtgagagtggagtagatctgagtgtgaagcaaaaattcttccaaagttttcatctttcaatcaaagggtcctaaaaaaaatgctctgaaccttcgttttcttcatctttttctttttctaagtccccaatcactataacacaatgcctcgcccttgtttccacaagcttgttctccccactactctccaatccagacaactgaggattccagataattttctgaggaaatatgggaccca

SEQ ID NO: 44394 - DNA, 255 bp, Glycine max
  Clone ID: 701042724H1
ttttaccttaaacaacaatggccgatgccgaggatattcaacccctcgtttgcgataatggaaccggaatggtcaaggctggttttgctggagatgatgcaccgagggctgtgttccctagcattgtggggcgtccacgtcacactggggtgatggttgggatggggcagaaggatgcgtatgttggggacgaggctcaatccaagaggggtattttgactctcaaatacccaattgagcatggaattgtgagca

SEQ ID NO: 44395 - DNA, 255 bp, Glycine max
  Clone ID: 701042726H1
tccgcccattgaaagtttgggggacttatcatttttgaggtacttaagcttcagaagtcacaagatagtccatcttccaaaattaattggtgagctgcacaacctagaaacattggatctaagagaaacttatgtgtgtatgatgccaagggagatctacaagcttaaaaagttaagacaccttctgagtggttatcaagggtttcaaatggatagtggcattggagtactaacatccctacaaacactacctga

SEQ ID NO: 44396 - DNA, 248 bp, Glycine max
  Clone ID: 701042727H1
cttctcacctctctctctctctctccctccctcctagggtttcaagtttccatgtgaaaacggattgagaatctctctctcattctctctctattttatattttctttcacgtcaattagggtttttttgctggcgtgattctgaaggcttggatctggatatcttctttgcttctttgctatggaagactcggattcagttgctacactgatagattctactacttctaagatacaacagctgcaga

SEQ ID NO: 44397 - DNA, 252 bp, Glycine max
  Clone ID: 701042728H1
cttcctttgtaatagaaagcacgcgtttctctctctccctctctcaacgaatatttgtgtacttcctcttttgtgggtagattcaatttaccatgtcgagttcatcggaatactctcaattttccggccagaaaccggcgaggtcgccggagaaatcgagcttctctcagacttgtagcctgttgagtcaatacatcaaggagaagggtagcttcggagatcttaccctcggaatgacatcatgtgggtcac

SEQ ID NO: 44398 - DNA, 249 bp, Glycine max
  Clone ID: 701042729H1
acctacctctttttcttctctctcaacaacttcaccttcttcctcctcgatcatgtctcacttcaagggcaagtaccatgatgagcttatcgccaatgctgcgtacattggcactcctggaaagggtattcttgctgctgatgagtcaacagggacaattggcaagcgtttggccagcatcagtgtagagaacattgaatccaacaggcgagctcttagggagctgcttttcactgctcctggtgttct

SEQ ID NO: 44399 - DNA, 250 bp, Glycine max
  Clone ID: 701042730H1
cgattgctagaatggaatttcgatgctcagtcatctcttttaccattctcttctctcttgctcttgcaggagagagccatgtccatgcatcgctacctgaggaagattattgggaagctgtttggccaaacactcccattcccactgcactgcgagagcttctaaagcctctccctgcagctgttgaaatcgatgaactccctaagcaaattgatgatacacagtacccaaaaacattcttctataaaga

SEQ ID NO: 44400 - DNA, 250 bp, Glycine max
  Clone ID: 701042731H1
gtcgcgattgatcgattcagctacgtccgatgaagataaagtcgcacccgtttacaaattggaggaaatctgcgaacttttgcgctcttcgcatgttagtattgtgaaggaggtttccgagtttgtcttaaaacgtttggaacataaaagcccaattgttaaacagaaggctttaagattgataaagtatgcggttgggaagtctggtgtggagttcagaagggaaatgcagagacattcagtggcggtt

SEQ ID NO: 44401 - DNA, 253 bp, Glycine max
  Clone ID: 701042732H1
tgacttttcgagaaaggaaaaaaaaagagtttccggcattattccatcatgaacgctcttcccattcttctcttcttcctcttcgtttcggcattagtttatgcgaagaaaactggcgatgtgacggagttgcaaattggcgtgaagcataaaccagcatcatgtgaagttctggcacacaaaggtgacagagtcaaagtacactatcggggaaaactcactgatggaactgttttcgattctagctttgaaa

SEQ ID NO: 44402 - DNA, 254 bp, Glycine max
  Clone ID: 701042733H1
gtttcaaggggagttgagtgatgcttcggttgtggcggtgaagaggttggagaggccggggggtggggagaaggagttcagggctgaggtgtccacaattgggaacattcagcatgtgaatcttgtgaggctgagagggttttgctctgagaattctcataggcttttggtttatgagtatatgcagaacggtgcccttaatgtttatttgagaaaggaagggccttgtttgagttgggatgttaggtttaggg

SEQ ID NO: 44403 - DNA, 255 bp, Glycine max
  Clone ID: 701042740H1
aaattattggtctctgttctctacctcaccccccaccgcactcgtcttgtctcaaacaaatgcaacaaccacttattcttatagttactatggactaggaacaagatttgattctcattctgatatcagattcagatttttttaaaagagactcacgctggcggtgaagaacgtttctgcggcggcggcggaggaggaggaacaggttaacatgactctgatttccaattccgacgtcgaaagccacgccgacgt

SEQ ID NO: 44404 - DNA, 253 bp, Glycine max
  Clone ID: 701042741H1
gcaagagtattcgatttgattgattgtattacagtgtcattttccttcataaccgatttccattttatgattgtgcgcaacagttcgcagactcacaatggccgcaatatccaactccttatcactgaagcacagtttctctctgagtcgagctcctccttcttcctcttccatcaaattcaaattcagaagatgttacgccgcgttcgccaatgagaatcgcgagtacgtgatcgttggcggcggaaatgcc

SEQ ID NO: 44405 - DNA, 248 bp, Glycine max
  Clone ID: 701042742H1
tggtcgtccatttcctcctctatttaacttcaaacaggaattatctgaagcatctccagtgcttgttaacaaattgatacctgaccacgtgaagcggcaaatagggctgcaatttgttcctccagcaggatcatgatgatgagctttaggggggctttagtgtatactagttgatgagttaaacaaaagtgacaccgttatttttgtctaaattagcatgttctgtggcctgaccagtgtagtttcaa

SEQ ID NO: 44406 - DNA, 249 bp, Glycine max
  Clone ID: 701042744H1
gggtgcccaaaattggggaatcaaatcgccggcctctagcaatgttgagaccaaatgcttcacttacttcagccctaaacttattagttcaagctcaagtaagttcaataccaatagttgatgatagtgactcattactggatatatattgtcgaagtgatataacagctttggcaaaggacagaacttacacacatattaatcttgatgaaatgactgttcatcaggcattgcaattgggccaggatt

SEQ ID NO: 44407 - DNA, 246 bp, Glycine max
  Clone ID: 701042746H1
attgtagaaggcgatggccgcgcgagctctgttgaccagaaaaaccctagccaccgtgctccgcaacgacgcgaagccataatcggagttggcataacagcagcggctactcattcacgctggttgcacgtgtacacgctacccgatctggattacgactatggcgcactggagccagccatcagcggcgacatcatgcagctgcaccaccagaagcaccaccagacttacatcaccaactacaac

SEQ ID NO: 44408 - DNA, 251 bp, Glycine max
  Clone ID: 701042749H1
ccactctcgcgtcgttaccatgccgcaaggggattacatagaacgccacagaagagactatggctaccgtctcgatcacttcgagcgtaacgcaagaaagaggcacgtcaagttcacaagcgctctgcaattgcccagaaggctctgggtattaagggcaaaatgattgccaagaaaaattatgctgaaaaggcgcagatgaagaagactttggctatgcatgaagaatcatcgtctaggcgcaagactga

SEQ ID NO: 44409 - DNA, 253 bp, Glycine max
  Clone ID: 701042750H1
actcgagccgaatcggctcgaggaaaagaaaatcctcaattttctacgcagccaaacactctctctctgtctctcgaaaattctcagtttgcagagaaaatctgaatcatgtcgtggcaagcgtatgtcgacgatcaccttctgtgtgacatcgaaggtaaccacctcactcacgctgctatcatcggccaagacggcagcgtttgggctcagagtaccgacttccctcagttcaaacctgaggagataactg

SEQ ID NO: 44410 - DNA, 250 bp, Glycine max
  Clone ID: 701042752H1
gaacagcctctggtcgatggaacaatgtaggcaagggaagtcggcaaaatggatccgtaacctcgggaaaaggattggctctgagggctgggcacgggggtcccagtcccgaacccgtcggctgtcggtggactgctcgagctgcttccgcggcgagagcgggtcgtcgcgtgccggtcgggggacggattgggaacgggcccttcggggcctcttccccgggcgtcgaacagtcaactcagaactggta

SEQ ID NO: 44411 - DNA, 262 bp, Glycine max
  Clone ID: 701042755H1
tgattcttggaatttgagtgtggaggttagcatggtagctcacttgacaaaggatgaactctaatccggctctccactatcaagattaattgctatattttcctttccatttatctgttggatagaatattaggcataataacaaacttgtcttagtgacattctttgttgcgggctaatattggactccatacaggttagagaaattgttgccattttggaccttgatgttcttttctatccttgtccaagaaatggccca

SEQ ID NO: 44412 - DNA, 253 bp, Glycine max
  Clone ID: 701042757H1
aaacattgtttccgtgatcatcctcatcactctcacccatggctgcctcatccaccatcaacaacttcctctctttcttcttacgcacaaaaccaccaccaccaccctctccaccgcagttcaaccccaccacttctcagaaccagaaaccctcctcctcacagcccctaattgcccaatacaaccctcctccttcaccctcttgcgcttcttcttctgagttgtcctctgttatatgcccatccatggcgta

SEQ ID NO: 44413 - DNA, 248 bp, Glycine max
  Clone ID: 701042760H1
ctaatccctctttcttcctcttcctcagtagtgcgattttcgattctcttctctgcaactatgcctaaccctaaggtcttcttcgacatgaccatcggcggtcaacctgccggccgcatcgtgatggagctctatgccgacgtgactcccagcaccgccgagaacttccgcgcgctctgcaccggcgagaagggcgccgggcggagcggcaagcccctccactacaaaggctcgtccttccaccgcgt

SEQ ID NO: 44414 - DNA, 243 bp, Glycine max
  Clone ID: 701042762H1
ccgcaaattgttttcttttgctgtcactgttgccgaatccctcactttctcactcctcagcaccattcaatctctttcctctactggcaataagcatcagcactctgccacatccagttcccttctgcgtgttcctttcttctactctctccagtccggccaaagcgaactccttccatcattttcagttttttctgtcaagtgctgttgcttctgctcccaaacttatccaaatattgcttg

SEQ ID NO: 44415 - DNA, 250 bp, Glycine max
  Clone ID: 701042765H1
ggaaaccctagctggataggtcaaacatcatcatgtcggacgaagagcaccatttcgagtccaaggcagacgccggtgcctccaaaacctaccctcagcaagccggtaccattcgcaagaacggctacatcgtcatcaaaggacgcccctgcacggttgtcgaagtctcgacttccaaaactggaaagctcggtcacgccaagttccacttttttggaattgatattttcactgccaagatacttgagga

SEQ ID NO: 44416 - DNA, 256 bp, Glycine max
  Clone ID: 701042721H1
ctctctctctctctctctttctctatggcatctgcgacgcgtctcgtgcactgcgagctgcgctcggcgaggcccgcggttcggccgagggaaccggccggtccggttcaggttacgatccccaaacccaaacccaaagcggcggaggcggaaggcgcgaacatcgttttgcagccgcggttgtgcactctcagatcctacggttcggatcgagccggggtgcttatcaagactcgcaaggagggtgaccatgatg

SEQ ID NO: 44417 - DNA, 83 bp, Glycine max
  Clone ID: 701042688H1
gtttgtggatcatcaccaatctcttcttgctaaagtaacttgcctttcatctcttccttgttagctttccacacaatctcatg

SEQ ID NO: 44418 - DNA, 254 bp, Glycine max
  Clone ID: 701042689H1
agcagccacccgattgcatcgtcgccgactttctcttcccctgggtggatgacttggccaaaaagcttcgcatccccagacttgccttcaacggcttctccctcttcaccatctgcgccatacactcctcctccgagtcttccgattctcccatcattcagagtctccctcaccccatcaccctcaacgcaacaccgccaaaggaattgaccaaattccttgaaaccgtgctggagacagagctcaaagctatg

SEQ ID NO: 44419 - DNA, 254 bp, Glycine max
  Clone ID: 701042690H1
gctagctaggttgaaaatagtttggttttgtagtaagtgaggtgaggtgccaaaatggtgaagataactcttggtactttcgatgactcttttggtgttgcctctcttaaggcttatttggcagagttccatgcaactctgattttcgtgttcgctggtgttggttcagccatcgcttacaacgagcttacaaaagatgcagccttggatccaacggggctggtggcagtagctgtggcccatgcatttgcact

SEQ ID NO: 44420 - DNA, 256 bp, Glycine max
  Clone ID: 701042691H1
ggtttcaaggctagtggaggagcgtaggaggctgaggagaaaagacaggctaggctagaaaaagaacttttggaggaggaagagagaaaacagaggaagaggtttgaggccatagaaatgcagaagttgaggaagacggctacgaggcggtgtcgcaactgtttgaacccgtatagggatcagaaccctggtgggggtaggtttatgtgttcgtactgtggccatgtttcaaagaggcccgttttagacttgcctg

SEQ ID NO: 44421 - DNA, 257 bp, Glycine max
  unsure (1)..(257): unsure at all n locations
  Clone ID: 701042692H1
gaaagatagtgagtgaagtaactgaagagaagaaaaaatgccgtgcctcaacctcagcaccaacgtgtccctcgaaggcgtcgacacctcttccatcctcgccgaagccacctcctccgtcgccagcataatcggcaaacccgaagcctatgtgatgattgtactgaaaggatcagtacccatagctttntggtggggatgagcaaccagcagcttatggaggattggttccattggtggtcctaacctagtgtaaa

SEQ ID NO: 44422 - DNA, 260 bp, Glycine max
  Clone ID: 701042693H1
tcgctaacagtaacagggtaaagagtaagcgaaaccctacgcgcgtgttccttccggtgaaactatcttatcctctccgggatctgaatctgagaaatttaatgcactactacttcttctcgagaaggatccagaagaagaagaagaagaagagccacactcaccgccaatgagcaacatccgtcgctgccagaggattctcatcctctctctcttctttctctccgtcgtcgctcctctcgtcttcgtctctcaccggc

SEQ ID NO: 44423 - DNA, 254 bp, Glycine max
  Clone ID: 701042694H1
ttcacaatcactttttgcgcttctctcactcactcactcttcttcttcctcttcgtgtggttttctttctcgaactcgaacgaagatgcgtgagattcttcacatccagggagggcaatgcgggaaccagatcggagccaagttctgggaggtggtgtgcgcggagcacgggatcgattcaacggggaggtaccaaggggacaacgagttgcaactcgagcgagtcaacgtctactacaatgaagcgagttgcg

SEQ ID NO: 44424 - DNA, 265 bp, Glycine max
  Clone ID: 701042695H1
atagttttgaagagatatgcatcaagaaagaagcgtttgagggagaagagaagttttgtgcaaaatccttgggaacagtaattggttttgccatttcatagctgggaaagaacattcaagtactttcaagttcctttgtcaataagcaagagcaatacactgtggaaggactgcagaatcttggagacaaagcagtgatgtgtcatgggctaaatttcagaactgcagtattttactgccataaagtccgtgaaacaacagcttt

SEQ ID NO: 44425 - DNA, 268 bp, Glycine max
  Clone ID: 701042696H1
tccagttctctcttttccccatcacttcctatctgaggcaaaagaaagacactaaaaaaattatccacagcatcaaagttggaatctcccttgtattgatttcactcctgtacttcgtggatcctctctatgagcaagttggagataatgctatatgggctatcatgactgttgttgtcacttttgaattttctgcgggtatagagctacgctaggaaaaggtttaaatcgcggaatgggaaccatattaggaggtggactgggttgc

SEQ ID NO: 44426 - DNA, 260 bp, Glycine max
  Clone ID: 701042701H1
ctcttcttctcttgcggctagggttttagcgcacttcttctagatttaaggaagatgggtaaggaaaaggttcacatcagtattgtggtcattggccatgtcgactctgggaaatccactaccactggtcacctgatttacaagcttggaggcattgacaagcgtgttattgagaggtttgagaaggaagctgctgagatgaacaagaggtctttcaagtatgcctgggtgctggacaaacttaaggctgagcgtgaaag

SEQ ID NO: 44427 - DNA, 257 bp, Glycine max
  Clone ID: 701042702H1
gtgatctaaccgaacaatcgcatatttctgttctgccttcttctactcaatacattacctgcctctagtctcgtttccaggtttgtaataataataattttagtttcttcgttacgcctgcgttgtgcgtgagaaagtgcgcgtggtgaaaaccatggcttctcagctcctgagacgaaccttcggaagtcgcatccttgcaaaccctagggccttctccttctcctccgctgcttccactccgatccgcgccactc

SEQ ID NO: 44428 - DNA, 260 bp, Glycine max
  Clone ID: 701042703H1
gttgtgttgagcagagagagagagtgagggataagaagagaatagggttagggttagggtttgattgaggatgccgaagaacaagggaaagggaggtaagaacaggaagaggggaaagaacgaggcggacgacgagaagcgggagctggtgttcaaggaggacgggcaggagtacgcgcaggtgctccggatgctggggaacgggcggtgcgaggcgatgtgcatcgacgggacgaagaggctctgccacatccgcggga

SEQ ID NO: 44429 - DNA, 260 bp, Glycine max
  Clone ID: 701042704H1
ccatgctctcccaaacaagaagcgattaagattagatttttcagcaatgaacaacaccaacccaaccaagaatgctgcaacgccgtcgtttttcaccaaccctggaacaccctccatccccatgaaccaccttctctcccaaacgcagcctcaaccacaaggtgccacgtcacacttccacggccactttcagctttcacaaccccaaacccacgtgctcgcaccacaacaacagccacaccctcatcctcatcctcaag

SEQ ID NO: 44430 - DNA, 258 bp, Glycine max
  Clone ID: 701042706H1
ctttttgatcctcatagtggtgacaactatgatagggatgaggatcatctggcattgatgatggagcttcttgggatgatgcctcgcaagattgcacttggtggatgctattcccgagattttttcaacagatatggagatttgaggcacatccgtcggttgcgtttctggcctcttaataaggtgctgacagagaagtatgatttcagtgaacaagaagcaaataacatgaccgatttccttcttccattacttgat

SEQ ID NO: 44431 - DNA, 258 bp, Glycine max
  Clone ID: 701042707H1
ctacttggtagttggagtggtagcttttgctctactttgctcattcagagtttctttgacagattcagttccattattttcgcctgttcatgacgctgcttctttgactcgcaactctttccctgctggcttcatctttggggctggatcctcagcctaccagttcgaaggagcagcaaaggaaggtggaagaggaccaagcatatgggataccttcacacataaccatccagaaaagataagagatggagccaatgg

SEQ ID NO: 44432 - DNA, 259 bp, Glycine max
  Clone ID: 701042708H1
tcttgctagggttttaggaaaagacactgtctcgcgagtgaacacaggttacagcaatggctttctttggtagaattgggaatttattaagacagacagcaagcaggcaggttagttcagaattgcgatcatccccttcgttttttcaggctatacgcagtatgtcatctgctccaagcacaaagctgtttatcggaggtgtttcatattctactgacgagcaaagtttgagggaagctttttcaaaatatggtgaagt

SEQ ID NO: 44433 - DNA, 258 bp, Glycine max
  Clone ID: 701042710H1
ctctccgcatacactctgctcgtagggtttctccacctagagggacatggctcccaaaccgcctagtacgggtctgtttgttggactgaacaagggtcacgtcgtcaccaagaaggaattgcctccacgcccctcagatcgtaaggggaaaacaagcaagagggtgcactttgtgaggaacctcataagagaggtagccggttttgcaccctatgaaaagcgtataactgagttgctgaaggttgggaaggataagag

SEQ ID NO: 44434 - DNA, 258 bp, Glycine max
  Clone ID: 701042711H1
ttctaacaacaataagaagaagaagaagaagaagaagaagtaagcctttaatgattgatccactttattgttgttagcagtcaatgtcgtctttaagatctctccaaagaaagctgatgagaagacaaggtttttttcactcaaaggcaccagcaaagtcactttctccaccatcaccaccacttcctagcaagacctcattgacacccccagtttctccaaagtcaaagtcccctaggcttcctgccacaaagagag

SEQ ID NO: 44435 - DNA, 254 bp, Glycine max
  Clone ID: 701042712H1
gagatagaccccagaagtggtttctgcagctccaattcaatcttctacagcaagcgtaagcccctcccactccctcccaacaacgccttcgacgtcaccaccttcatctcctcccgcgcccaccgcgccaccacagccttcgtcgacgccgccaccgcccgccgcctcacctacacccagctatggcgttccgtggagggcgtggcagcctctctctccgtggacatggggatccgaaagggcaacgtggtcct

SEQ ID NO: 44436 - DNA, 252 bp, Glycine max
  Clone ID: 701042713H1
ctagtggtgaaggagatcaaaactttggctggctcttggcagaaagtcttgttttctcgcatctttcgggaagcccatggcggatgttttatagccaaggaagcgtatgggatgtgtgaagatttttctctcttctctgttattcccaattgtgtttacctgttcgcaggggttcttagttggggtttcagcccttttgctcaccaaaaaaaaataagaaactactgggtgtggcttttggtgtgtttgaag

SEQ ID NO: 44437 - DNA, 253 bp, Glycine max
  Clone ID: 701042714H1
gaaaaacatatcacacaatatggcattcaagggctatttccttctcggcctcgttactcttgttcttgttaaatcttccaaagttacatgcgaaacagaatcggttaatacagtttcacccattattgacatttcactcaatcggaagagcttcccagaagggttcatatttggggcgggatcttcctcgtaccagttcgaaggggcagcaaaggaaggtggtagaggaccaagtgtatgggataccttcacc

SEQ ID NO: 44438 - DNA, 254 bp, Glycine max
  Clone ID: 701042716H1
agacacaaaaaaatggctagtggccgcaatttgaagaacgctgtgattgcattcttggttcctcttccctccatcttcttctacctctcattcctcaaccactacgactcagcaaaatccccatctttttggtcaactctatggtcatggtgctatcaccaccctcttctattagccaacgctctcttcttcctcaacgtcaatgtcctcttctggctcataggcctaatacaatccagccactggatgatcga

SEQ ID NO: 44439 - DNA, 256 bp, Glycine max
  Clone ID: 701042718H1
acgaaacaaggaaaaagaaatcgaggaggtataggatggaacaggggatatacgcggactgagcgaggcgatggagtgtttggaacacatatgctatgaggggtgcacccacgttggaccgtacgatgcggaggtgaagagggagaggacgccgtgtgggagattcgccacgtgccagggtcttcaggttctgatccgccactttgccacgtgcgagaagaaggttcgcggtggctgcgtgcggtgcaagagaatg

SEQ ID NO: 44440 - DNA, 252 bp, Glycine max
  Clone ID: 701042720H1
gcgagggtgaggggatgagggtgaagtcggggaaacgtgtgggggtgagcttggggagggtgcgggagatttggtggtgagggtggaaatgagggtgtcgagcttatgggtcatggtttgcaggttttcactgagactgagttgatgaatggtgagcttagctatggcgtcttccaacttttcagagttggacttcgaggccatgagagcgagacgagagcaccaaattgttaggaatgcgtttataaattc

SEQ ID NO: 44441 - DNA, 258 bp, Glycine max
  Clone ID: 701042687H1
aaaagattaacaataaaagtgtggagtactgttgatagcaaagatgtttgggatcttcgacaaggggcaaaagataaaggggacagtggtgttgatgccaaagaatgtgttggacttcaacgccataacctccatcggtaaaggtggtgttattgacacagccaccggcatcttaggccaaggcgtcagcttagttggtggagtaattgatactgccacttccttcttaggccgtaatatctccatgcaattgatcag

SEQ ID NO: 44442 - DNA, 262 bp, Glycine max
  Clone ID: 701042656H1
cgggggaagattttcatccctttggactaataacatagtaggccaacgggggaagattttcatccctttggcctactatgttattaggcacattctaaggaaaggtttgagtgaaaatcctaaaacaaagtttatcattacgggtcatagtttgggtggagcactcgcaatcttgtaccctacgatcatgttcttgcatgatgagaagttgctgattgagaggttggaagggatctacacgtttgggcaaccagagttggag

SEQ ID NO: 44443 - DNA, 256 bp, Glycine max
  Clone ID: 701042657H1
atggatcagaaagtcgatttcagtgctccgcattccatgggaaccactatcatcggcgttacttacaacggcggtgtcgttctcggagccgactctcgaaccagcactggagtgtatgttgccaaccgagcatcggacaaaatcacacagctcactgataatgtttacgtgtgtcgctctggatcggctgctgattctcagattgtctctgactatgtgcgctacttccttcaccaacacacgatacacttggaca

SEQ ID NO: 44444 - DNA, 261 bp, Glycine max
  Clone ID: 701042659H1
ccccctgcaagttcttcaaaccctccattgctgcagtctccggtgcgcacgccatccccaatgcgagtccctcctgtgaagcctttgaagcaaccaaagccgaaggctaaggaccccaacaagagggatatgagtcttgaggagaaacacaagttggggttagggttgcagagtttgccgccagaaaaaatggaacaggtggtgcagatcatacggaggaggaatggacatttgaagcaggatggggatgagatcgagcta

SEQ ID NO: 44445 - DNA, 265 bp, Glycine max
  Clone ID: 701042662H1
gttttgaaggtattgcaaatgtgagatgccttataacccggatgatctcatggtacaatgtgaagggtgcaaggattgggattatgtgattccagcgcctgcagaatgaacgccgtaaagggtgttaaggtgttgtaaaggtcaaatttggtagtaaaatgagaaggggaatggttgtgacaacaggaagctcatagaaaatgtaccatcctgcttgcatgggcatgactattgaagaagctaagaaactagatcattttgtatg

SEQ ID NO: 44446 - DNA, 269 bp, Glycine max
  Clone ID: 701042663H1
cgtcactccttgctcttagccctcctcctcttcgccgccgtccccaccgccgcgatggcggtggccgcgtccgacgccgacgacatcctgatccgtcaggtggtgccagatgttggcgaagctgaagaggaggacaacctgctgaacgccgagcaccactccgcgagcttcaaggccaagttcgccaagacctacgccaccaaggaggagcacgatcatcgcttcggcgtcttcaagtccaacctccgcagagccaggctgcacgccaa

SEQ ID NO: 44447 - DNA, 248 bp, Glycine max
  Clone ID: 701042665H1
agagaatccgaggcgaagagaagagaaaaattaagatggaggggaaggagcaggatgtgtcgctgggagcgaacaagttcccggagagacagccgattgggacggcggcgcagagccaagacgacggcaaggactaccaggagccggcgccggcgccactggttgacccgacggagtttacgtcatggtccttttacagagcagggatagcagagtttgtgggcacttttctgtttctatacatcact

SEQ ID NO: 44448 - DNA, 263 bp, Glycine max
  Clone ID: 701042666H1
gcgagagcagaagctacagcgaggcaagcctgcttccgcggcttgccacgtggtacaaatccaaggacgtagcgcagaggatccttctctcagttgaatgccaaatgaggaggtgttcctacacgctgggtttgggtgagccgaacctagcgggcaaaccgagcctgctctacgacctcgtgtgtaagccgaacgagatccacgcgctgaagacgacgccgtacgatgagcgcgtagagaatcacgagaaccacgcgttgcac

SEQ ID NO: 44449 - DNA, 261 bp, Glycine max
  Clone ID: 701042667H1
ctcaaggttacaaagggggttgatcatgttttcaatcttgctgcagacatgggtgggatgggttttattcagtctaaccactctgtcattatgtacaacaacacaatgattagcttcaacatgattgaggctgccaggattaacggcattaagaggtttttttatgcctctagtgcttgtatctaccctgaatttaaacagttggaaactaatgtgagcttgaaggagtccgatgcatggccagctgagcctcaagatgca

SEQ ID NO: 44450 - DNA, 260 bp, Glycine max
  Clone ID: 701042668H1
atgacattcattgagattcgtaaacgcagatggttaggactctgtaggctgataaagacaacactcataccgttggaaagaaggatgctgctggccatgttgcttaatttagttcttgcttcctttgtcttcttgagttttatcagagacgggagtgcagggatcactagctctttcattcggtcagagtggccggcagttgacatcccccttgatcatgaagcatttgcagttccaaagggttataatgcacctcaaca

SEQ ID NO: 44451 - DNA, 262 bp, Glycine max
  Clone ID: 701042671H1
tagtgagagaaagttctctctgcttctctctcttagactcaaaaccctattgcgtgctttgcaatcgaccccgattatggccaacagtaacctccctcgaagaatcatcaaggaaacgcagcgtttgctcagtgagccagcacctggaattagtgcgtccccttcggaagacaatatgcggtatttcaatgtgatgatccttggcccaactcagtcgccttatgaagggggagtttccaagttggaattatttttgccagaa

SEQ ID NO: 44452 - DNA, 262 bp, Glycine max
  Clone ID: 701042672H1
caggtgttggtgccctaatcgtgagaagaaaggaaagggaaaagaggaaaatggtgtgcataaggaaggcgacggtgaaggaccttctggcgatgcaggcgtgcaacctgttctgcctccctgagaactaccagatgaagtactacctctatcacatcctctcctggccccagctcctctacgtcgccgaagactacaacggccgcatcgtcgggtacgtcctcgccaagatggaggaagaaaccaccgactgccacggtca

SEQ ID NO: 44453 - DNA, 258 bp, Glycine max
  Clone ID: 701042673H1
gttgaattgaagttgaagccatgagatgaatcacttatctcttgacaccgaagattattctctgtcaagcttgctggagcttgcagccaacaacgatgtctcgggtttcaaaagactaatcgagtgcgatccttcctccatagacgaggttcggttgtggtatatccgtcacaaagagtcaaagaagatggtcaatgagcaaagaactcctttgatggttgctgctacctatggcagcattgatgtcatgaagctgat

SEQ ID NO: 44454 - DNA, 258 bp, Glycine max
  Clone ID: 701042674H1
ctcttcttcttcccacgctcctccttctcatacccttcgccaccctcgtctccgcccgccctcacctcgccggagactttctccgactgccctccgaaaccgataacgatgacaacgtccagggcacccgctgggccgtcctcctcgccggttccaatggctactggaattacagacatcaggctgatgtttgtcacgcctatcaaatactaaggaaaggtggcctgaaagaagaaaatattattgtttttatgtatg

SEQ ID NO: 44455 - DNA, 258 bp, Glycine max
  Clone ID: 701042675H1
gttgtccccccatgtccttggacccaggtggcctgccacgtgggtccaagaacaagcccaagccgcccatagtcataaccaaggaaagtcccaacgcactccgaagccacgtcctggaaatcaactccggcagtgacgttgctgagagcatcgccgcctttgccaaccgccgccaccgcggcgtgtcggtgctcagcgggagtggcattgtcgccaacgtcactctccgccagcccgccgccccggccggcgtcataa

SEQ ID NO: 44456 - DNA, 261 bp, Glycine max
  Clone ID: 701042677H1
gagctgcgaaaacccccaactccaacctctgttcatcgtctaccgcgctttcttttcaaccagaactatgattaagctttttaaagtaaaggaaaagcagagagaacttgcagaaaatgcaagtggcggaccacctgttaagaagcaaagtgctggagagttgcgtcttcacaaagatataagtgagctgaatctaccaaaatcatgtaccatgcaattccccaatggcaaagatgatctgatgaactttgaagtttcaat

SEQ ID NO: 44457 - DNA, 261 bp, Glycine max
  Clone ID: 701042678H1
ggatcttccccaagctttggaagatgagtatggtggtttcttaagctcccatatagtagatgattttcaagactatgcggatctttgctttaaggaatttggagatagggtgaagtcttggagtactttgaatgaaccatggttgttcagccagggtggctatgcaaccggagcgacggcaccaggaagatgtaccggtccacaatgcctcggtggtgatgctggcactgaaccttacatagttacacacaatcaaattct

SEQ ID NO: 44458 - DNA, 265 bp, Glycine max
  Clone ID: 701042679H1
tctgggcgaacaccactggactgggacagccgtatgaaaatagccctaggagccgcaagacggcttacatgcctccacgtggcaggcaaggtggtccacggcaacatcaaatcttccaacatcctcctccgagggccggaccacaatgccggcgtttctgacttcggcctcaaccccttgttcggaaacggagccccgtcgaaccgcgtggcgggctaccgggcacccgaagtggtggaaacccggaaggtgagttcaagtctga

SEQ ID NO: 44459 - DNA, 268 bp, Glycine max
  Clone ID: 701042680H1
ctcgagccgctcgagccgtttttctttttatcattcatgggtttttttgtagcacatgtactgcaaggaacagcactagcccttcttggattatggcacaccatccacaccatcagatcttacctggtgaagggccctgccaacttcactgtaagattctggtaccagtttaacactacccctcagtctagacttaaacacttagaacttgtttctattttatccttttccatccttgcatttttcgatcaaattctagacttccctc

SEQ ID NO: 44460 - DNA, 256 bp, Glycine max
  Clone ID: 701042681H1
tttcgccattggatctgcccttccttccccttccggcaaaggtatgcaacttttttttgttgttctcttttttacttcttcgtattatattgttgttctgatggctgtgcctattttaaagttgttgactttcttcggtttcatgggtacccatttataatcatatgtgattgcacgttgcagtatatgtttatatatataatgcggggtgttaatgtataaatatgtttttttttttttctggggttatttgttt

SEQ ID NO: 44461 - DNA, 260 bp, Glycine max
  Clone ID: 701042682H1
cccaacccaagaaatttccttttacccctttcccctctcctcttttcttattcatcaaaattcctctttggtgtcctctccctcggtcaactccgtttactataaatatgaccactcttttcttcctcttcttcaacttcaatactcacctttgaatggattctaattcttcttctccaagtcccaacaaccacgcttccacaaccaaaatcaaccgtttctttcatcccaagctgggttcccaacctgccaccagctcg

SEQ ID NO: 44462 - DNA, 259 bp, Glycine max
  Clone ID: 701042683H1
gtgtatttgtagagagaaacaaagttctcttctactttctgtctccagcaggctcagaatctttttgcaactgttctctggattttcgttcattattttagtttcctcttttgttttctctcctttttctttgaagcaaagtgaacttgtggtatacctttccaattgaggtttctagcgaaagagaaaggatgtcaagtgggacaacatactggtgttacacatgcaggcagccaatctggcttgaagggagggaagg

SEQ ID NO: 44463 - DNA, 260 bp, Glycine max
  Clone ID: 701042685H1
gtctcgtttacacatctctccaacctttcactttcgtttctcagttttattcgaatccctctctcaatctcctttccaaatggccagcgttgaggttgcacagcaaacaccaacaacagttccagaaaatgaaacaaccgaggtaagcaagacccaggaaacaaccccagtcactgaggctcctgcaacagaacaaccagcagctgaggttcctgcaacagaacaaccagccgctgaggctcctgccccagaatcaacca

SEQ ID NO: 44464 - DNA, 261 bp, Glycine max
  Clone ID: 701042686H1
gaaagaattagcaaaagacaatgattcttcaaaggagaaaaatcaagttcaaccagggcttagtggtcctctgaaaaagagaattcagcagcttgttgactctaatcctgtcatgcttttcatgaaaggaactcctgaagagccaaaatgtggatttagcaggaaagttgttgttgtgttgaacgaagagagagtcaagtttggaagttttgatgtcctatcagactcagaggttcgtgaaggcttgaagaagttttccaa

SEQ ID NO: 44465 - DNA, 278 bp, Glycine max
  Clone ID: 701042654H1
gtacgactcaacttgtgtgtctttcgtgaaaggcaagacactgaagcttcaaatttcaacattctcctgttcgtgtcatcgattgggaatattgcggtgctggcaatgctaactttgtgtttctgactcattgtacttaattaatttctagctagccactctgtcatgactttgttttccttttccaccgattttccagcggctgggagcttaataaaaaaaaaaaaaaaaaaaaaaaaaaaaaaaaaaaaaaaaaaaaaaaaaagggggggcgcccc

SEQ ID NO: 44466 - DNA, 264 bp, Glycine max
  Clone ID: 701042627H1
gtacaacaacatgtaccgcataatgttcgaccggaggttcgagagcgaggaggatcccatcttccagaggctaagagccttgaacggagagaggagtcgcttggcgcagagctttgagtataactatggtgattttattcccatcttgagacccttcttgaagggttacttgaagatttgcaaggaggtgaaggagacgaggttgaagcttttcaaggattacttcgttgacgagaggaagaagcttggaagcaccaagagcac

SEQ ID NO: 44467 - DNA, 264 bp, Glycine max
  Clone ID: 701042628H1
caactacctcaacttttacaagctctatcaacctcttgtggtagttgaggtagtaaaagttggtggcgtgatcgggtacgacaacaccctatggaacggatctgtggtggcaccccctgatgctcctcttaggaagtatgttaggtactacagggacttcgtgctggagctcaacaaagccctcgctgtggaccccaggatcgagatttgcatgctcccggttggtgatggaatcactatctgccgtcggatcagtgatttctg

SEQ ID NO: 44468 - DNA, 266 bp, Glycine max
  Clone ID: 701042629H1
ctcgagcgaatcggctcgagcaaccctcccttctccctattacaaccgatcgccaccactttttctctctaacttccacatggacgacgtcgctttttactctctgcttttcctgtgcttctttcaatcggtgcgagggattttggaccccaacgatttcctcgctctgcaatcaattcggaaatcccttcacgatgttcccggttccaattttttctcctcctgggacttcaccgccgacccctgcaacttcgccggcgttttct

SEQ ID NO: 44469 - DNA, 269 bp, Glycine max
  Clone ID: 701042630H1
ctcagatgttccttccatcaaccactccagcaaagataagcttgttgtgtccacctcctcctcccttcttcacactgctgttgatcttgttaacgagaccaagttggatgacgagatcaagtcatggctagcatttgctgcacaacaaattgttgaagttaacgcattggctaaggcattgtctggcaacaaggatgtggccttcttctctgctagtgctgcagctcaggcttcaaggaagtcctctccaagagtgaccaacgaggctg

SEQ ID NO: 44470 - DNA, 273 bp, Glycine max
  Clone ID: 701042632H1
cttttgagagtttttcagagagaaagagacagacagagagagcgagcaactttgttagatttcaatcatttcgagaatatcgaattttcaatttcgtgtcttccattttcgggttcaattctgaggtttcatacaaacaagggaagatatcacattcttaaagattcacaatttcagataaatattatatgtatctgaaacttttttaataagaagaatgccaggcattcctgttgcagctcgtgctacctcaagccatccagatgcttgtga

SEQ ID NO: 44471 - DNA, 267 bp, Glycine max
  Clone ID: 701042634H1
gtcaagaaggtcaacgaatctggtttaggtgccgggcttaaagttacgggttggcttaactgggccagaaagcccaaaggattaggacagtgagatcccataaaaacaaaacaaaaggacaaaacgacagcacttcttctcttctctcatttttcagtttctcagtttcttattcgttaatcgttagatctcatcttacactcaccggcgagtccatctcgcgccaccgtcgactgagctccggccatcgccgttggttccctcact

SEQ ID NO: 44472 - DNA, 247 bp, Glycine max
  Clone ID: 701042635H1
ctttcgctctctctgcttcactttctcgcttttgcattttcttgtgagaaaaaaaaatcctcagaacaaaaataggtcttcttcttctctgatctaccaaagcttcaaattctccttagtttggtttgactgtgagtttggagtgtaatgtcgccgccgacgctggtaacggaggaggatgggcggacaaccgtggcgtccgattcttcgcaatccttggactgtttctctcagaatggtgctggat

SEQ ID NO: 44473 - DNA, 260 bp, Glycine max
  Clone ID: 701042636H1
gcagtttcgtgctttcccgccgccgctacactgccaccgtcttccccgccgtctccgccaggttctctctcactccgcaaccagtctttccaactctctctctctctacgaaaccctaaacttgaaacctaccccactcatcgtgtgtgtgtgtgcagagatggcagaagaggattcaaagcctctgaactacatctccgaggtcattctcaagaagaggaagaacaccgaagcatgggctttaaggaaaaaagacagtt

SEQ ID NO: 44474 - DNA, 262 bp, Glycine max
  Clone ID: 701042637H1
gtagcgggtctgcgctgattcacaataagaatttgttgatatcaccaattcataatgcattaaaggtgaggggcaacaatagaagttgtggcttgcgtgttcaggtttctatggtggactcttcctccgctgatttcaccagacgcatcgaacgagcttggtcaatttctaagcaaccaaggccaatcgtgtgttcgtcttgcgactcaaaagggcatattgaatgtaaatggtgtgcgggtactggtttttttattcttgg

SEQ ID NO: 44475 - DNA, 266 bp, Glycine max
  Clone ID: 701042638H1
gagaatggctcccaagggtttaatctttttggctgtgttatgcttctcagcactgtcactgagtcgttgtcttgcggaggataatggacttgttatgaacttctacaaggaatcatgccctcaggctgaagacatcatcaaagaacaagtcaagcttctctacaagcgccacaagaacactgctttctcctggctcagaaacatcttccatgactgtgctgttcagagttgtgatgcttcactgttgctggactccacaagaagga

SEQ ID NO: 44476 - DNA, 263 bp, Glycine max
  Clone ID: 701042639H1
ggaagagagagggagattctttgtttgctaccttctctcggaaaaatggttacgttcaggtttcaccagtaccaggtggttgggagggctcttcccacggaagcagatcagcaccccaagatctaccgaatgaagctctgggccaccaacgaggttcgcgccaagtccaagttctggtattttctgaggaaactgaaaaaggtgaagaagagcaatggccaagtgcttgccatcaacgagatttttgagaagaaccaaccaaa

SEQ ID NO: 44477 - DNA, 268 bp, Glycine max
  Clone ID: 701042640H1
gcaaaaacacccttcattcagtttgtgacatgtctcacaagaggctaggaaaaaagcttcaacctgccaagaaggcatggaagagcttctccaacacagtccaacacaaactccacaaactcaacattcccaattccatgaaaaccacccttcaacgcctccttcaatccttttactcccttggcactgtcatacactctagacttcatcgttcattcaccaccataaggccacgtggtggtactgccacttctaattactaccatgt

SEQ ID NO: 44478 - DNA, 260 bp, Glycine max
  Clone ID: 701042641H1
ctcgagccgtggatttggacttggtcgtcaacacagtctaattaatatctttttgctccatcgcttatgaatcttcttcttcttcttcttcttgttcctgcaacgcactgaattcgatcaatcaatccatcttcaattgctttgtttcgatcggaggaaaatggccgatcagttatcgaagggagaggaattcgagaaaaaggctgagaagaagctcagcggttggggcttgtttggctccaagtatgaagagccgccga

SEQ ID NO: 44479 - DNA, 262 bp, Glycine max
  Clone ID: 701042642H1
ctggaatttggttccaatgaaacaatcttcttctccggggcacttggccttagccttagacaatccacgtagaacacttcacgtgtcttgtggctccacatcaccacatgcttcccagagatcatcaattcaggggggtgaagcttttttcaggggtgtgttggaaagtatgcaatctgtttacttgaacagaaatcgtactgctaaggccatattggaccttgttcactctgctgagaataactcattatgctatgatcat

SEQ ID NO: 44480 - DNA, 262 bp, Glycine max
  Clone ID: 701042643H1
aacaaagtacccttgttttccccaagggaaatcccataccaagtgtcaaggcactgaccatctacaggtcaggaaccttttctattgatgttcagtatgatgacgtgagtggtttgcaaacacctgcaaagatcagcacatatactattggccctttccaatctacaaaaaatgaaaaagcaaaagttaaagtgaaagttcggttgaatgtgcatggaattatatctgtcgaatctgcaactctactggaagaggaagaaga

SEQ ID NO: 44481 - DNA, 263 bp, Glycine max
  Clone ID: 701042644H1
gaaatggtcttggactcttacctgcccttcattctcgacaaggccagggagatgaaggacgaggaaagggtcttaaagatgcacactctcaacaccacctactgttacagtggagtcaaatgggactccattaatctggagcatccctcaacttttgagacgctggcgatggagccggagctgaagaatgcggtgatagaggacttggataggttcgtgaagaggaaggagttttataagagggttgggagggcgtggaaacg

SEQ ID NO: 44482 - DNA, 266 bp, Glycine max
  Clone ID: 701042645H1
ggaaaacgttgtagagttcacagacttacccgtcaagagacctagagaagaagaagaagaagaagaagaacaaaccaatggagtctccaacgacgccgtttcaacgctacccaatgaccctcaataccctggtatctctgctgttattcccggttggttctcagaaatcagcccaatgtggcctggggaggcgcactccttgaaggtggaaaagattttgtttcaagggaagtctgactatcagaatgtcatggtcttccagtcat

SEQ ID NO: 44483 - DNA, 271 bp, Glycine max
  Clone ID: 701042647H1
accgacagagccatccacgtcatcttcattggcgagggacccaaccaccgtggttcacccaaggcgcgagcattcgagcacggcctcttgccaatcccgcgcctcatcttctccgacccgacgcaaaccctaatctcgttgaagcagaagcttctcgagttatcctctaaccagcgagtcgactcggcggcaatctccgagtcactgcagatccccattgagcacgccaggctcgtccttgataccctcgcctcgattctgcactccgact

SEQ ID NO: 44484 - DNA, 273 bp, Glycine max
  Clone ID: 701042648H1
catttctccatttccattttctctctcacttttcaagaatcgtaagctatgggaaagtcttacccaactgtgagtgctgattaccagaaggccgttgagaaggcgccgaagaagctcagaggcttcatcgctgagaagagatgcgctcctctaatgctccgtttggcatggcactcttctcggaacctttgacaagggcacgaagaccggtggacccttcggaaccatcaagcaccctgccgaactggctcacagcgctaacaacggtcttga

SEQ ID NO: 44485 - DNA, 264 bp, Glycine max
  Clone ID: 701042649H1
gtggcaggggttttcttaatatggcttcctcacctgtccatcaggccagaagcattgatgcctcgacccatgctgtagatatttccaatggaaatgttttgtcccatagtaatcaattaaaaatagcttcccctctgagtagtggattttctgattatggatctaatgctaatggacagtctgtggttgctaaacttcgaccaaaggttcatgtaggtaaaggactgagtgaagtaaatggaagttctgatgttttaggtgagc

SEQ ID NO: 44486 - DNA, 263 bp, Glycine max
  Clone ID: 701042651H1
agagaatggctcccaagggtttaatctttttggctgtgttatgcttctcagcactgtcactgagtcgttgtcttgcggaggataatggacttgttatgaacttctacaaggaatcatgccctcaggctgaagacatcatcaaagaacaagtcaagcttctctacaagcgccacaagaacactgctttctcctggctcagaaacatcttccatgactgtgctgttcagagttgtgatgcttcactgttgctggactcacaagaa

SEQ ID NO: 44487 - DNA, 277 bp, Glycine max
  Clone ID: 701042652H1
catacgctcgagctcgaaccgctcgagccgtgacgcccacgctcgcacggccgtatcacgccgcgcgtacgttacaggaaccacctctacggccagggaacggatcggccggtgaacggagcggtttgcggctttgattccggcgagctgcgactttttgtgtcagagagtgaaaatgcgacgggacttgaatccatttcgtcggtaatagaggaacgggattcgaagaagtttgtgtgggagaatggttgcttgcttcactgtgagcttccaatta

SEQ ID NO: 44488 - DNA, 262 bp, Glycine max
  Clone ID: 701042653H1
ctctaaccttttccttccgttcactcgccgccttgctcatcctcgccgtcacagtcacctcaaccgatcatgttctagacttctctctctcagctggagatgattcaacaaagtatagcttctaaattttgtgagtatagtctgggcaattgtaaaatggacttgcctaatcgtgataaacaactgactgttgctgtgaagaagacagcattgagagatctgcaaaatgataataaaatcatggtgccaaccctgttggaag

SEQ ID NO: 44489 - DNA, 265 bp, Glycine max
  Clone ID: 701042626H1
atcttcctctattggttgttctatgtctgctcatgaactaactccctctcaatcccctacctaatccctttcaatttccccatttttttccccattttttttcctaataaatcagatatgtaaaatcctaatttctctaaccctaacaaaacccccaaaattcaaagaagaagctggagatctgcgcgagttcaagatcgtcggagggaggaggagatccagtggtgatggatgagagaaagaggaagccaatggagtcaaaccg

SEQ ID NO: 44490 - DNA, 264 bp, Glycine max
  Clone ID: 701042591H1
aaaccctactcattctccatacctcaacgaagaggttaaagagacggcaacactttgctgtccgccttgaccgagcagagcttcgtcttggccctcgattttgccctaaagtactcccagtcacaacagacaccgtcgtcgttgtcgtcatcatcaatggcaccgaagcagaccaaggctgagaagaagatcgcttacgatgcgaactgtgcgacctaatggaggagtacggccagatcctcgttgtgaactctgataacgtgg

SEQ ID NO: 44491 - DNA, 263 bp, Glycine max
  Clone ID: 701042592H1
attttcgtggcattcgtcactctcgtgtcgggtgaaggcgaaaaccaaatcaagatgctgagagtgggcgcaaagaggcttttgggaacgacgtcgttgggcgttagggttccggcgaggctgtaccacgagagggttgtggatcactacgacaacccccggaacgttggatcgttagacaagaacgacccgagcgtggggacgggtttggtgggggcaccggcgtgcggcgacgtgatgaagctccagattaaggtcgacga

SEQ ID NO: 44492 - DNA, 261 bp, Glycine max
  Clone ID: 701042593H1
cattgaccctattcctttctttattttcggattaaattaactaacatcaatttttgttctttggcttcagtgataaattgtcagcatctatttcaaggtttcgtcttttttgtgccttttttcccccagaaattcataaattcgtggaagttctccgctcgatttgtgcattgaattggtgccgcatttactctacgaattgaacaaggtggcatgatgcgatgagatgatgttctatgagggtattctcagtgtaacact

SEQ ID NO: 44493 - DNA, 271 bp, Glycine max
  Clone ID: 701042594H1
tgtaattgtagagccaccacaatcgctacccttggctgcaagtgtaagcctaagcctgagacataccatagagaaagtgattcaattaatatattatatggtgtttctcttcaattcccatggagcctaagacacaacctcaagcgaatagtcctccaccaaaaccttgggaacaagcgggttcctcttctggtccagcacctttcaaacctccgtcagctggcaacacaagtgatgtagttgaggcttcagggactgcaaaacctgggga

SEQ ID NO: 44494 - DNA, 267 bp, Glycine max
  Clone ID: 701042595H1
cgaaaatgtggaagagaacgggttttgaagaagaagcagttcaattgatcaactcagatttcagggacctaagtctagctgctaatagactcgcccatcatgccatcaaacttggtggcattggctttggagcctcttttttcggattgtttgctgccattgctgctatttatctgttgattttggatcgtacaaactggaaaacaaatattctcacagcactactcattccatacattttcttcagcttgccttcattaattttcg

SEQ ID NO: 44495 - DNA, 276 bp, Glycine max
  Clone ID: 701042601H1
aacaaactcacaaaatggataagcaaattttgtttcttcttccccttctcatcatgtccctcttcactgtttcaatagccgctgaatcttccagctcatgccccatggatctcaactatgttgagacctttccatgggactcttcatcctgcagagaccctgttgacaagaaccactgctgccagtcctgctaagtgtaattggcataggactttcccaacatctcaaacaaacttccttgtttcaacttcccaatgaaaccatttcctccaattg

SEQ ID NO: 44496 - DNA, 273 bp, Glycine max
  Clone ID: 701042602H1
gggtaaccacggcgccactcgaacaagtgcggcaattcccaacgcttctcttctcagggggagttcgaatcctgtgagctttcaatatgacgtcgttcttgaagcctgagaatgctctgaaaagggcggaagaattaatcaatgttgggcagaagcaggatgctttgcagactcttcatgacctcatcacctcaaaacgatacagagcatggcagaagacacttgaaaggattatgttcaagtatgtggaactttgcgtcgacatgcgaaaag

SEQ ID NO: 44497 - DNA, 269 bp, Glycine max
  Clone ID: 701042604H1
attacttctttccttctctctctcaccaaaacaatttgctcacaaaggaggaaaaatggcacctttcgtttccctctctttgttgcttctctttctcaaccaccccctcctttccctctcaaccaaccctgaagggaacgctctgcatgctttgagaagcaggctttctgatcccaacaatatgttgcagagttgggacccaacactggttaatccctgtacttggtttcatgttacctgtgactccaacaatcatgtgattcgcttag

SEQ ID NO: 44498 - DNA, 269 bp, Glycine max
  Clone ID: 701042605H1
gtcaaacttgagttcaaacactctcatcttcttattcttctgctttcactctctgactcaatcgttctaatccacaaaaaatgaccttaaattacaacattgccctcgccttctctgcggtgctcacgctgctcctctttcccctactgaccgtaggggagctcgtggaggagcagccactagtcctcaagtaccacaacggccagctcctgaagggccgcatcaccgtcaatctcatctggtacggcaccttcaccccgatccaacgg

SEQ ID NO: 44499 - DNA, 270 bp, Glycine max
  Clone ID: 701042606H1
gcaaatttctactttctgggttttctatttgagattcgttgttccaatgagcgatcacttggtggtgttcgttgaccgtctcgcgcgccctgtccccgttgacccggtggcgcagccgccttccgagccgtctcctcctccggcccccgtgaatgctgacgcttccgggagctccggcaccgctccggtggaggattgtgacggagagggcggcggcgaggaggagccgctgatccagatggcggagtgccgcatctgccaggaggagga

SEQ ID NO: 44500 - DNA, 268 bp, Glycine max
  Clone ID: 701042611H1
aaaatcttatcttagcaatagctacccctatcacaacaatactctattaggcaaaaacaccaaatgggagaggaaaaagagcagcctaagaatgaaaccgagaagaagcccgaggaggccgccgcagcccccaagaaagacgacggacccatccctgtcgtttacaagctcgacttgcattgcgagggatgcgtcaagaagatcaaacgcacatgtcgccacttccaaggtgtggaaaccgttaaggcagatctatcgtcgaacaaag

SEQ ID NO: 44501 - DNA, 267 bp, Glycine max
  Clone ID: 701042612H1
gaatagattacccaagggtgcacgaagcttgtcatacacatcaggggtctgtgcatggagcttactctgctggggttatggctgctgaaaattgtgagagctatatgttagagaaactaggccacgcagaaaagctatctctagcttctgttaggcatgaaatgcttgaaactcttatacctcttcagatctcgaggatgtgatttgttggtgctcagtagcttttagacaatgattctgcataatgcaatggcaaaatatttgcca

SEQ ID NO: 44502 - DNA, 271 bp, Glycine max
  Clone ID: 701042613H1
gcatgtttttcttgatggattagagaatcagatagagactcggcattcagtttctctgtgcttgttcttttgccctattggggttcttagtcatgccatcaccaaagaaatgactaaaagtgccagaaaaaacaagcacagctctatagagggcacctacttgctttcccacataaccaaaaaagtaacttaatttaaaaacttgaacatgaatttctgaaactcttaaacttcatgttcaagtttttaacttaagttacttgtaattttg

SEQ ID NO: 44503 - DNA, 272 bp, Glycine max
  Clone ID: 701042614H1
aattttcaaagccagacagacaaacatgtccgagaatattgagtccaattctccttcgctttccctctttatctgaaaggtatggagtgttttgacttctggaagagataatggtgcagtgcctatccggattaaagcatttgtgtgctgctctggtaaattgttgtgatgccgattcgtcaaagcaacctacaggtttagaaaatccagaagttcttgcaagagaaacagtgtttagtgtaagtgagattgaagcgctgtatgaattgttc

SEQ ID NO: 44504 - DNA, 273 bp, Glycine max
  Clone ID: 701042615H1
taattacttgccttgaggaacgttccagaccacatacagaggtttctctagtgatcttcgttcttctgtggagatcttgttttttcatctcacttttcttctaattaaggaacaagctttccgcagttgaaaaccctagctagctagcttccaccaatttgaatcaccaatggctcgctctttctctaacgtcaaggttctctctgctcttgtggccgacggattctccaacactctcaccaggcgtgggtacgcagcagcgacacaaagcgc

SEQ ID NO: 44505 - DNA, 98 bp, Glycine max
  Clone ID: 701042616H1
ttgcaggggagatttgagtctgacacagagctttccctcttgcaagtgatacaataataatcccaaagatacatagaaaacatagatcacaattcaca

SEQ ID NO: 44506 - DNA, 268 bp, Glycine max
  Clone ID: 701042617H1
cataaatattccgttttgcgtttctctgcctaaaaggattgaaagatgggtcaagcactaggttgctatcaagttgatcagtcaaatgtggctatcaaggagcattttggaaaatttgatgatgtcctagaacctggatgtcattgcctgccttggtgtcttgggtaccagattgctggtagtttgtcactgcgtgtgcagcaacttgatgttcgatgtgagacgaaaaccaaggacaatgtctttgtcactgtggttgcatctgtgc

SEQ ID NO: 44507 - DNA, 270 bp, Glycine max
  Clone ID: 701042618H1
tggggatcgatcttaaggctgggggtaagagcaaaaagaccaaaagaacagcaccaaagtccaatgacatctacctcaaattacttgtcaagctttatcgattccttgttcgaaggacagacagcaatttcaatgctgtgatactcaagcgcttgttcatgagcaaggttaacaagcctccaatttctttgtcaaggttaattaagtatacgaaggggaaggaggataaaattgctgtagtagtggggactgtaactgatgatatcagag

SEQ ID NO: 44508 - DNA, 269 bp, Glycine max
  Clone ID: 701042619H1
ggcctgccactcctccggagagacctaaaacaccaccttatgtccctccaagagctccttctcctagacctccctctccgagggctccttctccaaggcctccgtctccaagggctgcttctccgagggtggcttctccacgagttacctctcccaaagccgcgtcttcccggattgctcatcaccacaaggaggttggctacagaccagagccaactttgaggcaacagcatgccacagctactaagatccagtctgtttacagaggc

SEQ ID NO: 44509 - DNA, 269 bp, Glycine max
  Clone ID: 701042620H1
gaaagatgcaaccaatgattttgaggatattggtcacagcaccagcgccgtagccatgatggatgagttctatgttggagacattgatacatcaaccatccccagcaaggttaagtacactcctccaaaacaacctcactataaccaggacaagatgccggagttcatcatcaggatcctccagtttctagttcccttgtttatcttgggtttggcagttggtattcgtttctacaccaaatcaacataatcatttaactgcaagagca

SEQ ID NO: 44510 - DNA, 267 bp, Glycine max
  Clone ID: 701042621H1
ggatgagcatcggcttctggtttatgaatttatgcccaagggtagcatgcaaaatcatctattcagaagaggttcttactttcagccattctcttggagtttgcgaatgaagatagcacttggggctgcaaagggccttgcttttcttcatagtacagaacctaaagtcatataccgtgactttaaaacttcaaatatcttactcgatacaaactacagtgccaaactttctgattttggcttggccagagatggtcctactggtga

SEQ ID NO: 44511 - DNA, 267 bp, Glycine max
  Clone ID: 701042624H1
actcgagcgaatcggctcgaggttgaatatttgtgaattgcgactcaccacacgaccaactccttctcgctttgttgacttcttggcatcttttcttgctacaatcattttttcaatcaaccttctcttcctcaacgcacttcaattcttcctttttcgcgtacgttggagtcttggagcgaaccttcaattcaattcttcctagcgggttttctaactaggtggtggttcttgttaaaagctgccatctgggttctgctaccgttg

SEQ ID NO: 44512 - DNA, 264 bp, Glycine max
  Clone ID: 701042625H1
gcttcttgcaagaagtttctgagcttttatatcctctatatatagttctctggcaattaaggtctcatccaaataagcacaaatgggtagccagagttacttcaaggctttgattatttgccttatagcactaattggatcaactcaagctcaattgcagcttggtttctatgccaaaagttgtccaaaggctgagcaaataattctgaagtacgttgttgagcatatccacaacgctccatcactagcagctgctctcataag

SEQ ID NO: 44513 - DNA, 263 bp, Glycine max
  Clone ID: 701042590H1
cagcataagaaagatctccaacaaataagacagtctgctggaaatcacgaaatagactatatgccttacatgggagaagttgttcctttcaaaaactatctttaccgatatactactccctacttggcctccaatagctccagtcccctctggtatgcagttaggcgtgcgtctgctcatataattgtgctatccagctattcaccatttgtgaaatacactcctcaatacatgtggcttaaagaagagctgaagcgagttga

SEQ ID NO: 44514 - DNA, 266 bp, Glycine max
  Clone ID: 701042557H1
cataaatattccgttttgcgtttctctgcctaaaaggattgaaagatgggtcaagcactaggttgctatcaagttgatcagtcaaatgtggctatcaaggagcattttggaaaatttgatgatgtcctagaacctggatgtcattgcctgccttggtgtcttgggtaccagattgctggtagtttgtcactgcgtgtgcagcaacttgatgttcgatgtgagacgaaaaccaaggacaatgtctttgtcactgtggttgcatctgt

SEQ ID NO: 44515 - DNA, 264 bp, Glycine max
  Clone ID: 701042558H1
ctctttgcaacacaacaataaaagacaacacagagagaagcgtcttaataaacgctcttctctgaaaaacctgatttcttctcttcttctcttctctttcgcttcgatcttcgatctctgacaatgagagattgcatctcaatccacatcggtcatgccggtattcaggtcggtaacgcctgctgggagctctactgcctcgaacacggcattcagcctgatgggcagatgccatgtgataagactgttggtggaggtgatgat

SEQ ID NO: 44516 - DNA, 265 bp, Glycine max
  Clone ID: 701042559H1
gttaatcatctgtctttcaagctaagattttcgggtttgtctattaattcaccaagaagcaaacttagaaggatttttcgaaagccaggtgttttcagaaacgagatccaggttttattgtcgaatttcgctagtcaaattaattttcataattatttttttctttgaaaccagccaagagggttatttttgatccctcaaagctaatttctctctctctttttttatttccgggactgaagaggttgtctatttgaaatctcct

SEQ ID NO: 44517 - DNA, 270 bp, Glycine max
  Clone ID: 701042560H1
gaagagagagaaacccatttctagagagagaaactcgcagtcgcagacatgtcttccttcgatgccttcgccgacgacttgaacgtcaactcttcttccactcgccagcacgacgatgacgaggacaacttctctggctacggcggctactcctccttcaccggaggattctccgccgacggagatgtcgccgtcgatcactccgccgccgcgtcgccggacatctacggcttcactgattcgaatcccgcttactctcagtctcccttc

SEQ ID NO: 44518 - DNA, 270 bp, Glycine max
  Clone ID: 701042561H1
atcaaacacttctatcaacaacacaaaacaatctcttccccgcaattgtaacctcttattgacgcagactgcacccccattccctgatgttcaagttttctcatcatctgaatacacccttttcaatcttcatctctcttcacacacatacatcaggcacttctatcaacaacaacaaaagagtgtgagatgttgtaaattctctaatatgtgtctttgatttttacatataagaaaaacaacacacacttctaccaaattttgctctaa

SEQ ID NO: 44519 - DNA, 257 bp, Glycine max
  Clone ID: 701042562H1
gtagtctgcaagtacttccaaaggcggtctggtccaggaaggggacatgtggagacatttaatgaggaagagtgggatgatgtggaaattggaatacctcgtgctgctttgaactgcaccagttcccatcttgcctatggacatctgatggttctgttccaaatgacaatctccctgctagtggatgtactgggtcagcatccatatcatgtctatcaggatcactgccttctcctggaggtctataatcctggtca

SEQ ID NO: 44520 - DNA, 254 bp, Glycine max
  Clone ID: 701042563H1
cttttgatgcagggatatagttcgaattcaaaagaccgtaaagggaacttccttgatgattgggatctttcagaagctggtgggggtgaggtttctgagaatacagaccaaaggcaagtatccttagaccaagatcagagctcaatgcttaaagtgatttgtaatcaaagagatcgatttaggacccgcttgcgagagacagaagaggaaataaggcagttgaaggagcagattggggtattaacagtggaact

SEQ ID NO: 44521 - DNA, 265 bp, Glycine max
  Clone ID: 701042565H1
ctcagctagggagaagaaagatggaagatccagaggttattattgggagcttgaatccaaatgataccaggggaaagaccgttacttgcaaagctgccgtggcatatggtcctggagagccctttgtggtggaacgtgttcttgttcatcctcctcagaaaatggaggttcgaatcaagatcctcttcacttcaatctgccacaccgatctcagtgcttggcaaggcgagaatgaggctcaacgtgcatatcctcggattttcgg

SEQ ID NO: 44522 - DNA, 265 bp, Glycine max
  unsure (1)..(265): unsure at all n locations
  Clone ID: 701042566H1
ctggtcggactcgagccgntccactatcatcttctctcagttcgacgtcagcgaagcttcattgcttgttgggggcaattcgattcgatttcgcagagtagaatgtttgggacggcgattcgatgtttggcgaagaaaccgaagccgaagatgggacccgtgatcctgaaaacgccgccggagcagaggcagacaatcacaagagacctcttcgatataattaaggagcatggtcccatcactgttgctaacacctgggaacgtg

SEQ ID NO: 44523 - DNA, 262 bp, Glycine max
  Clone ID: 701042567H1
ctcgagcgcaaaacctcgtttggcttatctccctgccatttttgttcttcttctagttgtcttcacttctgtgacggcacaatccccagggccagaatcttcatcactccacgacaccttccttcaatgcctcaccaaatacacaacaaactcctcatctcaactctccaacatagtcttcgctaacaccaaccccaagttccccactgtcctccaaaactacatccgaaacgcgcgtttcaacacctcctccaccccaaag

SEQ ID NO: 44524 - DNA, 264 bp, Glycine max
  Clone ID: 701042568H1
atgggttcaaacccaaaaccccttgtgcacctttctcttcttctcctggtcctcttttcttcctcaaccgaatccctgagatttgaaatccaatccgggcacaccaaatgcatctccgaggatatcaagagcaattccatgaccgttggcaagtaccaaatcgttagccccaacgagggtcaacctctgccagatgcccacagattcaccgtcagggtgacttcgtcttatgggaacaatatcactacggggatcgcgttcaga

SEQ ID NO: 44525 - DNA, 264 bp, Glycine max
  Clone ID: 701042569H1
agattattgactgggaaaactcttctgtgaagcaagttgagattcctttcaagcctgctcgtgttctactgcaggattttactggagtccctgctgttgttgacctggcttgcatgcgtgatgctatgaataagcttggcagtgattctaataagattaatcctctggttcctgttgatcttgtcattgatcattcagttcaagttgatgtagcaaggtcagagaatgcagtgcaagccaatatggagcttgagtttcagagaa

SEQ ID NO: 44526 - DNA, 266 bp, Glycine max
  Clone ID: 701042570H1
ctagtagttaagaaacattagttaaagaagataagaaacattacacctagctactagagtttaacatggcttccaaaacttgctcctcccttgctcttttcctcacactcaacctcgttttcttctcacttgtctctgcatgtggttatacaccatgccctggtccaaacccaaagccaaggcccaaccccaaccctaaccctaaccccagccgaagtggctcgtgcccccgtgatgcactcaaactaggtgtatgcgccaatgtg

SEQ ID NO: 44527 - DNA, 264 bp, Glycine max
  Clone ID: 701042574H1
gtgccaccgtatcccttatacaagcgcattgcttcagctctgttgaggtgcatggaatctgaaacattttgtaggataggcggcaatttagccatgaccaatgaatttgaagattcttccattcagcagaagcgtgatgagtggcacaaattgattgtagagaaggggtttgaaatagagaatatttgaagaatgttttctttgaacttcatgtgcaagagccttcttttcacagctaaatgatggcctaaaaccaattgaagg

SEQ ID NO: 44528 - DNA, 268 bp, Glycine max
  Clone ID: 701042576H1
ggaaaacgttgtagagttcacagacttacccgtcaagagacctagagaagaagaagaagaagaagaagaacaaaccaatggagtctccaacgacgccgtttcaacgctacccaatgaccctcaataccctggtatctctgctgttattcccggttggttctcagaaatcagcccaatgtggcctggggaggcgcactccttgaaggtggaaaagattttgtttcaagggaagtctgactatcagaatgtcatggtcttccagtcatca

SEQ ID NO: 44529 - DNA, 266 bp, Glycine max
  Clone ID: 701042577H1
ctcgagcgtctggttggaattgtatggaatggagggttagctaagaagaaaataggagagggttagtttttaggggctgcggaaaaaagatagtgagtggtggccaatgggagcggagaggttttcccacgaccatgctcccttgattctgggtctccagccatccgccctggtcgacaacgttgccaccgtcgattggtccttgctccatcgcattcccggcgagcgcggtggctccatccctgtccaaattgaagaactggaat

SEQ ID NO: 44530 - DNA, 264 bp, Glycine max
  Clone ID: 701042581H1
cagccagcagccataagcaacgcaacaattccatttccagtttctgattcgtcacgtcagacaaaggaaggggttagggtgtgacctgagatcaaaatgttgcggaggcttctctcttctcacctcaaaaccctagcctcctccgccgccgccgccgccaccgccactccccgatctgcttccgcctccgccagattcgccgctctctctcgctcctgcctctacttctcaacccaatccgaggatgctactgcgatcaaaaag

SEQ ID NO: 44531 - DNA, 258 bp, Glycine max
  Clone ID: 701042582H1
aaaaccctttcattccattttacattattgtaaagcattcttctcttttctttcttttctctttcctctctctctctctacgctttctcgtttgagatccctcaagggatccactaactgaaggagcaatggggttgacatttaccaagctttttagccggcttttcgccaagaaggaaatgcgaattctaatggttggtcttgatgccgctggtaagaccaccatcctgtacaagctcaaacttggagagatcgtta

SEQ ID NO: 44532 - DNA, 264 bp, Glycine max
  Clone ID: 701042585H1
gtgtgatttgcagtcggattgccggtgtctgtttcgtcgaagtcttcctcgtttctggtttcctgattcgagcatttaactggtggttgggccaatctcactgggttgatccccagtccgaaactgacaactatgagcagcactctttaaaaccatatttcaagtatataaagtttttgaatgaagtaagctaaaagaagtactatggagaccaagcgctgcaacttctggcttcctaacaaaaacagattttgtgcaaactgc

SEQ ID NO: 44533 - DNA, 263 bp, Glycine max
  Clone ID: 701042586H1
cagtgagcagaggttttcattcaactggcatgaagaggatgggaggtggacatggccatgatgagccctattatcttcatgcaaagcacatgtacaacttggacaggatgaagcaccaggggttgaaaatgtcccttgctgtattcactgctttcagcattggggttgcagttccagtgtatgctgtcattttccagcaaaagaagacagcttctagctaggctcgtctttttacttccatttgcaacaataaggtggatttg

SEQ ID NO: 44534 - DNA, 262 bp, Glycine max
  Clone ID: 701042587H1
gagacgcttcgcaaatctcaatcgaatctcagaaaaatgagagaaatcatcagcattcacataggtcaggccgggatccaggtcggaaactcctgctgggaactctactgcctcgaacatggcatccagcccgacggcatgatgccttctgactccaccttcggtgtagcccacgacgccttcaacaccttcttcagcgaaaccggatctggcaagcacgtcccccgtgctgtcttcgtcgacctcgaacccaccgtcatcg

SEQ ID NO: 44535 - DNA, 265 bp, Glycine max
  Clone ID: 701042588H1
ttcaaaccctaaaaccctagaagccgcttaattttttctagacttttctttttcttttcataaacccccaaccccacgcacactctcttagttctctctcgtttgcatttgcattgcttcctacattttctttaccttctctctgtctcttccatactcacatcatgtctcgcttggcttctaacctcgcttccaaagcaaggattgctaggagtagcagcctacagattggatgtaggctgagtttgagcagaaactatgcggc

SEQ ID NO: 44536 - DNA, 264 bp, Glycine max
  Clone ID: 701042589H1
aaaacggaaagttgagctaccaagtgagaagcatgttgatggggttttctatgatcctccacttactgggacacaagttttttcaaacctaccactgaccaaccaatttaggtgtttgaataaagcagctgtaataatggagggggagcaaaaccctgatgggagtagagcaaataagtggaaagttgtcagcatccaacaagtggaagatgtgaagtgcttggcaaggattttcccaatttgggctgcagggatcctaggatt

SEQ ID NO: 44537 - DNA, 267 bp, Glycine max
  Clone ID: 701042556H1
ggaatattggttctcaacaatgccatagcttcttgcactgaagcaatagaacaacacaagggtaaacttgtggttaaggaggcagctagagcagtgagtgaacgtgatgataaattgcttgccgagcacatggctaagctacgccaagataatgaagaggtcagtggtgatgaagacagtgaggaggaagaagatacaggaatgggcgaggttgatgtggataatggtgccgggataacagagtgacaaaaaacgtgtgggtatagt

SEQ ID NO: 44538 - DNA, 266 bp, Glycine max
  Clone ID: 701042524H1
caacaaattactaaggagagttttgagagatcaaatgaagcgtgagtcatcaattcagagcagactttagtaacattattaattcagtccattccctatgtctagaatacatttatactgggtgtgaggtctttggcgtgtaatcaaatggtgaacatttgatattattagtgggaaatccttcactttattaagtcgtaacgttgtttattgtcatccatgtttgtgctcttttaatgtcaaataatggaatatcaagtaggaag

SEQ ID NO: 44539 - DNA, 269 bp, Glycine max
  Clone ID: 701042525H1
gagaatccgaggcgaagagaagagaaaaattaagatggaggggaaggagcaggatgtgtcgctgggagcgaacaagttcccggagagacagccgattgggacggcggcgcagagccaagacgacggcaaggactaccaggagccggcgccggcgccactggttgacccgacggagtttacgtcatggtccttttacagagcagggatagcagagtttgtggccacttttctgtttctatacatcactgtcttaaccgtcatgggagtcg

SEQ ID NO: 44540 - DNA, 268 bp, Glycine max
  Clone ID: 701042527H1
taagaattagggcgaactggtcataggtgtgaagtgaaagagagattctgcgtgcaggaagagcgaacatagtgagtgtggcaatggcggaggagcaaagtgacttcaggatttacaattccatgactcagcagacagagatcttcataaccaaagtccccggcaaggtttccatgtacgtttgcggagtcactgcctaagacttcagccatctcggtcacgctcgcgctgcggtttctttcgatatcctcttcaggtaccttaagca

SEQ ID NO: 44541 - DNA, 271 bp, Glycine max
  Clone ID: 701042528H1
gagagaacaaattacgattttccatcattccagaaccgtaatctccaaaccccacttcgtcagatattaaagaagaaaccaacagagtttccattctcggtatctcttctctgatcaggttgacaacttgacatagcaatcctgctttcttggttccccatttccatgtttgtggattcttcctgattcaaaggcaatccattgtgtcttcttagctcagttttgagcttcaaaagttacaacttgcaacacaaatttctatctgtaactt

SEQ ID NO: 44542 - DNA, 271 bp, Glycine max
  Clone ID: 701042529H1
tggaggtcgccgtttcagtgagggaacaagtgcagatcgtgagattcagagaacgctaatggagctgcttaatcaactcgatggatttgatcaacttggaaaggttaaaatgataatggcaacaaaccgacctgatgtacttgaccctgctctcctgcgtcctgggagattggatagaaaaatagaaatccctctgcctaatgaacaatcaaggatggaaattcttaagattcatgctgctggaattgccaagcatggtgaaatagactat

SEQ ID NO: 44543 - DNA, 72 bp, Glycine max
  Clone ID: 701042530H1
cgacaaccaggaggtgggcttggaagcagccatccttgtgacgaaagcgtaatagctcactggtctagctcc

SEQ ID NO: 44544 - DNA, 274 bp, Glycine max
  Clone ID: 701042531H1
cgttctttgtctcgcaatcttcactattttcaccgagcatttgcattccacattgaatatggctgaggctacacaatctaatgctgagttgttggagtggcctaagaaagataagcgccgcttcctgcatgttgtgtatcgtgttggtgatcttgatcgcaccattaagttttatactgaatgttttgggatgaagcttttgaggaaaagagatattccagaagagaaatatgccaatgcttttcttggatttggccctgaacaatcccatttt

SEQ ID NO: 44545 - DNA, 121 bp, Glycine max
  Clone ID: 701042532H1
tgatgatgcaagacagagacaaagagaagggaaatatcaggagctagtgctaggtacgagtactggagcaaaacgcgggtgtgtgtgactttcgttcgatagagatgcagttccattcaga

SEQ ID NO: 44546 - DNA, 271 bp, Glycine max
  Clone ID: 701042533H1
actttctcaaatatggctgccaggtggagttctggatttgtactggtgctgaccctttttggttatatacctggaattatctatgctgtctatgctatcaccaagtgatcaccctttaactttgtgtggacaataaacaaatgtcatgggcgtttctgtctttcaactcagatattagtgtttctttaatatatcgccaatgttgtcatattcttatgttctgtttttaaaaccccttttgttcttagcttaagcgagagtggagtgtgta

SEQ ID NO: 44547 - DNA, 267 bp, Glycine max
  Clone ID: 701042535H1
ggaaagaagcagaggctgaggaaacaatgaagatattggtgaccggcgcatccggtttcctcggtggaaaactctgcgacgccctcgtccggcaaggttactctgtcagggttctcgtaagatccaccagcgatatctccgccctttctccgcacatcgaaatcttctacggcgacatcaccgactacgcctctctcctcgccgcctgcttctcctgcactctcgtcttccaccttgccgccctcgtcgaaccctggcttcctgatc

SEQ ID NO: 44548 - DNA, 268 bp, Glycine max
  Clone ID: 701042536H1
gtcacaggtgaaaatggcaccatagatggtcagggtgagttttggtggcagcaatttcacaggaagaagttgaagtacactcgcccatacctgattgaattgatgttctcagacaacattcaaatctcaaatctaactctcctcaattccccatcatggaatgttcatcctgtttacagcagcaatattattgtgcaaggcatcaccatttgtgctcctgtcacatctcctaacactgatggcatcaacccagattcttgcacaaatg

SEQ ID NO: 44549 - DNA, 267 bp, Glycine max
  Clone ID: 701042537H1
ggaatctgggtctagcgaaggagaagaggtgcagcaacgcgtgccgttgagggagagagtggagtggtcagatgttactccggttcctcaaaacgacggccctaaccctgtcgttccgatccagtacactgaagagttttccgaagttatggattactttcgcgccgtttacctcaccgatgaacgctcccctcgcgccctcgctctcacagccgaagccgttcaattcaactccggcaactacactgtgtggcatttccgacggtt

SEQ ID NO: 44550 - DNA, 268 bp, Glycine max
  Clone ID: 701042538H1
ctttcaatatgaggaaccccactcacaagtcccctgaggttgaaaatgatggtgattttaaagttcatctgttctcttcatcatccgagttgcttgaaaagcttcatgaaaaatggagttcagtggagaaaccaccatacccagctatgtatcctagtatttatggaggtatcatacttgatccagcaatgatggtaatccccattgatgatcacatggttcacagagggcatggtgtgtttgatacagctattgttctagatggata

SEQ ID NO: 44551 - DNA, 266 bp, Glycine max
  Clone ID: 701042540H1
cgcaaaaggtgataactgatgatcgttgcccttcaacttctattgccttgaagagcaagcgcaaaaggtgataactgatgatcgttgcatgaaattcaactctttgtcctttggtcaatcatggaaagacaatgagaaagaaccacattttgtttctgatgggccagggttaaagcagatcaaggagctaatattggtttacttatgcttaaaggccagcaaatagttcatatagtacttgtgatgctacataattaggaagttca

SEQ ID NO: 44552 - DNA, 267 bp, Glycine max
  Clone ID: 701042543H1
ccttactttgtgttttgttgttcgaaaagaaatcaaggtctttgttttgattccttcgtgcttgcttctggaatctcaacaacaccttttgctctctcttggctggatcagtcgccgttactcaagaaacataacatacaaccaaggtgatggacaaggttgtggaggaggctgaaaaagtgaagaaggaatgggatgaaacatacaagacaacgcaagagcacattgaggcaattgcagagtatggaaaaccaggaagagcaaaag

SEQ ID NO: 44553 - DNA, 271 bp, Glycine max
  Clone ID: 701042544H1
tctcacttctcttggggttgtgagaaaagtgctcgggactcttacaacagatattgttcaaccaaggagtggaaattggcacttagcacaaaagaggtggaagactcatatcgtttaagggtcgtgcgaggctggtacatacaacgtgccgaatctctgtccctgggaccttaccaagaactgatgaaaaggcctcatctaacatctcgagggataagaagacagttccagaagcagatcctccgagtatcaaagacgttcagcttttgta

SEQ ID NO: 44554 - DNA, 267 bp, Glycine max
  Clone ID: 701042545H1
ctctggagttaattcaagagcttcagaagcacttccctataaaacggtgtccgttgagaatacgtgctactgctcctgatgaccaggtgcctgaacttttaggaaagctgaatgaatggaatgccactgttatttctaaagaaggatcttctgctgttatttttgaattggaacctggtctatataaggattgtcatgactttgttatgaataagatgcatggaagatttgaagttcttgcacactctctttatgtggagggggata

SEQ ID NO: 44555 - DNA, 273 bp, Glycine max
  Clone ID: 701042547H1
cttgtcaaccctttgagagttagaatggctgctgctattgaacatccccacaatagtgtttccaaactcctctgcccaacagaggatgccagtggttggaatgggatctgcccctgacttcacatgcaagaaagacacaaaggaggctatcattgaggccgtgaaacagggttacagacacttcgacactgctgctgcttatggctctgaacaggctctcggtgaagctctcaaggaagctatccatcttggcctcgtctcccgccaagacct

SEQ ID NO: 44556 - DNA, 273 bp, Glycine max
  Clone ID: 701042548H1
cttaggagtctttcttcctgtgtaatagaaagcacgcgtttactctctctcgctctctcaacgaatatttgtgtacttcctcttttgtgggtagattcaatttaccatgtcgagttcatcggacatactctcaattttccggccagaaaccggcgatgtcgccggagaaatcgagcttctctcagacttgtagcctgttgagtcaatacatcaaggagtagggtagcttcggagatcttaccctcggaatgacatcatgtgggtcactgagac

SEQ ID NO: 44557 - DNA, 111 bp, Glycine max
  Clone ID: 701042549H1
ctcgaccgttcaaggtgtggtgtgtttcacatttgaagtaacactgaaaagaaaggaaagtgaagttgagagtttaagaagaacaagaaatgggggttggttcccaggatg

SEQ ID NO: 44558 - DNA, 265 bp, Glycine max
  Clone ID: 701042551H1
ctctttgctacctcttagtcaaacaaagtaacaaaccatcctcccctctcttctcttcttttgttctctagatttcttctctcttgtttcttagaatccgtacaatctaatcaacataacaaaaatggatgcaattagttgcatggatgagagcaccaccactgagtcactctctataagtctttctccgacgtcatcgtcggagaaagcgaagccttcttcgatgattacatcgtcggagaaggtttctctgtccccgccgccg

SEQ ID NO: 44559 - DNA, 265 bp, Glycine max
  Clone ID: 701042552H1
ttgcatttgtgtatgtatctactcaaattcaacatttgattgaggttctatctggggatggctctgtggctatgtggtgggatgaacacaagaatttggattctgaagtcagttaccagcatatttgcaattatagatggaatcaagaagtggctggggttgaacaaggtgaaattcaacttgtcaaacaaagccattgacaaagagaagctcaagaaatatgagcaaggtaggttcgatttccaaggtgcagctgtgttcatgg

SEQ ID NO: 44560 - DNA, 262 bp, Glycine max
  Clone ID: 701042553H1
gcatcacctcttcgtcattgtctatgccctgttggttgtacatggaatcaaactttacttaactaaggaatggtacaagaaaacggttagcaccttcagttgaaccttatatttatgtagttgttttggattgaaaaataatcgattaaaatgcacttgacattatgtgattgatagacctggatgtatctggctattcccatcaccatttatgcattggaaagactggttagagcattcagatcgagcattaagtccgtca

SEQ ID NO: 44561 - DNA, 264 bp, Glycine max
  Clone ID: 701042554H1
ctcgagccgggaaaagtttggattttttgatcgttttgtgataagagttagatgttgagtgatagacggaaaagttgaggtggggttggattatatggatagtctttgttgcttcagctctttcagtcaggtggttggagggcgttcttcatgtaactctggcaaaggcaagagcagtcagtcctcagtcaagtatggctatagcctagttaaagggaaagcaaaccacccgatggaggactatcacgtagcaaaatttgtcca

SEQ ID NO: 44562 - DNA, 266 bp, Glycine max
  Clone ID: 701042521H1
catatccttcaatttctcgaattggatttggagccaacccttcgcattttcaggaaactggggttggtgtatgcaattgttgtgttaggattttctctggaagatatgagtaggtctccttcgttttcagtgagaacagatgttagttcgagtgttgattcagaatcattgcaacaatgggttgttgccttttgtgctataaggtttgatcttgaacagggccagcttgtggaagagtgttatccacatgggtgtttttcccatga

SEQ ID NO: 44563 - DNA, 262 bp, Glycine max
  Clone ID: 701042555H1
gaactgactcactcctttctctccctccctctaaatatatatttctgacaacccaaagtcaaacaaagaaaagcaactgaactagaaatagattgattgtttcatgataaaaaggcctcatgccttgtctcccttttgatcaagcgtgacaaacttgtatttttttttattattgtaaatcaaaaagttccctttctttttgttatataataatttggaaaaaaaaaaactaaaaggcatttttatttgcatcttcctttct

SEQ ID NO: 44564 - DNA, 236 bp, Glycine max
  Clone ID: 701042379H1
cttggacttatatctcatccactggcccctcagttctcagctatggaagttctcctttcctattgaggtagatgatctcttgcctttcgatgtgaagggtgtgtgggaatccatggaagagtgccagatacttggactcaccaaagccattggagtcagcaacttctctgtcaagaagcttcagaatctggtctctgttgctaccatccgtcccgtggtcgatcaagtggagatga

SEQ ID NO: 44565 - DNA, 248 bp, Glycine max
  Clone ID: 701042381H1
gcaatgtgacatcattaaaatcagtggcatggttcgcaataaggagcgatttgtaaaaagaagacaacatcttgtgggtcccaattcttccaccttgaaggctcttgaaatactcactggctgctacattctcgtccagggaaacacagttgctgctatgggttcattcaaaggcttgaagcaagtcagaagaattgttgaagaatgcatgctgaatagaatgcatcctgtatacaacattaaggttc

SEQ ID NO: 44566 - DNA, 247 bp, Glycine max
  Clone ID: 701042383H1
cagacatgtacaggaacgctgcttcacgtcttagggtcatcagtgcccgttcgtgcagcagcagcaggatacctgccagtgccagatttgcaagttccgttgccacacaacaatcctcttctggtttgggtggtttatttggatggctcactggagaccgatccagttctttaccatctctggatttcccgcttccgggcgttacacttcccccttcattgcctgattttgttgcgcccggaaaaac

SEQ ID NO: 44567 - DNA, 239 bp, Glycine max
  Clone ID: 701042384H1
caagccataaaaacatgcattttttgttgttgtttgttgcaagttagttaaaactgtgtcacattgatggttaatgcaccacttgcatcgtaatcatcgaagccacacttgtaaaaatctaaactaaaagtctaaaaccaaaccactgtgttccaattcttctttgtattctccattcaccctcattgcgtttttttaccctttttcggtgtcttctcagattcctcacacgcacactc

SEQ ID NO: 44568 - DNA, 247 bp, Glycine max
  Clone ID: 701042386H1
aactttttctacttaccttttctcttaatccaaatacgatggcagccatggcaaccacaaccctctcttcaaaccccaaactctcattcttcaacggaaagcccgtcacatattcttcccgcgtcgcgcccaccaccaaattatcctcatccaaacaaggcacaattcccatgtccctaaccccacccccctacgacctccagtccttcagattccagcccatcaaagaatccatcgtgtcacggga

SEQ ID NO: 44569 - DNA, 247 bp, Glycine max
  Clone ID: 701042387H1
cgttggttgcgattgaaacggtacgatgggaagaggaaaattcaagagcaagcccaccggtcgccgccagttctccaccccggaagatatgcttgctggaacctctaaccgtcctcgaacttttagacagaaagaagctgagcatgaagaggagcctgaggaagtacctggggatgaatctggagaagaatcagaagaggaaacttctaagaaaaaaggaacacaaggagttattgagattgaaaat

SEQ ID NO: 44570 - DNA, 67 bp, Glycine max
  Clone ID: 701042388H1
ctcagaaccttctggggttatagcaaagaactaagagagagagagtgagaaaatgatgagttcatcg

SEQ ID NO: 44571 - DNA, 246 bp, Glycine max
  Clone ID: 701042391H1
aagcgccaaggctgcaacacccactccctcccctcccttcaatccctaattccgccactcacttccgctctcagctcagggtattacgtagtacgtggagaatgggaagtactgaaaagatcccaatcatcgctgaaagttcagaaaccaccatcgagataaaaattaaaacattggattctcaaacttacaccctcagagtggataaacagatgccagtccctgctctgaaagaacagattgctt

SEQ ID NO: 44572 - DNA, 247 bp, Glycine max
  Clone ID: 701042393H1
gacaaaattcagatcacaggcccttcagggaagataatgcttttacccgaggatgacccaaatgctacccatataatgattgccaccggtacaggtgttgctccattcagaggctatctacgccgaatgttcatggaatcagtccctacatacaagtttcgtggactagcatggcttttccttggagttgccaacactgacagtcttctctatgatgaagaattcagcaaatacctcaatgactatt

SEQ ID NO: 44573 - DNA, 242 bp, Glycine max
  Clone ID: 701042394H1
agaatttctatctatctcttgtttcaatttcaacaacggtttctcctttttcgttttgagtttcaatcaagccatcatcatgtctaccgcagcgcaacccaaggccaagaaatcggcgtcgtccaagaagcccctctcccaccctcccttcgccgtgatgatagcagaggcgattgcgagtctgaaagagagaaccggttcgagccaatacgcgataaccaaatacatcgaagggaagcaca

SEQ ID NO: 44574 - DNA, 248 bp, Glycine max
  Clone ID: 701042395H1
gtaaaacagagggagcatgtcaatttggattcccccagccacgacgttgattagttgtaacagcaattgataataatcaggatgcaacaaatacgactccgcacacccagcagttaaattcattaattattttattgttcttattttattatattgtcattctctgcctctgcatagtttctgtttacttttcgctactcaaagtctcaaaaactcatcttccccgatttagtagtcattaattattg

SEQ ID NO: 44575 - DNA, 249 bp, Glycine max
  Clone ID: 701042396H1
aaagacacagccattgtttgtttactttccattgattgagcgtaagtcatgacatgtctgaggacatcatccagtgggaggaaggaagtctcaacctttagtcgaaagagcaaggatctgagtgagtgagcgatcatgtgtggtggtgcgattatctccgacttcattccagcgggtcccgacggcggggcgcacgcgtgaccgccgacatcctgtggccgaatttgaggaagcggttctcgaagtcgc

SEQ ID NO: 44576 - DNA, 253 bp, Glycine max
  Clone ID: 701042501H1
ccctatggctcgtcactccttgctcttagccctcctcctcttcgccgcgtccgacgccgacgacatcctgatccgtcaggtggtgccagatgttggcgaagcgaagaggaggacaacctgctgaacgccgagcaccacttcgcgagcttcaaggccaagttcgccaagacctacgccaccaaggaggagcacgatcatcgcttcggcgtcttcaagtccaacctccgcagagccaggctgcacgccaagctcg

SEQ ID NO: 44577 - DNA, 270 bp, Glycine max
  Clone ID: 701042502H1
cacaaaccactatcaaaccattacatatgtatcaatcgtgctaaagtgagataacttagggtctgtatttaatcattttcgggatttatggggggtaggtgtggggagaacaagaacaagacctgagttgttaaacttttttattttgagaaaaaaaaacattggacatagtaaagccatggaagagatcaccaagaacctatcagggacttctcttttggtaccatcagttcaagacttggctaaagataagatatctaatgttccaca

SEQ ID NO: 44578 - DNA, 268 bp, Glycine max
  Clone ID: 701042503H1
caggccaccaaagccaaaggttccattgccaccaggcactgttgtgtcccctccaaggccaaggggtcgtcccccaaaagaccctaatgcccctcctaagtcccctaaggctaaggccacccctgccactggcaggccaagaggaaggcctaagaaggttgctcgctcaccggccgtgccgtctcccaccgccgtctccactggaaggcctagaggcaggcctcccaaagtgaagcctcagttgacagaagtcagtgttgagtcatag

SEQ ID NO: 44579 - DNA, 268 bp, Glycine max
  Clone ID: 701042505H1
atttaatttgattttatagcgacgagaccagcgagcaccaccaccgcgaccggcgagcccagccaccgtgttcgacttcgaattgagtccgagaaggctgttagataggcttttatattgaaaactgagacttgaagggaagcggttataattggtctggctttggacgtttaaacaattccgatcaagatccaattttgccttcccattttctcgtcgtttttttgtaacggtctttccatggcatatcccttctctgatttcaagt

SEQ ID NO: 44580 - DNA, 270 bp, Glycine max
  Clone ID: 701042509H1
gtttcagtgagtgatcggtgttcacttgatccttcataagtcgtcatcatcatcatcatcatcaccgttgattgaagaagatgccgatcagaaacatcgccatcggaaggcctgaagaggctactcaccccgacacgttgaaggcggggttggctgagttcatctccaccttgatcttcgtgttcgccggttcaggttccggcatcgcctacaacaagctcaccgacaacggcgccgccactcccgccggcctcatctccgcttccatcg

SEQ ID NO: 44581 - DNA, 81 bp, Glycine max
  Clone ID: 701042510H1
ctcgagcgcttcttctggtgccaagaagacggcagtttgcctgcactgatcagtccttagagcatgaattcagcatccccg

SEQ ID NO: 44582 - DNA, 269 bp, Glycine max
  Clone ID: 701042511H1
gctctctcactcacaaacgcacactgaattcaaaaacatcgaaagagagaggcatggtcgagcaaaccttcatcatgatcaagccagatggcgttcaaagatgccttattggcgagattattagcagatttgagaggaagggtttttacttgatagggttgacactcgttactgtggaccgtccttttgctgagaagcactatgctgatttgtctgcaaagcctttctttagtggtttggtggattacattgtctctggccctgttgtt

SEQ ID NO: 44583 - DNA, 269 bp, Glycine max
  Clone ID: 701042512H1
ctttctcaaacaaaaccagacggttatctagtcttccaatcttccccctattccctgttcctattcctattttatcaatcaataacataaataacacttcttcttgccttttaatatatttttctctcttcccctcttgtttcacctttcaacacttaattagagacgacccactttccttgcagatctttttccagggaaaagtttggatgttttgtggtaagagttagatgttgagtgatagacggaaaggttgaggtggagctgga

SEQ ID NO: 44584 - DNA, 84 bp, Glycine max
  Clone ID: 701042513H1
cagctcgtctgcaacgtcttccacaacgcacgtcttggtcccaagaacggggcacactgtgcgagaccatttaatgaggaagaa

SEQ ID NO: 44585 - DNA, 270 bp, Glycine max
  Clone ID: 701042514H1
caaaagcctattcacttggtcaatcattctctcacttagcaaacaaacactgtgtgtagctgcaatggaagagtattactaccagagacatcacgtgccagcatttgggagctgggattggaatgataatcttccttttacacaatgctttgagtctgcaagacaggctggtttgctaagatatagttactctgagtctgaagatagagatctttatgtcactggagacttgtatgagaatgattttgtcaaacccgctatgatcgttgt

SEQ ID NO: 44586 - DNA, 274 bp, Glycine max
  Clone ID: 701042515H1
ctcaattatatccatccttatcgatttgattagttgatttttaaatttttgacgacctcaatcataagaacaatcaattcttgtagctttgattcgttttcttggaattagatttgcaaacactactgaaaccgaaaccctaaacccttgtgaataagacgaatttgttctttcctttgattagataagaaagagttagatttagattcagttcgtttacgcttttatttgttgtcttctaattagatttgggagtataagtgaaaccctaggt

SEQ ID NO: 44587 - DNA, 225 bp, Glycine max
  Clone ID: 701042516H1
cctagctcttgttgacattccaataagtttggtgctatgatcatggagatcaatgcatccaccgacaacattaatacagccaagtacaacgtacatcacaaacagccttaccgaacttggtagcactttcagcccccacaaaattggatgaatgatccaaatggaccaatgtactacacaggagtttaccacatcttctaccatcataacccttatgcaccaacc

SEQ ID NO: 44588 - DNA, 269 bp, Glycine max
  Clone ID: 701042517H1
ccaggaccaaacagcatccgcgcgcagcgacggtaaccctccaacaacaacacttccgctgcgaaaaatgtctctggtggcgaacgaggatttccagcacattctgcgtgtgctgaacaccaacgtggatgggaagcagaagataatgttcgcaatgacctccatcaagggtattggaaggagattcgccaacatcgcttgcaagaaggctgatgttgacatgaacaaaagggctggtgagttgactgctgctgagttggatagtgtga

SEQ ID NO: 44589 - DNA, 53 bp, Glycine max
  Clone ID: 701042378H1
aaaactacaacctttgtcagtttctgtcttgttcgactctgcttctttctcca

SEQ ID NO: 44590 - DNA, 265 bp, Glycine max
  Clone ID: 701042518H1
gttataagctaggaaagctacactaggaacagatgtctccaattccaaaacagtttttagggtgatttcagaagcaagccactttcacttgatcttgaagtttgaggaggcatgcaacacttcttgcactgtcatctgtgtacttaagatgaaataaacatctcagtgcaagctcagaaatagatcttattctgaatactcagtggttaatttccatttctattttgtaaataatttctaacataagcatagctaaatcatgaaa

SEQ ID NO: 44591 - DNA, 269 bp, Glycine max
  Clone ID: 701042520H1
gcaagttcctttttgttttcctattattgggaattcttaactgtgaggcacaatatttcaatgccaacccatacgactatttacaactagccttaaggtggcctaattcctattgcttgacacatgaaggtggttgcagggaaatagtgccacaatattttactattagctaccttcatcccatgagaagaggaggccctgatctgcaaaattgcccctcaccatttaatatgccaaatagcactatggagataaacaagaatgaccta

SEQ ID NO: 44592 - DNA, 247 bp, Glycine max
  Clone ID: 701042338H1
atggctttaggtgttcctgctcttccgttgacatacgtggctcacgttctggcagttgttgccagcgtcttggtcgtggtctgggtcgtcaatttcaggggtggcttggcttgggattctgataacaagtccctcatcttcaacattcatccagttcttattgttattggcttactagttcatgggggtgaagctattataagttacaaagcttttcccctaaagaaggaagtgaagaaattgatac

SEQ ID NO: 44593 - DNA, 251 bp, Glycine max
  Clone ID: 701042341H1
accagtaagagttgatgttgttcataatttgaaaacgtcaaggcagccaacaaactagcgggggttcttcatcatctgtcttgtatggacatgaagaagggatattcagtttccttgacaaaacaacaacataagaaagagccatttcctgcagttcatcacacaagaacgcatcttcaatgcatccaagcggatcttgatgctacagtaggtactagctcagggcataatcaatattccctcaaattggg

SEQ ID NO: 44594 - DNA, 249 bp, Glycine max
  Clone ID: 701042342H1
aatcactactacacaaatcacacacacacacacagagttgcaagagaaagagagcgagattccgatggcgactctggattccgacgtgcctatggttcccgccggcgagccctcgagcagcgccggtccttcttccaagaagcccaagcgcttcgagatcaagaagtggaacgccgtcgctctctgggcttgggacatcgttgtcgataactgtgctatctgccggaaccacatcatggatctctgcat

SEQ ID NO: 44595 - DNA, 249 bp, Glycine max
  Clone ID: 701042345H1
cttccattcctttcttccggatcacagggaaaataaaaaacaatggagttggacttgacaccaaagacagcagaagtgttgtttgagggagatggtggaggttactacacttggtggagttctaaagtgccactgctggccaagaccaatgttggtgctggtcggttagtgcttcagcctcagggctttgctattcctcattattcagatatatccaaagtaggttatgtgcttcaagggaacgatggc

SEQ ID NO: 44596 - DNA, 247 bp, Glycine max
  Clone ID: 701042346H1
gtttaagcaaacataacttgcagtaatggcttcaatgaataaccaaaaagaaattgagctctttgagggccaatctcttctgtacatgcagctatatgggcacctaagacctatgtgtcttaagtgggctgttcaactaggtattccagacataatacagaaacatgccaaacccatttctctttctgacttggtctctactcttcaaattccaccagctaacgctgcttttgtgcagcggttcatg

SEQ ID NO: 44597 - DNA, 251 bp, Glycine max
  Clone ID: 701042348H1
gtcagagaaagtgaggcttttatttgattctaaaaatgagacgtgctcttgctttgcttcctcttctcttcctgtttgtagcgattggggaatcaagaaaagatggaggaaaatattggaaaatgaacacgagagatcatcagatgccgaaaaaaattaaggctctcctcaaccaaaactttgagatccaatctgaaaagattctcaaaaccaaggaacaaattcttgaaggttctaaacatgattgcgaa

SEQ ID NO: 44598 - DNA, 252 bp, Glycine max; identical to SEQ ID NO: 16837
  Clone ID: 701042349H1

SEQ ID NO: 44599 - DNA, 248 bp, Glycine max
  Clone ID: 701042350H1
gtgaatctcccgttgttgttgttctttctggaagcatggaacccggattcaagcggggagacatcttgttcttgcacatgagtaaagatcctattcgggttacgggagattgttgtgtttaatgttgatggacgtgagattccaattgctcatcgtgtaattaaggtacatgaaagggaagatactggggaggttgatgttctcacaaaaggagacaacaattatggggatgacaggctactgtatgc

SEQ ID NO: 44600 - DNA, 236 bp, Glycine max
  Clone ID: 701042352H1
agctcgagcgcgctcgagcaagagttgagacatgttgagtgcaatcatttgtcaaacagtgggacagatgagttcgatagaacagagtctccacaagctgcttcaaattctagtgtgattacatctgttggttcttctgaagatactggatctgtaacagtggcaggatgtgttgaggaaagcaccgggggtgttgaaatgatgaacaatggctggtttgaggatagcacttatgg

SEQ ID NO: 44601 - DNA, 101 bp, Glycine max
  Clone ID: 701042354H1
ttatctgaatcgcgaacagaggcaagaagacgggaagaagggcgtggtcgatctcatgcctctcttcgccaaggaactcctcgccggttccgtcgccggcg

SEQ ID NO: 44602 - DNA, 96 bp, Glycine max
  Clone ID: 701042355H1
caatttccctatattacttgcggtattgagggaacactactagatcatgtgtataacgttgtatagcgagctagctagctttctattgtctaatat

SEQ ID NO: 44603 - DNA, 245 bp, Glycine max
  Clone ID: 701042356H1
aataactatggttgctgagccattagaaagaggtcttgcagaggacatagagaatggtgttgttagcactgactggagtaaaaagaaactaggtgactttctccagactaaatatgactgggatcttcttgctgcacggtcaatctgggcatttggccctgataagcagggtcccaatattctgttagatgacacccttccaactgaagttaacaaggatctaatgaatgccgtgaaggattcca

SEQ ID NO: 44604 - DNA, 247 bp, Glycine max
  Clone ID: 701042358H1
ttttgtctttgtttctcttacaattttattttgcttctcttccttggagaagagttttgcctttcaaacaaccaaaggagcacacagaaagcaacaatcttcatcaatatactcatcttgttcacctcagctcactccttccttcatcttcctgcagctcttctgccaaaggtcctaaaagaaaagcatcattagaagtggtacacaaacatgggccatgctcccaactgaataatcatgatggcaa

SEQ ID NO: 44605 - DNA, 64 bp, Glycine max
  Clone ID: 701042359H1
cggaattctggtcgagcgaatcgtcaagggttcagttgctggtgaagtgcttcgccgcgacctc

SEQ ID NO: 44606 - DNA, 247 bp, Glycine max
  Clone ID: 701042360H1
ttctttcccacctttcattagttttgtggtttgtggcatcgaagccaaggaggcaaggatgatgccatacaagttttggcataggaaaaagtgtaacgtagtgcaataaccaagggtggctttgacttataggatagattgtgttcttttcatataaaatgatccaatgtaatttgtgtaaaactttctataagagtagcaattttcttgttcttttatattttgagctgaatgttgagttaaatag

SEQ ID NO: 44607 - DNA, 249 bp, Glycine max
  Clone ID: 701042361H1
gtgaaagagaatccgaggcgatgacaagagagaaattaagatggaggggaaggagcaggatgtgtcgctgggagcgaacaagttcccggagagacagccgattgggacggcggcgcagagccaagacgacggcaaggactaccaggagccggcgccggcgccactggttgacacgacggagtttacgtcatggtccttttacagagcagggatagcagagtttgtggacacttttctgtttctatacat

SEQ ID NO: 44608 - DNA, 249 bp, Glycine max
  Clone ID: 701042363H1
cgcgtcgctgctccgtaccagtttcactgcataaatttgagagaaaactctgcaaacatgttggtttatcaggacctccttacaggtgatgagcttctctcggactccttccgttacaatgaaattgagaatggaatgctgtgggaagttgaggggaagtgggttgttaagggagcagttgatgttgacattggtgcaaacccttctgctgagggtggagaagatgagggagtcgatgacgcagctgtt

SEQ ID NO: 44609 - DNA, 252 bp, Glycine max
  Clone ID: 701042364H1
caaaactcaggcacttgctgtttgccactcagatacttctggacatgaatcatcacatgcttcatgaactcatgggagttgatcctggaactaaccctgtttgccatttccttggaagcaaggccattttatgggtacccaatttatctatggacactgcctatcagactaacgttgttgtttaattagtccatgcatctgcatcttgggcaccataagattgtatataaaataaattatggtgtgttgtgt

SEQ ID NO: 44610 - DNA, 253 bp, Glycine max
  Clone ID: 701042365H1
gacagcgtcgtcgtcttcgctatgtcgcgacagagatccagaagagccgaactacctcccgctcaggagaatattgaaaaattggagaaagttgtaaacgatggaaattattatggagctcagcaaatgtacaaatccgttagtgccagatatgtttctgctcagaggtactctgaagcattagatatcctacattcaggagcgtgcattcagttgtctcatgggcaggttacctgtggagcagagttagctt

SEQ ID NO: 44611 - DNA, 249 bp, Glycine max
  Clone ID: 701042366H1
cgcaggtccacaagccggtccattaacttaaaatgtaaaaatatgatagcatggttaggccgactacattgaatgatagcaaagaaaatattttgtaataacattaaaggaggcatgtttggactgttgaattgcccagtttatagcatggttaggcggactacattgaatgatagcaaagaaagtattttgtaataacattaaaggaggcgtgtttggattgtagaattgccgagtttagctgcagaa

SEQ ID NO: 44612 - DNA, 246 bp, Glycine max
  Clone ID: 701042367H1
ctctcctttcgctcctgcttgagaaaatcaggtatgaaagttcacttctccgttcaactcgttctttctctgtttctactgttcgcatttcacgttccacatatggttgttgggactgtggagcttagagctctgatggagttgaagtcctctctggatccagagggaaagatccttggctcgtggatcagtgatggtgatccatgcagtggcttcttcgaaggggttgcgtgcaacgagcatcgc

SEQ ID NO: 44613 - DNA, 71 bp, Glycine max
  Clone ID: 701042368H1
aacgcaaccaccatcatcgtgtttaggtcattcttctctctttccgtaccctaaaaccgaaaaaattgttc

SEQ ID NO: 44614 - DNA, 247 bp, Glycine max
  Clone ID: 701042371H1
gtgacacagaaattaagctagatcttcatagtttcttcttcttttctcaccttccttctctcccttcagacaaagggacaaaaaatcagtgtgtgagagagagagagagagaaattccaaaaccatgtcccacagtcatctaagtttcgcctttgggattctaggtatcattgcctccttcgtgtgctttctggcaccactaccaacattttatagagtttgtaagaagaaatcaaccgaaggttcc

SEQ ID NO: 44615 - DNA, 247 bp, Glycine max
  Clone ID: 701042372H1
atctctctctcgccggcgtcgctacgaaggaaagcaatttactgtgaagaacaatgaggaagctaaagtttcatgaaaagaagcttttgaagaaggttaattttttggaatggaagagggaagggggtcacagagagaacctcattatgcaacgctaccatgttactggacgggacgattacaaaaaatattcaggtttatgccatatggttcagaagttagtaaacatattgaaacagatggaccc

SEQ ID NO: 44616 - DNA, 246 bp, Glycine max
  Clone ID: 701042373H1
ggcagactagtatccgatcctctgtcctctcgaagctttcatcgttcaacatattctcaccatctcagtcatgggcctgctatcttgttttaggtctaccgtcctgagaaaatgttccaaaggaagctctggcatgtcaagattcctgtatacgaacaattttcaacgaaacttgatttcgtctggtggcaatgaatcgtattatgggtattttaacaggagatcatacacttcactttatatggg

SEQ ID NO: 44617 - DNA, 247 bp, Glycine max
  Clone ID: 701042374H1
taacaaacttcttcaccctctctatattccaatcctttttttccattccctactattccctatcatctttctttgtgttctcatctttttccttttcccaagcaattgtactttttaggggcatacacgtaaagcagttggtttctggagtagttagagttacatgtgttttgcaggcacatggcaacacatgaaatggatcccgatgttgttcgctggggtcttcatctcctagatgtctgcacac

SEQ ID NO: 44618 - DNA, 242 bp, Glycine max
  Clone ID: 701042377H1
gaagcttgcatgctcttcttcatgggaacctgggaccaggaaggattccgttagattggaccacgagaataagcttgatgttaggtgcatctagaggtttagcacggattcaggaggagtatagcgcatcagagatacatcagggaacgtgaaatcttccaacgtgcttcttgacaaaaacggcgtcgctttaatatctgactttggcctttcgctgcttttaaaccctgttcacgggattg

SEQ ID NO: 44619 - DNA, 244 bp, Glycine max
  Clone ID: 701042337H1
gtttttctgttgttgtgtaatgatactcattgtcaccaccaacacgctttcatcttactgaacaacgacttcatcttcactcttccttcaaatttccaacaagggttcaagggtattattcttgctgtattcattctcttgctgaaatgcagtctttctagatagtttgttcaactgtccctttattggcgttactatgctacctactggagcaaaatagactcaattacgtgagaacaacagc

SEQ ID NO: 44620 - DNA, 252 bp, Glycine max
  Clone ID: 701042304H1
ctcacagtcgtttcggggcattcttgtgcactcagttactctctctctctctggagcgtcgtcgtttcgttagggcacaaaaccccttttcggatcggtggagcaaggcctcgccggcgagattcccgaggctgttcactcagcgatcgagcaccggcgaaaagcggcgaagatgaaggttttcgtgaagactctcaagggcacgcacttcgaaattgaagtgaacccttcggacacgctttctgaagtgaa

SEQ ID NO: 44621 - DNA, 251 bp, Glycine max
  Clone ID: 701042305H1
gctcgacaagctcaaagctgagcgtgaaagaggaattaccattgatattgctttgttgaagtttgaaaccaccaagtactactgcacggtcattgatgctcctggacatcgtgactttatcaagaacatgattactggtacctcccaggccgactgtgctgtccttattattgactccaccactggtggttttgaagctggtatttctaaggatggacagacccgtgagcatgctcttcttgctttcaccc

SEQ ID NO: 44622 - DNA, 251 bp, Glycine max
  Clone ID: 701042307H1
gtgctttcgagcagtgactgtagtcttattcttcttctctaacaaaatggtcatcgtcgattccgattacgaaggtgccgccatcgaagccctcggttctctcttcaaggtcacccaagtcttcctctgggatgatggccttcaggtttcatcctcagctgaacgctggatattggatgaagctgatgacaatcacggctctgaccccgttcctgatttgattgaccttattacacccgaggatttggagc

SEQ ID NO: 44623 - DNA, 252 bp, Glycine max
  Clone ID: 701042309H1
ctttgttcgacaattttgaatggtcttcaggttatacatcacgttttgggatgatcttcgtggattacaaaaatggtttgaagagataccaaaagctttcagcgcaatggttcaagaattttctcaagaaagaaagaagactttatagctctagtaaataatatgaaattcgtttattcattggttatatttgtaaataattatttggtttttctttgatattcttttattctaaagaggtcctaatttgac

SEQ ID NO: 44624 - DNA, 250 bp, Glycine max
  Clone ID: 701042310H1
attttcgcggaaaacctcagcgtagttcctaacactacactcttccgccgattatttctccaaaccgattattcttcttctgtgccctagcgccttttcctccgccgtcaaccaccgtatccctcccgcttccggcaccgatcgaacagtctccggccaagttcagttcttgcttgcgaaaattctcggaatattttgaatccaggaaatcatgcacgctccagttctagttctcaaggactctttgaaa

SEQ ID NO: 44625 - DNA, 242 bp, Glycine max
  Clone ID: 701042311H1
gcaacagagagtagaaaagatggcgcggttgatcacagtggtgtggtgcgcggtggcggtgctactgtgcgcctgggcgggcgcgtcgtgggtggaggaggcggcgaacccgatacgaatggtgggaggggtggaggcggaggtggttcgggcgatagggcagtgccggcgcgcgctgaagtttgctaggttcatgagcaggttcgggaagagttaccgaagcgaggaagagatgagggaga

SEQ ID NO: 44626 - DNA, 250 bp, Glycine max
  Clone ID: 701042312H1
caggcagctagtactaccctgcccctgctagctattttgtaacaagcagatcaaattaattgcttgatatcaagaaacatggcaatcaccggtgttcatggatggggagacatcaagagtctcagcgtccaagtgatcaccggtcgatggatcgtcgtattcgcctcttttctaatcatggcagccgccggagcaacctacatgttcggtctctattccagcgacatcaaaaccaccctcggttacgacc

SEQ ID NO: 44627 - DNA, 249 bp, Glycine max
  Clone ID: 701042313H1
atcgcaattaccccaaattcctcaccctaccgtagatccatctcctcttccttcgtgaattctggttcagggtggttgccatgtatggcacttagtatttttttcccctttttaggattattaggggtgggtgggttgtgtctcgcttagggttccaaagtttgtcgctttgaatggaacctcgtgttgggaataagtttcgcctgggtcggaagatcggaagcggctcctttggggagatctatttag

SEQ ID NO: 44628 - DNA, 254 bp, Glycine max
  Clone ID: 701042314H1
cgagcaacgatggaggaggaggaggaaaagaagaaagaagaagaagaagaattgcagagagaggttcagatcgcatggccttaataacgggtcgaatcaatgcgcttcctccgacaccaccctcttcggcgtcgtccccaacccacccccacatccctcgccacgcgcagtccttgtcggtcgcagctttcgattctaactcagatgatcagcagcagcatcttccccctcgccaccagcgccctcagtcgttg

SEQ ID NO: 44629 - DNA, 251 bp, Glycine max
  Clone ID: 701042315H1
gtgatcggtgttcacttgatccttcataagtcgtcatcatcatcatcatcatcaccgttgattgaagaagatgccgatcagaaacatcgccatcggaaggcctgaagaggctactcaccccgacacgttgaaggcggggttggctgagttcatctccaccttgatcttcgtgttcgccggttcaggttccggcatcgcctacaacaagctcaccgacaacggcgccgccactcccgccggcctcatctccg

SEQ ID NO: 44630 - DNA, 253 bp, Glycine max
  Clone ID: 701042316H1
cactaataacagcaaactaaaggtgaagtttgccagaaacaagatgggaaggaaccattttcagcagcaacactgtgctgatgggagcatgtggatggagagtcagggtcagcaacagagctatgccttccaagaagagtcttggagccctgataacaactatggccacaaccacaagcaattcccaggcatgcacatgaacatgaacaacaacaacgacaacaaaaggcttggtgcttttgctgctgtggac

SEQ ID NO: 44631 - DNA, 260 bp, Glycine max
  Clone ID: 701042317H1
tactcgagccgaatcggctcgagatgaagagaatctaaagaaagaccaaagccaggctcaacaagttgtgttattgtatgcatgagaattgaaggagagaggtgaagactcattatcatcatcatcatatcatcgtcatgtatagcatggattcatcatcttctggatctcagttttctcagcacccacaactccctccagggtttcgattccaccccacagatgaagagctagtggttcagtacctcaagaaaaaagca

SEQ ID NO: 44632 - DNA, 250 bp, Glycine max
  Clone ID: 701042319H1
taattctcatttcttcatcgttcgattcttctcctcctaaagatcttcgtgaaaactttgaccggtaagaccatcacccttgaggtcgagtcctccgacaccatcgataacgtgaaacctaagattcaagacaaggaagggatcccacctgaccagcagagacttatctttgcgggtaaacagcttgaggatggtcgaacccttgccgactactacatccaaaaggaatccactctccacctcgtgcttc

SEQ ID NO: 44633 - DNA, 252 bp, Glycine max
  Clone ID: 701042320H1
gaaaataataattagtagcataataattaagccaaagtgttcatagatatggagggtcttctgcctcttgtttataaagcaatcaagagaaacaaaacacgaaggcaacacgagtgtctttcatcaggaacttctctaaggtacaacatcagcatggccgagatgtaccctcaaactcaggaacatgtccttcagaaccagacacatgcccagaaagtgtttcaccaccaccataatgaaagtcacaaaatt

SEQ ID NO: 44634 - DNA, 82 bp, Glycine max
  Clone ID: 701042321H1
ggaggaacaacgaccagatatgtacttctctgggttgcatgactaggctttgcggtaacccagtgaagtacatatatggtcg

SEQ ID NO: 44635 - DNA, 250 bp, Glycine max
  Clone ID: 701042322H1
ggaatttcttcttccaatttttcagaactttgcacgaaagaagaaactctgaaggaagtgcatgcatcacttgtaaaggaaggacagaaggctcgtttggagaaatttgagattcctgcaaaaattaaattgctttctgatccatggactcctgaatctggcctagtcactgctgctctcaaactcaagagagaggccataaaaaagacttttgatgaagaactttctgagttgtatgcttcataggctt

SEQ ID NO: 44636 - DNA, 74 bp, Glycine max
  Clone ID: 701042323H1
cgcaaatcaaagcgcaacagccattctccttcggtgatcttgatagcatgggaaaacagagcacagaattctct

SEQ ID NO: 44637 - DNA, 250 bp, Glycine max
  Clone ID: 701042324H1
cgtttaagcttagtttgtcaatttagttttccaaatttaacacattgttaaggctaattatggctgatattgagggttctccaggaagctccatgcatggagtaactggaagggatcaaaccttcatagcctcagtggattcccctatggtccctacagacaccacagcaaatttcgctttgctactagattctgagcacaaggcaaaaattttcaagcttgtttccttagctaaccctcacgtgagaac

SEQ ID NO: 44638 - DNA, 105 bp, Glycine max
  Clone ID: 701042326H1
tgaggcctgtgctgtgctctgaggggccatagtttgggaccctttgaaccctaatctccacccaaagccattgaaccgggaacctgccttggaaaagaaagagcg

SEQ ID NO: 44639 - DNA, 250 bp, Glycine max
  Clone ID: 701042327H1
ggcttcttcttctccctctcactcatatctcacacatcttcctcttcatccctctcaccaaggtgatagtgagaagcgcgtggaggacgatgaatcgcgcgttccgattcacatcgtgacggcggtcgtcgcaacttcccgtcgaatttctggaaccctcgcctcaatcgaagctcgtcatcggctttgactgcgagggcgttgacttgtgccgcaaaggcactctctgcgtaatgcagcttgcgtttcc

SEQ ID NO: 44640 - DNA, 249 bp, Glycine max
  Clone ID: 701042328H1
gttcacgaagacacactcaagtacatgaatgattttgagctgtacgactttgttgctgattcaaattttgatcagttcatcaatttgatccgaggggagaatgaagatgccaactgtgatcatttcggttctgaccttatcaatgattgctttgttaacaatcagcagcagcccctttcatctcctgcaaacccttttgatcagaacaacaacaataataataatgatgctgtgaatgtctatgatcca

SEQ ID NO: 44641 - DNA, 250 bp, Glycine max
  Clone ID: 701042329H1
gcatttccaaaaacatcatacatatgtcttttctaagatccaccatgtcaaatgatcattctaaattaacctttgatgagctcagatgggtgattaacatccgcaaaactcttgaagaagaggttgaggaggatggtgaatttgctgtgtccatcttcagcgtgccaaagctccttatggcaagtgatccagactcttatgtccctcaacaggttgcaattggtccctaccattattggcgtccagagct

SEQ ID NO: 44642 - DNA, 251 bp, Glycine max
  Clone ID: 701042330H1
cgtcaacaacagcagtccaagaaatttggatcatgatggaagaattgacaatgaaagttctgggacaagtacttcattacaacaaaatgctaccagtcatcaaaaaaagtttccaaatagttctttactacctgataattttctttttcccaaaaagattgttactgatggggacagggattatctacaaacaaagtattcttcagacaggaatcacagtggtccgttgcaatatcggcagaagagagaca

SEQ ID NO: 44643 - DNA, 251 bp, Glycine max
  Clone ID: 701042331H1
actcgagcgaatcggctcagaattaactatgaagcctaccactactattatcccttaccttcctgcctctctttgctttcctggctctttcagaagatgttgaacaagttgtggacataagtggcaaccccattttcccaggtggcacatattacattatgccatcaacttggggcgctgccggtggtggattgaaactaggccggacaggaaactcaaactgcccagttactgttttgcaagattactca

SEQ ID NO: 44644 - DNA, 250 bp, Glycine max
  Clone ID: 701042334H1
gtttagggtaaatccgtggctggtttctggaacttttgcatccgaatctccgtttgttttggcagaagcacaggttctccgcgtcagccatggccgatgacttcgacttcgcggataaagttcctccttcattcgatcgcgtgggaaatgtgatcaaggattctggatccaaagggttcaatccaggattaattgtcctcctggttgttggtgggttgttgttgacattcctcattggaaattatgtgct

SEQ ID NO: 44645 - DNA, 72 bp, Glycine max
  Clone ID: 701042335H1
atttcttctaaaactttattttctctgtgcatcattcataaagtaataagccagcagataaagccattccac

SEQ ID NO: 44646 - DNA, 251 bp, Glycine max
  Clone ID: 701042336H1
cttttccctcttctttttctatgatggcattggatatgatagatgttgttccgagaacgaggatggaggaagctgcttccgctggattaaagagcatggagcatccccttcgactcctttctccaacctcttctactcccaattcttcttcttctcctcttctcaataccaatcccaacaacctccactgctcccaaatcaccgacttcaccgtctccaacttcaaacaagtcatcaaccttctcaaccgc

SEQ ID NO: 44647 - DNA, 74 bp, Glycine max
  Clone ID: 701042302H1
actcgacgaattcggctcgagaatttctgacgagctatctagctagtcgatcctaccgtaagtgaggtgcccat

SEQ ID NO: 44648 - DNA, 272 bp, Glycine max
  Clone ID: 701042268H1
cgcctcttcaacaacccttgttttgttctgtgcaagtgcatcttgaaaggaacaacaatggtgaagtctataaactttctcctgcttctgtctctactagcctttgttccctcctgtcactgcaaaaagaaaataggaggttacctctaccctcaattttacgacggttcatgccccagagctcaagagattgtccaatccatcgttgccaaggctgtggcaaaagaaccccgcatggctgcttcgttgctcagactacatttccatgattg

SEQ ID NO: 44649 - DNA, 274 bp, Glycine max
  Clone ID: 701042269H1
caaaaaaaactcccttgtatattgttgcagctctagctagggtttcgcaagtgcgatcgaagaagaacaacgacgatggcgatggctgcagctctgcgtcgcgaaggaaggcgtttgattcaaccaatcaacgccctccactcttctctcaattcctccctcatctctcaagaccaagcctctcatggcgcgcgctccatttccactcaagttgtgaggcaccgaatgaagagtgtgaggaatatccagaagatcaccaaggacatgaagatgg

SEQ ID NO: 44650 - DNA, 272 bp, Glycine max
  Clone ID: 701042270H1
cctcactcgttcattcgaacaaaaccctttttagtttttttcctcctctgtttctctctctgctctgcattttggtggcatcatcagagatagagacttgagtgtgagagccacaacttctccaattcttcaaaagggtgaaactttgaaggaaaagaaatggttggtgctataaaagcagcgattggagacgcggtgttgactttcatgtgggtgttctgttcctctgtgttgggaattgcttcagggtacataaccaatgcacttaacct

SEQ ID NO: 44651 - DNA, 205 bp, Glycine max
  Clone ID: 701042272H1
aattactcaaaagtaattgaatttgtccagttcaaagataggttgcaacactctagtcagtatctagtggctcgagttgaaacacccattttacaactaaagcagaatgcagataacattgaagaagaggagggtatccttcaaaacttgaaatgtggtattcacttccttgagctgtctaaggaggtagggtcaaagccttgga

SEQ ID NO: 44652 - DNA, 157 bp, Glycine max
  Clone ID: 701042273H1
cttcccttgttcgtttcactctcacaatggactccctctctcacttctgcaccggagcccttctcgccggcggcctctactggttcgtctgtgttctggggcccgccgagcagaaggggcaacggggcaacgatctatccggggggttcattttcgg

SEQ ID NO: 44653 - DNA, 229 bp, Glycine max
  Clone ID: 701042274H1
gccacgctgaggcctaagatctccgaattccaagcgcctcttgatagggtctcccaccctaaccaagccagatcccgttttcaattccttctcagtttccttttctctgaaaaaacatgttgaggggtgcagctagaaggctctcttcctctctcccatctcctcctccgttgcggcccaatcaggcggcttcggctttcctctctcgaaacgacgtcgtcgtcgatga

SEQ ID NO: 44654 - DNA, 269 bp, Glycine max
  Clone ID: 701042275H1
ctttcaccttcctccatactttcttcatctgggttttgcttgctataaaaatctagctaaaatttgtcgtttgctttcagcaagagctttagcttaattatcaccaggaatttatttggcagtcatggattattcatcatggatgattaacacttccttggatctcaacattaatccccacaggcttcatgaagaacttcccaaaaaggaggtggaaaacaactttttgtcattgaatttggaggtgaagaaatcttctgtaaaacaag

SEQ ID NO: 44655 - DNA, 271 bp, Glycine max
  Clone ID: 701042277H1
ggcgttctatatattattgaattgacaatgaggcctgctcttgctttgcttcctcttctatttgctttcttgttagctgccactacagaatcaagaaaagatacaggggaatattggaaaatgatcatgaaagatcaggaaatgccagaaggacttcaaggtcttgtttcatttcaatctgaaaataaccctaagactcaagagcagcttggtaaaggttccaaaaaccattgtgaagagtctctagttacaaatacacaagttaatagtg

SEQ ID NO: 44656 - DNA, 273 bp, Glycine max
  Clone ID: 701042278H1
ccaggatgttccgcatccaccaaggcatgcatatacggcatccagtacggcgacagttccttctcagttggctacttcagccgcgagcgcctcaccgtgacagccaccgacgtcgtcgacaacttcctcttcggctgcggccagaacaaccagggcctcttcggcggctccgccggcctcattggcctcggccgccaccccatcttcttcgtccaacaaaccgccgccaaataccgtaaaatcttctcctactgcctcccctccacctccagc

SEQ ID NO: 44657 - DNA, 268 bp, Glycine max
  Clone ID: 701042279H1
gagaaacaaagttctcttctactttctgtctccagcaggctcagaatctttttgcaactgttctctggattttcgttcattattttagtttcctcttttgttttctctcctttttctttgaagcaaagtgaacttgtggtatacctttccaattgaggtttctagcgaaagagaaaggatgtcaagtgggacaacatactggtgttacacatgcaggcagccaatctggcttgaacggagggaaggcttttgcccctactgcgatgga

SEQ ID NO: 44658 - DNA, 276 bp, Glycine max
  Clone ID: 701042280H1
gaaagagaaagagaaagagaagagaataataatttttccgggaaaattcaagttccaatcggaatcggaatcggaatctgaaatgagtagtagggtttggtttctactattccttctgctgatctcgaaatgccatcaagtgtggggctcctacgcgggttccgctagctccatcgtcaacccttccaaggtcaaacagatttcctggaagccaagagctttcgtttatgaaggtttcctcacggatttggaatgcgaccacttgatctctttagc

SEQ ID NO: 44659 - DNA, 272 bp, Glycine max
  Clone ID: 701042282H1
gggaagaggaaccctagctagggtttggaagaagctgatccgagaagatggtgcagcgtctcacctaccgcaaacgccacagctatgctaccaaatccaaccagcacagagtcgtcaagactcccggtggcaagcttgtttatcagaccacgaagaagagggccagcggacccaagtgccctgtcactggaaagaggattcaagggattccacatttaaggccagcagagtataatagatcaaggttacacagaaaccgaaggactgtgaac

SEQ ID NO: 44660 - DNA, 269 bp, Glycine max
  Clone ID: 701042283H1
caagaaacgaatcgaagtctttttcttcttcttcctcctcttacgaactcgcgagatttctttgtcctcactcaagggttagggatgcggcggaacagtccagcatactacagtcctccgcggcgaggatacggtggcggtggccgaggaggagggtccggcaggaggggattcggtggaggcaggcgcagggacagcaatgggagcctcttggttcgtaacattcccctcgattgcagacccgaggagcttcgcgtccctttcgaacg

SEQ ID NO: 44661 - DNA, 271 bp, Glycine max
  Clone ID: 701042286H1
ctgacgagaaaccagacaccagcaccgaagttgttcttcccgtagagaaagacgcacaacaagaacaagaaacctcgccagagaaggagaaagagaacgttcccgaaacagctgaaaccgagtccgaggttgtttcaaaaccaagcggtgacgacaacgttcctgaatccggttctttcaaggaggaaagcaccattgtttccgacctacctgaaaccgagaaaaaggctctgcaagaactcaaacaactcattcaagaagcgctcaacaa

SEQ ID NO: 44662 - DNA, 270 bp, Glycine max
  Clone ID: 701042287H1
caataatctgagagagaaacaaaaacaatgaaggtttccattgccaagttccactcccttcccctatgttttttccttctcttggccttcaacacaaaacccctcctagcagcagaaccagagccagtggttgataagcaagggaaccctttggagccaggagtagggtactacgtgtggccactttgggctgatgaaggaggcctcacactaggccaaacaaggaacaagacatgccctctttatgttatccgtgacccttcattcatt

SEQ ID NO: 44663 - DNA, 268 bp, Glycine max
  Clone ID: 701042288H1
gggtgttaaagccaggaaacggaagctcagtggttttggacttcgtgtgtacaaaaattatgatccaagagcaaaggtcttgaggaaactgacagaggaagtgttttccattgttggccgggatcctcttatagagattgctgttgccttggagaagattgcactgtctgatgagtatttcatcaagaggaagctatatccaaatgttgacttctactctggactgatttatagggccatggggtttcaacctgagtttttcactgtt

SEQ ID NO: 44664 - DNA, 262 bp, Glycine max
  Clone ID: 701042289H1
tgcaacctcaatttagccagattaacatctctgttacatggaggggaaagaaatttgttgtcgagatgaatataggagccaatgtgaaggatctagggcaggaattgcaaaagttaacaaatatcaaagaagataccatgcggttcattgttccacagatttctgccagcacgtcaaaacttctggcccccttttccaaggaacatgcacttttaagtctgcaggaaacttcaattaccgaggccaggtcaattataatgat

SEQ ID NO: 44665 - DNA, 269 bp, Glycine max
  Clone ID: 701042290H1
taatggcgtttgctcacgacttggagttggaatcctcttcttcccctctggtgttctcagtacggaggagtgaaccggagctggtggctccggccaagcccactccccgcgaaattaagatcctatctgagatagattctcaggcgggtcttcgtacccaaattccaatcatacagttctaccgtaacgacccatcattggcaggcaaggacccagttcaagccattcgaaacgctcttgcggaagcacttgttttctactacccgttt

SEQ ID NO: 44666 - DNA, 269 bp, Glycine max
  Clone ID: 701042291H1
gagagaaacccatttctagagagagaaactcgcagtcgcagacatgtcttccttcgatgccttcgccgacgacttgaacgtcaactcttcttccactcgccagcacgaccatgacgaggacaacttctctggctacggcggctactcctccttcaccggaggattctccgccgacggagatgtcgccgtcgatcactccgccgccgcgtcgccggagatctacggcttcactgattcgaatcccgcttactctcagtctcccttcgaat

SEQ ID NO: 44667 - DNA, 269 bp, Glycine max
  unsure (1)..(269): unsure at all n locations
  Clone ID: 701042292H1
gttgacatgcacatccaaatgtcttctttcctcttagcatcgtttgcacttttgttttgcatctccaccttggagaagagctttgcctttcaagcaacaaaggaaagcaacaatcttcgtcaatatcattttgttcacctcaactctctatttccatcatcttcttgcagctcttctgccaaaggtcctaaaaggaaagcatcattagcagtggtacacaaacatggcccatgctcccaactanatcataatggcaaagcaaagactac

SEQ ID NO: 44668 - DNA, 269 bp, Glycine max
  Clone ID: 701042293H1
ctcgagcggtttgattgggatcatcctatccacttgcagcccacaagtcctactactgtgaagaaggtcagtgttgtttgggatgcctatgaagcaacaaaggatgcacatggcctttgcattctaaccgagtgggatgagttcaagactcttgattaccagaagatatttgacaacatgcaaaaaccagcatttgtttttgatggcagaaacattgtggatgctgataagttgcgtgagattggcttcatagtttactcaattggtaa

SEQ ID NO: 44669 - DNA, 270 bp, Glycine max
  Clone ID: 701042294H1
gtcagatctggtccctacggtcagattttccgacctgataacttcgtcttcggccagtccggcgccggaaacaactgggccaaaggtcactacaccgaaggcgctgagttgattgactctgttctcgatgttgtcaggaaggaggcagaaaactgtgactgccttcaagggtttcaggtttgccactctcttggtggtggaactggttctggaatgggaacactgttgatctcgaagatcagggaagaataccctgaccgaatgatgctt

SEQ ID NO: 44670 - DNA, 227 bp, Glycine max
  Clone ID: 701042296H1
ttgacaaccatgagtgatgtatatagctttggagttgttctcctagagctcctcacaggaaagaactctgtggacaagaaaagacccaccagagagcaggatttggtggaatgggcaaggccattgttgaaggattcccataaactagaaagaataatggacacaagacttgaggatcagtactcaactgaaggggctagaaaatttgcagccttggcttatcaatg

SEQ ID NO: 44671 - DNA, 256 bp, Glycine max
  unsure (1)..(256): unsure at all n locations
  Clone ID: 701042301H1
ggctcacatcatccaatgccaatccgacggccacgatcccttccacgtgctcctcgagccgnagatgaaccaggaggacacgtggcgcaattacgccgccgacgtcgacgtactccacgccgccgtgtatagcatcagccacgaccgcttcgccgtgttcctccgcctccacaccgcttcgtgcgtacgcgcctccgccgtggcgctgctcaacgagctcctccgcttcgtcgccggcggcgacgaggcgagcggg

SEQ ID NO: 44672 - DNA, 274 bp, Glycine max
  Clone ID: 701042267H1
aaagtgtctacagagaagagaacaacatagcagagagagagagagagagagagagagagagagagaagagcttatctacttcactttctggagagacatggagggtgctaactggaagataacagaggaagaagcagggccatcctcttcttctgggattgcttcaaataaacaacaaaacccacctgaaacttttcatcatcaacatcataggaaggaggctgcagcagaagaagaagacaccgaggaagagggagaagacgatgttgatcat

SEQ ID NO: 44673 - DNA, 270 bp, Glycine max
  Clone ID: 701042229H1
gtcgcttctcgaaccctacttcttccgcggtgattgcatttcaattcctgtaatggcgattgataatatttttaaacatgaagccagtgaagaaaaaggagagcgggccagaatggcttcttttgttggagccatggctattgctgacttggtgaagacaaccttggggccaaagggaatggataaaattttgcagtcaacaggtagaggacgtgaagttactgtcactaatgatggtgctacaatcttgaagtccctccatattgataa

SEQ ID NO: 44674 - DNA, 139 bp, Glycine max
  Clone ID: 701042230H1
aacctctaacctacctctttttcttctctctcaacaacttcaccttcttcctcctcgatcatgtctcacttcaagggcaagtaccatgatgagcttatcgccaatgctgcgtacattggcactcctggaaagggtattc

SEQ ID NO: 44675 - DNA, 283 bp, Glycine max
  Clone ID: 701042231H1
gaagcaccttttctgagggagagagtcttccacttttctgcagagtccatagcaaaactgaaagcaaaagccaactcagagtccaataccacaaaaatctcttcattccagtcattatcagcacttgtctggagatccataactctcgcgcgctccgtgccgtacgagcaaaaaacaagttgcaagatggctataaacaatagatcaagaatggaaccgcctatgccagaagaatactttggaaacttagttcaagtagtgagtgcagaaacgacaacaaggg

SEQ ID NO: 44676 - DNA, 285 bp, Glycine max
  Clone ID: 701042232H1
aacgatatcagtcttccattcatcaacaaccactctctctcccctctctgcagcaaaaccaattctccggcgacatctccggtcaggttccggcagcctctccggcgactcggcatggcaactcaatgaatgcggaatcaccgccggggctcctcatgtcggtttcctgcctctccgactacgacctcctctgcggcgaggactcctccggaatcctctccggagagtcgccggagtgctccttctccgacatcgactcctcacctcctccgccgtcgccgacga

SEQ ID NO: 44677 - DNA, 282 bp, Glycine max
  Clone ID: 701042233H1
cactgttccaatacggaatctaaggcaaagcaaaccaaacatcttgaatcatgggttcaacaggtgagactcagattaccccaacccacgtatctgatgaagaagcaaaccttttcgccatgcaactagccagtgcttctgtccttccaatgatcctcaaatcagcacttgagcttgatctgttggaaatcatagccaaggctggccctggtgttcatctttcccccactgacatttcttctcagctcccaacacagaaccctgatgcacccgttatgttgg

SEQ ID NO: 44678 - DNA, 281 bp, Glycine max
  Clone ID: 701042234H1
cagaaccttctgaggttaaagcaaaaaacaaagagagagagagagagaaaatgatgaagccatcgatgctcagatctctccactccgccgccacccgcggcgcctctcatctcttccgccgtgggtacgcctccgagccggtgccggagcgcaaggtagccgttctcggcgccgctcggcgggatcgggcagcctctctcccttctcatgaagctcaatcccctcgtttcgagcctctccctttacgatatcgccggaactcccggcgtcgccgccgatat

SEQ ID NO: 44679 - DNA, 275 bp, Glycine max
  Clone ID: 701042236H1
ggggggtggcactgtttggccgttgatgatcagggcagagcttatgcttggggtggaaatgaatacgggcagtgtggcgaagaacccgagcgcaaggatggcactggtagacctttaaggagagatatagagatccctcagcgctgtgctcctaagcctgttgttcggcaggttgctgcaggaggaactcactcagtggtacttacacgagaagggcatgtttggacatggggtcagccatggccgcctggtgacataaaacagatttcagtccc

SEQ ID NO: 44680 - DNA, 276 bp, Glycine max
  Clone ID: 701042238H1
cctgactctgtgttagtgttgtgtttgttgtgtgttgagaagcagagatgcaaggcagcgcggccgacggagaagccttggatttcgagcctgaggacgatgacttgatggacgaggacggcgcccccgacgccgacgccgacgcttctccacctcaacctaagctcaaatccgccatcacccccgccgccacttcctctctctccgccccgaagaagaccaagggccgcggattccgccaggacactgacgccaaccgcaacactcgcctctccg

SEQ ID NO: 44681 - DNA, 275 bp, Glycine max
  Clone ID: 701042240H1
gaggttttgacgcaacacactttcactgagaaaggatctctatctaccaaggagcagaataaaacccttctctctggtaagtgaataagagaatggcttcagatcggaaacttcacactttcgaggaggtggcaaagcacgaccagaccaaggattgctggctcatcatttctggcaaggtgtatgatgtcacccctttcatggaggatcatcccggaggtgatgaggttttgttatctgcaacaaggaaagatgcaaccaatgattttgaagat

SEQ ID NO: 44682 - DNA, 271 bp, Glycine max
  Clone ID: 701042241H1
ctttgcctccccttctcacttcgcttattcttctctcgtgtactatgtctcttctttcttgatgctatgttgatgactggataaaatctgagacagaagggtagtttctagaaacttgacagagctaattaagagaatcttggtatttataggaagtagattactttattaactgggtaataagtcgttgtttggaggctatagatggcgatgcaaaccgtttatctgaaagaacatgaaggacttgtccacagttctgttgggcagttgt

SEQ ID NO: 44683 - DNA, 284 bp, Glycine max
  Clone ID: 701042248H1
taggcagagtctcttgcacgctttcaaggagggtcaccctacatatatcctttgtatggtttaggagagcttccccaggcatttgcacggcttagtgctgtttatggtgggacatatatgttgaataagcctgagtgcaaggtagaatttgatgaggaaggaaaggttgttggtgtcacatctgaaggggaaactgcaaagtgcaaaaaagttgtttgtgatccatcatatttgcccggcaaggtgaggaaggttggtagggttgcaagagcaatagccataat

SEQ ID NO: 44684 - DNA, 277 bp, Glycine max
  unsure (1)..(277): unsure at all n locations
  Clone ID: 701042249H1
tggatccgcagatctaatgatttcacacactttcctcactacggatcattttnctcttcatctgtgggcaccccaatagcttcttctaatcgacagtccaattttgttggtttgtggtggatcatcttcgtcgttgtggtgactagtgaggagtgcaggactatacctatctatatagtgtatgaaaattcaggggggtgaagtcgtttttggagtagttgataaatgttgaaatccttgacggttgtttggtgaaatgagggatgttatcggggtt

SEQ ID NO: 44685 - DNA, 274 bp, Glycine max
  Clone ID: 701042251H1
gtggttttcatcgtcttccttctcttatatttctttttttttttgtcttcgccgcacgccgaaacaatggccggaaaaggagagggtcctgctatcggaatcgatctcggaaccacctactcttgtgtcggtgtgtggcaacatgaccgagttgaaatcatcgccaacgaccaagggaacagaacgacgccgtcttacgtcggcttcactgataccgagcgtctcatcggtgatgcggctaagaaccaagtcgccatgaaccccatcaacaccg

SEQ ID NO: 44686 - DNA, 258 bp, Glycine max
  Clone ID: 701042252H1
tcgaaattggcgctctgctacgaatccatcttcttctccaacttccatttcaccgatcaaattcaattcaatgggtgccaatcacagtcgcgaagatctgttggaatcttccgattcagagcaagaggagcatgaaaccttcgaagacgccaccgaaggaagcgccgaacggaaaccgtcaacgccgtcatccctcgatgacgtggaggccaactcaaagccttgaaatccaattactcttcaaattcaaccccggcg

SEQ ID NO: 44687 - DNA, 272 bp, Glycine max
  Clone ID: 701042255H1
caaaacgtttatagatcataactactacgtattggaagacagctttggtttcagttttttgtcatcactctcagctggtcggtgcttatagatccagcgccagcagattcaatttgacactggaagcaacttttcatttcaaagattaagtgaaaacatggctgtccttgctgcttccattgtgagcaaatctggcaaagttctagtttctagacagtttgtggacatgtctcgtatcagaattgagggacttctagcagcatttcccaagt

SEQ ID NO: 44688 - DNA, 274 bp, Glycine max
  Clone ID: 701042258H1
caccaccctattactacaaatcacctccacccccatcaccttctccaccacctccttactactacaagagtcctcctccaccatctcccgtttctcatcctccctactactacaaatctcctccacccccaacgtcgtctcccccacctccttatcactacgtgagccctccaccaccaaccaagtctccaccaccaccagtttacatttatgcttcccctccaccacccatctacaagtaagcttggaattaagaagcagcaacaataataag

SEQ ID NO: 44689 - DNA, 271 bp, Glycine max
  Clone ID: 701042259H1
gccacatgaaatacaacagatctagcagggatatatctacaattgtccaatgagctggccaaagtacaattaacttgtgttagagactaataagcgaatcatcagataacgacaaaaataactaaaaaaattggtattgatggtgggagggggtaaaataaagtgatgattggcatcttccatgagcaaatccagctccccagaagcatgtggttggttggttggcattcattgaatattggcttcgcatgaggcattttctgttatggag

SEQ ID NO: 44690 - DNA, 271 bp, Glycine max
  Clone ID: 701042260H1
ctttgataatctcctatcctttggttactaccgtaaaacctgtccccaatttgaatccatcctacacaacaaagtcacagaatggatccagaaggactacactttagcagctagtctcatgaggctccacttccatgattgctctgtcaggggatgtgatgggtccattctgttgaagcatgatggaagtgagaggacagcacaagctagcaagacactgagagggtttgaagtggtggatgatataaaggcagagttagagaaacaatgc

SEQ ID NO: 44691 - DNA, 273 bp, Glycine max
  Clone ID: 701042261H1
gttcttcccaactcctcagaagttgaatgtagtttggtgatacggagagaggttgccctgtcctgtcggtggctctgatctatgtatgacatttccacgatgctatatgctcgcttcgccatttcatcactagtgtcttcttgtcttggaagttgctatggaatctaggggttcaacaagctaaataaaagtaaggtgataaagcatggagtttttgaaaatcaagaagttcagaaaatctcagaaagcagatggagaaaaggatttggcaga

SEQ ID NO: 44692 - DNA, 273 bp, Glycine max
  Clone ID: 701042262H1
cgatgatgaataagaacacagacatcatcatgagttattcttattcttattcccctgccactccattctcgtcatcatcttcacattccatggatcccataatttggagcaaattgccacccgaaatcctcgaatacatactctcttttcttcctctcaaaaccttcttaaacctaagatccacttgcaaaggtttctggtctctcatattctctcctcctttcatttcgaaacactgttctcccactgcttcttcacccttctcttcattcc

SEQ ID NO: 44693 - DNA, 278 bp, Glycine max
  Clone ID: 701042263H1
cattcgttgacttgggctctctcttctcttctcttctctctcaaaatcgtttctctgcattttcagctaaacctgagcacacccaactgagattttagcttcagattccgaggtaagaggagaaagaagagaactaagtgctacccagagttcgatttttgggttggtcaacaaggtcaagatgtttctgagcttgatgggtatcatgtagatcaagaggggtgcgtgtgtggattggggaagcaatttgtttatgaagttgaagaagcatggataga

SEQ ID NO: 44694 - DNA, 275 bp, Glycine max
  unsure (1)..(275): unsure at all n locations
  Clone ID: 701042265H1
cttaaagcagaaaacctcaaggccttgacgnaggcttagaaggcaaacgaattattctttttccttctaagcctgcttcaagtccttgagttcagttcttacaatcacgaaaggatcaagttgaatgaaaattcaaccttgttgccgatcaaactcccactctaatttattcaatctgtgtgactaggtaggtgcaattacggcttgatgagtgtccttctgctgtaaagtgccaagtaacgatattaatctccaattttttttaaccctgacgg

SEQ ID NO: 44695 - DNA, 270 bp, Glycine max
  Clone ID: 701042266H1
caagcacccactatcactccctcacgacctcatgacaacaattcccgcaaaaccctttaacaacaacatggctgcagcattcacgagaagcctttcatccacctctcaactaagctcaaaatcaccaaacattaacatgttcgaggaaaatggtctcctttcacctcacatgtccgccacagcattgctccaaaaagctgcagaaatgggtgcaacagtgaatagtaacagcaacaacaacagcatgatgatgagtggagaaaaagctta

SEQ ID NO: 44696 - DNA, 276 bp, Glycine max
  Clone ID: 701042228H1
cctctctttgtgtcgcctggtcttggcatctccgcagcaccacccaccctggaccaggtcttcaacagagagaaagagaaggaaaaacacacacacacacacacacacacgttaaactaacattttttattagtaagaagacatggctcaacccagttccaacggggatctgaataataaccagcagggtcaggttcagcaacagcagcagcagtgggcggcggcgcagcgattcagtatcagcagcaatggatggccatgcagtacccggcctcc

SEQ ID NO: 44697 - DNA, 253 bp, Glycine max
  Clone ID: 701042194H1
ctcgagccgttcagttctttctggataagcttgcatcatctcttggtccacgcttttatactaacattttcaaatgcaagcaaatatcagaaactggagctcaacagatgctattagatacccaagctgtaaagacgattcttcttgaagttccttcccttggtagacagacatcaggtgcccctagttattccaagtttgtaagccgcgagatgagcaaagccgaggcccttttaaaggttatactttctcc

SEQ ID NO: 44698 - DNA, 277 bp, Glycine max
  Clone ID: 701042203H1
gaaggaataaactattacaacaatcttatcaatgagctagtggctaatggtatacaaccacttgtgactctatttcattgggatcttccccaagccttagaagatgagtatggcggattcttaagtccacgcatagtgaaagattttcgggactatgcggaactttgcttcaaggaatttggtgatagggtgaagcattgggttactttgaatgagccatggagttacagccaaaatggctatgcaaatggacgaatggcaccaggacgttgttctg

SEQ ID NO: 44699 - DNA, 280 bp, Glycine max
  Clone ID: 701042205H1
acctcgagcgattcggctcaggtcacaccgccgtatagttcacgaccgaaccgcactatttatctctttctccgccgcaaactatccttctccggcggcgccaccgtacaaccctcgatttaagcaaaggagcaacagaaggaggtgcttggttgcaaatggcggccaccgcaagcaacaacgacgtcgccgccgccgccgacggccccgtgatgagcctaatcaacaagcgcctccgcgccctccgcaagaagctgaaccgcatccttcccatggaaga

SEQ ID NO: 44700 - DNA, 281 bp, Glycine max
  Clone ID: 701042206H1
ctctttcaccagaaagtgacactgagagaagaaggaaaaactaaccaacaccacagcccctaatttcctttttctcacaatggcggcttcagtcgacaaccgtcaatacggcacccacataaacgccgtcgttcgcgcttgcggcccagacttcaatacccctctcccgtcggatttcgatctggactcatccagcgacgacgaagaccaaaacgacgacgcttcgtatctcaaggagttgatacaaaaagcgaacgcgcaaaccgaggcgtcgctgttgg

SEQ ID NO: 44701 - DNA, 274 bp, Glycine max
  Clone ID: 701042208H1
atccattagaagaaagaaaattaagcaaataacaagaaagaaacaatgaacgacttgttctccggttccttctcccgcttccgcagcgaccagtcctccccggaccgccaccacgacatcgagatgggcgccaccgcctccggcggcggtcgcggcggcgaggtgaaccttgacaagttcttcgaggacgtggaaggcgtgaaggaggaactaaaggagttggaaggtttggctcagagtctaaggagcagccacgagcagagaagacgctgca

SEQ ID NO: 44702 - DNA, 278 bp, Glycine max
  Clone ID: 701042209H1
aaagcattcaacttttggcatttttaggttatcttgaatccgattatcaatggagaccccatcgtccaccagaagagtaataacaagatcacagactttatctgcttccaatgatgctctcatcacagttttcagtgagtgattttttctcttacaatttcaatttttctttctccaaactcacccaaaacaacattactcgtttgtcttttgcaggaaatattgaagattccgaaaagaacacatcaaagtcaaaaacaagggtgcaacaacaacaa

SEQ ID NO: 44703 - DNA, 110 bp, Glycine max
  Clone ID: 701042210H1
cctcgagcgaatcggctcgagcacacacaaaaaaaactcccgtgtatattgttgcagctctagctagggtttcgccagtgcgatcgaagaagaacaacgacgatggcgat

SEQ ID NO: 44704 - DNA, 277 bp, Glycine max
  Clone ID: 701042211H1
aaaaaaataaaataaaaattggaaaaattccaattccgctctcgattttcgatttcggagtttgatagcaacgttggaaggaaaggtgagagcaaaatcgttggaagaatctggtttttgggtcgtggttgttgttttcgccatcaaaacaatgtcttcgccggacattgtctcgatattggagaactcgaaggagttcgatcgggtgaggaaagaacaagaggatattctgtcggagatcaacaaacttcacaagaatgctcaagcaactcctgaa

SEQ ID NO: 44705 - DNA, 205 bp, Glycine max
  Clone ID: 701042212H1
gaaaaaggggagtttcttattctttctagacgcttccattgatcggcgatttcttagacatggcggacatcacgaacacgaggaagtgaagggtgagtccttgttggagaagatttctgggaagatccacgaccacgattcgtcatcttcgtcggattccgacaacgagaaaaccagggcttctgactccttgaagtcaaaggtt

SEQ ID NO: 44706 - DNA, 275 bp, Glycine max
  Clone ID: 701042213H1
ctcttattcatccttctcttctgaaaaatccagatctctttctgcccttttctccgtcacgcttttcgtgaccggatctgtatggatttgatccagatctacacgccgatggtggttttggccgggtctttcatagatctggtgcgtagaggctcagatctacggtaccgaggtacaacagagaatcgatgacaagaacgcagatccgacggtagatccagccgattccgcttgttcgatcgctacagacccctgtatcggatcattaagcagcg

SEQ ID NO: 44707 - DNA, 278 bp, Glycine max
  Clone ID: 701042214H1
cagagagaggtatcacagtgaaacgaagaagccctaactacgcacgcactcattcttgagaaagctcaatattcattcgtccatggcactctcttctcgtctcttttccaaatccaaattgatctatggctgtcaaatacttctgcaaaaggagcatgctattccagttcgtcactttgctaaagagtctgcccctcctgcccttaagggagatcagatgctgaagaacatttttgtggaggtgaagaacaaatttgagactgccataggaatattaa

SEQ ID NO: 44708 - DNA, 277 bp, Glycine max
  Clone ID: 701042215H1
gcctccgccaaagcaaataaaatggatactgaaatggttgagagcattgatgtcacagatgatgcaaggagttttagctgggcagtggacagcgccataaggagtgagactgggtccatttttggagaatctcgtgtccgtagctttgcttcgttagtggacagtgccataaggagtagtagtgccagtgaagcagatttgggatcatccccttccccagtgcatgcttttgcctccgctgtggatatcaggactgttgctgcacgattattcaccg

SEQ ID NO: 44709 - DNA, 283 bp, Glycine max
  Clone ID: 701042216H1
tggtgagtgaaaatggcggtacccttgctctccaagaggatcgtgaagaagcgcgtcaagaagtttatacgcccccagagtgatcgcaagatctccgtcaagccaagctggcgcagacccaagggtattgattctcgtgtcaggagaaagttcaaaggatgcactttgatgcccaacattggttatggctcagacaagaaaacccgccattatctaccaaatggtttcaagaaatttgtcgtgcacaatgtgaaagacctggaacttctcatgatgcataaca

SEQ ID NO: 44710 - DNA, 280 bp, Glycine max
  Clone ID: 701042217H1
ttcaaatttaataattggcattgacttcaccaagagcaatgagtggacaggcaagcactccttcaaccacaaaagccttcattttactggaaacactcctaatccgtatgagcaagcaatctctataattggccgtactctctcttcatttgatgaagacaatctgataccatgttttggatttggtgatgcatctacacatgatcagaatgtgttcagcttttatcctgatgagtgctattgtcatggttttgagcaagtacttgcacgctaccgagag

SEQ ID NO: 44711 - DNA, 276 bp, Glycine max
  Clone ID: 701042218H1
gaactgtgatccatcgtcaatctttcagtaacaaacatgagcggactgttcttgttgctgtggctgctgctatcggcaacttgctgcaaggatgggataatgccaccattgcaggtcatatttttattcggttagccaattaagataacattcaaccaagtctaattggctttctatgctatgcaggatctattttgtacataaagagggagtttaatttacaaagtgaacccacaatagaaggtctaattgtggccatgtcacttattggagcca

SEQ ID NO: 44712 - DNA, 279 bp, Glycine max
  Clone ID: 701042219H1
gtccgtttcacaccttccttggataccttgagtccactaaagtgattgacactttccaaaaccaagccaacaacactgaagaaggaattaccatctttgttcctaaggacagcgctccaaatgctataaagaaaactaccctatccaacctcacctctaaccagctaaagcaagtgatcctcttccatgccttgccacatttctattctctggctgagttcacaagccttagccaaaccagctctactcccacattcgccggaggagattacactttga

SEQ ID NO: 44713 - DNA, 275 bp, Glycine max
  Clone ID: 701042220H1
aacttattgaagaattgagtactccagccccgggttcaaaggacctttatttttcttcaaagtactctaggtcctttattacccaatgcatggcttgcttatggaaacaacattggtcttactggcgcaataatgaatacaccgccctaagatttctctttacaattgctgttgccttgttgtttgggagcatatattggaaccttggctccaaaatcaaaaagcaacaagatcttttcaatgccatgggatccatgtatgctgctgttcttctt

SEQ ID NO: 44714 - DNA, 276 bp, Glycine max
  Clone ID: 701042221H1
gctgaacaaacctatgagtatactcctcctgaagctttgctgaatgctacatggtatcaagggccaacaagctcaactttgaaatatgacatgtggagcattggtgttgtgatgttagagttggtcttagggacaccaaatgtcttccagataaatgctttaacacgtgctcttttagacagacaactagaaggttggaatgagggtgtgaaggagctggcatacaaacttagatcattcatggaattgtgcattttaatccctggaatttccagg

SEQ ID NO: 44715 - DNA, 271 bp, Glycine max
  Clone ID: 701042222H1
ctttcacaacataacatattgctctctaattattctagtgttgctattgtgttgtcactttctctttgacgccatttttctagctatttaagaaaatggcaattgagcagcacaaggatgtggagagtggatatttgcaacagcccttcattcaaccagaggaggctgctgcttgtgaagaagttggatcagataagagtgtggaaaatggatccattggaatggtttttcttagcacacttgttgctgtttgtggttctttcacatttgg

SEQ ID NO: 44716 - DNA, 275 bp, Glycine max
  Clone ID: 701042224H1
gagacaagttggaagcttcaggtgggccagtttcatctcgttactcttttgctggcccttcatttcaccgccaataacttaatttgcattttttgaattccttgacttgtgttccttagtatctttcaaattctggtgactgaaaaaaaaactgtgagaaatcctacatacttgagcccttctggatttggaaaatcatttctgcctggtgagatttcaatatggtcaatatgatgattggtagctctggaactttagatgagaaggctagtttg

SEQ ID NO: 44717 - DNA, 274 bp, Glycine max
  Clone ID: 701042225H1
ctcatctgcttcccctagcaaccttcttcttacttctctccgcttcttatctccagattgctggggcggaagcacaaccgttgactagtctcaaacttaactctcatattcttcaggagtctactgctaaagagattaatgaaaatcccgaggcaggatgggaggctgctataaatcctcgtttctccaattatacagttgaacaatttaagcgccttcttggagtcaaaccaatgcctaagaaggaacttagaagtacacctgctatatctca

SEQ ID NO: 44718 - DNA, 274 bp, Glycine max
  Clone ID: 701042226H1
caaccactttgcttcagctatggagtttcgttcccttccattggttttctctctcaatctgatcctgatgacagctcatgctgccatacctccagaagtttactgggaaaggatgcttccaaataccccaatgcccaaagcaatcatagactttctaaaccttgatcaacttcctctttggtatggtgctaaggaaacccaatctacagatcaaatattcctgtatgatgctaagaaaacccaatcaacagatcaagttcctcctatcttttat

SEQ ID NO: 44719 - DNA, 252 bp, Glycine max
  Clone ID: 701042193H1
cttggaataagggtcattaggaagggtatccctccacccccagcaaagaagggccaaagtggagtcctatttgtatgcaaccacaggacagttttagaccctgtggttacagctgttgcattaggaaggaaaattagctgtgtcacatatagcataagcaaattcactgaaataatttcaccaatcaaagctgtggcactctctagggagagggacaaagatgctgccaacatcaagaacttgcttgaggaa

SEQ ID NO: 44720 - DNA, 256 bp, Glycine max
  Clone ID: 701042163H1
cgggacttgttcctgcctgctatacagaatctcttgaaagacttggatgcattggatccagcacacaaagaagcccttgaaattattatgaaggaaagatcaggaggaacttttgagtcttttagtaaggtgatgggtgctcatattggccttccatcatcagtgaccagcttctttggtgagagtggattgcttggaaagaaagaaaccacagagccaccatcagaagcaacagtgtctcccaaagctgctgcac

SEQ ID NO: 44721 - DNA, 262 bp, Glycine max
  Clone ID: 701042165H1
cttaaagcagaaaaactcaaggttttgaagcaggcttagaaggaaaacgaattattatttttccttctaagcctgcttcaagtccttgagttcagttcttacaatcccgaaaggatcaagttgaatgaaaattcaaccttgttgccgatcaaactccctaactaatttattcaatctgtgtgactaggtaggtgcaattacggcttgatgagtgtccttctgctgtaaagtgccaagtaacgatattaatctccaatttttt

SEQ ID NO: 44722 - DNA, 258 bp, Glycine max
  Clone ID: 701042166H1
cctcgagcgaatcggctcgagtgaaccgggagcctggaacgcgctgcagaaggaagaacaagggaggcctccggtttccgcggtgggaccgcttgtaagaatggaagcaggtcaggccgactcggagtgcttgacgtggctggacgagcagccacgtggaagtgttttgtttgtttccttcggaagcggtgggacactctcgagtgcacagatcaacgagctggctctcgggttggaaaaaagtgagcaacggtttct

SEQ ID NO: 44723 - DNA, 260 bp, Glycine max
  Clone ID: 701042167H1
ggtccctcgacctccgcacaaccccaactccaaggggctgtgcctgtcgccgtcgtcttccacgctcatgtcggaacccgacatccacgcgccgccgttcctgctccagcgcccgccgctcctgcagtcggcctcgccactcttcaagcagcgatcgtggtcgccggacgccttccgcgatgaggcgtggctccggcgcaaggggaactgcaagaaccgccgcagcaagagcgtcaccgatgaggacgtggacgagctca

SEQ ID NO: 44724 - DNA, 260 bp, Glycine max
  Clone ID: 701042169H1
ttttcatgtaggcaagtctatatccaggaaaagtattgtacctcaaaatgcaaaaaccagaaggttttaagttccatagtggcatgtatatattcattcagtgcccccaaatttcgccctttgaatggcatccattttccttgacttcagggccacaagaagactacctcagtgttcacattagaacactcggagactggagctaccaaatatatgatctattccaagaggcagtgttatcacgatcacaagggtgtcca

SEQ ID NO: 44725 - DNA, 256 bp, Glycine max
  Clone ID: 701042171H1
acagcattggccttgtaaatgctggacagtatcttgaggagacatatgggggtggactatttccaattttatacatatggggtattggattattagcagcaggccaaagtagcactattacaggtacttatgctggacaattcatcatgggaggttttctaaacttaaggttaaagaagtggatgagagcattgatcacccgaagttgtgcaatatttccaaccatgatagttgctcttatattcgatacctcgga

SEQ ID NO: 44726 - DNA, 257 bp, Glycine max
  Clone ID: 701042172H1
cataaacgccgcccaaaaccatttatagggttttcttttctttgccaagaaaatgagagagtgcatttcaatccacattggtcaggccggtatccaggtcggaaacgcctgctgggaactctattgccttgaacacggcattcagcccgatgggcagatgccgagtgacaagaccgttggaggaggagacgacgccttcaacacattcttcagcgagaccggcgccggaaagcacgtgcctcgcgccgtcttcgtgg

SEQ ID NO: 44727 - DNA, 255 bp, Glycine max
  Clone ID: 701042173H1
ctacatctcaaagtcttggatgactacaaaagagccactcaatatatggagtaagagcagtttcactgtagaaggtatatgggagcacttaaatgttacaaaggatcaatctgattacctttggtattcaaccagagtatatgtttcagatagtgacatcttgttttgggaggaaaatgatgtccatccaaaacttactatagatggtgtccgtgacatattgcgtgtattcatcaatggccagcttataggtat

SEQ ID NO: 44728 - DNA, 253 bp, Glycine max
  Clone ID: 701042174H1
gcagttcttaccggaagggttcgtggagcgaacaaaaggaagagggtttttggttcagtcttgggctccgcagcctcaggtattgggccatccatccacgggtgggttcttgacccactgcggctggaactctattctggagagcgtggtgaacggtgtgcctttcatagcctggcctctgttcgcggacagaggaccaacgcctttatgctcacgcatgacgtcaaggtggcgctgaggcccaacgttgcag

SEQ ID NO: 44729 - DNA, 238 bp, Glycine max
  Clone ID: 701042176H1
ggaagcttgtgtctatgaacaatatacacttccaaaactctatgtgaagatgcagtactgtgtttcctgtgctatccactctcatgttgtgagggttcgatcccgcaccgacaggaggaagcgtgagcctccacagagattcatcaggcgcagggatgatgcaccaagacctggtcagcccggtcaaggacctcgtcctgcgggcacagcagcagcacctgtcggaccctaaaagcaa

SEQ ID NO: 44730 - DNA, 254 bp, Glycine max
  Clone ID: 701042177H1
caaaacactattttattatcttcttcgtctgttctttgcattgaagaaaatttctttgaattgaagaaaacttgaaatcgaattgtgaaacagaaaataaaccaaaggaaatttttactgattgaattgcagagattggaaaaatggcgttgagtatgactcaacagatcgggaccctagctggtgcgacggtgccggattcctcggccggagaatcgaccgcggcggtgagtgccgccgcggtgtggaagtca

SEQ ID NO: 44731 - DNA, 183 bp, Glycine max
  Clone ID: 701042178H1
gacctttgtccatcttcaatgttctgttcctaaaaccataccatattctgcctacccaagaaaagttcctttttcccctttccccttctcttttcttcttcaaggtcaactccgtttactataaataatgaccactcttcttcaacttcaataatactcacctttgaatggattcttcttctt

SEQ ID NO: 44732 - DNA, 255 bp, Glycine max
  Clone ID: 701042179H1
cccatgtctcaaactccgaatccaacgttgtctctcctacccttgtcgaatctactacgaacactctaggggtgctgaagaatatgaaggtgttcgtgtacgagcttcctccaaagtacaacaccgattggcttgcgaacgagaggtgtagcagtcatttattcgcttcggaagttgctattcacagggcactgttaacgagcgaggttcgcacgtttgacccatacgaagctgatttcttcttcgtcccagttt

SEQ ID NO: 44733 - DNA, 256 bp, Glycine max
  Clone ID: 701042180H1
cagcaccatcctcgtgctcctcgaagctcgaaagcagcagcaacaagaacaacaacaacgttgtctttctcagcaaaacctacgatccgaggaagaggaaggaacgatgtcttcgtcatcgggaagcacagcagcagcaacgccgattctgaaggaggaggtggacatagtgattcccacgatacgtaacctggacttcttggggatgtggaggcccttcttcgagggttatcatttgataatagtgcaggacggt

SEQ ID NO: 44734 - DNA, 253 bp, Glycine max
  Clone ID: 701042181H1
ctcgagccgctttattctctttcagtagaacaacagcaacctctctgccttccagacccactttctggtatttggttccaatgaaacaatcttcttctccggggcacttggccttagccttagacaatccacgtagaacacttcacgtgtcttgtggctccacatcaccacatgcttcccagagatcatcaattcaggggggtgaagttttttcaggggtgtgttggaaagtatgcaatctgttattgaacag

SEQ ID NO: 44735 - DNA, 259 bp, Glycine max
  Clone ID: 701042183H1
cttttacaggatcagaagccatgtttgctgatcttgggcactttacacaattatcaatcaagattgcttttacttctgtggtttatccatctttaattcttgcatatatggggcaagctgcttatctatctaaacatcataacattgcacaagattatcactttgggttttatgaatctgtaccagagaaattgagatggcctgttctcgttatagccatacttgctgcagttgtgggaagtcaagccattatcactgg

SEQ ID NO: 44736 - DNA, 259 bp, Glycine max
  Clone ID: 701042184H1
ctttctctctcttctgttttcctttttctcgagaaaattgtgtcagggtttctgtgattgagcctgcaaacacttccttgagggcacaaaagattccattgtttgcttctttcagattaatttttttgtcagttcagatcttcaagaagaagaatccagagaagctatatatacatcatcgttgttctttgccaagacaaagaagaaaaatggtgagggggaaaactcagatgaagcgcatagaaaatgagacgagtag

SEQ ID NO: 44737 - DNA, 258 bp, Glycine max
  Clone ID: 701042185H1
agaagtctcttactattacacaattaagaatgaagggctctctctttcacctcctgtttgtgattctttttggactctctcattttgtatgcctcaaagcagtcccaattacaagaactgaaagccttatgcaagatcccaaagttattcatcatgcactggataatatccacaaccacaagattatcactgagataaaggggcagcaggaggagccattttttgctgagaggatggacttggaactccatgactacc

SEQ ID NO: 44738 - DNA, 255 bp, Glycine max
  Clone ID: 701042186H1
gatttctgcaatctacaaaaattcactatgggagtcacaacctttacacaggaatactcctcctctgttgccccatcacgcatgttcaaggccttgattgtagactccagaaatttgcttccaaagctcttacctcagtttgtaaaagatgtgaatgtgatccaaggtgatggtgaagctggaagcattgaacaagttaacttcaatgaagctagccccttcaaatatctgaaacacaggattgatgtgcttgac

SEQ ID NO: 44739 - DNA, 87 bp, Glycine max
  Clone ID: 701042187H1
agcccttctaaaacgccttactctgtatcttctttcatcatccaaaaaaaaccattcacacaacgtaaacccgcgggcttcccaaga

SEQ ID NO: 44740 - DNA, 249 bp, Glycine max
  Clone ID: 701042188H1
cacctctccccaaaaccctcgcgccgcttttttttctctttcattatttttttaccattttttttatggacctcttcaccggcgatcacttccccgtccccgaccacgtcgctccgttccccgattccggcgacctcctcttcgccgccgacctcctctcccaccgccacaacccccagaagttccgccccatcaggtccgtccccaccgcccccattgccaacccttctcctccccctctctcgcacg

SEQ ID NO: 44741 - DNA, 251 bp, Glycine max
  Clone ID: 701042189H1
gccgaagataacaagaccgaagctcagcctcgagctaaacgggccaaaacctccaagcctcaatccgaacctgagtacttcgaagataagcgcaacttggaagatttgtggaaggaaacattccccgttggaactgagtgggaccaattggatactgtctatcaatacaagtgggatttctcgaatctagaaaatgcgtttgaagaggatggcgtgttgtatgggaaaaaggtttatctcttgggttgcac

SEQ ID NO: 44742 - DNA, 249 bp, Glycine max
  Clone ID: 701042190H1
gcgaatttacaaaactagccaggaacaggccctgtctttccgatattcaccatctctttctctctaatccaaaaaaaaatctgttgtgaacaaacacacattattgtttgttttcatcccacggaaaaatcgatcaggcaaaacaaacaaaggtgaaactgaataggtgcgtgtttgtgttgatgggctaagaggacagagaaaaagaaagaaagagtataaaatcaaatctggcaaatctcgtggggt

SEQ ID NO: 44743 - DNA, 253 bp, Glycine max
  Clone ID: 701042191H1
aaacaacagagtttatttctttttggttccttggttcacgctggctgcaaggcttgtgtttggtgggagcagcttctcaccgtgacgctgctctacgaagacgacgacaacctcgtgtgacaacatcaaataatgggaaaaggaaacatggaactcgagacaaacaaggtctatgactacgaggatgcacgaggggacgttgaagtcccagataccgctcatcagataagcactgattcatggtttcaagtgg

SEQ ID NO: 44744 - DNA, 256 bp, Glycine max
  Clone ID: 701042161H1
catcaacacagtgtcacatccattaacgtgctatggtgtttagttaggaaacaccggtggtaaaattgtacgaagcagaaagaacatggctccgtctagcaaggctgagaaaaaggctgccgtggatgcagctgcatggatgttcaatgttgttacatctgttggaatcatcattgtaaacaaagctttgatggcctcttatggcttcagttttgccacaacattaacaggcatgcactttgctaccacaactttg

SEQ ID NO: 44745 - DNA, 252 bp, Glycine max
  Clone ID: 701042192H1
atcatcagccatgtccaacaatctaaggtcttcgagttactcttccctaacccgttcctacatggcaacaacaggctcagaaccttggtccttttttctcatcttcgttttcctgtgacctttttcttcctttcaaacacacatacgaaagtcctccttttttcttgtttccttttgtctttctttctttcttggtggcagaaaaaaatgggtattggagagaagagtccaagcaagagtttcaatctgcac

SEQ ID NO: 44746 - DNA, 264 bp, Glycine max
  Clone ID: 701042121H1
tgacaagggaggttgatctagaatactctgaggcagttaaagccacgggcttgacagacagtttgttgaaactaagggaggaagtttcaaaagcaaatgcagataatcaaattgtcgatccattgctgaaggataagatagaaaagctaagggtggagtttgaacagcaactgcgtgcagctcccaattatggaaggctgcagaataagtttacctatctgagcgaattatgtaaagttaagcttctgtcagatgcaaacaagg

SEQ ID NO: 44747 - DNA, 262 bp, Glycine max
  Clone ID: 701042122H1
cagactagagagagtaagagtaagagaagagatggaaagagtagcatcagtatctcggccactgaaaatatacttcctcccattcttctcaccggggcacctaatccctctggtccagctggctcgcttggtggcggcacgaggccagcacgtgaccatcatcaccacccccgccaacgctcaactcttcgaccagaacatcgacaaggacaccgcctccggccaccacatccgcgtccacatcatcaagttcctcaacgcc

SEQ ID NO: 44748 - DNA, 256 bp, Glycine max
  Clone ID: 701042124H1
ctagacctcgatcttgatctcgacgcacctcgccgtccctcgcagtagctgaacctcacagaagaagcctccttcaccggcaacgccagtggacctccagaaaccgtcgtcggcagcgtttcggacgacgaaaattgcatgcttctggccgcctacccctggacgacggcgacgcatttgggattgaagactgacgccgtcttctcggcctctgaaaacaggttataatttcaataggaattcagatcttataatc

SEQ ID NO: 44749 - DNA, 258 bp, Glycine max
  Clone ID: 701042127H1
aaaatgtggtttcttggttggaaaggggcatctgggttctcagcctcttccacagccgaacaagtcactcaagggattgatggaaccgccctcaccgccatcgtcacaggagcaacaagtggccttggtctggagaccacccgggttcttgcattgcgcggtgtccatgttgttatggcagtaaggagtctggacagtggtaagaatgtcaaagaaacaatacttaaggaaatcccctcggctaaaattgatgtcatg

SEQ ID NO: 44750 - DNA, 247 bp, Glycine max
  Clone ID: 701042131H1
ggttcgctgaactatattggtttgcaggtgcaaccacaacatctggttatgccttcaatgcaaggccatgaatagtttagatgcttctacgcatcttatttatttcccttgaatgcttgtacgcatggaatgggtggaaacaatggtttggtgatttaatatttaggttctcgtttagaaggcatcagtgtcagaattttgttacggtactaaggtagatttttattaatacattatacatgtcata

SEQ ID NO: 44751 - DNA, 254 bp, Glycine max
  Clone ID: 701042132H1
ggaaaaaattggaacctgcctctgttaaactttgtatttttctgagtgggtgggttgattgagagtgctgtgcaagctttggaactttttcccaacctgctacttcaatggccactgaagaggttaacaaacctcaatcacttcctccataccctgagatgatagtgaaagcacttgaagcactgaatgagccaaatggatcgaacaagtcagcaatatcaaagtacatagaaacccactagggtgagtcgcca

SEQ ID NO: 44752 - DNA, 264 bp, Glycine max
  Clone ID: 701042133H1
cttcaaccttggcctttcactttctcttcctatctctctctcacgttcacattccatgccagtgttttaggcagcaccccttcatattctttcaaccagacacagagcccccaaaccctgaagaagccagagtcagagagcaacagagtaatactatagtggaatatttgttggaccatgaagcataaagatggaaaaccgattaatcagccaaataagaaccgggctgtgactttggcagtcactttaattgctctatgtggt

SEQ ID NO: 44753 - DNA, 262 bp, Glycine max
  Clone ID: 701042134H1
cttgcggctagggtttagcgcagctcttctagatttaaggacgatgggtaaggaaaaggttcacatcagtattgtggttattggccatgttgactctgggaagtccactaccactggccacctgatctacaagcttggaggcattgacaagcgtgttattgagagatttgagaaggaagctgctgagatgaacaagaggtctttcaagtatgcctgggtgcttgataagcttaaggctgagcgtgaaagaggaatcacaatt

SEQ ID NO: 44754 - DNA, 262 bp, Glycine max
  Clone ID: 701042137H1
aagatatggcaatgttcacgtaccacgttgaaacggttcaatcatggttggcactgagcagacttcacatactgatccacttagtggcagtgttgtcgctgtgttactaccgcataactcacttgttactggaacctccaacagcgccatggcttctgatgaccgtagcggagcttcttctctcggtgctctggttcttcaaccaagccttccggtggcggccggtgtcgcggagcgtcatgacggagaagctgccgaggga

SEQ ID NO: 44755 - DNA, 175 bp, Glycine max
  Clone ID: 701042138H1
cttcttcttcttcttctctctctctctctctctaaatattttactctctcttcagcgaattcgtttttctcttcaagcttcggctatggcgtctggatcctcgggtcgcggaaactctgcctccaaaggcttcgatttcgcttccgatgacatcctctgctcctacgacgactac

SEQ ID NO: 44756 - DNA, 257 bp, Glycine max
  Clone ID: 701042140H1
gcaggttgagtatcccaacaatgtacatttaatacgtggaaaccatgaagctgcagatattaatgcactgtttggtttccgaattgagtgcatagagaggatggtaaggaatttcatgtactagaaattgtgtcttgtttatattgggttcatcaaccaatcatgaaaaattgttgatcagggtgagagagatggaatttggacatggcatcggataaacaagctgtttaattggcttcctctggcagctttaattg

SEQ ID NO: 44757 - DNA, 251 bp, Glycine max
  Clone ID: 701042142H1
gggaaatccataaagcgaggcattatatcattcctcaacgttgatgacagcagattcacccgcgccgatgaaattgaattcgccccatatttttcaaagcacaagtggggtttgttccgccgaaaaaccaagcttctttgtcgcaagtgttgcaaccatattggatatgcctacaacgatcgcacttcatcattttttcccttcgtatcaaacagaacagaaccatcaccacccaccgaggcatcaaattc

SEQ ID NO: 44758 - DNA, 256 bp, Glycine max
  Clone ID: 701042143H1
gagtgagatagagagagacgcttcgcaaatctcaatcgaatctcagaaaaatgagagaaatcatcagcattcacataggtcaggccgggatccaggtcggaaactcctgctgggaactctactgcctcgaacatcgcatccagcccgacggcatgatgccttctgactccaccttcggtgtagcccacgacgccttcaacaccttcttcagcgaaaccggatctggcaagcacgtcccccgtgctgtcttcgtcga

SEQ ID NO: 44759 - DNA, 244 bp, Glycine max
  Clone ID: 701042144H1
gttcccaaacacgcaacctcaactttgttctgtttcctctgatgtcccagggccacatgatccccatgatggacatagcaaaaattctggcacagaacggtgttactgtcacagtggtcacaacccaccaaaacgcatcacgcttcacatcaactttttctaattcccaaatccgattactcgaagttcaattcccataccaagaagcagcgttgccagaagggtgtgagaatctcgacatgtt

SEQ ID NO: 44760 - DNA, 257 bp, Glycine max
  Clone ID: 701042146H1
gagcaggactttctcaacatgtacttcaaggacaagtacaagccaataccgaacatgtacaaccttgtgctggccatgttgtggcgtcaccctgaaaatgttgaacttgataaagttcaagtggttcattactgtgctgctgggtctaagccttggaggttcactgggaaggaagagaacatggatagggaagatatcaagatgcttctgaagaagtggtgggacatatatgaagatgagacactggactacaataa

SEQ ID NO: 44761 - DNA, 101 bp, Glycine max
  Clone ID: 701042147H1
gaaggaaccagattccttaatcagttgtgtatgcttaagtcatgtatttggagtggctgaatgtatttgtatttgtcattaataaagagagttgtgttagt

SEQ ID NO: 44762 - DNA, 255 bp, Glycine max
  Clone ID: 701042148H1
aagaaaatcctcacccattttcttcgtagccaaacactctgaaattctcagttatgtcgtggcaagcgtatgtggatgatcacctactgtgtgaaatcgaaggtaaccacctcactcacgccgctatcatcggccaagacggaagcgtttgggctcagagcaccaacttccctcagttcaaacctgaggaaataactgccatcaataatgactttaatgagcctggatcacttgctccaactggattgtatatcg

SEQ ID NO: 44763 - DNA, 261 bp, Glycine max
  Clone ID: 701042150H1
aaaaaataattaaggtgtttttctttaaatgggttggttgattggttcaatgaaccgatcaagaccacagcaggttcatggggatgcgaggattaagacgctttgttttttaatcttccgatgtcactcttgtttgttagtttgtttttttattctttatttcaataagtactgtgcaagtaggttagagttgggtagaagggcatgttcatggtgttaattactatgttatgtatgcatgtgagtgctgctatcgatggc

SEQ ID NO: 44764 - DNA, 260 bp, Glycine max
  Clone ID: 701042152H1
tgacgcctgtgctgtgctctgaggggccatagtttgggaccctttgaagcctaatctccatccaaacccatttccacgggaaattgccttggaaaagaaagagcgaagaggaaaatgcagaatcacaggctgaagcagcagcagcagcagcaacaacaagctcttatgcagcaagctcttctccaacaacagtctctcccccaccctggcctccttgctcctcctcagattgaaccatatccaagtggaaatttgcctcc

SEQ ID NO: 44765 - DNA, 256 bp, Glycine max
  Clone ID: 701042154H1
atctagaatggctttgaagcttgtaaatctagggtttcactcatcgattccgtgttctccgaggcccttgaaagatcggttcgtgcttcggtcttctaaagtggagcaaatatcgtttacggaatctgagaactcactcatcgaagcccttcttggcatccaaggacgcggacgttcttcttctcgtcagcagctcaatgctgttgagcgtgctgtacacgtcctggagcggttagggggtgtacctgatccgaca

SEQ ID NO: 44766 - DNA, 258 bp, Glycine max
  Clone ID: 701042155H1
gtttcagtgagtgatcggtgttcacttgatccttcataagtcgtcatcatcatcatcatcatcaccgttgattgtcgaagatgccgatcagaaacatcgccatcggaaggcctgaagaggctactcaccccgacacgttgaaggcggggttggctgagttcatctccaccttgatcttcgtgttcgccggttcaggttccggcatcgcctacaacaagctcaccgacaacggcgccgccactcccgccggcctcatct

SEQ ID NO: 44767 - DNA, 257 bp, Glycine max
  Clone ID: 701042156H1
acacccctctcatggcatcttcttctggtagtttagacacctctgcaagtgcaaactccttcaccaacttcaccttctccacacaccctttcatgcccacttctttctctgaccttcttgcttctcccacagacaacaacaaaccaccacatggtggtggtggtggtttgtctgagagaactggctctggtgtccccaaattcaagtccacaccaccaccttctctgcctctctctccccctcccatttctccttct

SEQ ID NO: 44768 - DNA, 253 bp, Glycine max
  Clone ID: 701042158H1
tctgtctctgtgtttgcggctgaggattccgaacgagcgaccttcttcgtttctcgcaaagtttaagtcctcatgggtaaggaaaagactcacatcaacattgtcgtcattggacatgtcgactctgggaagtcaactaccactggtcatttgatctacaagcttggaggtattgacaagcgtgtgattgagaggttcgagaaggaggctgctgagatgaacaagaggtcattcaagtatgcctgggtgcttg

SEQ ID NO: 44769 - DNA, 258 bp, Glycine max
  Clone ID: 701042159H1
ggagaaggagaaagagaaagaatctaagctgaagaacaagatcttcaaaatactgccaaaagcagcggctgcagcagtgagcatgacattccaaaaccctcccttcagcccaggcagggatcacaagttcaaacaccatggcggcaaagggttcttctctggccctatgattcccgttgaagccagaagaaaatcaaaggatggttgtgttgaaactcaagaacccacttcccccaaaatctcctgcatgggacagat

SEQ ID NO: 44770 - DNA, 256 bp, Glycine max
  Clone ID: 701042160H1
gttacaatggagttagaaatgcaatgggatgggaacccaagtattatacttgatattaaaactcttcttggtgttgcactaccggtgcaggtaaaaaatattggatttacgggtgtttttaggttgatcttcaagccgttagttgatgaatttcctggttttggagctgttagctattcattaaggcaaaagaaaaagttggattttactctaaaagtcattggtggcgacatatcagcaattcctggattatatg

SEQ ID NO: 44771 - DNA, 258 bp, Glycine max
  Clone ID: 701042119H1
cattaacaaatattaatggttaaatttatttgttttttttcctgtgagattaaactcaaccattttttttccttcttttttaactattcaactcaatcttatatctcaaattaagtttattttttggttttcctagaaattaaattattctgagaaattaactatatttaacgagcgagagccatttcattggcccatattagttcttgtgcttaggaaactttttgggtagaaaaaaaacagtactaagagtttgac

SEQ ID NO: 44772 - DNA, 256 bp, Glycine max
  Clone ID: 701042083H1
tcagaaggagaaagaacggagaagttgttgagggcgaggccagcggcgtcttcctcgacactttgcttgaattcgctgaggacgagaccatggagatcaaaattaccaaggagcaaatcaagggccttgttgtcgactttttctctgcagggacagattccacagcggtggcaacagagtgggcattggcagagctcatcaacaatcccagggtgttgcaaaaggctcgtgaggaggtctacagtgttgtgggcaa

SEQ ID NO: 44773 - DNA, 256 bp, Glycine max
  Clone ID: 701042085H1
atttcattccatcataatggccgcctcagcgatggtgtttgatccgccgcccttcctcccgtcgacaaagtccgcctacctccaaggcggtgacgccacggtcttcgatgaggaagatctctacagccgcctcaaatccctagtgcgtcactcgagttcgtcgacatccaggaggaggatgtgaaggacgaactgaagaatctcaggcgcgagctacctccgcgcgatggaggaggtgaagcggatccagtcggtg

SEQ ID NO: 44774 - DNA, 256 bp, Glycine max
  Clone ID: 701042086H1
gtcgggtgtactttcttgcgaaaccgagagagcgaaggggcaaacacaattttttttatcttctttattattctatgtagagagagagagagagaaaatgttggggatcttcagcagttcagtggtgtcgccgccggaggagctggtggccgctggcaacagaacgccgtcgccgaagacgaccgcgggagaagctgctgaaccggttcgtggagagctaggcgtcggcggtgtctctgcaggttggggaacacgt

SEQ ID NO: 44775 - DNA, 257 bp, Glycine max
  Clone ID: 701042088H1
ctcatgcagtgatggaaccatttgccatagcaaccaataggcatctcagtgtgctccaccctatttataaacttctttatcctcactaccgcgacactataaatatcaatggacttgctaggcagtccctgattaatgcagatggcattatagagaaatcatttttgcccggaaagtactccattgagatgtcttcatccgtctacaagaattgggttttcactgaccaagcattaccagctgatctcgtcaagaga

SEQ ID NO: 44776 - DNA, 248 bp, Glycine max
  Clone ID: 701042090H1
gtgagtagaaggcatagagactagcgcggagatagcaatccatctcatacatttcaatggcaactcaaggtcaagtcattacctgaaaagctgacggtggcctgggaatccaacaagcccttaactgtccaagacgttcaagtggctccgcctcaagccggcgaggtccgtgtccaaatcctattcaccgctctctgccacaccgatgcttacacttagggcggccaagatccgaagtctcttccctg

SEQ ID NO: 44777 - DNA, 256 bp, Glycine max
  Clone ID: 701042092H1
ttcttcttcaattcatatcatatcaattagatttgttttcagagtttgctagtgagataccatggagaactacaacagcaatgacttttggaaattcagtgaccagttgaggcttgaatctgggttggccaatctgtctctgaatgattattccgtttggagcaacagctacagctccaagaggcctgatcagaggaggaagtttcgtgtcaagggcagtgatttctacaactcatcaaagcctctttatgctgat

SEQ ID NO: 44778 - DNA, 256 bp, Glycine max
  Clone ID: 701042093H1
caacaaacacaacaacactctctcttctcgctcttggcttttcgctcttcactcactctcattcattcatttccaccgaacatggatcctgtaagcgtgtggggtaacacgcccttggcgacggtagatcccgagatccatgacctcatcgataaggagaatcgccgtcaatgccgcggaatcgagctcatcgcctccgaggacttcacctccttcgccgtcatcgaagccctcggcagcgctctgacgagcaaat

SEQ ID NO: 44779 - DNA, 260 bp, Glycine max
  Clone ID: 701042094H1
gtggaggaacattgtgcctggccttcctgctgttattctcaggtgtacgtgtaggctcgccaacgctgtctctgctggcaccattctcgcttctagacaagtgagaaggaagcttgtagaagattggttgccggttttggttgtatgcaaagataatgtttcaccaatatcacccagcaacaaatcgttgtatctggaactggaagacacattcttgcgaatcatctccacattgcctatgtcagatgctcaagaattgt

SEQ ID NO: 44780 - DNA, 268 bp, Glycine max
  Clone ID: 701042101H1
gcggcggcaacagggagagaagatgaagttcaatccacgtgtgtcgagcagccgccgcaagagccgaaaggtcatttcacggcgccatcgagcgtgcggcgggtgcttatgagcgcccctctgtcggcggactgcggtctaagtacaacgtgaggtcgatcccagtacggaaggaggacgaggtgcaggtgatgcgaggaacatacaagggtcgcgaggggaaggtgactcaggtctaccgtcgaaagtgggtgattcacattgagcg

SEQ ID NO: 44781 - DNA, 266 bp, Glycine max
  Clone ID: 701042102H1
cactcgagcgaattcggctcgagaattaataacaagctagctagcagttcgattttgtactaagtgaggtgccaatctggtgaagatagctcttggtactttggatgactcttttagcgctgcctctcttaaggcttatttcgcagagttccacgcaactctgatttccgtgttcgctggtgttggatcagccatcgcttacaacgagcttacaaaagatgcagccttggatccaacggggctggtggcagtagctgtggcacatg

SEQ ID NO: 44782 - DNA, 265 bp, Glycine max
  Clone ID: 701042104H1
ctcctcgttagcagttttcgttctccattctctccattccttcgccatgtccgatctcggctccgatcttcctgctgccgccgccgctcttagtgctgaggatcgtgctggtctcgtgaatgcactcaaggacaagctccagctcctcgctgggcaacatgtggacatcctggagacactgccacccaaagtcaggcaacgcgtggaaattctcagagatctgcagagtcaacatgatgaggtggaggctaaatttttagaggag

SEQ ID NO: 44783 - DNA, 263 bp, Glycine max
  Clone ID: 701042105H1
gcaatcttagcagaacaaagatgagtctcaatgtagatgatgatgagttagtgagtgaaatggctgaagcacccagttttgcttcatctctaccagtccccaatgttcaagaaatggtaaggaataaccctttgcaggttcctgaaagatatgcgaggagtcaagaagagttggagaaagtcaaccatatgcctcacctttcatctgaggtccctgtcattgatttagcactgctttcaaatggaaacaaagaggagttgttg

SEQ ID NO: 44784 - DNA, 263 bp, Glycine max
  Clone ID: 701042106H1
attatctctctctctctctgtttcgctttcaccgaagaataacttgactttcccgaactccacctgagaaaaagatacccttaattcgcaggcgcgtcttgtgttggacaacaaccacaagatgattaacttcgaagaaaccgagttgcgactcggcctccctggcaacgactcagcactcaagggaagtgctgccaagagaggcttctctgaaactgcttctgttgatttgaagcttaatctttcttcttgcattaacgact

SEQ ID NO: 44785 - DNA, 263 bp, Glycine max
  Clone ID: 701042107H1
caaaccgaggcctcttcacatctgaccaaactctcttaactaatgctgaaacagccagccaggtgaaacaaaatgccagggatccctatttatgggcaagtcaatttgcagatgcaatggtgaagatgggtcaaatcattgtcttaaaaggtaatgctggagagattagaacaaattgcagggtggtcaatagttagcaatagtggtgaaggactcaagtgcctgcagcaaagaagatttacaaattctaagtcatgtttctt

SEQ ID NO: 44786 - DNA, 245 bp, Glycine max
  Clone ID: 701042109H1
tcaatctgtcaaaaccagttgtgtgtattgtttctgccaggcaaatatcaatagcaatagcaggaatgtcaatgttgagatcagtttgtcagttaagggtgggagtcacaacccaaaaaccttgcctccatccctcaatcttattctccttttccctctctcacaacactcacactctcagttctaaaattattccccagaaccttccgttttcacccaccttcagtgcccctttcaccctttgt

SEQ ID NO: 44787 - DNA, 260 bp, Glycine max
  Clone ID: 701042110H1
aaaaaatcacaaaccaagcttaattacccaagagagaaattaagaagctagtttgcttgttcttcggtgaactcagggagtcagatagataatactgatccctcgagatattgagattcatctaagagattaatatcatcctacccaaccacaagcttagattgacacaagatggaagtggtggtacaaagtcctagtagtccaaccatggataatttcgattttggtggcaacatgggttcgatctatcaaagtgtcct

SEQ ID NO: 44788 - DNA, 261 bp, Glycine max
  Clone ID: 701042111H1
actccgtgagcaagttgaggaacgacttgacttttatgacaagggagttgcccctcgcaagaacatagatgtcatgcaggctgctattgaaagtgctgaaaacaaagatacagagatggaaacagaagcacctgctgaagtttcaggcaagaaaaccaaaaagaagaaacaaaaagctgctgatgctgaagatgacgtggctatagatacaaatggtgatgctgtggaggatcataaatcagagaggaagaagaaaaagaa

SEQ ID NO: 44789 - DNA, 260 bp, Glycine max
  Clone ID: 701042112H1
cttttcttcttcctctctcttcgttctctctctctctctcttattcctttctctccgaatccacgtcctagatccgttgttctcttcccacagttctcactgaatcaggatccattttgataccaagttgctgttgaatatcgagtttgctctttagagatctgtttccctctagacaacggtctgtgtgacctgttattttagttgaatcgaagccgcgaccaaatcttcctgatctttgcctgaggtgatggcatcgg

SEQ ID NO: 44790 - DNA, 256 bp, Glycine max
  Clone ID: 701042114H1
gtttaatatcactaaccacttcctcgttgaatcataacataaccacttggtctgtgtttgtttttgcaacttcatattgtacataaaaacatggatgatgaatatgctaagcttattagaaggatgaacccaccaagggttgtgattgacaacaatgcctgtgaaaacgcaactgttattcaggttgacagtgtcaacaaacatgggattctccttgatgttgtccaagttatatcagatatgaaccttgtgataa

SEQ ID NO: 44791 - DNA, 261 bp, Glycine max
  Clone ID: 701042115H1
tttcaatttctcgtcgtccctcattatggctcgtctctcgatcgtcgccatcgtcgccgccgtgctcctcctggccctctccgccacccccgcgacggcgcgtccctgcaggagcttcataatctcctcctactccttccgcaaccctaactccaacacgttcgccaccatcaccgagatccgatccttcacccctctctacatcaccgacaaacccccctcctatgcccttttcttcccccacgcgactcagctccctca

SEQ ID NO: 44792 - DNA, 110 bp, Glycine max
  Clone ID: 701042117H1
ccaatattgttaactgaatatttcagactaaaacaacgagttgaaaaaatattttcatgtgttgaacagtaactaaataatatgggttttaatggaacggtttgtttttc

SEQ ID NO: 44793 - DNA, 261 bp, Glycine max
  Clone ID: 701042118H1
tttcatttctacatccctggctctgttccgtcgatgacgatggcgtttagggtgcgaaaccctgacctccgctttctcattcttctctctctcttgtccatcacttccgccaaggtcttcttcgaggagcgtttcgatgacggatggggaaatcgttgggttaaatcagattggaaaaaagatgagaacctggctggggagtggaaccacacctctggccaatggaatggagacgctaacgacaaaggtattcacaccagt

SEQ ID NO: 44794 - DNA, 260 bp, Glycine max
  Clone ID: 701042080H1
ggccattggtaccggcatttttgactatgtctgggtacaattctataacaacccttcgtgcagttatagccaaaacaatttagataactttctaaaatcatggagagagtgggccacatcattgaaagtaggtaaactgtttctggggttaccagcagatgaagctgcagctccggccggaggttatgttccggctgatgtattaatgtctaagatcttacctgaaataaacaagtcaacaaattatggaggtctcatgt

SEQ ID NO: 44795 - DNA, 263 bp, Glycine max
  Clone ID: 701042044H1
cagagaccttccctttccgccgaagaactgttccttggcggaaagattagacctctcaaacccctttccccttcgtcgaataaaagaagagagaaaagggttatcgaagaatcatcatcactattatcatcaccacctccacaacgtaagctaggtagggaaagagcttcatcattttccatttcctctgctacccctttaaaaggtcgcagaggaagtggaattcaagtcgtgtcttgtgatgacacgtcatcacaagggga

SEQ ID NO: 44796 - DNA, 263 bp, Glycine max
  Clone ID: 701042045H1
caaattacgaaccctgaacctctttgcgaattcagctgaaccttgatgggaaatctgagatttctgataggaaatagaaagccccaaaacattaccttagaataagggatttctcccgttactgaaggaaagacccccatttcatagcgcctggggaacgcaagtttgatcgaggattggagaggagaggtggaatggaagaaaaggcgaaggatggatctgtcttaaggatcttcagtcttacttggttagtagttttagat

SEQ ID NO: 44797 - DNA, 261 bp, Glycine max
  Clone ID: 701042047H1
cgaggatccgacccggatccatggggtgcgtgagtcgaagcaagcggtgtcggtgacgccggcgattgaccactccggcgcgttccggagcaatgcgggtggtctggccgagccggagaagaagaggagcaagaagaggaccgagtctggtggagcgagtcagagcgaggtaggtgagtcggggagaacgagttccaattgcgactcgctcagcttcaggctggggaacctccacaagtacgtgcagggcgaacacgtcgc

SEQ ID NO: 44798 - DNA, 266 bp, Glycine max
  Clone ID: 701042049H1
tgaggacaaaaacgaagaacggaaagccacagatggcaatgagaattgatgttccagccactaatccaactcgagcaattacagctatcactagcatgctgtgggaggatttagtcaagaatcccaccggagacttggttcacaagagcaagctccaatgtgctgagaaaatgattagaggtgcctttgtcgagctctataaaggatttggcctactcaaaacttacagctcactcaatatggtagcatttacaaagatattaaag

SEQ ID NO: 44799 - DNA, 267 bp, Glycine max
  Clone ID: 701042050H1
ctcaaaaacagagtagcctacacgtatcagagagagtgagagaagagagagaatatttctgttcgtgcagatagatagatagatggctcggagctccacaagaatgaaatgggtctccatcttcacacttctattcctctcccactcgcccctcacaaccttcgcagaagatgggctagtggcgaatggagattttgaggttagcccatcaagtgggttccctaacgaggcgattgtggagggccccagcgaggtcccaaactggaa

SEQ ID NO: 44800 - DNA, 261 bp, Glycine max
  Clone ID: 701042051H1
aaagatagaaaaaaaaacactgcacaaaacaatggctttgaatttgattcatcgaccagccactaaaccaccatcttcctcctcctctttcgtcacccctcgccctttgcggaccacacagagcatccctgtgaggaactcgcggcgctccatcgccgtgcgcgccgccgccacggaggctcctgtggctactattacggcggcaagggagtgcagggtgaagtcggtgaaggcccggcagatcgtggacagccgcgggaa

SEQ ID NO: 44801 - DNA, 263 bp, Glycine max
  Clone ID: 701042052H1
gacctccgtgaatcgataagcaaccaaaccgacgtcgctctgagcatcacaaagctcctgttgtcgaaaaacgctcgggacagtaacctcgtgtactcgccgctgtcgttgcacgttgttctgagcatcatcgcttctggctccaagggccccacactcgatcagcttctctccttcctccgatccaagtccaccgaccatctcaactccttcgcctctcagctcgtcgccgtcgtgctctccgacgccgctcccgccggcgg

SEQ ID NO: 44802 - DNA, 257 bp, Glycine max
  Clone ID: 701042053H1
aggcgctgctgtttctacgattcatgttaccccagaagatggtttcagttatgcaagcttcgaaactgttggttatgacttcaaagcggtgaatctgaacgaaatggttcagagggtattggcatgtttcctcccaactgagttttctgttgcagttcatgtggatggtgcaagcaagtcgtttgagcagacctgctttctggatgttaagggatactgtcgtgaagagaggagccacgaagggcttggaatgggtg

SEQ ID NO: 44803 - DNA, 259 bp, Glycine max
  Clone ID: 701042054H1
atcgtgctgaatggcatggatcagatgttgctatcaaggttttaacagttcaggatttccaagatgatcaattgacagagtttctaagagaggttgcaataatgaaacgagtacgtcatccaaatgtggtgttgttcatgggtgcagttactaaacgtccccatctatctatagtaacagaatatttgcctagtttatttcgcctaatacataagccagcatctggtgagattctagatccaaggagaagattacggat

SEQ ID NO: 44804 - DNA, 258 bp, Glycine max
  Clone ID: 701042055H1
cacgaacagaagcttgactgtggtggtggctacatgaagttgctcagtggggatgttgatcagaagaaatttggcggggatactccttacagtattatgtttggcccagatatctgcggttacagtaccaagaaagttcacgctattcttacctacaataacacaaaccacttgataaagaaggatgttccttgtgagactgaccaacttactcatgtttacacatttatcctccgtccggatgcaacctacagcatc

SEQ ID NO: 44805 - DNA, 259 bp, Glycine max
  Clone ID: 701042056H1
cacacactcactctccttctctctcctattgcggctagggtttgggtttttcactttcagcctctccattccttcaaccttcttcttctctttgatctcttctggagacgttccgtgtttagtagcaagggttagttgaggccttgtgtttggaaacgtacggtgtcgttttggagttgggaaaacaaataattctgagagatggcaaccacgaacccttttgatttgttgggtgacgacgctgaggacccttctcagc

SEQ ID NO: 44806 - DNA, 260 bp, Glycine max
  Clone ID: 701042058H1
agagaatagagaaagcgaagggaaggcccgtgagttttgcgcgtgcgagagagacagtggaaagaaaggcaagggatgacgctgggtctgatcaatgcgaatcctgtggttcacgccaagaaagagcgaatcgctcgttctgatgatcctcacgccgatgacgccgttgatcctctcgacatctatgatttcgtgagggatattcgggatcccgaacatccttattccctggaacagctcagtgttctctccgaggaatc

SEQ ID NO: 44807 - DNA, 260 bp, Glycine max
  Clone ID: 701042059H1
ctgctttaaacttcccttcgggaacatcattgccacttccatggctgcctcacacatcctttataatcctcctcccctttccaaaacttttattaatcaccctttgaaccaaaacccttctcctcaaaacctaattctaccactcaaagctactattaaaccgcgggttcttagagcagttcactcccagaagatcactgctaactcctcgcttcataactccgatactaggactcgttttcagcactgtttcacaaaga

SEQ ID NO: 44808 - DNA, 261 bp, Glycine max
  Clone ID: 701042061H1
ggcgctgggaaccatgctcgaggaatggtggtgtgatatatttgtacaaatgatttcggaaaccaaattaatcatcaaaacaatttggcggctagaaaggagagtgaaatgtgatgaaatcctaggatagactcgttaaagatttgggaatagaatgcagggaattagtgttttttgagttgtaccatgtacacattaacaacagtatatagatgaaactttttccttcaagtccctttttgtgtatctgtgcgttgatgt

SEQ ID NO: 44809 - DNA, 269 bp, Glycine max
  Clone ID: 701042063H1
ccctcgagccgaatcggctcgagctcaaacatggcctccaaatcctacaccctcattctcctcatcctcaccacattcctcatagcccaaacccaagcccaagctcccgcaccggccccctcaggcgcggtgaacctcaccgcgatcctcgaaaagggtggccagtacaccaccctaatcaaactcctaaaggacacacaacaactcactcagatcgagtcccagctcaaatcaaactcacaaggcttcactctcttcgcacccactga

SEQ ID NO: 44810 - DNA, 272 bp, Glycine max
  Clone ID: 701042064H1
cattgaagactctaaacgggcaggagtttgtctcctttctggagcagatacttgaagccttgaacaaaggagagattccatcaacaggctctcttgtggacgttttcaacaagaatattcttgagaaatgtcttaagttatacagtgaaaagatggcgaaattagttctacctcttcctgagaaatctctgcaaggggcccatgataggtctagagatgaagtcacaaaagtctttgatcagcagcattttggtcgtcaccatgctaagaaa

SEQ ID NO: 44811 - DNA, 267 bp, Glycine max
  Clone ID: 701042066H1
cgtagatatggctgaaactgacatccaagactatctccaactcttcttcctctggttactctccatcatcgccgttagagccatactcaccaaactccgccacaagcctcgccgtccaccgggcccacggtccctccccatcatcggccacctccatctcatctccgccctgcctcaccagtctttccacgcgctctccacgctttacggccccttcgtgcaagtcttcctcggctccgtccccgccgtggtcgtttcgtgcccgga

SEQ ID NO: 44812 - DNA, 261 bp, Glycine max
  Clone ID: 701042068H1
caaaatgttgccacttgtgtacatactcatagctcttcctgcagtagtgttgctattgatcctcttcaaagccaacaaaaacaacccgccacgtccaccaggtccaagaggccttcccataatcggcaaccttcaccaactcgacgcttcgaagctcaatctccaactagggcagctctcaaagacctacggtccccttttctccctccgaatcggcttcaagccagccctcgtcgtttcctctccaaaactcgccaaaga

SEQ ID NO: 44813 - DNA, 251 bp, Glycine max
  Clone ID: 701042069H1
tttaaccggaatcgggcccccacagcccgacaagaccgacgctctgcagcaggtgggcttgaaattagcccaattggcccaaatcatcggcgtgcagttcgaattccgcggcttcgtttgccgcagcctcgcggatctcgacccgaatatgctcgagatccgagccggggaagccgtagcggtggattccgacttcgaactccaccgcatgctcgccctgtgcggatgcgtcgacaaggtcttggacactg

SEQ ID NO: 44814 - DNA, 158 bp, Glycine max
  Clone ID: 701042070H1
ggggtacatttctagaggaatcacgatcatgagaaatgatgcaatgtttctgtttcttgttgacctttcatcttattttgtaatttagattatttaatttactaaatatattaattgtggaagcttaatgttgagttcgtactgcatgtctgattttc

SEQ ID NO: 44815 - DNA, 254 bp, Glycine max
  Clone ID: 701042072H1
ctcaacttgacccattacctgttgcatgagaataattcagactgcaacatcgtgaatgagcttgggtttcctcgactgttgatgcaccttgcctcaagtgaagattcagatgtcagagaagctgcccttcggggccttcttgagcttgctcgcaatactcaagatggcaaggatggcaatgaggaagacagtgagaagatgaagcaacttcttcaagaacgaataaacaatatcagtttaatgtcagctgagga

SEQ ID NO: 44816 - DNA, 258 bp, Glycine max
  Clone ID: 701042073H1
ctttccccaacgaacctcgttgttgtgaatcgcgctgctgaatcaatcgttctcggttttcgcgtactctactcgttcatcccgacatggtttgcttggcttgtttgctgcccctctttctcgtcccaatcgtcaacatcctccctcttctcttccattttatcatggggaaaatctatcgggtttttggttgggagtacaggaaaccggagagggctcctcctgcatgtccattcaagcctccagccaacaggatct

SEQ ID NO: 44817 - DNA, 257 bp, Glycine max
  Clone ID: 701042077H1
ttttctgatatgtaagtctatttgcctttactcttaggggcccccatttacggggatgatggaggatggggtgagttggaaaattgaaattttcatttttgcatcttcaaggttcagccataacgttaacaaaaagagagagagagagagagaatgttatgtatgggtttggtttcacattcaaggacatgggaaacatggggggaccgaagccaacatagttttgttggttatatatatacttggatgcctattga

SEQ ID NO: 44818 - DNA, 263 bp, Glycine max
  Clone ID: 701042079H1
tctcgagccgattcggctcgagcggctcgagttcctttccccgtttttcttctctctctcaatctctttcatgtgagggtagacccacaacaaaacacaaaccacacactctcctaactcgaggttatttttttctttccccaaagaggcatgagttgcaacgggtgccgcgtccttcgaaagggttgcagcgagtcttgtattctgcggccgtgtctacagtggatcgatacgcacgaagcacaaggccatgccactgtctt

SEQ ID NO: 44819 - DNA, 260 bp, Glycine max
  Clone ID: 701042043H1
agggagacaagacagagtagtacagattactaccaatggctaccaaggtttacattgtttattattctacgtatggacatgttgagaagctagctagagagatagaaaaaggggctgcttctgtggagggagtagaagcaaaactgtggcaggtacctgaaacattgcctgaagaagtccttgctaagttgggagcacctccaaagagtgatgttccaattattactcccaatgagcttcctgaggctgatggctttttg

SEQ ID NO: 44820 - DNA, 268 bp, Glycine max
  Clone ID: 701042009H1
attttcatttgagagttgcaggttgccagttaatcgtcttcttctctgcatccatcagatccaaagtttctcgcgatacgagggagcaatgtcagaggctaaggttcaggatttgaagaaggaagaggaggttgctgatgattctcctaagaacgaagttgacagtggaaaatctgtggatgatctgaaagattcggataacgataaaagcgatggaaacgccatgccctcatcccatcaggaggaagcagctgttaagaaaaagtat

SEQ ID NO: 44821 - DNA, 265 bp, Glycine max
  Clone ID: 701042010H1
caggtgaagcaacagtgttacgaagcaagtagtagcaattagcaatggcgtacatgagcatgggggaagctcataggaggataacacattatctgaatcgcttttccgacgcgatttcttgccaagacggagctacgttcaagtctctcttcgctctctcttctaattccccattccttctctctctgggcgacgcgctcaacctcttccaagacgccaacagactcatcaagcaatccgacaaccattcccagttcacagacat

SEQ ID NO: 44822 - DNA, 267 bp, Glycine max
  Clone ID: 701042012H1
aagaatttgagtacatgatgacagccaaaataggagaaagggacactaaagaggagctcatgaaagctttccatattattgatcatgataaaaatggaaagatatccgcattagacatcaagcgcattgcaaaagagctaggtcaaaatttcactgacagagagattcaggagatggttgaggaagcagaccaagataatgatcgagaggttagtgcggaggagttcatcacgatgatgaacagaactcgcttccatcactagtctt

SEQ ID NO: 44823 - DNA, 266 bp, Glycine max
  Clone ID: 701042013H1
cgtttcaattctcaagtaaacatcatcaaagagcttctagtgtgaagtttggtggtgtttcatgcagagccgcaacgttaacccaagaaaacttgtacaaaatattgtctgtgtgtccaggaagtgcaacaatggatgagatcaagagggcttataggtcaatggctcttcagtaccaccctgatgtgtgccatgatccttccatgaaagaggaatcaacgaggatgtttgttcagctaaacacagcttacaagaccttgtccaat

SEQ ID NO: 44824 - DNA, 282 bp, Glycine max
  Clone ID: 701042014H1
ctcgagccgattcggctcgagtacagagcaaaagttccagacttgcgagaaattatggcaagagatcttgaaagtggcggtggaggaaccaagaataacagaactgcagaggtaaactactctgcacctgaatcttcccatgtttatgattctgagacccattggacatcatggctcgtgcctatgtttgtggttgctaatattgctgtctttgttattaccatgtacatcaacaattgtcccaggaacaaccttcgtttccaaggtcgctgcgtggccagg

SEQ ID NO: 44825 - DNA, 271 bp, Glycine max
  Clone ID: 701042018H1
tttcactctttgtatttttcgctgactccggcgtcactttccgttgagtctccgtccaccggcgtggcgatgtactcggaatcttcaaactccgattctcaaccgcaccctctctcgaacccaatcgacgacgcgtgccacgacatgagctccctggaagagctcgcgaaccgcggcgcgtggcgttccatcattgacaaggtctcacgtgctcgcgccctctctctcctccacaagccccacgaccacctcacctaccttgccttcaacg

SEQ ID NO: 44826 - DNA, 264 bp, Glycine max
  Clone ID: 701042020H1
agatcaaccccgacgaaggcaaggggtttttctcggcttcttcagatttctgaaatggcgcctgtttcagctttagccaagtacaagctcgtcttcctgggtgaccaatccgtgggaaaaaccagcatcatcactcgcttcatgtatgataaattcgataacacctatcaggctacaattggtattgattttctatcaaaaactatgtatcttgaagatcgaactgttcgactgcagttgtgggatacagctgggcaggaaaga

SEQ ID NO: 44827 - DNA, 263 bp, Glycine max
  Clone ID: 701042021H1
ggaaaatcttcctaaaattgcatctgaagatgatgaaatggtgcagatttccggtgaccttgatgttgctaaggatgctcttgtgcaagcacttacacggctaagagcaaatctttttgataaggagcgtgctgtctcaggattccttccggtgcttccatatcttcctgcttcagttgatggatcagatggtttgaactatgacagtagagatggtaaacgacatggacgtggtggatattccagtgggtatggaggttcaa

SEQ ID NO: 44828 - DNA, 263 bp, Glycine max
  Clone ID: 701042022H1
cttcatatcccacggaaacacagccaggcttgctaaggagcacggcgatataaagttggcccagatctgcggcatgattgcctcagatgagaaacgccatgagactgcatacacgaagatagtggaaaagctatttgaggtcgatcctgacggtacagttatggcgtttgccgacatgatgaggaagaagattgccatgccagcacacctcatgtatgacggccgtgatgacaacctgtttgatagctactcttcggtcgcgc

SEQ ID NO: 44829 - DNA, 266 bp, Glycine max
  Clone ID: 701042024H1
gtctgtctgtctctgactccactcccaccttcgcctgcgtcactcactctacctttctttcacttccttatcatatcattattctcttccaattcctcaacgcgcactttctctcttctctccgcatctccaactctctctctcacacacgcactctgaaacaaaaaaatagaaatagaaaaaaaaaacaaaagttaaaaaaaaaggttagttattcttcttcaaccacgccatggagggtcttccccaaggttaccgtcccaacg

SEQ ID NO: 44830 - DNA, 265 bp, Glycine max
  Clone ID: 701042025H1
caccgagaaggacagcaggaaacaaacaaaaaggagcagatgggtagctcaggtttctcatggcaattggcggatcatccaaagcatccaaagggtaagactgtggctgttgtggtattggatggttggggagaggccacacccaatgagtacaactgcatccacaaggccgaaacaccctgcatggattcacttaaaaagggtgctcctgaacggtggagattggtcagggctcatggtactgctgtaggacttccaacagaag

SEQ ID NO: 44831 - DNA, 264 bp, Glycine max
  Clone ID: 701042026H1
ggccaactggtccaaaggagcaggataactggctaggagatgaatattgctagttctgcttcctctctcgttttagcgggaaaggaatgcaaactgattaaggtaatatctttatgtcctggtattagtatgtgttatgtatgtcattgtgggagaggtgaaatggagcaagacatcaacatcatcatcatcaatcaattgtaaagggggtgtaccttacatagtagcaacttatgtcattcttggtgacctgaagaactatag

SEQ ID NO: 44832 - DNA, 264 bp, Glycine max
  Clone ID: 701042028H1
cgaactcctggtggcggtgctgactctgctttccggaaggcagaggatgtggtctccggcatgctagccaagggctttatcttagggaaagatgctgtcaacaaagcaaagacctttgacgagaagcaccagttatcctccacagcctcagcaaaagttgcgtctttcgatcagaaaattgggcttagcgagcaaataagtgctggtgctacagtagtgggtgatagagttcgagaagtggaccaaaagtttcaggtttcagag

SEQ ID NO: 44833 - DNA, 261 bp, Glycine max
  Clone ID: 701042031H1
ctgctcgagctgctcgagcggctcgagcggctcgagctatcctccaactaacacacagcgcaactatcgtcatctatccccaaccctaaccagttagcgaacgatcgcttagagtttcgacgcaggatgcgttcgaaagagcgaaccagcagccgcattcgagggttcctcgtcgtcaggagtggattcgtagagatgttggtggttgctacaatccaagacagcccaagaagggatcatcttcgaattcgagggaggagt

SEQ ID NO: 44834 - DNA, 172 bp, Glycine max
  Clone ID: 701042032H1
agcgttgaaaatggagaagttgcagctgcatgtcccgagagttaagcttggaagtcaaggcttagagatatcaaggttgggctttggatgtgtaggactatctggactttataatgctcccctctcgcacgaagctggatgttcaattattaaagaagcattcaatatgggt

SEQ ID NO: 44835 - DNA, 276 bp, Glycine max
  Clone ID: 701042033H1
ttctcgagctgaatcggctcgagcggctcgagcacagatccgtcttgaacttctctgtgttctgaaacagcaacaatggcaaataccatgactatgtggtttctgttggtcactctttccttcgtttatgctgctgccactgctaatactcaaatcaaagttactaacaaccctgcggacaagttggtagttgcgattcacgaaaacagaactgctcacaaggtgtcagccttataggacaacccggggcttgcgtgtattgctctacaatacatt

SEQ ID NO: 44836 - DNA, 270 bp, Glycine max
  Clone ID: 701042034H1
tgtggctttgaaccattctggtgttagatggtatgtgtttggggatgatgacaccattttcttccctcagaatttggtcaaaactctttccaaatatgatcataggctttggtactacgttgggtcgtactcagagatttatgagggctcccaggtttttggttttggaatggcttttggtggaggtggttttgccatcagttcctctctagcacaagtcctagccaaggtttttgattcatgcatacaaaggtattctcatctatatgg

SEQ ID NO: 44837 - DNA, 265 bp, Glycine max
  Clone ID: 701042035H1
cttcctcaccgattgctagaatggaatttcgatgctcagtcatctcttttaccattctcttctctcttgctcttgcaggagagagccatgtccatgcatcgctacctgaggaagattattgggaagctgtttggccaaacactcccattcccactgcactgcgagagcttctaaagcctctccctgcaggtgttgaaatcgatgaactccctaagcaaattgatgatacacagtacccaaaaacattcttctataaagaagacct

SEQ ID NO: 44838 - DNA, 264 bp, Glycine max
  Clone ID: 701042037H1
ctcgagccgcgcgtttggacgcagacggtagcaaggaaacccaccgtaagcgataagcaatagaattcagagagagagagatagagagtctcttgctctgtatctttgatttgatcattccaatcttcaatttttctatatatccatcaatccgctgagtgcaaagttctaatctttcgcctattgggttctactcctttctctcttcgtttccgatcgatccaattttcttcccatggctacgatcggacacaacaatctcaa

SEQ ID NO: 44839 - DNA, 262 bp, Glycine max
  Clone ID: 701042038H1
aacatctttggacagtggccctgcaaattttgaggcaatggctcacacttatagcattgctttattgttcactcgttcaaagacatccagttacatggctttagtaagatgtttccaactggcattttccctcatgagcctctctctggaccaagaaggaggtttacaaccatctcgcaggagatctctttttactatggcatcatacatgcttatattctcagccagggcaggcaatttccccgagctaattcagaaagtt

SEQ ID NO: 44840 - DNA, 261 bp, Glycine max
  Clone ID: 701042039H1
cccttttgaagtaatcgatggagtttcagtctctttccagattctaccttcttctttccttaaccattctcttccttgcaccctttcacgctcaagctaaaattaaagtcacttactgcgataagaaggcagactatcctgtgaaggtgtctggagttgaaatatcaccagaccctgtggagagtggcaagcctgctacctttaagatctcggctacttctagtaaagctatttatggtggagaagttgtaattggagttt

SEQ ID NO: 44841 - DNA, 261 bp, Glycine max
  Clone ID: 701042040H1
ctcgagccgattttctagcttccaaaccctaacactcctcttcctcttcgatcatcacctatccacaatgccgccgaagttcgacccctcccagatagtcgacgtcttcgtccgcgttaccggcggcgaagtcggcgcggcgagttccctggccccgaagatcggtcccctcggtctctcccccaagaagatcggataagacatcgccaaagataccgccaaggactggaaggcccccgcgtcaccgtcaagctcaccgtt

SEQ ID NO: 44842 - DNA, 260 bp, Glycine max
  Clone ID: 701042041H1
gtttgcttccatggaagtgatttccgcttcgagcttgaatcccaacgctccgatgttcgtgcctctcgcctatcggacggtggaggatttctccgaccaatggtgggacctcgtccactcctccccctggttccgcgactactggctccgcgagtgcttccaagatccccagtaccaatacgacgacgttttcgacttcgactttgacctagatctccaagataaagatgaaaatgaagggaaggaagggaaagaggtgg

SEQ ID NO: 44843 - DNA, 256 bp, Glycine max
  Clone ID: 701042042H1
tctagctccaattcaaccatggcttcgagactcacggtaacagccttggtgctgatagctttggcaacagtttctctccaaacttcagcttcatcagtgggtaaattcatcgacgaaaccatcacttcccacaagatcgtcattttttccaagacctattgcccgtactgtagaagggcaaaagctgttttcaaagagttgaaccaagttccacatgttgttgagctcgacgagagagaggatggttcaaagattc

SEQ ID NO: 44844 - DNA, 216 bp, Glycine max
  Clone ID: 701042008H1
tttcttgtaaaacaaagattgtattctatttagcatgttagcataatcacaatatgctcgtacaagtaagaatttttactgcaccaaacattaacaaaccctagaagaacatcaaaacaaccagaactatacaacaatttaaaggagaaaaattcttacttgtacgagcatattgtgattatgctaacatgctaaatagaatacaatctttcttgt

SEQ ID NO: 44845 - DNA, 265 bp, Glycine max
  Clone ID: 701041975H1
caaagatggcaaccaacgcggccagtcccactcgcagtccacgctcccaacaacctcccacccaaagcccaaggacaccctcgtcaaggcccacgctcaggtccacctctttctccaacaatccctccacctcctacagcggctccaccggttaccgcctctcctctgacacctccatctcaagcttctcctccatcacctccctccgcgacacgctccccgaaaacccccacatctacgacttctccgaaatctgtgccgccac

SEQ ID NO: 44846 - DNA, 261 bp, Glycine max
  Clone ID: 701041976H1
gtcccaattttctagggttttattcattttccgatggcttctgcagatgttgagtaccgttgctttgtcggtgggctcgcttgggccactgacgaccatgccctcgagagagccttctctcagtacggcgaaatcgttgaaacgaagattatcaacgatcgtgagactggcagatccaggggttttggatttgtgaccttcgcctcggagcagtccatgaaagatgcgatcggagcgatgaatggacagaacttggacggc

SEQ ID NO: 44847 - DNA, 268 bp, Glycine max
  Clone ID: 701041977H1
aaaacatttccctgctacttcatcttcttcttcttcttcttcatcaccggtggttctgttcattcttccttgcaccttcttctttgaagatcgaaattgtgtttttgaaaaaatgggagttccagagaaagaccctctttcctctaccgagtttgcctcctggttttcggttttaccccaccgacgaggagctcctcgttcagtatctatgccgcaaggtcgctggccaccatttctctcttccaatcattgctgagattgatttgta

SEQ ID NO: 44848 - DNA, 249 bp, Glycine max
  Clone ID: 701041978H1
gttccgagacctcccagaaccggtcagcatccccggttgcactcctcttcccggcaaggactcgttggacccggttcaggaccgcaaaaacgaggcctacaagtggatcctacaccactgcaagcgatacaaagaagccgaggggataatcgggaacagcttcgaggagctcgaaccgggagcctggaacgagctgcagaacgaagaacaagggagtgctccggtttacgcggtgggaccgcttgtaag

SEQ ID NO: 44849 - DNA, 205 bp, Glycine max
  Clone ID: 701041979H1
gttgaggatcagattgctgtcgggaaacgcgtggtattagtaggtagcacaggggttgtgaagtctcaaactgattctgcttatggtgccaatgttgaagtgcggcttagagaggcagattttccaattggccaggaccagtcttcactgagcctttctcttgtgaagtggagaggagacctggctttgggggctaatcttcagt

SEQ ID NO: 44850 - DNA, 158 bp, Glycine max
  Clone ID: 701041980H1
actcgagacgaatcggctcgagataacaagctagctattagttcgactttgcagtaagtgagcgtgccaatatggtgaagatagctcttggtactttggatgactcttttagcgctgcctctcttaaggcttatttcgcagagttccacgcaactctg

SEQ ID NO: 44851 - DNA, 275 bp, Glycine max
  Clone ID: 701041981H1
aagaaagaaggtttttttagtatagttaacagcatggagagggaggaagatgttaaggttggagcacagaaattctcggagaggcaagcactgggtacaggagctaagagtgacaaggactacaaggaggcaccaccagcacccttgtttgagccaggggagttaaagtcatggtctttttacagagctgggatcgcagagtttgtggccacattcttgttcctctacatcactgtcttgactgtcatgggtgtcaacagggcacccaacaagtg

SEQ ID NO: 44852 - DNA, 267 bp, Glycine max
  Clone ID: 701041982H1
gtttttattgctgccactttcatggagcagggtggcattccaccttcaacgaaccctgcaactcttcttaaggaagcaatccatgttatcagctgtggttacgaagacaagacagaatggggcaaagagattggatggatctatggctctgtgacagaagatatcttgactgggttcaagatgcatgctcgtggttggatttccatctattgcatgccacctcgcccagcatttaagggttctgctcctatcaatctttctgatcgt

SEQ ID NO: 44853 - DNA, 268 bp, Glycine max
  Clone ID: 701041983H1
cactcgagccgattcggctcgagcaaacatacaaagatgaaagacagatgttgttgtgctagttttagttttggcaaggcaaagccttatttgttaacggtgggacttcaatttgggttcgccggtgcatacatcttctccgtcgctagtctcaaccatggaatgaatcgttacgtcttcgttgtctatcgcaatgccatcgctgcattggcccttgctccttttgcattgattttcgagaggaaaattaggccaaagataacactcc

SEQ ID NO: 44854 - DNA, 69 bp, Glycine max
  Clone ID: 701041984H1
ctttccagttgctggtaagacttaaacgtgatttaataatgaatgccaaattcgggtcttggctaaaaa

SEQ ID NO: 44855 - DNA, 265 bp, Glycine max
  Clone ID: 701041985H1
cacgcacaacacaaccacatcatcgtcttcatcgctctccgacacttgaacctctcatgttgttcctctagaaacctcttccgctccaccgtggaattttcctgcttctgtagcacaaaacacacacacacacaaactctgctttaatattattcacgcctgtccttgtcgtggtgctggttacaagatagggtttgcactttttaatcagaaactagccatgaccaggtacagaaaactactgtgttagttaaaaaacattcat

SEQ ID NO: 44856 - DNA, 261 bp, Glycine max
  Clone ID: 701041986H1
ggatggtgagtgttgaagagatccgtcaggcacaacgtgcagaaggccctgccactgtcatggcctttggcaccgccactcctcccaactgcgtcgatcagagtacctatcctgactattacttccgcatcaccaacagcgtgcacatgactgagctcaaagaaaagttcaagcgcatgtgtgataagtcaatgattaagaagcgatacatgtacttaaatgaagagatcctgaaggagaatccgagtgtttgtgcatata

SEQ ID NO: 44857 - DNA, 262 bp, Glycine max
  Clone ID: 701041988H1
gaagaatgttgcagtcaaggatctcaagcgtggttttcttgcatccaactccaaggatgaccctgccaaggaagctgccaacttcacatctcaagtcattatcatgaaccaccctggccagattggaaatggatacgcaccggtgcttgattgccacacttctcacattgctgtcaagttttctgaaatcttgaccaagattgacaggcgatctggtaaggagcatgagaaggagcccagatttttgaagaatggtgatgca

SEQ ID NO: 44858 - DNA, 256 bp, Glycine max
  Clone ID: 701041990H1
accgattgctagaatggactttcgatgctcagtcatctcttttaccattctcttctctcttgctcttgcaggagagagccatgtccatgcatcgctactccgaggaagattattgggaagctgtttggccaaacactcccattcccactgcactgcgagagcttctaaagcctctccctgcaggtgttgaaatcgatgaactccctaagcaaattgatgatacacagtacccaaaaacattcttctataaagaaga

SEQ ID NO: 44859 - DNA, 251 bp, Glycine max
  Clone ID: 701041991H1
ggcgttgtttcgttcccaaatctcccaaattccccattctacccctggtggcagatcacgcacttattccatgacaccgagagaggaggtcccgaatggaagtttcacagagagaagatgcttctcaacattgattcctggggcgtcgttatcaacacattcagcgagttagaacaagtttacttaaaccacttgaagaaagaattgggacacgaaagagtctttgcggtgggcccggttctgccgattca

SEQ ID NO: 44860 - DNA, 251 bp, Glycine max
  Clone ID: 701041992H1
aaaattcgtataggagcacataaaatggcagacatgcctcgggtgaagcttggaagccaaggcctgaaggtttccaagttaggatttggctgtatgggcctaagtggagtgtacaacgatcctgttcccgaagagggtagcatctctttgatcaaacacgcattcaccaaaggggtcactttcagtgattctgcagatttttatggagcacgtgccaatgaagtttgagtcggaaaggctctcagggactt

SEQ ID NO: 44861 - DNA, 268 bp, Glycine max
  Clone ID: 701041993H1
cgcttactcctttttcttctcctgcttctgcacctcattgccataccccctttcaatcaggagaaaatctctcgctccctttctctttcttctcttcacgccgccatcaccatgccttcactctctctctctgaaactgacaccactcacccctaaacctatttccaacaaaaagatgccatagatccaatccctcactgatcccgacctcgatggggtttcggggaagaagacgacagaagcgcaaggcttcagatttattagaacc

SEQ ID NO: 44862 - DNA, 261 bp, Glycine max
  Clone ID: 701041994H1
atcaaccttggatcaggtttagggaatggctgcaatcttagctcgaaaatcactccttgctcttcgtgcgcgccaattggctgtaagcggtcaagggctgcacagctcccaatactatggccttcggtcaagtgaacactccttctctaccaaaagagaggatgaggaaagggagcaactcgcaaaggacatttcacaggattggagttctgtctttgaacgtagcattaacactctctttctcactgaaatcgttcgagg

SEQ ID NO: 44863 - DNA, 278 bp, Glycine max
  Clone ID: 701041996H1
gaccatcaccgtcctggccctcgacaatgccgccatgtcctccctcctcgacaagcacctctccctccccaccatcaaaaacgtcctctccctccacatcctcgtcgactacttcggcgccaaaaagctccaccagatcaacaacagcaccaccctcgtctcctccatgttccaggccaccggctccgcctccggcaccgccggctacgtcaacatcaccaacctcaaggccggcaaggtcggcttcgccgccgaagacaacgacggctccctccact

SEQ ID NO: 44864 - DNA, 281 bp, Glycine max
  Clone ID: 701042001H1
gcacaaacagaccaattccaacggttgaattttttggctgaagacaccccaccgacgttagtcaaataaaacatgtcttgctccgtcgcggtttccaattcgccggtgttctctccttcttcttccctcttctgctcgaagccctccatcatctcttcttcgccggaatccctctcgctctctctctcgcatctcaaaccttccaactcttctacgacgtcgtcttgttcttcaccctctgctgctgcttcttcatcttcttctccttcttctccgtttcg

SEQ ID NO: 44865 - DNA, 286 bp, Glycine max
  Clone ID: 701042003H1
gtattcggctcgaggagagaaatatcttgttgagttgatttctgatcccaaattgagtttgagtttcagccatggtatctgtttctctgctcttattcctatctttctttgccttctttgcaccctctgaatctcacgacaaagtctcgttggaattgtactacgaaagcttatgcccctacagcgccaacttcatcgtgaatcacctcccaaaaatcttcaccccagatcttgccccaatcgttcacctcaaactcgttccttggggcaatgccaaactccgtgc

SEQ ID NO: 44866 - DNA, 266 bp, Glycine max
  Clone ID: 701042004H1
gcttggtgttcgttatcccacacatgcttgatgatgaggtttcaatcaaaacacgtacatgtgctacattcatgtagttgagcatatataccacaggattcttgtaataataggagggtttactattgttgagcgactttaccaagtctcacatttatttatgtatctatttttccatcaaatcaaatgcagtaatgacggggagttccttcaatgaatatgatgatatacctatatcatgcttgtgcacgtgatgtaggagacaa

SEQ ID NO: 44867 - DNA, 267 bp, Glycine max
  Clone ID: 701042005H1
gctagggttagtgctttgtttcactctttgctcttgatttcttcccttgtattggcttctcaaatccatgtttcctctgggaaactagtccctggactatcatggaattactatttgttgacatgtcccaagcttgagaggattataaggaagcatcttgaggatgtcttcgagaaggacagtggagtagctcctggcatacttcgactcttcttccatgactgctttcctaatggatgcgatgcgtctatattgttgaatggagac

SEQ ID NO: 44868 - DNA, 266 bp, Glycine max
  Clone ID: 701042006H1
cgttgcttgaaaagaaggaaacaagaaaaaaattagtgtcattaagttattaattaagtatggtcttagtagttaatttgcgtgtgtaaattaatgttacttaatcgggcatgtatccaagagggggaaaaattgaagatatgtgttggggatttattgattattacgaaagataatcataatataggtaggagggaggggatatttgaattaatgagtataatggtaattaattatgatttggaaaaataaatatatactatggg

SEQ ID NO: 44869 - DNA, 139 bp, Glycine max
  Clone ID: 701042007H1
gctagtttcatctgggttatgcttatgtctggcacagaacaggtgaccatgggaggattaggactcaatttgactccaattactacatttgctatcattactgtgattgctacggtgctaatatggtggttttggaatc

SEQ ID NO: 44870 - DNA, 252 bp, Glycine max
  Clone ID: 701041974H1
ctcgagccgcgcaacctcaactttgttctgtttccctgatgtcccagggccacatgatccccatgatggacatagcaaaaattctggaccagaacggtgttactgtcacagtggtcacaacccaccaaaacgcatcacgcttcacatcaactttttctacttcccaaatccgattactcgaagttcaattcccataccaagaagcagggttgacagaagggtgtgagaatctcgacatgttaccttcacttg

SEQ ID NO: 44871 - DNA, 265 bp, Glycine max
  Clone ID: 701041942H1
cttggaaagcctctgtaaacaccctgaagaatatctttcttatgatggtcattgcagtgattcaacagtgaaatcactgtcaagctcacttgtttgtactgttggggagatatcaacatggccaagtgccagtactgtcattccaggccaggttacatataccgtggatatacgagcgatagatgaccttggacgtgaagctgttatctatgatttatcgaaacaaatttaccaaatatgtgacaagcgttcagtttcctgcatt

SEQ ID NO: 44872 - DNA, 263 bp, Glycine max
  Clone ID: 701041943H1
ggtttgtacagcgtttgctttgggggcgaaaaattcagatttttccgatttgcaccattttcaacagagaacaacaccatttgtggattgctgtaaactgcactttttggctgttagctaatggacaagggggtgccacctagcctcttcgtcaatgacggttctttcatggagaggttcaagcaacttcagcaagagcaggagaaagggaagaatgtcaaattggaggattctaaaccaattaaggttaattcagggtcttt

SEQ ID NO: 44873 - DNA, 153 bp, Glycine max
  Clone ID: 701041945H1
gcagtttcgtgctttcccgccgccgctacactgccaccgtcttccccgccgtctccgccagagatggcagaagaggattcaaagcctctgaactacatctccgaggtcattctcaagaagaggaagaacaccgaagcatgggctttaaggaaa

SEQ ID NO: 44874 - DNA, 274 bp, Glycine max
  Clone ID: 701041947H1
cgggggatcaacctttgtacaacgaagacaaaactgttattgtcactgtaaatggggagatatacaatcacaagcaattgaggcagaaactgagttcccatcaatttcgaactggtagtgattgtgaagtgattgcccatctttatgaagaacatggagaagaatttgttaatatgctggatgggatgtttgcctttattcttcttgatactagggataaaagttttattgctgctcgtgatgctattggcattacccctctatacttgggctg

SEQ ID NO: 44875 - DNA, 278 bp, Glycine max
  Clone ID: 701041948H1
cacttttaggaggtccctacatcttacgtacatttcccgctgtacagattcatccagttcttagtgttattggcttactagttcatgggggtgaagctattataagttacaaagcttttcccctaaagaaggaagtgaagaaattgatacaccttgttttccatgccatcgcattaatacttggaatagttggaatttatactgccttcaagtttcacaatgaaagtgggattgccaatctctacagcttgcattcatggcttggaattggggttatt

SEQ ID NO: 44876 - DNA, 261 bp, Glycine max
  Clone ID: 701041949H1
gccagctagggcttgagatctcatatatcatggctacctccatggtgaagcttatgcttttctctgctctcatactcttgtccttgcaagcagttgtgtctgtaacaccactgcattttcaacatccactagaccctttaaccaaacaagagataagtcttgtccaaaccatagtccaaaataagtacccaagctcaagtaacaggttgagcttccactacattggactcttcgaacctgaaaaggatgccatcctcaaat

SEQ ID NO: 44877 - DNA, 193 bp, Glycine max
  Clone ID: 701041950H1
ttcattctcatctttctctcttctctctccacccaaaccctaactcccgaccctgttcccctctcgtatccgtcatgaaaggaggaaagtccaagaccgaatctaagagagccgatcccaaacttgctgtgaataagaagggagccgccaccaaggctaggaaacccgccggcaaggggaaggcagcgaaaga

SEQ ID NO: 44878 - DNA, 272 bp, Glycine max
  Clone ID: 701041951H1
gaaagaaaggaaacggaataattcgatacccctctcgtctcgtaactaaccatggcagcgctccgatggaagagcttcgaggagaatgaggatcgcccagccaagcctcgtcattttggcgtcaccgagattcaaagcccccactgcactctcttctcccacaaccttcttcaggatatttttgaatctatgggagactatgtagatgggttaaagttttctggaggttctcacagcatgatgccaaaggctactatcaagcaaatcattga

SEQ ID NO: 44879 - DNA, 257 bp, Glycine max
  Clone ID: 701041952H1
taataacaagctagctattagttcgattttgtagtaagtgaggtgccaatatggtgaagatagctcttggtactttggatgactcttttagcgctgcctctcttaaggcttatttcgcagagttccacgcaactctgattttcgtgttcgctggtgttggatcagccatcgcttacaacgagcttacaaaagatgcagccttggatccaacggggctggtggcagtagctgtggcacatgcatttgcactgtttgta

SEQ ID NO: 44880 - DNA, 261 bp, Glycine max
  Clone ID: 701041955H1
gaaagagactgggcaaaagatgaaacatcactgaagtcaggttttaggcatctagagcacatgccattccctttctggttggccctttttgttgaaggaactcgtttcacgcagacaaagcttttacaagctcaagagtttgctgcttcaaaagggctgcctatacctagaaatgttttgattcctcgtactaagggttttgtcacagcagtacaaagccttcggccattcgttccagccatttatgattgcacatatgca

SEQ ID NO: 44881 - DNA, 263 bp, Glycine max
  Clone ID: 701041956H1
gtttgagagaaaggttgagctatagcctaaaggctgagacacataaatagtttctactttctattcatagatagatggctggcacaattatgagacctcagattgtgctatttggctcctccataattcaaatgagcttcgacaatggtggttggggtgctattctagctaacttgtacgctaggaaggcggacatcatcttaagaggatactctggttggaattcaaggcgggctttggaggttttggatgaaattttcccc

SEQ ID NO: 44882 - DNA, 260 bp, Glycine max
  Clone ID: 701041957H1
ctctctttctctctccttcaacgcatcccaaccctgtggcgctataccctcctagatctactctctaaccgctatacaggctggtactaagagctgtggttagtcatagatggcgctctcagcttcacgggcaatgtcaaagggtgtggtggtatctgtgcctgctctggttctatctgctttagtggctactgttttcctgttcttccttttgtcctctctttcatcctgctcctgccctactccttcagaaatctctg

SEQ ID NO: 44883 - DNA, 264 bp, Glycine max
  Clone ID: 701041958H1
aagaaagtcatctagaacagttgtaattcgtaatatccactacatcactccaaaaaggagaaataatgaggggggagtctctgatgagtcactagaagatgatgatggcatcgatgaagaaaccatcaaacaaaaggttggtgttgcacttgagtctttgcaaaaggtccataaagttgaaaaacgtgctaagggaaaaaaagcagcagcctggcacaatgtaactaaatcaagtgatgcgactgaggaagatctcacttataa

SEQ ID NO: 44884 - DNA, 265 bp, Glycine max
  Clone ID: 701041959H1
aaagaaaagaccatcaaagtttcacttcagccttatccggtttagggtttcggtttttgaccctacctttgacgtatcgaaaccttaagtttcggatcaggtctgagcaatctggttggtagaacctttggtcttagagagtcaagttttatgtctgaattagacgatcaaattcctactgccttcgatccttttgctgatgcaaatgctgatgactcgggtgctgggtcaaaggagtatgtgcatattcgggtacagcagcgaa

SEQ ID NO: 44885 - DNA, 271 bp, Glycine max
  Clone ID: 701041961H1
gttgttgctgctcatcctccgtaacctccgagctctgcaccgaagaacgaagccatggggaagacacatggaatgggatctgctcgcaagctcaagtcccaccgcaggaggcaaaggtgggctgacaagtcatacaagaaatcacctgcttggaaatgaatggaagaaaccttttgctggttcatcccatgccaagggaattgtccttgaaaagataggtattgaggctaagcagcccaactctgccattcgtaagtgtgccagggttcaa

SEQ ID NO: 44886 - DNA, 271 bp, Glycine max
  Clone ID: 701041962H1
ctcggtgacagtggggtggggaagacatctttgatgaaccaatatgtgaataagaagtttagtaatcagtacaaggcaaccattggagcggattttttaaccaaagaagtgcaattcgaagataggcttttcaccttacagatttgggatacagctggccaagaaagattccaaagccttggagttgctttctatcgtggtgctgattgttgtgttcttgtatatgatgttaattcgatgaaatcatttgacaaccttaataactggaggg

SEQ ID NO: 44887 - DNA, 272 bp, Glycine max
  Clone ID: 701041963H1
gcttggtgttcgttatcccacacatgcttgatgatgaggtttcaatcaaaacacgtacatgtgctacattcatgtagttgagcatatataccacaggattcttgtaataataggagggtttactattgttgagcgactttaccaagtctcacatttatttatgtatctatttttccatcaaatcaaatgcagtaatgacggggagttccttcaatgaatatgatgatatacctatatcatgcttgtgcacgtgatgtaggagacaacatgtg

SEQ ID NO: 44888 - DNA, 254 bp, Glycine max
  unsure (1)..(254): unsure at all n locations
  Clone ID: 701041964H1
ggatacttcagcactgattttaattatgccttgcattttggtacatggaaatcatttgttgacttatctatgattacatgagtttgatttgcataaatatgggttacctatgataagtgatccagtgtttagcggggacgtgatcctcgtctcatgtacttgagtcgtgatggatatattgatcaatttntgccccttgtcttgataggccagggacaaattcttgtggcacttgttttgcttcctctttaatt

SEQ ID NO: 44889 - DNA, 275 bp, Glycine max
  Clone ID: 701041965H1
gtgaagtccttcttacatagtatagacattctcaagccatgatttgtagacttttcaccatctacttcactttcttcttatgtttgccttttaccttcttcgttccttatgttcatagcaataaccagcttgataccaatttctatgatggatcatgccccaatttggccacgattgtcagatatggtgcttggtcagccattaaaaatgacaacagaatggctgcgtccctccttcggttgcactttcacgattgcatagtaaatggttgtgat

SEQ ID NO: 44890 - DNA, 270 bp, Glycine max
  Clone ID: 701041966H1
gcaaacgatccaaactcttttttcatttgcagcatcaaaatgagtggtagcaacgatcgtcagcggcagctggagctctaggtttttgaaggtggctagtgcagctgccgctacagccgccgttgccggcggtttatatgccattctttcatcctcaacctctgctagctctgagatggaagtgccgtttggcagcgcacggcgtgagagcaaagaacgtgacgatggtggctccgggtctcatcctcgcgagggtgcaacaaggtcagt

SEQ ID NO: 44891 - DNA, 188 bp, Glycine max
  Clone ID: 701041968H1
cgaccacaccaccgttatggacgaggacgagcaactcgaacgattcgactcggagttcgcctccacgagttccatttcctccaccctcagcaccgactatttccgcaacctcaccagctccggcgacatttcctccatcagcagctgctccggcgagattcctcccgtcgcggtcctcgcgcctccgt

SEQ ID NO: 44892 - DNA, 257 bp, Glycine max
  Clone ID: 701041969H1
ctcaggtggctaaactacctccgccctaacatcagacacggtggtttctccgaagaagaagacaacatcatttgcagcctctacgttagcattggaagcaggtggtcggtcattgcagcacaattgccgggaagaactgataatgacataaagaactattggaacacgaggctgaagaagaagcttctagggaaacaccgtaaggaactacaggcacgcaacaaaggaaacggtggtatccttaaacaggagaacag

SEQ ID NO: 44893 - DNA, 261 bp, Glycine max
  Clone ID: 701041972H1
aatccatttaacaatgatctcacaaatcggttatgtgcagatggggaagtttcattggacaaagctgcagaggtgtggaagaattatatttgtgaggtttcttcttcagacatttgcaagacacccggtcggatgactccaaccgtttatggccaaatggaagctgcagtgaatgtaagctatggtttatatcattatggcccattcttggttggcctacaagactgcactttcgttcggaaaatattcacagacatcagc

SEQ ID NO: 44894 - DNA, 259 bp, Glycine max
  Clone ID: 701041973H1
tccaaatccaaaaaaatcatggagcagttgtactacctcacccttgtgctactgtttgtgcccttcgtctctgtctcttttttcatcattttctacaggcatcgttctccgttcagcgtccccaacttgccgccggggaaggcggggtttccggtgatcggcgagagcctcgagtttctgtcggcgggaccgaaggtggttcaggagaagttcttctccgatcgcatgacagagtactcttccaaagtgttcaagacct

SEQ ID NO: 44895 - DNA, 264 bp, Glycine max
  Clone ID: 701041941H1
gaaaaatccactttggttgttcacttgtatatgtatctcagtctcaggtggtggtgcatcgctgagttgtgtgagagtgagaaagagagagtgtgtgtgtgtgcagaagatgtggccattcagcagaaaaggggcttctggtttttcatcatcatccacggcagagcaagtcactgaaggaattgatggaactggtctcactgccattgtcacaggagcatccagtggtattggcactgagactacacgtgtcctttcattgcg

SEQ ID NO: 44896 - DNA, 262 bp, Glycine max
  Clone ID: 701041908H1
gaaattgcctctttcaagaagcatctgagtgtttactattttgtactatatttatatatagtcactcaagcttctaggatttctgcctgctgcatcaaaatgggaagcaacttgaggtttttgagtctttgcctcttggcattgattgcatcaactcatgctcaacttcagcttggtttttatgctaacagttgcccaaaagcagagcaaattgtcctgaaatttgttcatgaccatatccacaatgctccatcactagcag

SEQ ID NO: 44897 - DNA, 266 bp, Glycine max
  Clone ID: 701041909H1
ctcgagcgcttggactttacagatcatgtttggacagagtgcttctctcaattcttgggaagatggatgcatcttgacccatgtgaaggaatctatgacaagccattattatatgaaaaagggtgggggaaaaaattaaattatgtaatagccatagcaaaagatggagtttatgatgtcaccaaacgatacacaaggaagtggcatgaggtcctatctcgacgtactatcattacagagccttctttgtcatctttactctctaa

SEQ ID NO: 44898 - DNA, 261 bp, Glycine max
  Clone ID: 701041910H1
ctttgcttcagctatggagtttcgttgccttccattggttttccgctctaatctgatcctgatgacagctcatgctgccatacctccagaagtttactgggaaaggatgcttccaaatagcccaatgcccagagcaatcatagatcttctgaaccgtgatcaacttcctctttggtatggtgctaaggaaacccaatctacagatcaaatattcctgtatgatggtaagaaaacccaatctacagatcaagttcctcctat

SEQ ID NO: 44899 - DNA, 270 bp, Glycine max
  Clone ID: 701041912H1
cggctcgagaacctcaaataacccttgttatctctctttcattctcacttgtactcatctctttttcacaactttttttgtaccttctgatctaatggcagttccagtgattgatttttcaaagctgaatggtgaagaaagaaccaaaactatggcacagattgctaatgggtgtgaagagtggggattttttcagttgatcaaccatggtattccagaggaactccttgagagggtgaagaaggttgcctctgagttctataagctgga

SEQ ID NO: 44900 - DNA, 264 bp, Glycine max
  Clone ID: 701041913H1
gattggtgaatttgagattgaagaagatgatgcaggctggacccggcggcatggcccaacaagcgaaccagcaatacgcacagcaacagcaacaacaacaacaacaagcatacatgatgatgccgccgcagcctcagccccctcagatgtgggccccatcggcccagcctccgtcccaatcggtagctcctccgcaacccaccagcgccgatgaggtacgtacccactggatcggcgatttgcagtactggatggacgaaaatt

SEQ ID NO: 44901 - DNA, 254 bp, Glycine max
  Clone ID: 701041915H1
tagaaaatggggtctctaatggcctctcttactctcactcttgtattggcaatagtttctctaagctcgtgctctcaagcctcagctgacaagtacgactattcatctccaccaccaccagtttacaagtacaagtccccaccaccaccctacaagtattcatctcctccaccacctcctaagaagccttactaatacccatcaccaccaccaccagtctacaaatactagtcaccaccaccaccatacaagta

SEQ ID NO: 44902 - DNA, 283 bp, Glycine max
  Clone ID: 701041917H1
caacaagttaatagcattccgcaaaatggctgccaccaccttagtctctgaagtcactctcccctcctcctccggccagcggaagatgccgctgatgggcctcggcaccgcgccggaagcaaccagcgcggttaccacaaaagatgctgttcttgaggccatcaagcagggctacaggcactttgatgctgcttctgcttatggtgtggaacagtctgtgggagaagccatagctgaagcacttaagcaaggactaattgcatccagagatcaactcatcatc

SEQ ID NO: 44903 - DNA, 275 bp, Glycine max
  Clone ID: 701041918H1
gaaagattcgaaacgaagaaagaaagcgttgtgaagaatggcggaagagggacaagtgatcggtgtccacagcgtagaggagtggaaggaacatctcaagaagggagaagagtccaagaaattgattgtggtggattttactgcttcttggtgcggtccatgccgtttcattgccccaattcttgcagagtttgctaaaaagttgccgaaggtcaccttcctcaaggtggatgtggatgaattggagactgtttccaaggagtggggaattgagg

SEQ ID NO: 44904 - DNA, 276 bp, Glycine max
  Clone ID: 701041919H1
caaaaactaaacactaacaacgttttgggctctgagcaacttttacatttgagacacagattaaattaatccactttaattaggtctgttgttcatgatggctctagctactccaggtagccctagctccatgcacatgccactggtgcaaacgtccaaccctagctcacaaaattctatgacgacaattaccgaaaggagaggaagtgtagtagttctacaaacgaaaagaaaacatgatggaggaaaaggacgtgatccacaaactaatagcat

SEQ ID NO: 44905 - DNA, 158 bp, Glycine max
  Clone ID: 701041920H1
ctgtattctgaggttccatctcctcctatttccctctcccatgcaagttgacctttcattccactttttcgaatccctagactcaggcctggtaaccttttgaggttgttgggtgcagaagggaacgatggctgcttcagaggagaatagtgcactgt

SEQ ID NO: 44906 - DNA, 263 bp, Glycine max
  Clone ID: 701041922H1
tcggaacaaacagggaatataagagagaaaaagatgggtttcataatggaattcgcggagaacttggtattgattttgatggaggatccgaagaaagggatcggaggttccgggagcacgtttatagagtgaaggacaggtgcgagaagacgaaggagatgtggagctaccctatgcgaccctatgggttttggactttcgaacgccacaattctcagcttgcttgggatgcacagattagccaagtggctgggaggagggac

SEQ ID NO: 44907 - DNA, 266 bp, Glycine max
  Clone ID: 701041924H1
caaaataactgcatacatcttccatccaactatatatccccacactctatggcgaggtgtgaatccgtttccacgacaatgcccttctctgcaaaaatattaatagcacttatattccttgcattcgcaatcacggctaccacttcaactcgaatccttgatgaaatagaaacaccagaagaacccaacagtgctgccgaatcccctgttgtctctccacttccacttgttgcagaatctccagttgcggaagtcaaaggagttga

SEQ ID NO: 44908 - DNA, 265 bp, Glycine max
  Clone ID: 701041925H1
gttccttccattcctttcttccggatcacagggaaaataaaaaacaatggagttggacttgacaccaaagacagcagaagtgttgtttgagggagatggtggaggttactacacttggtggagttctaaagtgccactgctggccaagaccaatgttggtgctggtcggttagtgcttcagcctcagggctttgctattcctcattattcagatatatccaaagtaggttatgtgcttcaagggaacgatggcgtactgcggatg

SEQ ID NO: 44909 - DNA, 266 bp, Glycine max
  Clone ID: 701041927H1
cttcgagcgaatcggtcgactgatctacatgttcctgagccctacagatgatttgggttagaaccaactctttgctggtcagaaaaatctgcagcttgtgcttttacttctggctgttatctctgtgccctggatgctattgccaaaaccttttattttgaagaagcaacatgaagctaggcatggggttgaatcctatgaaccacttcaaagtacagatgagagcttgcaagtggagtcaaaccatgattcccatggtcatgagg

SEQ ID NO: 44910 - DNA, 271 bp, Glycine max
  Clone ID: 701041928H1
ctcctctgtactgagacatggccgaagaagaagaagaagaagaatcagagctcagcgataagcagaaagtggaaatcgcgaaatggctcctcctcaattctcctcccggagaaatccaatacgttgccagagatgtgacatccattctcaacaacgatgatttgtacaaggaagccgcttccgaggcttttctcttttacaacaaatcgcacttgatcttccttccaatgatcaaccgaagcggagacgtactggctacttctattggtga

SEQ ID NO: 44911 - DNA, 142 bp, Glycine max
  Clone ID: 701041929H1
tatttattttgagctttccatttttctctctttttcaactttcaattcaagcagctttggaaaaaccaaccagccaacgggtttttcttttttccacctccggaaatttgtaagttgctttgaattgaattttcaaacaaaa

SEQ ID NO: 44912 - DNA, 273 bp, Glycine max
  Clone ID: 701041930H1
ctttgactgctgccgtcaagccaaccaagggacatcaacatcgaattagaaaatagcatcaaaatttgaaaaccaatgttcactatcactaaaaaattgaagttccagaaccagtatttgaacaccaaggcgtcgcaactcccaacaacctggccgccgttgccgccaccgctcctgttgccgtcaaactcgtgcccacccttttgcttcagattttgtggtgctcgcggaccagctcaagaaggagagctagtgggagactctcaaggcggc

SEQ ID NO: 44913 - DNA, 278 bp, Glycine max
  Clone ID: 701041931H1
actagtcaacaaacataattctcttcctagtcttgtccttaaattacaacaactttcaatcctcaatctgctccatcatatatatatagtaataatagcagcaatggataatactcccagattgcttcaatcggtttcaagcttgattctgattctaagcatttcatcattggcctcagcatctctgaaagtgggtttctatagctcaacgtgtccatctgctgaggcaatagtgagaagcgcagtagagaaagcaatatctgccaacccaggcatag

SEQ ID NO: 44914 - DNA, 280 bp, Glycine max
  Clone ID: 701041932H1
tgagagaaacacgatgcatttatgttgagagaacttgtgaagagatgggcagaccatcaaattatggctcggtggctttctcggttctttcattattaggatcgatactttattgctcggaggtcacttccgccccttaatgaagttgggttgacttgcttccgcgatttgatttacaaggaactaaatgggaaagttagagatgcagttatttcactaattgatcaagaacgggagggagaacagattgatcgagctctattaaagaatgtattagaca

SEQ ID NO: 44915 - DNA, 214 bp, Glycine max
  Clone ID: 701041935H1
tgtgtgatgccaacatctaaatagtaggttgaagaatttgactgaactgaaatatttcaattctgggcactcttcgaagattgtaacatagagattgcagattcaagttcattcaaattcttcaacctactatttgcctgttgtgtagtgactgtgtgatgccaacctaggtcctggagtaaccaaaaagcttgatctgtttacaaagttgaaa

SEQ ID NO: 44916 - DNA, 268 bp, Glycine max
  Clone ID: 701041937H1
atttctttcccgtatttcaaatacttcgtacagtgcccaataagttattgggcgttcttttaatggtttcggtacctacaggattattaacagtaccctttttggagaatgttaataaattccaaaacccatttcgccgtccagtagcaaccaccatctttttgattggtactgtagttgccctttggttaggtattggagcaacattacctattgagaaatccctaactttaggtcttttttaaacttataaaattgattccattat

SEQ ID NO: 44917 - DNA, 263 bp, Glycine max
  Clone ID: 701041938H1
aagggacagctttttccatgacagaacgagatcgtcttgatctacgaggactgcttcctccaaatgttatgtctcctgacctacagattgaacgattcatggttgatctgaagacgcttgaagttcaagctagagatggaccttctgatcctaatgcattggccaagtggcggatacttaaccgcttgcatgacagaaatgagactatgtactataaggttttgattgccaaaatagaggaatatgcaccaatagtgtatact

SEQ ID NO: 44918 - DNA, 142 bp, Glycine max
  Clone ID: 701041939H1
agttgcaggcagtgtcatctctcctttgacgacaagatgagcatcccaattccccatcggcagttattcatagacggagactggaaagtccccgtcctcaagaatcggattcccatcatcaacccttccacccaacacatca

SEQ ID NO: 44919 - DNA, 250 bp, Glycine max
  Clone ID: 701041940H1
ctcaacaagagagttgcatcagcatatttcgagaattcggggggagtttccctctggtggaatgcctttccaaccatttcaagcagttgctcctcaacctattcacacaggtgctgtttcacagtttcccaaccggcctatggttttcccccagttagcatctgctgatcaatctagatttcaaatgcagtccccttggcgaggtattagtcctcatagccagtcaaggcagaaacaggaaacccttcca

SEQ ID NO: 44920 - DNA, 249 bp, Glycine max
  Clone ID: 701041907H1
ggaaaatgagttacttgggtttgggtgttagtccaggtactgttccagtgtaccatggaacaaaacttaaagtgttggataggagggtgaggataacagagctggtgttaaggtgtgtgagccttggtcttggagttgttgcaattgtccttgtggtgactgattcccaagtcaaagagtttttctcctttcagaagaaagctaaatttacagacatgaaggctttagtgttcttggtagttgcgaacg

SEQ ID NO: 44921 - DNA, 135 bp, Glycine max
  Clone ID: 701041868H1
ctaaactttgaacttgatagatactgtgagtgtttttgttcctcaatcaatctaattctctcaatggcttcttctctctccaccaaaccattctcaacaaccgacgctctctccgccttcgcttctctcaatccc

SEQ ID NO: 44922 - DNA, 263 bp, Glycine max
  Clone ID: 701041869H1
tcaatgagttagcttcgggtttggaattgagtggtcaaaggttcttgtgggttttgagagcaccaaataattcagctagtgctgcttaccttgaggcttcaaaggaggaccctttgcaattcttaccaagcgggtttttggaaaggacaaaggagaaaggtttggttgtggcttcatgggcactcaggttcagtccttggtcaaattcagttggggggtttctaagcattgtggttggaactcaacattggagatgtgcaaga

SEQ ID NO: 44923 - DNA, 273 bp, Glycine max
  Clone ID: 701041870H1
tgttaagaaccctacttctaagattgtctatgatgatcacaaccatgaaagatttcccccaggtgacccaagcaagagggcatttgcctacttcgtacttacaggtggtaggtttgcttatgcctctgtggtccgtctccttgtcctcaagtttgtgctaagcatgtctgccagtaaggatgttcttgctctggcttcacttgaggttgacctctccagcattgagcctggcactacagtgactgttaagtggcgtggaaagcctgtgttcat

SEQ ID NO: 44924 - DNA, 267 bp, Glycine max
  Clone ID: 701041871H1
aagacacacataattagcatagttattatggggagggttgagtactccccattgtttgagacaagaaggtgcagaggaaggttcatctacaggtcctttgcaatctcattatttgtgaccatatgctttatatggcattacagatttagccacataacaaagggtgaagatggaaactgggcatggcttggtatgcttgcttcagagctgtggtttggcttttactgggtccttactcaagcccttagatggaacttgtgttcagac

SEQ ID NO: 44925 - DNA, 268 bp, Glycine max
  Clone ID: 701041873H1
gttcactcttcttctcttgcggctagggttttagcgcacttcttctagatttatagaagatgggtaaggaaaaggttcacatcagtattgtggtcattggccatgtcgactctgggaaatccactaccactggtcacctgatttacaagcttggaggcattgacaagcgtgttattgagaggtttgagaaggaagctgctgagatgaacaagaggtctttcaagtatgcctgggtgctggacaaacttaaggctgagcgtgacagagg

SEQ ID NO: 44926 - DNA, 267 bp, Glycine max
  Clone ID: 701041874H1
atccatatggaggtttaatcctaaacaggccaactattagcaggagattcatgcctgaaaaggggtctcctgaatatgatgcgttggctaagaaccctgagaaggagtttttgaagactattactggcaagaaggagaccctcattgaccttacagttatagaaatcttgtcaaggcacgcatctgatgagttctaccttgggcagagagatggtggtgactactggacttctgatgccggtccattagaggcatttaagaggtttg

SEQ ID NO: 44927 - DNA, 251 bp, Glycine max
  Clone ID: 701041875H1
agcgcagaatccaagaagaaaggatcaactgtcaaagataaggaaaaatctaaaaggatgaagggtcaatcatcccatgcaacctggaaaagtgaaacagagatgcatctaaggcaacagtttgattagcattatgtgttcttgtatgttaccagttacctggtagaatgtgatgtgtttaggactatgctgttaaatcaacaaattaacttcgtcgttatcaatgccagcaggtacaagttgctacatat

SEQ ID NO: 44928 - DNA, 269 bp, Glycine max
  Clone ID: 701041876H1
caattaattatagtttaggctgcaaattatggaatcccatgatgaagagcatgctgccaaactacttagagctcaaacccacatatggaatcacatatttagcttcataaactccatgtcccttaaatgtgtggttgacttaggcataccagatatcatacacaactatggccaacccatgccactctcaaacctcattgcttcactaccaatccacccatccaaaacttgcttcgtccatcgcttgatgcgaatcatgatccattctg

SEQ ID NO: 44929 - DNA, 268 bp, Glycine max
  Clone ID: 701041877H1
actcgagccgattcggctcgagcaaattcccttcccatggtctctcactcttcaattaattccatttagctttccccaaataccaaaccctttttcgcttagatcccaatccaattgggttatggacatggcttccagtccccgcaccgtagaagagatcttcaaggattacagcgccagaagaacctctgttattcgcgctctcactcacgacgttgatgaattttacggcctctgtgatccagataaggataacctgtgcctctat

SEQ ID NO: 44930 - DNA, 267 bp, Glycine max
  Clone ID: 701041879H1
gatcatcagaggcaatggcgagcaggtactgggcagtgtctcttcccgtccacaactcggcatcatctcagctctggaaccaattgcaggaacgaatctccaagcattccttcgacacacctctctacaacttcaacattcccaacctccgcgtcggaaccctagactctctcctctcactcagcgatgacctcgccaagtccaacaatttcgtcgaaggagtcacgcacaagatcaggcgccagattgaggagctcgagagagttt

SEQ ID NO: 44931 - DNA, 265 bp, Glycine max
  Clone ID: 701041880H1
aatttattcaaaaagaaaagatgaaccctaatttcctctgtctctgaacttggaagatctggtttccattatctcctccatcttcacgttccgaaattgtagatagaagatcacacttgctcaattcccttctcaagttattgttggttggcaatgcaagatccaaggattcctttgtcagaggagatcttgaataataaaccaaggaagaagaaaaactcaacccagaaggcatctttatgtcttttgcaagcgaatggtgtca

SEQ ID NO: 44932 - DNA, 270 bp, Glycine max
  Clone ID: 701041882H1
agcaaagccaaggaaatgaaggggctttgacatttccaattttctaatatttaatattcgctcattccaattttcatcacaaacacacactgctacaccaaaaaccgaagcaaaacaagtgaatcaagactctacttcgtgttccaatcagaggatatagatagagaattatgagtcgattgaacaaaaatagaagtatttgtagtgatggtagtgccagtaatgaatcttcttcaagtggaataactggagaaagggatgatcatcttg

SEQ ID NO: 44933 - DNA, 121 bp, Glycine max
  Clone ID: 701041883H1
atgatccttcactcacttactcatcatgggcaattctgatctctgcctctggaagaaggcagaatgcttctccttgcattgcatagctgtcaggcatggattataccaccaactcacatcc

SEQ ID NO: 44934 - DNA, 177 bp, Glycine max
  Clone ID: 701041885H1
ttcaaaaattgcctatgatggttggcaaaatatcgggcacaccattccaccatggcagccattgcaatgtcattttacaacattggtcaaaatccgtaaaaaaataaagttctggaggtgtttggggttgggaaaggagaggaatgatacgatgttcttataattgcagctttgtta

SEQ ID NO: 44935 - DNA, 269 bp, Glycine max
  Clone ID: 701041886H1
cgccagtctcccagaaggaagctgacatccagatgatgttggccgccgacgtccacctcggcaccaagaactgcgacttccaaatggaacgttacatcttcaagcgccgcaacgacgggatttacattattaaccttgggaagacgtgggagaagcttcagctagcagctagggttatagttgcaattgagaacccccaggatatcattgttcaatctgcacggccttatgggcaaagagcggttctgaagtttgctcagtgcactggt

SEQ ID NO: 44936 - DNA, 272 bp, Glycine max
  Clone ID: 701041888H1
gttttctttgttctttttcaacccttacataattaatctgtgcaaaattagcatcagattgacccttggctaacttcgttttgatgtattttttcaaaacaaattaacctcagtttgttttgacaggctgcagaattactaaatcatccgcatcttcagccttacattcataaaattcacctaaaattaaatagccccataagaagtacttttccattccaatggccagagtcaaattacataaggagaactcagtttgtagagcagagtct

SEQ ID NO: 44937 - DNA, 266 bp, Glycine max
  Clone ID: 701041890H1
ccagaattcatgccattgagtcatgttcttgcaaccaagctcggtgctcgtctcaccgaggttcgcaagaacggaacctgcccatggctgaggcctgatgggaagacccaagtgactgtggagtattacaatgataatggtgccagggttccagttcgtgtacacaccgtgctaatctccacccagcatgatgagactgtcaccaacgacgaaattgcggctgacctcaaggagcatgtgatcaagcctgtgatcccggagaagta

SEQ ID NO: 44938 - DNA, 161 bp, Glycine max
  Clone ID: 701041891H1
caaattctctgtgttgtgttgtgtacttgtgttaattgtgttgttgttgtaggaaatttaagtgaagagagaatgatgatgaagtctgctatgtgtgcattggtgcttgtggcactggttgtggttgaagtggggcacatggctgaggctgcggtgacttg

SEQ ID NO: 44939 - DNA, 269 bp, Glycine max
  Clone ID: 701041893H1
cgcaacaaaaagaaagaatcccaggcgaggagaaagatggaggggaaggagcaggatgtgtcgttgggagcgaacaagttccccgagagacagccaattgggacggcggcgcagagccaagacgacggcaaggactaccaggagccggcgccggcgccgctggttgacccgacggagtttacgtcatggtcgttttacagagcagggatagcagagtttgtggccacttttctgtttctctacatcactgtcttaaccgttatgggagt

SEQ ID NO: 44940 - DNA, 270 bp, Glycine max
  Clone ID: 701041894H1
cctagatacatatgttcacgctgctgatggtactccgttactcatcaagaacgcaatctgtgtctttgaacaatatggcagcatcatgtggcgtcacaccgaaacaggcattcccaatgaatcgttcgaagaaacgagaacggaagtcaacttagtggtaagaactgttgttaccgtgggcaactacgataacatcattgattgggagtttaaaacaagtggctcaatcaaaccctcgattgctctctcgggtatattggaaattaagga

SEQ ID NO: 44941 - DNA, 272 bp, Glycine max
  Clone ID: 701041895H1
gttcaacaacgtggcgctgcaattatcaaagctagaaagctttcaagtgcactatcagctgctagtgctgcttgtgaccatattagagactgggttcttggaactcctcagggcacttgggtatcaatgggagtatattctgatggttcctacaatgttccagctggacttatatattcattccccgtcacttgtgccaatggggaatgggcaatagttcaaggactttccattgatgagtcctcaaggaagaagttggacttgactgcaga

SEQ ID NO: 44942 - DNA, 181 bp, Glycine max
  Clone ID: 701041896H1
ccctaatcagctcacagacctctctttctcgcgtctttggaggtatagtttccaagtctcctttccttcgatccaagcgctattgttcccaatcttttttcataccaattgctgttccagcaaaattttatggaggagcaattcatacttagagttccacctaatgtggcagagcggatag

SEQ ID NO: 44943 - DNA, 289 bp, Glycine max
  Clone ID: 701041901H1
agcagataaacctaaagacgaacctcgcaaattccctcaacactggagtcactaagtgggactcggtggaaattcattctgggactcagctaagctgaccaaccatgattcaaaatggttgcattgtatcccaagggtgtgcccctctgaattctaggtcacgcaaccatgtcatacctagtacctctgtctttcgttgcgcttctcgaatgcctcccaaggttgccgtctctaacatccggagcttttggggacataatttggaatttcaatccttgttgccaagagg

SEQ ID NO: 44944 - DNA, 280 bp, Glycine max
  Clone ID: 701041902H1
ccctgttggtgctaaaataaattttgtttcttggtctcctgatggttgtcatttgtcctttagcattcgtgtgaatgaggaggacaatgatagcagtaaactcacagtatggattgcagatgtgaaaacagggatagctagaaagttgtttcagtcacctaatgtacatttgaatgcagtttttgacaattatgtttgggtaaataattcttcattgttagtttgcaccattccatcatcccgtggagctcctccaaagaaacctttggttccaagttgc

SEQ ID NO: 44945 - DNA, 133 bp, Glycine max
  Clone ID: 701041867H1
gggcaataaaacagcaaaagtttcaattttgtttctgttgaattttctcgggttggtttgcagtagcaatggcggagacatagtggtttactggggccaagacgagagcgagggcacattgagcgaaacatgc

SEQ ID NO: 44946 - DNA, 268 bp, Glycine max
  Clone ID: 701041905H1
cactcgagccgattcggctcgagcggctcgagttcctttccccggctttcttctctctctcaatctctttcatgtgagggtagaaccagaacaaaacacaaaccacacactctcctaactcgaggttatttttttctttccccaaagaggcatgagttgcaacgggtgccgcgtccttcgaaagggctgcagcgagtcttgtattctgcggccgtgtctacagtggatcgatacgcccgaagcacaaggccatgccactgtcttcgtt

SEQ ID NO: 44947 - DNA, 284 bp, Glycine max
  Clone ID: 701041830H1
cggctcgaactcgaccgaatcggctcgagatttggaactaccaaaagccgaacgtcgcacaactacacacaaacctagcaaccattgagttttgtatgctttgaaacatcgtgtgcacagtaccccagaagatcgaacaaggatctccacaaagacaaaccccagttctcaactgtgttttacctctctctcacctaatatcagaccatacccagggtttttggtttttctttttaaattagtttcagtgacattaacgaggctgagaagatgcagcagacacc

SEQ ID NO: 44948 - DNA, 95 bp, Glycine max
  Clone ID: 701041831H1
gttactttccaatttgaattgttccattttcatttctttcgcaaaagttgcaactacttcctcagaaaaaaagtttctaagttaaggcaatccag

SEQ ID NO: 44949 - DNA, 94 bp, Glycine max
  Clone ID: 701041833H1
caacaccattcatggctgtgtcaaggaggaatcgttcacaagtgagaatcatcatcatcatcatccagcagcagcagcggcattatcttccatc

SEQ ID NO: 44950 - DNA, 119 bp, Glycine max
  Clone ID: 701041835H1
cggctcgagggaagagagagggagattctttgtttgctaccttctctcggaaaaatggttacgttcaggtttcaccagtaccaggtggttgggagggctcttcccacggaagcagatca

SEQ ID NO: 44951 - DNA, 116 bp, Glycine max
  Clone ID: 701041836H1
atgggttcttcttcttctatgtggacggtgtgtgtgattttggcatcactggcctctgcagcactctgtgccaacccacgcaggccagtggatgtacaatttggccgaaactacgt

SEQ ID NO: 44952 - DNA, 148 bp, Glycine max
  Clone ID: 701041837H1
aaacttcaacttgtaatcaagggagacagaaaatttcaagcacaaaaaatggcggagaagaaagtggtgatcctaggaggtggtgttgccggtgccaaccttgcaaaaactatacaacatcaagccaacgtcacccttattgatccga

SEQ ID NO: 44953 - DNA, 278 bp, Glycine max
  Clone ID: 701041838H1
tttcgatttgcttcctcttcttcttcctctgcgcttcacatcctcagacctcaaccatcagcaccaccataccaacaacatcatcgcggcgccatcaccaccgtaccaacaacatcatcgcgcgatccaagcaacactcacaccaacagatctatgcgccacaacaccaccgcgcaacggagaagtcgcgcgcgcgcaggaagcctcaaagattgattcgcgcacacagatggaggtgcaatgatggtgtgacggcggcgcggtggtggctggtccaa

SEQ ID NO: 44954 - DNA, 277 bp, Glycine max
  Clone ID: 701041840H1
ccgacgcctccagataaacaaccttaactttcccacaacaccacccaacattctttttctctctctagatttcatttagttgttgctgtcttcttctgtttgtgtgtgccaacacagagcgaaaaacatggctctgaaccaatcaaaagccgtgttgttgagggtgagtttggtggtggtggcgctcttcatagcagggtacatagtgggtcccctctctactggcatttcgttgaaggtttggctgcggtcaaccactcttcttctagttgtgccc

SEQ ID NO: 44955 - DNA, 271 bp, Glycine max
  Clone ID: 701041842H1
gtgccattcatttcttctagccatggacgagaagctcatacagcggttagaatcggcggtgttgcgcttggagtcgctatcctctggactccacccctccgcttcacaatccggcggcgcccacgctcccgatgcggcgctcgatccctccgtcgtcgccttcgccgatctgatcgaccagtacgtcggtagggtttccggcgctgcagaggttatcggcggacaggtcttgggtgtcaccaaactggtgcaggaagctttcaatgttcag

SEQ ID NO: 44956 - DNA, 276 bp, Glycine max
  Clone ID: 701041843H1
aaagtttcttcctttctctgctctttgccttctctgacacatttggtgccttgtagagcgtgttttggcaggaaggtggtatggcgaaggacgttgaggttgctgagcgtggctccttctctgggaaggactaccaggaccctccaccagcaccactcattgatgctgaggagctcacaaagtggtccttttacagggctctcattgctgaattcattgccactttgctcttcctctacattactgtgctcacagtcatagggtacaagcaccaga

SEQ ID NO: 44957 - DNA, 138 bp, Glycine max
  Clone ID: 701041844H1
aaattgtgaaggaagtctcttcctacttgaagaaagtaggatacaaccctgacaagattccttgttgttcctatctctggttttgagggagacaacatgattgagcaggtcacaaaccttgactggtacaagggtcca

SEQ ID NO: 44958 - DNA, 277 bp, Glycine max
  Clone ID: 701041845H1
agcaaagaaagaaagaaagaaaaccctagcttaccttttcaactttcaagatgcaaatcttcgttaagacactcactggtaagacaatcacccttgaggtggagagttcagataccatagataatgtaaagtccaagattcaagacaaggaagggatcccaccagaccagcaacgtctcatttttgctggcaagcagcttgaggatggacgtacacttgctgattacaacatccaaaaggagtccactcttcacttggtgctccggctccgtggtgg

SEQ ID NO: 44959 - DNA, 279 bp, Glycine max
  Clone ID: 701041846H1
cacacttccacgtcaccaccaccaacgtcgaacgtggagcgtgaggctgtttccggtaacctctcccggcggcgctgagtggtgatcaaggaaatgggtcagacgctgagttgcgtgcaacagcacgaggaccatggtgtgctcttccctgcacttgcaagtggagaataggaggttgttgaggccatggtggaggaagaccccactgtgttggaacacaccattggctgtgacaggctttctcctctgcatgtcgctgctgccaatggtccgatcgag

SEQ ID NO: 44960 - DNA, 280 bp, Glycine max
  Clone ID: 701041847H1
taagcagcggctaccctaatcctctcctcttcctctctactaatttcagctatggccgacgaagctgtggttgttccagatcccacccagatcgatgtcaagctctttaaccgctggagcttcgacgatattgagtggcgacatccaagcacgccacgtatgtgcctcacaccgccggcaggtactcggtgaagcggttcaggaaggcgcaatgcaccattgttgagaggctgaccaactctctcatgatgcacggtagaaacaatggcaagaaactctt

SEQ ID NO: 44961 - DNA, 279 bp, Glycine max
  Clone ID: 701041848H1
cttcttttactatcttcaatggctgattcaggctcagcctcttcttccagaatgtggtgctccatccccgaacgggttcagctgcatgcggccatgttggccctgcagtttggctatcctggctttcatgtggtctcaagagctgcccttaacatgggcattagcaaacttgttttcccagtctaccgcaacattattgcttttctcctcctccttccttttgcctacttcttggacaagaaggagagcctgccattactttaaactcctcttacagtt

SEQ ID NO: 44962 - DNA, 128 bp, Glycine max
  Clone ID: 701041849H1
ctcaaaggtgttgatgttggtgcatataagcccttctgaagaggatcgtttgcgaaacagtttgttccttaaattttgcaaagagagcgagagcaatagagtccaacaaagaagtgccagtggaagtg

SEQ ID NO: 44963 - DNA, 131 bp, Glycine max
  Clone ID: 701041851H1
ttccatacgaggccgcagggcagagtttctgttgggtttgggaggctaagtagggtttgcgttgagaaagagagagatgggaagagaaaaggagacaacaaaggtagcttacacagtggagcagcttgtag

SEQ ID NO: 44964 - DNA, 91 bp, Glycine max
  Clone ID: 701041852H1
gtgaaagagaatccgaggcgaagagaagagaaaaattaagatggaggggaaggagcaggatgtctcgctgggagcgaacaagttcccggag

SEQ ID NO: 44965 - DNA, 113 bp, Glycine max
  Clone ID: 701041853H1
ctggacttgaagcaatatcctggtctacgtgttgaggttgggaatgccgccattgattcgctagaaaaaatgagggaagaaagcaaaagagcaccactacagctagttgatat

SEQ ID NO: 44966 - DNA, 157 bp, Glycine max
  Clone ID: 701041854H1
gcaactgaagccagaaccaaagaggatgctgtctagttgggtgaagagtgcctttcgtagtgggaagaaggatatgcaagaatctgttaatcagaatcttgattttgtccttggctcagctccaatatgggatagggtggagcttaaaggcaacaag

SEQ ID NO: 44967 - DNA, 277 bp, Glycine max
  Clone ID: 701041856H1
ctcgaggacgagttccgctcgctcatggagcgcggcggcgaggccttcgacctcactcggagccaccggaaaggcgactcagcggggaatttgccgttcgagtcagacgaagacgtcgacgaagaagaagaagaagagcggaacgttggaataggaggaggagacgaggaggagcagattccggtggcgctgccggtccgggacttcgacatcgtcatcgacgcactgccgtcggggacgatcaacgacctgcacgagatcacgaagcgaatggtgg

SEQ ID NO: 44968 - DNA, 275 bp, Glycine max
  Clone ID: 701041857H1
cactcgtggccacacgagctttaccactactagggcggcaaaaccactgttcttagcttctgcatgtgaagtgaattcttgcaatgcttccttttctccacggtgagcatgaataacaacaattgctggttcttgtaattattattattgcaattccattttgtgacttccctgttgcttgttaattagtgtgacccagatggtgttttgagtatttgtttggagattcattcagtattttgagagatttgtatgataaatatggatactttgct

SEQ ID NO: 44969 - DNA, 154 bp, Glycine max
  Clone ID: 701041858H1
ctctaatcactctagctgttgcaaatttctactatttttcaatggcttctgcagatgttgagttccgttgctttgttggtgggcttgcttgggtcaccggcaacgatgccctcgagaaagccttttcaatctacggcgacatcgttgaatcgaa

SEQ ID NO: 44970 - DNA, 277 bp, Glycine max
  Clone ID: 701041828H1
gttgatctttggttgaagattcaagaggaggcaaggttagatgttgatcaagaaccaattttatccagctactatttcagttccattttgtctcacaaatctttggagagtgccttggccaaccacctctccacaaatttgagcagcttgagccttccaagcagcaccctttttgaccttttcatgggtgttttggttgatgatggagatgatgacatcgtaggtgctgtgaaggatgatttgatagctgttaaggagagggacctgcttgcataag

SEQ ID NO: 44971 - DNA, 159 bp, Glycine max
  Clone ID: 701041860H1
ctcactttcttttctttttcttttcttttcccgaatctgaatttttccctacaaaatccactcactgtcctcaaagacagatccgaaagtggatgccaaatctatcacccctcgtcgcccgagattatcgtacccattagattcttcttccctcttcct

SEQ ID NO: 44972 - DNA, 275 bp, Glycine max
  Clone ID: 701041861H1
caaattaatcaaacatggctagggttagtgctttgtttcactctttgctcttgatttcttcccttgtattggcttctcaaatccatgtttcctctgggaaactagtccctggactatcatggaattactatttgttgacatgtcccaagcttgagaggattataaggaagcatcttgaggatgtcttcgagaaggacagtggagtagctcctggcatacttcgactcttcttccatgactgctttcctaatggatgcgatgcgtctatattgttg

SEQ ID NO: 44973 - DNA, 276 bp, Glycine max
  Clone ID: 701041862H1
catcaatctcgtttgttctcactaactattacttcatcatgtcgtcgagcacagttggtcaagtcatcaaatgcaaagctgcggtttcatgggaggcagggaagccacttgtgattgaagaagtagaggtggcaccaccacaagctggtgaagtgcgtttgaagatcctctacacctctctttgccacactgatgtttacttctgggaagccaagggccaaactccattgtttcctcgtatatttggtcatgaagctggagggattgtggagagcg

SEQ ID NO: 44974 - DNA, 273 bp, Glycine max
  Clone ID: 701041863H1
actgacgtctactggactactatatggatggggttggaataagtttggacaggttggagttggtgacaatgttgatcgttgctctcctgtgcaagtgaagttcccccatgatcagaaagtagttcagatctcatgtgggtggagacacacaattgctgtaactgaaaaggaaaatgtattttcttggggaagaggcacaaatgggcaacttgggcatggggataccgttgaccggaattctccaaagattattgaggcattgagtgtggatgg

SEQ ID NO: 44975 - DNA, 160 bp, Glycine max
  Clone ID: 701041864H1
tctcatttctcgtcttcactgagaaaaatccttctttgtgcatgctcctcgtttccatctaaaggggagagggggtgagtgagaaaaagagagtgaggtttctagcttctactcttgagtaaacatgactatggaagagggcagggtagagaacgaggac

SEQ ID NO: 44976 - DNA, 275 bp, Glycine max
  Clone ID: 701041866H1
gtacgcccagcgtgtcggtaccggtgctcccgtttacttggccgcagttctcgagtacctagctgctgaggtgcttgagttggctgggaatgctgcacgtgacaacaagaagaacaggattattccgagacatgtgctgttggctgtaaggaacgatgaggagttggggaaattgcttgctggtgtcaccattgctcatggtggtgttcttccaaacattaaccctgttttgctacctaagaagactcaggttgctaaggaaccaaaatctccat

SEQ ID NO: 44977 - DNA, 254 bp, Glycine max
  Clone ID: 701041794H1
cctagatacatatgttcacgctgctgatggtactccgttactcatcaagaacgcaatctgtgtctttgaacaatatggcagcatcatgtgggcgtcacaccgaaacaggcattcccaatgaatcgttcgaagaaacgagaacggaagtcaacttagtggtaagaactgttgttaccgtgggcaactacgataacatcattgattgggagtttaaaacaagtggctcaatcaaaccctcgattgctctctcgggt

SEQ ID NO: 44978 - DNA, 270 bp, Glycine max
  Clone ID: 701041796H1
ccctaatcagctcacagacctctctttctcgcgtctttggaggtatagtttccaagtctccttttcttcgatccaagcgttattgttcccaatcttttttcataccaattgctgttccagcaaaattttatggaggagcaattcatacttagagttccacctaatgtggcagagcggatagagcgtcttctgaatgaaaacaatgcttcttcatctgaagacaagtcactagatttgtcatttagagaggatggaagaagtggtacgttt

SEQ ID NO: 44979 - DNA, 148 bp, Glycine max
  Clone ID: 701041801H1
gctgccacaaattataataatagggttgttgaatgccatttggcttctattgtgctcgctataaagctagggatggatccaaaagaggcaatatcaaaagtgagcacactgtctgatgttgaagggttatgcgtatcatttgctggta

SEQ ID NO: 44980 - DNA, 194 bp, Glycine max
  Clone ID: 701041803H1
gttctctctctctgattcgatcgatttcgattgttgaattcatcacatcacggagccttgacaacgatggtgctgccgctatttactgctttcattctctttgcttttattccgaatggattgttagcagttccttccaccgtcccggcattcatttggtcatcacattatgaactggcctctgaaaatatatt

SEQ ID NO: 44981 - DNA, 141 bp, Glycine max
  Clone ID: 701041804H1
gagatcagtgaccggcgtgagacagcaaagatggtggctcgtggcaccacctcaccttcaatttcctgcttgccgtcttcaactcaaaccgactacaacgcgcgtcgatactgttcttttccgcaacgcccacgcccacgc

SEQ ID NO: 44982 - DNA, 143 bp, Glycine max
  Clone ID: 701041805H1
aataagtgagatgggtctggcccgttttcaaaattttcgtcattatagttattgttacgattatgatactgagaaagttggggggcctgaaatttggcatctacagctatcagattgctatatttgttgtcttgtttagcaaa

SEQ ID NO: 44983 - DNA, 283 bp, Glycine max
  Clone ID: 701041806H1
gcggtcatcaatttcatctcgattgcattggttcggcattcaacataaaaggagcaatgcagtgccctaattgtcggaagattgagaaaggtcaatggctatatgctaatggttgtcggtcatatcctgaatttagcatggatgagtggactcacgatgaggacctttatgatcttagctactctgagatgtcctttggagttcattggtgcccttttggcaacctggcacgacttccatcatcctttgaggaaggggagttttcgtcatctgcatatcatga

SEQ ID NO: 44984 - DNA, 208 bp, Glycine max
  Clone ID: 701041807H1
atcatggacagagtgcaattcagagaaaccaaatcccagacaccatacaacacaacacagcactttggtcgtgtttcgtttcatctttttctccgagaaagatccaccccacgtttcaaaatcactttttttctctgctttgggaaatgatgccattgttgtcccttgcgaagcaaaccccatcaccaccatcatcatgtaggagcga

SEQ ID NO: 44985 - DNA, 230 bp, Glycine max
  Clone ID: 701041808H1
ctcgagccgtccttataaacttcttccgatgtgtttctctctttctctctccgtactcttcctttcttcataaaattttgcaatcggtttgacaactgaatttgcatttggtaatcaaattaataattgacaaaaaagaagaagacaaaaagggtggggaggcatagccagatattgaacctgccctctgttcttaatctcattctgcctcccctcagatctcgtcttca

SEQ ID NO: 44986 - DNA, 278 bp, Glycine max
  Clone ID: 701041809H1
ggggctacccgctgagtttaagcatatcaataagcggaggaaaaggaaacagcaacggcagttacaaaactaaaggcggcgccggtgtcgcgcacggaagtttagagtccggcatgacggcggtgaagctgctggatttgatgccggtgatgcgaactccgatgaggacgcggcggagatggcgccggaggagatgaatccgaagctgtttggtgtggcgattggagcgaagatgcgagacacggaggaagtggtggagattgtggaggtggaggaga

SEQ ID NO: 44987 - DNA, 281 bp, Glycine max
  Clone ID: 701041810H1
gcattgtgatgatctaaatacacaacaaattatcatggatgaaatcatgcaatctgtcggcactttagcacaggatcaatatggaaattatgttattcagcatattgtggagaatggtaaaccacatgaacggactgctattatcagcaagtctgccgggcagattgttaagatgagccagcaaaagtttgcttcaaatgttatcgagaagtgtttggcttttggtagtcctgaagaacgtcagattttggtgaatgaaatgcttggtacttctgatgaga

SEQ ID NO: 44988 - DNA, 274 bp, Glycine max
  Clone ID: 701041812H1
aattcagaaactgaatagaatgtcctgaaacaggttgaaaaagggaagcaagatgatgcactgtcagatttaagtgatctcttgggagaactgaaaggcatggccattgacatgggatctgaaatcgggaggcaaaaccaagccttggacggttttgacaatgatatggagaagttgaccgtccgtgtgaatggtgctaatcaacgtagtcatcgtttgcttgggaaataggggcgtatatcatgagattgatactaatttttaccatgcatta

SEQ ID NO: 44989 - DNA, 95 bp, Glycine max
  Clone ID: 701041813H1
tttctttcaaacaaacgctgtttctctctctctctctctcgtagttcaattcaattcaattcaatatgatgcagagactctcttctaccactact

SEQ ID NO: 44990 - DNA, 287 bp, Glycine max
  Clone ID: 701041814H1
gtcccaaagagctaacaagagattcaagaccggcatggctaatgaagaggaacagaaaaaccacctcttcggcatcaaagatctcggtcacaagactctccttcagagtgatgcactctatcagtatatacttgaaaccagtgtctatccaagagagcacgagtgcttgaaagagatacgcaagatgactgcaaaacacccactgaacatcatggcaacaccagcagacgaaggacaacttctgagcatgcttgttaagctcccgaattcagagaacgccttggaaa

SEQ ID NO: 44991 - DNA, 285 bp, Glycine max
  Clone ID: 701041815H1
gttcgggtcctctcaatccgatcaacgacaccgtcgaattccgatcccctcgcgacgccgatggccacggcacccataccgcctccaccgccgccggccgctacgccttccaagccagcatgtccggttacgctgctggaatcgcgaaaggcgttgctccgaaagccagattggctgcttacaaagtttgctggaaaaattccggttgcttcgactctgacatcctcgccgcctttgacgccgccgtgaacgacggggtggatgtgatgtcgatctccatcggtg

SEQ ID NO: 44992 - DNA, 274 bp, Glycine max
  Clone ID: 701041816H1
ggaaaacgcagaagaacttgcggcactagatgccattgatgcggggaagttgtaccatatgtgtaggaatttggaagttccagcagcagcaaacactcttcgttactatgcaggtgctgccgataagattcatggcgaggtgttgaaaatgtcccgagacttccatgcctatacattgcttgaaccacttggtgttgtgggacacattactccctggaatttccccaataccatgttctacatcaaggttgctccttctttagctgctggctgc

SEQ ID NO: 44993 - DNA, 256 bp, Glycine max
  Clone ID: 701041817H1
ggaaaagacactgtctcgcgagtgaacacaggttacagcaatggctttctttggtagaattgggaatttattaagacagacagcgagcaggcatgttagttcagaattgcgatcatccccttcgttttttcaggctatacgcagtatgtcatctgctaccaagcaaaagctgtttatcggaggtgtataatattctactgacgagcaagtttggagggaagctttttcaaaatatggtgaagttgtggatgctagg

SEQ ID NO: 44994 - DNA, 143 bp, Glycine max
  Clone ID: 701041818H1
ctcacgaccctccgccgccgcggttgcaagcagagcacaccatcgaaatgggcgaacgaaggcgttggttccggaatcggtggtgaagaaggagaagaggaacgaggagtgggctttggagaagaagcaggaactcgatgccg

SEQ ID NO: 44995 - DNA, 134 bp, Glycine max
  Clone ID: 701041819H1
aaaaaacttgagagagagaaaatagagaaagaggctaggtagaaactagaacccgggtcctcttactacactcacccccaatttcccgagcctcagcttcgggacacccgaacctcattactcgggacgcgaat

SEQ ID NO: 44996 - DNA, 266 bp, Glycine max
  Clone ID: 701041820H1
tttgattccaagattgtttgaaactggggctatctgtttggtggatgagatttttcttgagtgccattacaataggtggcagaggtgttgccctggacagaggagccccaagtatgagaaaacttatgatcagtgcttgcagctcttcacttctctcagacaaagtggagttcttgttcatcaatggttttaattaactttgtagaattgcctgatggatgatgggtcaaaccctatatgcatgttctgagcttctgcatgtttct

SEQ ID NO: 44997 - DNA, 281 bp, Glycine max
  Clone ID: 701041821H1
ggctgctgaagtgacatatgaggataacgagaattttgttgatgatgggattcaaattgagcctttcaacctagagaaagaaagggaagaaggttattttgatgctgcaggaaattttgttgaatatgtaagagagaatgagattaaggatgcatggcttgataatgttgaagttgatccaaaatatgctgcattaagctctgtagcaacaaatgatgaagatgagggccccccagacctttcttctaaagatattggaatcatgacgaggcgcattgcaa

SEQ ID NO: 44998 - DNA, 280 bp, Glycine max
  Clone ID: 701041822H1
tcgaactcgagtggtaatggagacgattttacaagcaacgtgaaaaggctcataattgatttggtcaccatttgaaggaagagaatgtgaaagagtgaggtcagagttgcctgtagacgaagacaatcgtcatcagttgcagctgcaaaggaatgaggtaattgcattgacgaaccttctcaatcgactctcggaatccttcaaattcgtccacgaagtggacctacagttgaaagaatcatggaaggaggacatttttctgctcatacaagaactgatt

SEQ ID NO: 44999 - DNA, 280 bp, Glycine max
  Clone ID: 701041823H1
ccaacatctatctcacttcttagttctttgtggctctttccatgatggcctctcctacatctccaagagttctcttcttgagtctctttgtaactctttccatgattttacatttgagttcagccaggaagttgtctgagtcagacccccaattgcagttccaataccacagaggccctctcctcacaggcaaaatctccgtaaacctaatttggtacggtaagttcaaaccttctcagaaagccattgttgctgatttcatcacctctctctcctcttc

SEQ ID NO: 45000 - DNA, 277 bp, Glycine max
  Clone ID: 701041824H1
gatcaacacaaaggtgggaatgtattgattctactctctgaagaatctggagatcagcttgtagcatccaactatgtcagcaaacagttctttgcatgtggaattatcgaggaagacttcgtttttgggattgagattatgggttttgattgggataggtgttggtgtttttatagttgtgattctttgtgtattatctgtatgggtgatgtttcggagaaagtctaaaagatctctggacaagtactctttgtcacaaatacacatgtctcagagg

SEQ ID NO: 45001 - DNA, 263 bp, Glycine max
  Clone ID: 701041793H1
cgcaacaaaaagaaagaatcccaggcgaggagaaagatggaggggaaggagcaggatgtgtcgttgggagcgaacaagttccccgagagacagccaattgggacggcggcgcagagccaagacgacggcaaggactaccaggagccggcgccggcgccgctggttgacccgacggagtttacgtcatggtcgttttacagagcagggatagcagagtttgtggccacttttctgtttctctacatcactgtcttaaccgttat

SEQ ID NO: 45002 - DNA, 138 bp, Glycine max
  Clone ID: 701041826H1
cttttctacttctttcgttgtcgccgttcgttcacagcgtacctctgctctcgaagatggctcctcccagaggtggtggtgggttcaggggtggtaggggtgacagaggtagaggaacgggtggcggtggaggaagag

SEQ ID NO: 45003 - DNA, 226 bp, Glycine max
  Clone ID: 701041827H1
cgagaggagaggagagaagagaggaagttttgcacgtttgaatctatagaatagaatcaaaccaaattgaaagaagatcgatcgatcgatcgatggctctggtcggagttggagtgaagcatgcggcggagggcgcaccggaggagaattgctccgccaagcccaccaagcagggcgagggcctccgccactactattctcacaagatccaggagcatcgctcctt

SEQ ID NO: 45004 - DNA, 269 bp, Glycine max
  Clone ID: 701041757H1
cctcgtggccacacgagctttaccactactagggcggcaaaaccactgttcttagctttcgcatgtgaagtgaattactgcaatgcttccttttctccacggtgagcatgaataacaacaattgctggttcttgtaattattattattgcaattccattttgtgacttccctgttgcttgttaattagtgtgacccagatggtgttttgagtatttgtttggagattcattcagtattttgagagatttgtatgataaatatggatact

SEQ ID NO: 45005 - DNA, 265 bp, Glycine max
  Clone ID: 701041759H1
aacgacctgtttcctccctcgcacggatccacccgatttctgagattccttcgaattgttaactctctttcagtttcaagttggaaactttttcgattttcgctttctggaggtgtgaattgttgtttgaaagtcacaagcaatggtgaaggacactgcgtattatgacatattaggtgtcaattatgatgcatctgctgcagagatcaagaaagcttattatgtcaaggctagaattgttcaccccgataaaaatcctgaggat

SEQ ID NO: 45006 - DNA, 268 bp, Glycine max
  Clone ID: 701041760H1
ctcactttcttttctttttcttttcttttcccgaatctgaatttctccctacaaaatccactcaatgtcctcaaagacagatccgaaagtggatgccaaatctatcacccctcgtcgcccgagattatcgtacccattagattcttcttccctcttccttctacactttcccaaattctcacactattggcggttctagagcacaatttagtttatctactcactgttactgcgatttttgtcctacccttttcactattttagctat

SEQ ID NO: 45007 - DNA, 270 bp, Glycine max
  Clone ID: 701041762H1
catcaatctcgtttgttctcactaactattacttcatcatgtcgtcgagcacagttggtcaagtcatcaaatgcaaagctgcggtttcatgggaggcagggaagccacttgtgattgaagaagtagaggtggcaccaccacaagctggtgaagtgcgtttgaagatcctctacacctctctttgccacactgatgtttacttctgggaagccaagggccaaactccattgtttcctcgtatatttggtcatgaagctggagggattgtgg

SEQ ID NO: 45008 - DNA, 267 bp, Glycine max
  Clone ID: 701041764H1
tctcatttctcgtcttcactgagaaaaatccttctttgtgcatgctcctcgtttccatctaaaggggagagggggtgagtgagaaaaagagagtgaggtttctagcttctactgttgagtaaacatgactatggaagagggcagggtagagaacgaggactacacacaagatggaactgtgaacattaaagggaaacctattcttagatccaaaagtggtggttggaaagcttgctcctttgttgttgtatatgaggtattcgaaag

SEQ ID NO: 45009 - DNA, 271 bp, Glycine max
  Clone ID: 701041765H1
ctcacgcatttcctcgttttcttcttcttcccttttctctcttctctctctttctccggcgacgatctcagattccggtcactcctctcgccggcgatcccttattcctccgtcctccgtcgagtcctttccgattcgaatcgttcccagccttgtgccaccatgaatcccgaatacgattatttgttcaagcttttgctgattggagattctcgtgtaggcaagtcatgtcttctcctgaggtttgctgtccaaatgtattgacgtatta

SEQ ID NO: 45010 - DNA, 268 bp, Glycine max
  Clone ID: 701041766H1
gtacgcccagcgtgtcggtaccggtgctcccgtttacttggccgcagttctcgagtacctagctgctgaggtgcttgagttggctgggaatgctgcacgtgacaacaagaagaacaggattattccgagacatgtgctgttggctgtaaggaacgatgaggagttggggaaattgcttgctgacgtcaccattgctcatggtggtgttcttccaaacattaaccctgttttgctacctaagaagactcaggttgctaaggaaccaaaa

SEQ ID NO: 45011 - DNA, 267 bp, Glycine max
  Clone ID: 701041767H1
gggcaataaaacagcaaaagtttcaattttgtttctgttgaattttctcgggttggtttgcagtagcaatggcggagacatagtggtttactggggccaagacgacagcgagggcacattgagcgaaacatgcaactctggactatacaaaatagtgaacataggctttctggcaaaatttggcggtgggcgggaaccagaaataaacctagcaggacactgcgaccctgcatcaaacggttgcaaaagtttgagcaaagacataaa

SEQ ID NO: 45012 - DNA, 268 bp, Glycine max
  Clone ID: 701041768H1
tctaaactttgaacttgatagatactgtgagtgttttcgttcctcaatcaatctaattctctcaattgcttcttctctctccaccaaaccattctcatcaatcgacgctctctccgccttcgcttctctcaatcccgatctccgatccttcttcctcggctacctccgtctctcactccgtcctcgtcttcccaagagacttcagatacgggctgctgggagtatctatggaaatcactttcgtgtttcaacatatggagaatcacat

SEQ ID NO: 45013 - DNA, 265 bp, Glycine max
  Clone ID: 701041769H1
tcaatgagttagcttcgggtttggaattgagtggtcaaaggttcttgtgggttttgagagcaccaaataattcagctagtgctgcttaccttgaggcttcaaaggaggaccctttgcaattcttaccaagcgggtttttggaaaggacaaaggagaaaggtttggttgtggcttcatgggcacctcaggttcaggtccttggtcacaattcagttggggggtttctaaggcattgtggttggaactcaacattggagagtgtgca

SEQ ID NO: 45014 - DNA, 268 bp, Glycine max
  Clone ID: 701041770H1
tgttaagaaccctacttctaagattgtctatgatgatcacaaccatgaaagatttcccccaggtgacccaagcaagagggcatttgcctacttcgtacttacaggtggtaggtttgcttatgcctctgtggtccgtctccttgtcctcaagtttgtgctaagcatgtctgccagtaaggatgtttctgctctggcttcacttgaggttgacctctccagcattgagcctggcactacagtgactgttaagtggcgtggaaagcctgtg

SEQ ID NO: 45015 - DNA, 265 bp, Glycine max
  Clone ID: 701041773H1
aggttcatcttcttctcttgcggctagggttttagcgcagttcttctagatttaatcaagatgggtaaggacaaggttcacatcagtattgtggtcattggccatgtcgactctgggaaatccactaccactggtcacctgatttacaagcttggaggcattgacaagcgtgttattgagaggtttgagaaggaagctgctgagatgaacaagaggtctttcaagtatgcctgggtgctggacaaacttaaggctgagcgtgaaa

SEQ ID NO: 45016 - DNA, 265 bp, Glycine max
  Clone ID: 701041774H1
atccatatggaggtttaatcctaaacaggccaactattagcaggagattcatgcctgaaaaggggtctcctgaatatgatgcgttggctaagaaccctgagaaggagtttttgaagactattactggcaagaaggagaccctcattgaccttacagttatagaaatcttgtcaaggcacgcatctgatgagttctaccttgggcagagagatggtggtgactactggacttctgatgccggtccattagaggcatttaagaggtt

SEQ ID NO: 45017 - DNA, 266 bp, Glycine max
  Clone ID: 701041776H1
caattaattatagtttaggctgcaaattatggaatcccatgatgaagagcatgctgccaaactacttagagctcaaacccacatatggaatcacatatttagcttcataaactccatgtcccttaaatgtgtggttgacttaggcataccagatatcatacacaactatggccaacccatgccactctcaaacctcattgcttcactaccaatccacccatccaaaacttgcttcgtccatcgcttgatgcgaatcatgatccatt

SEQ ID NO: 45018 - DNA, 271 bp, Glycine max
  Clone ID: 701041777H1
ccctcgagccgattcggctcgagcaaattcccttcccatggtctctccctcttcaattaattccatttagctttccccaaatcccaaaccctttttcgcttagatcccaatccaattgggttatggacatggcttccagtccccgcaccgtagaagagatcttcaaggattacagcgccagaagaacctctgttattcgcgctctcactcacgacgttgatgaattttacggcctctgtgatccagataaggataacctgtgcctctatgg

SEQ ID NO: 45019 - DNA, 270 bp, Glycine max
  Clone ID: 701041779H1
gatcatcagaggcaatggcgagcaggtactgggcagtgtctcttcccgtccacaactcggcatcatctcagctctggaaccaattgcaggaacgaatctccaagcattccttcgacacacctctctacacattcaacattcccaacctccgcgtcggaaccctagactctctcctctccctcagcgatgacctcgccaagtccaacaatttcgtcgaaggagtcacgcacaagatcaggcgccagattgaggagctcgagagagtttccg

SEQ ID NO: 45020 - DNA, 267 bp, Glycine max
  Clone ID: 701041782H1
agcaaagccaaggaaatgaaggggctttgacatttccaattttctaatatttaatattcgctcattccaattttcatcacaaacacacactgctacaccaaaaaccgaagcaaaacaagtgaatcaagactctacttcgtgttccaatcagaggatatagatagagaattatgagtcgattgaacaaaaataaaagtatttgtagtgatggtagtgccagtaatgaatcttcttcaagtggaataactggagaaagggatgatcatc

SEQ ID NO: 45021 - DNA, 263 bp, Glycine max
  Clone ID: 701041783H1
atcatcctgcactcacttactcatcctgggcaattctgatctctccctctggaacaaggcagaatgcttctccttcacttgcatagctgtcaggcatggattataccaccaactcacatccacctctcatcaattaccaacaattccaggaggtttatgccgtgccacttcagctggatcagatcttcagcattacacgtgggtcgtcttagagtgcacggtgaagggagatgggaagttgattctcacaggtcagaggttaa

SEQ ID NO: 45022 - DNA, 266 bp, Glycine max
  Clone ID: 701041785H1
ttcaaaaattgcctatgatggttggcaaaatatcgggcacaccattccaccatggcagccattgcaatgtcattttacaacattggtcaaaatccgtaaaaaaataaagttctggaggtgtttggggttgggaaaggagaggaatgatacgatgttcttataattgcagctttgttagtttcctgttctctttaagcctcaataattgatagttttatttttagtaagctcttaggaagaacttttaaaagggaagtagaagttca

SEQ ID NO: 45023 - DNA, 263 bp, Glycine max
  Clone ID: 701041786H1
cgccagtctcccagaaggaagctgacatccagatgatgttggccgccgacgtccacctcggcaccaagaactgcgacttccaaatggaacgttacatcttcaagcgccgcaacgacgggatttacattattaaccttgggaagacgtgggagaagcttcagctagcagctagggttatagttgcaattgagaacccccaggatatcattgttcaatctgcaaggccttatgggcaaagagcggttctgaagtttgctcagtac

SEQ ID NO: 45024 - DNA, 266 bp, Glycine max
  Clone ID: 701041788H1
gttttctttgttctttttcaacccttacataattaatctgtgcaaaattagcatcagattgacccttggctaacttcgttttgatgtattttttcaaaacaaattaacctcagtttgttttgacaggctgcagaattactaaatcatccgcatcttcagccttacattcataaaattcacctaaaattaaatagccccataagaagtacttttccattccaatggccagagtcaaattacataaggagaactcagtttgtagagcc

SEQ ID NO: 45025 - DNA, 262 bp, Glycine max
  Clone ID: 701041790H1
ccagaattcatgccattgagtcatgttcttgcaaccaagctcggtgctcgtctcaccgaggttcgcaagaacggaacctgcccatggctgaggcctgatgggaagacccaagtgactgtggagtattacaatgataatggtgccagggttccagttcgtgttcacaccgtgctaatctccacccagcatgatgagactgtcaccaacgacgaaattgcggctgacctcaaggagcatgtgatcaagcctgtgatcccggaga

SEQ ID NO: 45026 - DNA, 262 bp, Glycine max
  Clone ID: 701041791H1
caaattctctgtgttgtgttgtgtacttgtgttaattgtgttgttgttgtaggaaatttaagtgaagagagaatggtgatgaagtctgctatgtgtgcattggtgcttgtggcactggttgtggttgaagtggggcccatggctgaggctgcggtgacttgcaacccaacacagttgacttcttgtcttccggcaattaattcaggttctgcaccttcgagtgcttgttgccagaagctgaaggagcaaaagccatgcttct

SEQ ID NO: 45027 - DNA, 268 bp, Glycine max
  Clone ID: 701041756H1
ctcgaggacgagtaccgctcgctcatggagcgcggcggcgaggccttcgacctcactcggagccaccggaaaggcgactcagcggggaatttgccgttcgagtcagacgaagacgtcgacgaagaagaagaagaagcgcggaacgttggaataggaggaggagacgaggaggagcagattccggtggcgctgccggtcacggacttcgacatcgtcatcgacgcactgccgtcggggacgatcaacgacctgcacgagatcacgaagc

SEQ ID NO: 45028 - DNA, 268 bp, Glycine max
  Clone ID: 701041729H1
gagagaaatgcatggctggcaatataataggttcatcagtgcccaagagcgtccaagaaatgtccatggatggtgatgaaccaccatcaagatatgtagttaatggaaatagctttggatctaaagattcttctgtacagtttccaatacccatcattgatgtgcgtctcctctcatcagaagatgagctagagaagcttagatctgctctaagttcagctggatgcttccaggcaattggtcatgcaatgtcaagttcatatcttga

SEQ ID NO: 45029 - DNA, 274 bp, Glycine max
  Clone ID: 701041730H1
cggctcgactcgagcgaatcggctcgagatttggaactaccaaaagccgaacgtcgcacaactagcactaacctagcaaccattgagttttgttatgctttgaaacatcgtgtgcacagtaccccagaagatcgaacaaggatctccacaaagacaaaccccagttctcaactgtgttttacctctctctcacctacattcagaccatacccagggtttttgctttttctttttaaattagtttcagtgacattaacgaggctgagaagatgca

SEQ ID NO: 45030 - DNA, 278 bp, Glycine max
  Clone ID: 701041731H1
gttactttccaatttgaattgttccattttcatttctttcgcaaaagttgcaactacttcctcagaaaaaaagtttctaagttaaggcaatccagacacacaaacatcgacggaaaacgttcagctacatgcatagacatcttccttgctatcattcttcctcctcttggagtgcttctcaaatatggctgccaggtggagttctggatttgtttggtgctgaccctttttggttatatacctggaattatctatgctgtctatgctatcaccaagtg

SEQ ID NO: 45031 - DNA, 99 bp, Glycine max
  Clone ID: 701041732H1
catcctccaatgaacgacgctaccgccgccacccccgccacggcgctgttagatcgccgtggcaagtacaaccgcagcgtctcccacgtgaacgacgag

SEQ ID NO: 45032 - DNA, 259 bp, Glycine max
  Clone ID: 701041733H1
caacaccattcatggctgtgtcaacgaggaatcgttcacaagtgagaatcatcatcatcatcatcagcagcagcagcagcattatcttccatctacaagttcagaaatggagaccatgttatccaaattgctaccatccaacaatggatggagcaattcagaagctttgcaagaatttggaggcaagcctgtgaagcaggaaataggggaatctattccacaagagccagcacaacagaatggttatccttatggtggc

SEQ ID NO: 45033 - DNA, 272 bp, Glycine max
  Clone ID: 701041735H1
cggctcgagggaagagagagggagattctttgtttgctaccttctctcggaaaaatggttacgttcaggtttcaccagtaccaggtggttgggagggctcttcccacggaagcagatcagcaccccaagatctaccgaatgaagctctgggccaccaacgaggttcgcgccaagtccaagttctggtattttctgaggaaactgaaaaaggtgaagaagagcaatggccaagtgcttgccatcaacgagatttttgagaagaacccaaccaa

SEQ ID NO: 45034 - DNA, 270 bp, Glycine max
  Clone ID: 701041736H1
atgggttcttcttcttctatgtggacggtgtgtgtgattttggcatcactggcctctgcagcactctgtgccaacccacgcaggccagtggatgtacaatttggccgaaactacgtgcccacatgggcctttgatcacatcaaatatttcaatggtggttctgacattcagcttcatcttgacaagtacactggtactggcttccagtccaaagggtcttacttgtttggtcacttcagcatgtacataaagatggttcctggagattca

SEQ ID NO: 45035 - DNA, 273 bp, Glycine max
  Clone ID: 701041737H1
aaacttcaacttgtaatcaagggagagagaaaatttcaagcacaaaaaatggcggagaagaaagtggtgatcctaggaggtggtgttgccggtgccaaccttgcaaaaactatacaacatcaagccaacgtcacccttattgatccgaaggaatattttgagattccatgggcaagtttgaggggattggttgagccaacttttgctgaaaggatagtaatcaaccatagagagtacttcaaaaagggtaaccttgttgtatccagtgctgtc

SEQ ID NO: 45036 - DNA, 275 bp, Glycine max
  Clone ID: 701041738H1
tttcgatttgcttcctcttcttcttcctctgcgcttcacatcctcagacctcaaccatcagcaccaccataccaacaacatcatcgcggcgccatcaccaccgtaccaacaacatcatcgcgcgatccaagcaacactcacaccaacagatctatgcgccacaacaccaccgcgcaacggagaagtcgcgcgcgcgcaggaagcctcaaagattgattcgcgcacacagatggaggtgcaatgatggtgtgacggcggcgcggtggtggctggtc

SEQ ID NO: 45037 - DNA, 272 bp, Glycine max
  Clone ID: 701041740H1
ccgacgcctccagataaacaaccttaactttcccataacaccacccatcattctgtttctctctctagatttcatttagttgttgctgtcttcttctgtttgtgtgtgccaacacagagcgaaaaacatggctctgaaccaatcaaaagccgtgttgttgagggtgagtttggtggtggtggcgctcttcatagcagggtacatagtgggtccccctctctactggcatttcgttgaaggtttggctgcggtcaaccactcttcttctactt

SEQ ID NO: 45038 - DNA, 273 bp, Glycine max
  Clone ID: 701041742H1
gtgccattcatttcttctagccatggacgagaagctcatacagcggttagaatcggcggtgttgcgcttggagtcgctatcctctggactccacccctccgcttcacaatccggcggcgcccacgcttcccgatgcggcgctcgatccctccgtcgtcgccttcgccgatctgatcgaccagtacgtcggtagggtttccggcgctgcagaggttatcggcggacaggtcttgggtgtcaccaaactggtgcaggaagctttcaatgttcaga

SEQ ID NO: 45039 - DNA, 269 bp, Glycine max
  Clone ID: 701041743H1
aaagtttcttcctttctctgctctttgccttctctgacacatttggtgccttgtagagcgtgttttggcaggaaggtggtatggcgaaggacgttgaggttgctgagcgtggctccttctctgggaaggactaccaggaccctccaccagcaccactcattgatgctgaggagctcacaaagtggtccttttacagggctctcattgctgaattcattgccactttgctcttcctctacattactgtgctcacagtcatagggtacaag

SEQ ID NO: 45040 - DNA, 271 bp, Glycine max
  Clone ID: 701041744H1
aaattgtgaaggaagtctcttcctacttgaagaaagtaggatacaaccctgacaagattccttttgttcctatctctggttttgagggagacaacatgattgacaggtccacaaaccttgactggtacaagggtccaactctgcttgatgcacttgaccagattagttcgcccaagaggccctctgacaagccccttaggcttccccttcaggatgtgtacaagattggaggtattggaactgtgccagtgggacgtgttgagaccggtgt

SEQ ID NO: 45041 - DNA, 272 bp, Glycine max
  Clone ID: 701041745H1
agcaaagaaagaaagaaagaaaaccctagcttaccttttcaactttcaagatgcaaatcttcgttaagacactcactggtaagacaatcacccttgaggtggagagttcagataccatagataatgtaaagtccaagattcaagacaaggaagggatcccaccagaccagcaacgtctcatttttgctggcaagcagcttgaggatggacgtacacttgctgattacaacatccaaaaggagtccactcttcacttggtgctccggctccgt

SEQ ID NO: 45042 - DNA, 272 bp, Glycine max
  Clone ID: 701041746H1
cacacttccacgtcaccaccaccatcgtggaaggtggagcgtgaggctgtttccggtaacctctcccggcggcgctgagtggtgatcaaggaaatgggtcagacgctgagttgcgtgcaacagcacgaggaccatggtgtgctcttccctgcacttgcaagtggagaattggaggttgttgaggccatggtggaggaagaccccactgtgttggaacacaccattggctgtgacaggctttctcctctgcatgtcgctgctgccaatggtcg

SEQ ID NO: 45043 - DNA, 273 bp, Glycine max
  Clone ID: 701041747H1
taagcagcggctaccctaatcctctcctcttcctctctactaatttcagctatggccgacgaagctgtggttgttccagatcccacccagatcgatgtcaagctctttaaccgctggagcttcgacgatattgagtggcgacatccaagcacgccacgtatgtgcctcacaccgccggcagtcactcggtgaagcggttcaggaaggcgcaatgccccattgttgagaggctgaccaactctctcatgatgcacggtagaaacaatggcaaga

SEQ ID NO: 45044 - DNA, 274 bp, Glycine max
  Clone ID: 701041748H1
cttcttttactatcttcaatggctgattcaggctcagcctcttcttccagaatgtggtgctccatccccgaacgggttcagctgcatgcggccatgttggccctgcagtttggctatcctggctttcatgtggtctcaagagctgcccttaacatgggcattagcaaacttgttttcccagtctaccgcaacattattgcttttctcctcctccttccttttgcctacttcttggaaaagaaggagagacctgccattactttaaacttcctct

SEQ ID NO: 45045 - DNA, 271 bp, Glycine max
  Clone ID: 701041749H1
ctcaaaggtgttgatgttggtgcatataagcccttctgaagaggatgtttgcgaaacagtttgttccttaaattttgcaaagagagcgagagcaatagagtccaacaaagaagtgccagtggaagtgaagaagcaaaaagagaagaagattatggagctagaggaagacatcaaggaagccgaaaaacagagccagaatttaagggaacaaatacagcagattgagttgaagttaaatgagagtaaaaagctcttatttaccacatatagt

SEQ ID NO: 45046 - DNA, 269 bp, Glycine max
  Clone ID: 701041751H1
ttccatacgaggccgaagggaagagtttttgttgggtttgggaggctaagtagggtttgcgttgagaaagagagagatgggaagagaaaaggagacaacaaaggtagcttacacagtggagcagcttgtagccttcaatccatacaatcccgatattcttccagatctcgaaaactatgtcaacgaccaggtttcgtcgcaaacttacagcctggacgcgaatctctgccttcttcgcctctaccagtttgaaccagagaaaatgagtt

SEQ ID NO: 45047 - DNA, 271 bp, Glycine max
  Clone ID: 701041752H1
gtgaaagagaatccgaggcgaagagaagagaaaaattaagatggaggggaaggagcaggatgtgtcgctgggagcgaacaagttcccggagagacagccgattgggacggcggcgcagagccaagacgacggcaaggactaccaggagccggcgccggcgccactggttgacccgacggagtttacgtcatggtccttttacagagcagggatagcagagtttgtggccacttttctgtttctatacatcactgtcttaaccgtcatggga

SEQ ID NO: 45048 - DNA, 269 bp, Glycine max
  Clone ID: 701041753H1
ctggacttgaagcaatatcctggtctacgtgttgaggttgggaatgccgccattgattcgctagaaaaaatgagggaggaaagcaaaacagcaacactacagctagttgatatggagtgtggctatttgacggttgattactttcggaagcttcctcaagatgttgataagggtggcaatgctacacattcaatttttgatagatataatgattcatatcttaggagaattggaaccaatgttctgtcttatgtcaatatggtctgtgc

SEQ ID NO: 45049 - DNA, 269 bp, Glycine max
  Clone ID: 701041754H1
gcaactgaagccagaaccaaagaggatgctgtctagttgggtgaagagtgcctttcgtagtgggaagaaggatatgcaagaatctgttaatcagaatcttgattttgtccttggctcagctccaatatgggatagggtggagcttaaaggcaacaagtatgtattgggggagttcctggaatttaagggcaaacaagaagatgttgaggctttaagacctattagaagatcaaaagttggtcgtatgataatccaaaagacaagcatgt

SEQ ID NO: 45050 - DNA, 254 bp, Glycine max
  Clone ID: 701041755H1
ctcgagccgctcctttccctttcgagatcaaacgccaccgctacgcctccgcgctccgccgccactgcaacccccgcctcccttctccgtcaatgcaaaattcggcgtcgattctcgccggaaccttctcccgctcttccttcccctccgggctttgacttttgctttcttgcgattgcgatgagtccctttcgccctttgttgctcttcgccgccgtattctatctcctccgaaccctcgccgccaccgacgg

SEQ ID NO: 45051 - DNA, 273 bp, Glycine max
  Clone ID: 701041728H1
gttgatctttggttgaagattcaagaggaggcaaggttagatgttgatcaagaaccaattttatccagctactatttcagttccattttgtctcacaaatctttggagagtgccttggccaaccacctctccacaaatttgagcagcttgagccttccaagcagcaccctttttgaccttttcatgggtgttttggttgatgatggagatgatgacatcgtaggtgctgtgaaggatgatttgatagctgttaaggagagggaccctgcttgc

SEQ ID NO: 45052 - DNA, 276 bp, Glycine max
  Clone ID: 701041701H1
gctgccacaaattataataatagggttgttgaatgccatttggcttctattgtgctcgctataaagctagggatggatccaaaagaggcaatatcaaaagtgagcacactgtctgatgttgaagggttatgcgtatcatttgctggtatttataactcatctgatcctgtacttgctgtaaaggaatatttgaaggaagaaccatatacagctgaagaaattgaagcagttacaggggaaaactgacttcattttgaacataatgcagttatttag

SEQ ID NO: 45053 - DNA, 279 bp, Glycine max
  Clone ID: 701041702H1
attcatgaatgggatgtatccaagcaacaggatgtacagccaatatggaaacacatttaggcctgattctcgttttggatctgctgggtatggatctagaatgggttctttcgatagcaaatttaatggcacagggtatggctgcggtttaaaaaaaagcatggatggtttcagcgagctaaataagggacccagagctgccaagagttctgataataaaaatatcaaaagtcttggacctgtcacattattactcaaaggacagaaccttccagtgaa

SEQ ID NO: 45054 - DNA, 277 bp, Glycine max
  Clone ID: 701041703H1
gttctctctctctgattcgatcgatttcgattgttgaattcatcacatcacggagccttgacaacgatggtgctgccgctatttactgctttcattctctttgcttttattccgaatggattgttagcagttccttccaccgtcccggcattcctttggtcatcacattatgaactggcctctgaaaatatattgaaggaatctgtaaattaccaagtcatttctccgaagatctagcaaaatctattttatctgaagcaggctggtcaaattttct

SEQ ID NO: 45055 - DNA, 277 bp, Glycine max
  Clone ID: 701041704H1
gaaatcagtgaccggcgtgagacagcaaagatggtggttcttggcaccacctcaccttcaatttcctgcttgccgtcttcaactcaaaccgactacaaggcgcgtcgatactgttcttttccgcaacgcccacgcccacgcccacgcccacgcgcttcacgtttcttttgcggatcccctttcgctccaaatgccatccattctccttctctgtctgtcacgaatgacgcactgactgttctgatttctggggcgtctgcttctggtaaaggaacca

SEQ ID NO: 45056 - DNA, 276 bp, Glycine max
  Clone ID: 701041706H1
gcggtcatcaatttcatctcgattgcattggttcggcattcaacataaaaggagcaatgcagtgccctaattgtcggaagattgagaaaggtcaatggctatatgctaatggttgtcggtcatatcctgaatttagcatggatgagtggactcacgatgaggacctttatgatcttagctactctgagatgtcctttggagttcattggtgcccttttggcaacctggcacgacttccatcatcctttgaggaaggggagttttcgtcatctgcat

SEQ ID NO: 45057 - DNA, 275 bp, Glycine max
  Clone ID: 701041707H1
atcatggacagagtgcaattcagagaaaccaaatcccagacaccatacaacacaacacagcactttggtcgtgtttcgtttcatctttttctccgagaaagatccaccccacgtttcaaaatcactttttttctctgctttgggaaatgatgccattgttgtcccttgcgaaccaaaccccatcaccaccatcatcatgtaggagcgactcaacaactcgagtctcgcgttcctcttcctccccctctgggcacgtgagaattctccgattctga

SEQ ID NO: 45058 - DNA, 276 bp, Glycine max
  Clone ID: 701041708H1
ctcgagccgtccttataaacttcttccgatgtgtttctctctttctctctccgtactctagctttcttcataaaattttgcaatcggtttgacaactgaatttgcatttggtaatcaaattaataattgacaaaaaagaagaagaaaaaaagggtggggaggcatagccagatattgaacctgccctctgttcttaatctcattgtgcctcccctcagatctcgtcttcaatcggagtgctttgccttcattgattcactgcttgatgattgttga

SEQ ID NO: 45059 - DNA, 275 bp, Glycine max
  unsure (1)..(275): unsure at all n locations
  Clone ID: 701041709H1
ggggctaccgctgagtttaagcatatcaataagcggaggaaaaggaaacagcaacggcagttacaaaactaaaggcggcgccggtgtcgcgcacggaagtttagagtccggcatgacggcggtgaagctgctggatttgatgccggtgatgcgaactccgatgaggacgcggcggagatggcgccggaggagatgaatccgaagctgtttggtgtggcgattggagcgaaatgncgagagagggaggaggtggtggagattgtggaggtggagga

SEQ ID NO: 45060 - DNA, 277 bp, Glycine max
  Clone ID: 701041710H1
gcattgtgatgatctaaatacacaacaaattatcatggatgaaatcatgcaatctgtcggcactttagcacaggatcaatatggaaattatgttattcagcatattgtggagaatggtaaaccacatgaacggactgctattatcagcaagtctgccgggcagattgttaagatgagccagcaaaagtttgcttcaaatgttatcgagaagtgtttggcttttggtagtcctgaagaacgtcagattttggtgaatgaaatgcttggtacttctgat

SEQ ID NO: 45061 - DNA, 266 bp, Glycine max
  Clone ID: 701041711H1
gatttatctggtagggttgttatgctggggatccaaggtctggctgctgctggacagtgttgcaagcagcttgaagacttgaatctgcgattctgcgaaggattcactgatactggtctggttaaattagccttaggtgtggggaagtcgttgaaatctcttggtgtggcagcttgtgccaagataactgatatctcaatggaggctgtagggtcacattggaggtcccttgagaccttgtcgttcgactctgagtgcatccacaa

SEQ ID NO: 45062 - DNA, 271 bp, Glycine max
  Clone ID: 701041713H1
tttctttcaaacaaacgctgtttctctctctctctctctcgtagttcaattcaattcaattcaatatgatgcagagactctcttctaccactactactaccccccctcgctctgccttgctgcgctacggtggcggcgcacttcgccgggacgtgcttgctcccatttcctcttctcacttaacagctaagtcacaggtgggtgaaagtgacaccaaagcagctagatggttttctattatgagctctgatagatccacatttgattcctc

SEQ ID NO: 45063 - DNA, 279 bp, Glycine max
  Clone ID: 701041714H1
gtcccaaagagctaacaagagattcaagaccggcatggctaatgaagaggaacagaaaaaccacctcttcggcatcaaagatctcggtcacaagactctccttcagagtgatgcactctatcagtatatacttgaaaccagtgtctatccaagagagcacgagtgcttgaaagagatacgcaagatgactgcaaaacacccactgaacatcatggcaacaccagcagacgaaggacaacttctgagcatgcttgttaagctcacgaattcacagaacgc

SEQ ID NO: 45064 - DNA, 281 bp, Glycine max
  Clone ID: 701041715H1
gttcgggtcctctcaatccgatcaacgacaccgtcgaattccgatcccctcgcgacgccgatggccacggcacccataccgcctccaccgccgccggccgctacgccttccaagccagcatgtccggttacgctgctggaatcgcgaaaggcgttgctccgaaagccagattggctgcttacaaagtttgctggaaaaattccggttgcttcgactctgacatcctcgccgcctttgacgccgccgtgaacgacggggtggatgtgatttcgatctccatc

SEQ ID NO: 45065 - DNA, 281 bp, Glycine max
  Clone ID: 701041716H1
ggaaaacgcagaagaacttgcggcactagatgccattgatgcggggaagttgtaccatatgtgtaggaatttggaagttccagcagcagcaaacactcttcgttactatgcaggtgctgccgataagattcatggcgaggtgttgaaaatgtcccgagacttccatgcctatacattgcttgaaccacttggtgttgtgggacacattactccctggaatttccccaataccatgttctacatcaaggttgctccttctttagctgctggctgcaccatgg

SEQ ID NO: 45066 - DNA, 280 bp, Glycine max
  Clone ID: 701041717H1
ggaaaagacactgtctcgcgagtgaacacaggttacagcaatggctttctttggtagaattgggaatttattaagacagacagcaagcaggcaggttagttcagaattgcgatcatccccttcgttttttcaggctatacgcagtatgtcatctgctccaagcacaaagctgtttatcggaggtgtttcatattctactgacgagcaaagtttgagggaagctttttcaaaatatggtgaagttgttgatgctaggataattatggatcgtgaaactggt

SEQ ID NO: 45067 - DNA, 277 bp, Glycine max
  Clone ID: 701041718H1
ctcacgaccctccgccgccgcggttgcaagcagagcacaccatcgaaatgggcgaacgaaggcgttggttccggaatcggtggtgaagaaggagaagaggaacgaggagtgggctttggagaagaagcaggaactcgatgccgcaaagaaaaagaggttcgaaacgcggaagctgatttttaacagagccaaacagtactcaaaggaatacgacgagcagcaaaaggagttgattaggttgaagcgtgaagccaagcttaagggagggttttatgtt

SEQ ID NO: 45068 - DNA, 277 bp, Glycine max
  Clone ID: 701041719H1
aaaaaacttgagagagagaaaatagagaaagaggctaggtagaaactagaacccgggtcctcttactacactcacccccaatttcccgagcctcagcttcgggacacccgaacctcattactcgggacgcgaataaaagccacactgggattcacactcccaagttccaaccctactctcacacactgcaacaacgaaaaccaaagaagaaaaaagagtttcttctttccgaaatccaagcagtagggttagggttttttccgatctcaatggcgga

SEQ ID NO: 45069 - DNA, 274 bp, Glycine max
  Clone ID: 701041720H1
tttgattccaagattgtttgaaactggggctatctgtttggtggatgagatttttcttgagtgccattacaataggtggcagaggtgttgccctggacagaggagccccaagtatgagaaaacttatgatcagtgcttgcagctcttcacttctctcagacaaagtggagttcttgttcatcaatggttttaattaactttgtagaattgcctgatggatgatgggtcaaaccctatatgcatgttcttagcttctgcatgtttcttcttttta

SEQ ID NO: 45070 - DNA, 274 bp, Glycine max
  Clone ID: 701041722H1
tcgaactcgagtggtaatggagacgattttacaagcaacgtgaaaaggctcataattgatttggtcaccatttgaaggaagagaatgtgaaagagtgaggtcagagttgcctgtagacgaagacaatcgtcatcagttgcagctgcaaaggaatgaggtaattgcattgacgaaccttctcaatcgactctcggaatccttcaaattcgtccacgaagtgggacctacagttgaaagaatcatggaaggaggacatttttctgctcatacaaga

SEQ ID NO: 45071 - DNA, 273 bp, Glycine max
  Clone ID: 701041724H1
gatcaacacaaaggtgggaatgtattgattctactctctgaagaatctggagatcagcttgtagcatccaactatgtcagcaaacagttctttgcatgtggaattatcgaggaagacttcgtttttgggattgagattatgggttttgattgggataggtgttggtgtttttatagttgtgattctttgtgtattatctgtatgggtgatgtttcggagaaagtctaaaagatctctggacaagtactctttgtcacaaataccacatgtctc

SEQ ID NO: 45072 - DNA, 264 bp, Glycine max
  Clone ID: 701041726H1
cttttctacttctttcgtcgtcgccgttcgttcacagcgtacctctgctctcgaagatggctcctcccagaggtggtggtgggttcaggggtggtaggggtgacagaggtagaggaaggggtggcggtggaggaagaggaggagacaggggtacgccgttcaaagctagaggcggtggccgtggtggccgcggaggaggcaggggtggtggccgtggcggcggcagaggtggaatgaatggaggtagcaaggttctggttcagc

SEQ ID NO: 45073 - DNA, 276 bp, Glycine max
  Clone ID: 701041727H1
cgagaggagaggagagaagagaggaagttttggccgtttgaatctatagaatagaatcaaaccaaattgaaagaagatcgatcgatcgatcgatggctctggtcggagttggagtgaagcatgcggcggagggcgcaccggaggagaattgctccgccaagcccaccaagcagggcgagggcctccgccactactattctcacaacatccacgagcatcagctccttctccgtcaaaagacgcataacctcaaccgtcttgaggctcagagaaacg

SEQ ID NO: 45074 - DNA, 193 bp, Glycine max
  Clone ID: 701041696H1
gaagaagagaaggtggtaccgccttcaattctctctctccatttctcatcctcatcatcttattatactcttccatctccataacatccacttgtgaaaaaaacccattaatatatatcacacacacatgtatctctgagctccaatccaatccaagaccacaccttgtcgcgtcggacgaaccttggtgtct

SEQ ID NO: 45075 - DNA, 263 bp, Glycine max
  Clone ID: 701041663H1
ttgtggtatttgtggagatggaggggatttaatctgttgtgatggctgtccatcaacatttcatcagagctgcttggatatacagatgcttcctcctggtgaatggcattgtccaaattgcacctgtaaattttgtggcatagccagtggaacttctgataaagatgatgcatctgtgaatatcctacagacttgcatcttatgtgagaaaaaatatcacaactcttgcactaaggagatgaatacccttcctaataaaatca

SEQ ID NO: 45076 - DNA, 233 bp, Glycine max
  Clone ID: 701041665H1
acaaaacttgctatagcagtaagctataactcatttgaggctctgtgagaattgagaaatggctaaagatgttgaggttcaagagcaaggaggagagtactctgccaaagactaccatgaccctcctccagcacctttgttcgacccagaggagctcacacagtggtccttctatagagccctcatcgctgagttcatagcaacccttctcttcctttatgtcactgtgctca

SEQ ID NO: 45077 - DNA, 266 bp, Glycine max
  Clone ID: 701041667H1
cctcaaaataaaaaataaaactttttattatctgcaggttttgcatttgtgtttctgatttttgtgtacctatcccaatccgtttcttttcaatcttctcttcgaccccatttcctagatctgcttgtttcttccatcatcaactaatcatggttcttcacagagaactcgatcatctcttttcatcccctttcgttgaccctcccaaagatgatgcgaaatccagtggcatgtcaattgaaaagaagattgagttcctcgagagt

SEQ ID NO: 45078 - DNA, 266 bp, Glycine max
  Clone ID: 701041668H1
aatttgaattgggcactgaagccagagagatgccatgcaaccatatttaccattctgactgtattgttccttggttggttcagcataactcatgtcctgttcgccgtgttgagctgccacctcaaggacaggctagttcccgtggtactcgaagttggggaggaaggaatgccagcaacagcagcagcagtggcagcaatgatagctccaggggcagagagaacagccatcagaaccatggaaggagaaatccattttcatttttg

SEQ ID NO: 45079 - DNA, 82 bp, Glycine max
  Clone ID: 701041669H1
gcaaattccaattcccaattcccaattcccaattcgaaacccttattcctttcaaagaaccaaattgagtgatcgtgatggc

SEQ ID NO: 45080 - DNA, 261 bp, Glycine max
  Clone ID: 701041672H1
ctcagattgcaattgcctcttctcttctcccagaatcggtgtaggttacaggtttaagggttttgttttcatttaggtcactaatccgatatcatgaagctcgatacgactagtctcgaatcgtttcccacactgattgcacctcaaaacgacgtcgccggagaactctccgccgctccgttctttgaccttccgaattccaatgacttcgatgggttcttgaaagacgctattcagatggtgaagcccgcgaagggtact

SEQ ID NO: 45081 - DNA, 262 bp, Glycine max
  Clone ID: 701041673H1
ggaaaattagcctcacaaaagcaaagatcaaacaaaccaaggacgagaacacgatgttgcttgaacttgcacttggtttattggttttggctctgtttctgcacttgcgtcccacacccactgcaaaatcaaaagcacttcgccatctcccaaacccaccaagcccaaagcctcgtctaccccttcataggacaccttcatctcttaaaagacaaacttctccactacgcactcatcgacctctccaaaaaacatggtccct

SEQ ID NO: 45082 - DNA, 80 bp, Glycine max
  Clone ID: 701041674H1
ttcccctagattcagccacagttggaaaaaaaaaaaaagttgttcgagatggcacgttcgaagcaaactgctcgtaagtc

SEQ ID NO: 45083 - DNA, 123 bp, Glycine max
  Clone ID: 701041676H1
gaaaacatcactgcgccgcgctgccacaccaaataaacaccaacatggacgcatcaaaactcaatcaattgaagcatttcatcgaacagtgcaagtccaacccttccctcctcgctgatcctt

SEQ ID NO: 45084 - DNA, 114 bp, Glycine max
  Clone ID: 701041677H1
tggttgttgttgtaataaatatgcatggtgtgttgtaccaaaaacaaagtaagatgcttctgtacgttccgttgctttaaattcattgaaataaattaaagtggggtttagttc

SEQ ID NO: 45085 - DNA, 257 bp, Glycine max
  Clone ID: 701041678H1
ctaatctccatctaatagtgttaatttgtctttctctatctctatcggtcatgggtgcttttgcttttgatgaggaaaactcctccaccgtggctccggcaacactctacaaagctctgacaaaagatgctgacactatcatcccaaagattattggggccatccaaactattgaaatcgttgaaggaaatggaggacccggaaccgtcaagaagataacagctagtgaaggtgaccaaaccagtttcgtgctgcaa

SEQ ID NO: 45086 - DNA, 261 bp, Glycine max
  Clone ID: 701041679H1
gggcagtatggtggtggagctgcgccctacatggggcactagattccacataagtgcatcagtcttttattactggcctggcgtttcttctgagttctgaagtttaaggagctgatgcaattggcgtgtttataatgaaatgctacttactgatcagaatattttaattaccaaatggagttctgttttcgccacctgctttttcttattttcttccctttcaaaatattgtagtattctgactttggtttatcttcaaaa

SEQ ID NO: 45087 - DNA, 266 bp, Glycine max
  Clone ID: 701041681H1
cggctcgagtggaaccatttccctcataaaattctctcttcctttttgggttctcctcaatccattccaagcttcaatcttttctctcttctgccctctgcacctcccctcacacccttcctcattcgcaggaggtgaagatgtcgaccccggcaaggaagagactgatgagggattttaaaagattgcaacaagatcctcctgctggcatcagtggggctccccaagacaataattatgctttggaatgctgttatctttggacc

SEQ ID NO: 45088 - DNA, 267 bp, Glycine max
  Clone ID: 701041682H1
caaaaaggcagaaaatattgatggaaaaacactcaaggggatctcttgctagggaagatagagaagcaaggatgcaagaaaaggaaaagaggaaaaaaattaaggaaaatagggtctccaaaaaggattcagcaaggaaccaaagtcaatcaaattcacacattacaaggccacaatatcaacctcaagaaacaaatgtacccattaatccagaaaagccagaatttccatctcgaaattcaggtttatctgccaacataaggaaag

SEQ ID NO: 45089 - DNA, 237 bp, Glycine max
  unsure (1)..(237): unsure at all n locations
  Clone ID: 701041683H1
cttctgattctaattctaattccttctactttacaaattaaagaggttgcaactgtgtgctacactgtggctagaactacatgttctgtggttcccttcatgctttgcactgtggctggctcctgttctgtcaattttcactctctgggggttcagtttgagttagctctagataaagacatggattctcagaggtttctcatttgacaanaattgtcttgtatttctttgagggaa

SEQ ID NO: 45090 - DNA, 265 bp, Glycine max
  Clone ID: 701041684H1
cccccaccacctgccaccaccaccacaacaacaacaacacttctgatgttgtaggatcatacttctccttccagcacttgaactatggaacaacaacaaacatgtccctctctgcaaaccccaacgcctctctttgttttgttccagcctccacttcttcagaccttaataacaattccaccataacctcctccatgctcccttcaattttcccaacacaacacgtgaagctccaatctaataacaacaacccttccatttcatc

SEQ ID NO: 45091 - DNA, 261 bp, Glycine max
  Clone ID: 701041685H1
aaaggcatgagatcatcaagagggcagacgcggtgatagagcactatccattcggaagggaagatcacacgatcgttcctcgcttctggattggcatagagagcctgttcgcgaacatgattcagaagacacacaaggaccctaccattgaggagattaagagcttgctctgtctgaaacagcaacaacccgggtgggttcttctcagcaaagggtcgaacgtgaagttgttggggagtggggacccaatgctggcaactg

SEQ ID NO: 45092 - DNA, 258 bp, Glycine max
  Clone ID: 701041687H1
ggggtaaaacagcactactaacagcagacaagaaaaatggagattgaggacacatcaagtagagtatcattgcatttcctcttggcttagctcttcttgttgccttgttattgttcttttgttgcttcttttgttgctgcttgcactgggaaaaactccaacctttgtttccattttgtatggttatcgtcgatactcagcctctgacacaagcagacttcactccccctcctcacaagccaggctttcctgtcttga

SEQ ID NO: 45093 - DNA, 257 bp, Glycine max
  Clone ID: 701041688H1
ttcatttattgaatcccaccccaaatttctaattctttctctttcactctcccacgtgcatcttcctcttccccgctctaaataattctccgttcccatcattctctctctctctctcccaatacattattattatatgtgtgtggaaaaaagaaccgttttttttttcagtgaaagcgaccacctttatattatccttttgatcagagtgtaaaatggtgatgtgattttacaagggtcttgcatgcccctttgag

SEQ ID NO: 45094 - DNA, 253 bp, Glycine max
  Clone ID: 701041689H1
gctggttccaagtcttgcttcttaatttcttgatcatgtcacttgctggtaaaatcagcattgaaatggggtgcatgcaagcgctgcaaagtggttcaacctcttcagcaacgcaactccatcatgttcaaaaccttaccgaaagagtgcatgaaaccaagctacatcatggtgatgactggcatcacaacgaatcgatcaaacactggacttgtaccatagatggtaaggttacaatatatcacgagagtat

SEQ ID NO: 45095 - DNA, 254 bp, Glycine max
  Clone ID: 701041691H1
ctgagaatgagataaaggacaagaagttctttggaggtgacgagattgggttggtagatattgctgctgtctacatagcattttgggtccctatggttcaagaaattgcagggttagagttattcacaagtgagacatttcctaagctccacaattggagccaagaatttttgaaccatccaattgtcaaagaaagtctgccccctagagatcctgtttttgcctttttcaagggtcgctatgaaatccttttt

SEQ ID NO: 45096 - DNA, 254 bp, Glycine max
  Clone ID: 701041692H1
caaaaacaaacctctcttctctttctctctctctctctctccgcaaattgctgaacctcttccgtcctcacttcaacgcagacgcgttcgtactttctagaacttggcgtcattcaggggaggaagtttggctacttactacgatattgatattcaacgccaatggttggattccagagtgaccataagcccgggaacaagtgcaatggtaattctaatagttttccggttccggatcgtcatgtacgacttat

SEQ ID NO: 45097 - DNA, 254 bp, Glycine max
  Clone ID: 701041693H1
atcaacatgaaaccgatgtaggaatgggcacaactaaatgtggctaattgatattgcagatggctggagtggggtcagtggtgatgacaccattaataggaaacttgtcggaccgatatggcagaaaagcgttgctcacacttcctctcactgtctctgtcattcctcaagtgatattggcatatagcagggatacccaattcttctacgcgtactatgtggtgaaaactctggctgccatggcaggcgaaggg

SEQ ID NO: 45098 - DNA, 257 bp, Glycine max
  Clone ID: 701041694H1
taattttccattgggtggaagaaagtctcaacctttattcgaaagagcaaggatctgagttgagttgagtgatcatgtgtggtggtgcgattatctccgacttcataccggcaggtcccgccagcggggcgcggcgcgtgaccgccgacatcctgtggccgagtttgaggaagcgcttctcgaagccgctgctggacgatgatttcgaggctgggttcagagaattcaaggatgattcggaaatcgaggatgttgat

SEQ ID NO: 45099 - DNA, 258 bp, Glycine max
  Clone ID: 701041695H1
ctaagattgatgagtgtatgatgatgatgaagaagaagaagacagagaagggttgattgagatagctctcgatggatgcaagaggaagaggaacttggaatttaactttgatgaagagaatttgattgagatcgatatttctccgtcgaggtacagagaactttccggcgacgacgaggtgttttccggtgagatcagctacaactaatgtgacattaattcgagattgacgtagtggattattgtgttttttgaggt

SEQ ID NO: 45100 - DNA, 260 bp, Glycine max
  Clone ID: 701041662H1
cagacttctaacgctgatagggggatatcttctttcccacacgcatcaattgataaaattggagtgcaggaaaaaacatggaaagaaattttggcaatggcaacttttatcaacatccacctgatttggatgagactgcttcctctgtttctgaggacggccctggcattgagaattttcaagtttctggtgatgctattcctggagaaaagcttcttggatgtggatatccagtccgtggaacttctctttgtatgttt

SEQ ID NO: 45101 - DNA, 269 bp, Glycine max
  Clone ID: 701041613H1
tttctctcttctctctccacccaaaccctaactcccgaccctgttcccctctcgtatccgtcatgaaaggaggaaagtcaagaccgaatctaagagagccgatcccaaacttgctgtgaataagaagggagccgccaccaaggctaggaaacccgccggcaaggggaaggcagcgaaagaccctaacaagccaaagaggcctccaagtgctttcttcgttttcatggaggagttcaggaaggtattcaacaaagaacatcctgaaaaca

SEQ ID NO: 45102 - DNA, 273 bp, Glycine max
  Clone ID: 701041615H1
gtttcgttgtaaagaagagtgttgaagccttttcttttcttcttcctctgtcttgtcttcaacctcgttttcttttcttcgtcttctatcaccgattccgattcgctactctttcttcttcttccttttttattgatcctctctgcgatcacgaattttcccattttctccgtttcctcggcgaccaaacggaggagaagaacgcagttctgaaaacgattggaaaatgctgggaactgcactgcaattcagcggcgttcgcggcgaggatcg

SEQ ID NO: 45103 - DNA, 276 bp, Glycine max
  Clone ID: 701041616H1
gatgcaatgagttacagtgagatacgaaaatggtgttaatgggaggagttggagtaccctcaatctcaatctgttttttgttccaaacaagacccaccatagctttgtgtctcaaattcagattgaaacattcactttcatattcaatcactagcatggcattgaccaacaacaccaccaccaacgaaaggaagcttccaattctgctgtttgatatcatggacacccttgttcgtgaccctttttaccaagatgtccctgccttcttcggaatgt

SEQ ID NO: 45104 - DNA, 268 bp, Glycine max
  Clone ID: 701041618H1
gaacgaatgacggattgataatatcaatcctgggtcacagaaacgcggctcagcgtaagttgattcgtgaagcttatagtacaacccatggagaagatctccttaaagatttagacaaagaactttcaagtgactttgagcgggctgtgatggtttggacattggatccttctgagcgtgatgcctttttagcaaatgaagccactaagatgttgacttcaaacaattgggtcattttggaaattgcttccactagatcttcacttga

SEQ ID NO: 45105 - DNA, 273 bp, Glycine max
  Clone ID: 701041619H1
ctccgatggctaatccctcactcttgttcttcagtctcctcctattatccgccaccgtagccgccgccgaacggatcgacgatgaagacgaccttctgatccgtcaagtggtgccggatgcggaggaccaccacctgctcaacgcggagcaccacttctccgccttcaagacaaagttcggcaagacctacgccacgcaggaggagcacgaccaccgcttccgtatcttcaagaacaacttgctccgcgccaagtcacaccagaaattggatc

SEQ ID NO: 45106 - DNA, 268 bp, Glycine max
  Clone ID: 701041623H1
atcatctttagttcttcagtaatttattgtgggattctattctaagattttgagaatgtctagctgtgggtgtggaagcagctgcaactgtggcagcaactgcggttgcaacaagtactcttttgacttgagttacgttgagaagacaaccacagagactctagttttgggtgttgggcctgtgaaggcccaattggagggtgctgaaatgggtgttgcatctgagaacggtggctgcaactgtggatcaagctgcacctgtgaccca

SEQ ID NO: 45107 - DNA, 270 bp, Glycine max
  Clone ID: 701041624H1
caagcataagcacaagcacaagcacaagcacttctctaattccctttcacactctattacagatttcacaagtgcttacacttcaaatggctttggaagctcttcaatcacccaccacacccactccatcgtttagtccctttgatgataccagtctcagttacttagagacaccgtggacgataggaaagcgttctaagcgtagcgcacggtgcaacaactgcaacacccttcatgcaccgaggaagagtacctcgctctttgtctcat

SEQ ID NO: 45108 - DNA, 145 bp, Glycine max
  Clone ID: 701041633H1
aaaaatttgacagaattcaccaccctttttgctctgtttatatttttaatttttctcctgctctcagctgctgtaataattgttgcggtgctgttttggcaaagagggagagagagagcgacccaaaagagactatgctcgggga

SEQ ID NO: 45109 - DNA, 86 bp, Glycine max
  Clone ID: 701041634H1
cttcttccatttgggttttctcaaaagtgaaaagcaaattccgtgacttccacaatcaccactacacacagtatgacaccagtctc

SEQ ID NO: 45110 - DNA, 268 bp, Glycine max
  Clone ID: 701041635H1
cgaccgcgtactttactttctggacgcagtttctgcggttcaaacgagcgttttgagtaagcgattcatttacctttggacttccctcccagtcctcaagttccacgaccctctccttttccactctttcgtcgaccacttcctctccctcagagacgcttccaccaacgtccacgccctcaacttcacgtgccacgatgaactcgatgatgatgggcatgttgtagattccatcattgactatgttaccctcacacccaccatctcc

SEQ ID NO: 45111 - DNA, 132 bp, Glycine max
  Clone ID: 701041637H1
aaacaaagaacaaaaacattaatagagtatagaaagaaaaaagatgatgtccccatcccatgtgatcctatccatatttttcttggtgtgtacaacaacaccaccactgtcccttgcccagaacacccctca

SEQ ID NO: 45112 - DNA, 267 bp, Glycine max
  Clone ID: 701041638H1
caaattccaatcccaagaagctacctctcatcgttttctttcacggtagccgcttcgtgcgactcagcgcggcttccacaatgttccacgatttttgcgtcgaaatggcgaacaccgcggaggccttcgtggcctccgttgactaccgcctcgcaccggagcaccggcttccggcggcgtacgacgatgccgtggaggcgctgcggtggatcgcgtgcagcgaagaggagtggttgacgcaatatgcggattatagtaagtgttatc

SEQ ID NO: 45113 - DNA, 268 bp, Glycine max
  Clone ID: 701041641H1
aaaaatttgaaagaattcaccaccctttttgctctgtttatatttttaatttttctcctgctctcagctgctgtaagtaattgttgcggtgctgttttggcaaagagggagagagagagcgacccaaaagagactatgctcggggactcagctctgttgggaggtggaggaggagaaggtggtgcctccgccgatgtagtggcggcgaccgccacgcatgatgcgacaacgacgacgacgaccggaggaggcggtggcggatcaaata

SEQ ID NO: 45114 - DNA, 89 bp, Glycine max
  Clone ID: 701041642H1
cttcttccatttgggttttctcaaaagtgaaaagcaaattccgtgacttccacaatcaccactatagccagtatgcacaccagtctcag

SEQ ID NO: 45115 - DNA, 264 bp, Glycine max
  Clone ID: 701041643H1
cgaccgcgtactttactttctggacgcagtttctgcggttcaaacgagcgttttgagtaagcgattcatttacctgtggacttccctcccagtcctcaagttccacgaccctctccttttccactctttcgtcgaccacttcctctccctcagagacgcttccaccaacgtccacgccctcaacttcacgtgccacgatgaactcgatgatgatgggcatgttgtagattccatcattgactatgttaccctcacacccaccat

SEQ ID NO: 45116 - DNA, 266 bp, Glycine max
  Clone ID: 701041645H1
aaacaaagaacaaaaacattaatagagtatagaaagaaaaaagatgatgtccccatcccatgtgatcctatccatatttttcttggtgtgtacaacaacaccaccactgtcccttgcccagaacacccctcaagactttcttgatgtgcacaatcaggctcgtgccgaggttggtgttggtccactctcatggaaccacacccttcaagcctacgctcaaaggtatgccaatgagagaatccctgactgcaacctcgaacactcca

SEQ ID NO: 45117 - DNA, 265 bp, Glycine max
  Clone ID: 701041646H1
caaattccaatcccaagaagctacctctcatcgttttctttcacggtagccgcttcgtgcgactcagcgcggcttccacaatgttccacgatttttgcgtcgaaatggcgaacaccgcggaggccttcgtggcctccgttgactaccgcctcgcaccggagcaccggcttccggcggcgtacgacgatgccgtggaggcgctgcggtggatcgcgtgcagcgaagaggagtggttgacgcaatatgcggattatagtaagtgtta

SEQ ID NO: 45118 - DNA, 266 bp, Glycine max
  Clone ID: 701041649H1
ctcgagccgctcgagccgcttgctttgaccttttgccggttgttgtgttgcattggtgcaacatggcgttactcagaagcgtttctgcactttctcgacttcgctctcgcgtgggccagcaatctaatcttgcgaattcagttagatggctccaaactccgagctccagtaacactgatctttattctgagttgaaggaactagttccagagtatcaggaacgtgttaagaagctgaagacagatcatggaagtgttgaattggga

SEQ ID NO: 45119 - DNA, 270 bp, Glycine max
  Clone ID: 701041650H1
atcgaactcgttactcatccttctctcacactcttcttcatctggattacagagctccccattgtgacccttctatacagtcgatatcgacaaaatcggaagcaatgcacgtacctgcgagctgttgggagaggggttctaggagtgcctgttggggcactactgaattttttaggagctattgctgtgggggcgcctgttacatttcagtatcttcccaagactgtaaattgggctcttatgatgtctgtgttcacaacaattccagcg

SEQ ID NO: 45120 - DNA, 267 bp, Glycine max
  Clone ID: 701041651H1
cacttttgcttcgagatggcaaagtcgaagaatcacacagcacacaatcagtcctacaaggcccacaaaaacggcatcaagaaacccaagaggcatcgccacacttccaccaaagggatggatcccaagtttctgaggaatcagaggtacgcgaggaagcacaacaagaagagtggtgaaacagccaccgaggaagagtgaaatggcactttctaacggaaccattagggtttttttatgctcatttttttggttaaactttgtttg

SEQ ID NO: 45121 - DNA, 269 bp, Glycine max
  Clone ID: 701041652H1
aagaaatagagggttttggtgtttggtgtttgaatcgtgaaaatgttcagaaaccagtatgacacggacgtgacgacatggagcccggcggggaggctgttccaggtggagtacgcgatggaggcggtgaagcagggctcggctgcgatagggctccgatccaagacccacgtggtcctcgcatgcgtcaacaaggctaactccgaactttcatcgcaccagaagaagatcttcaaggtcgacaaccacatcggcgtcgccatcgccgg

SEQ ID NO: 45122 - DNA, 268 bp, Glycine max
  Clone ID: 701041653H1
ctcttcactactattaacctttcacatcacaacacaatctcatagccccaaaaacatagtactatacagccccacttctctttctctttctcttcactctaaagtctaagcatccatggccatggcgtctgctaagctcaacaccttgtcttcccagtggatcgcccacaattccttctctcctcgccgtcgatcctcttctcgccgagtctctcttccgatccgcgcttcttcttaccaacacgaactcgtccaaaccgccaaatct

SEQ ID NO: 45123 - DNA, 54 bp, Glycine max
  Clone ID: 701041655H1
tttcattattgtgtaccacttttcaaacttgctggagtttgtaacaacaacaac

SEQ ID NO: 45124 - DNA, 262 bp, Glycine max
  Clone ID: 701041657H1
attcaagttccaatcggaaccggaaatgaatagggtttggtttctactattccttctgctgatctcgaaatgcgatcatgtgtggagctcttacgcgtttccgctagctccgtcatcaacccttccaaggtcaaacagatttcctggaagccaagagctttcgtttatgaaggtttcctcacggatttggaatgcgaccacttgatctctctagcgaaatcggagcttaagagatctgccgttgcggataatctctctggag

SEQ ID NO: 45125 - DNA, 259 bp, Glycine max
  Clone ID: 701041659H1
cttgtcttctgaaggcagctggagggaagttatttcaggtgccaacaaatcaatatatgctcctgaccctctgatgttgggagaatcttacaagtagatcattgtctcaaatgggaaaaagctcaccctaacaactaatcccattcaaactgtttcaggacttggaagccatgtggagacacttctacgaaaatctaatactgattttactgtagttatttctcaaatgaatggaaaagatcactcatcccattctact

SEQ ID NO: 45126 - DNA, 262 bp, Glycine max
  unsure (1)..(262): unsure at all n locations
  Clone ID: 701041577H1
tggagatgcttcgcagagcagcagaagactcttcgtctccgcgtgtctgtcgtntgttctgtcactgtcaccgtcaccgttgagtgtcgttagggccgcccacggcgtgttctacgtgaagtgcaagtatcaggaccgcaccctctccgccctcaaagcccacgactaccgccgccagctctccctcctcgccggcgtcgacctccccctcggaggctccggccgccccgacgccgtcgggctttattacgctaaaattggg

SEQ ID NO: 45127 - DNA, 264 bp, Glycine max
  Clone ID: 701041578H1
taaaaagattacaggaaaaacagagagagagaaatcttctcaaaccatcttgcaggtgtgtctttcattctatgttctactgctgggtaattggaaggctaaccaggagctgcttcattcctcaattattcttcaatctttctaagaagttcatattcttcagtgttctctagtgtcatcaccaaaatcagggaatgctgaaagatgtgcttgatagttaagaattccttcactgaggctaatgagtccgtgcctccatctgag

SEQ ID NO: 45128 - DNA, 263 bp, Glycine max
  Clone ID: 701041579H1
gaaatctgaagctaacttaagggaaatgagatggccaatggcaacactagtcatcgcttcaagctcttgcttttccttctaactctgcactcttcattcgctgagattttcttcgaagagagattcgaagatggatggaagagccgttgggtgctatccgattggaaaaggagtgaaggaaaagcgggtaccttcaagcacacagcaggaaaatggtctggggatcctgatgacaaaggtcttcagacatataatgacgccaa

SEQ ID NO: 45129 - DNA, 265 bp, Glycine max
  Clone ID: 701041580H1
aacgaaaccagagattcgtaattgcacattctcttttgttgtctccagctcatagaatattataaactcagattcattcagaatttcagattcacctttttcttttcttctctaccttctttttcctctgacagctttttgcagaaagttgtgatttttccttgaaagatggcatctttgagcatgatccagatcagaactgggaattgtgcatctgggtttggtttgaattgtgctgggaaggttaaggttggtcccagcagag

SEQ ID NO: 45130 - DNA, 268 bp, Glycine max
  Clone ID: 701041581H1
cgcaacaaaaagaaagaatcccaggcgaggagaaagatggaggggaaggagcaggatgtgtcgttgggagcgaacaagttccccgagagacagccaattgggacggcggcgcagagccaagacgacggcaaggactaccaggagccggcgccggcgccgctggttgacccgacggagtttacgtcatggtcgttttacagagcagggatagcagagtttgtggccacttttctgtttctctacatcactgtcttaaccgttatgggag

SEQ ID NO: 45131 - DNA, 266 bp, Glycine max
  Clone ID: 701041582H1
ctcgagccgttttgatcatacgatttcgttttgcctaatctaaggcacaaattcaaacaaacaaggtcactcctcattcattcattcctcttttctttttctctgtcaagtgctgtctatcactcgttgttgatttcattccaacaacgtcaatttcacatttccttgtcttgttgtgatcactctttagtatttagcatacctgcaaagttgtactctttttttttccttccctttgttttgagctctcagattactcagcaatc

SEQ ID NO: 45132 - DNA, 265 bp, Glycine max
  Clone ID: 701041583H1
ctgccgtggtgctttctccactgcctaaaccgactctctctctctgcctctgcaagcttgttacttggctttgtttgattgattgccccaatggccgcgtgtggctatatatctgctgccaacttcaatcatcttgttggcgccagacacttatccaaattcagttcttcggatgccacaatttcgttatcatttggcgggagcgattcaatgggtcttagtttgcgacccgctccaattcgtgctcctaagaggaaccatttct

SEQ ID NO: 45133 - DNA, 262 bp, Glycine max
  Clone ID: 701041584H1
ctccttcttccgcatcaactcgtcttattagagtttttactaatcaattatggcttacgagataaccgagataaagaagattggtataggcctaattggtttcggcttatttttcacatttcttggcataattcttttctttgaccgtggtttgcttgctctgggaaatattttttccttggcaggggttggcattttgcttggttggcgttccacgtgggcacttttcactaatagagccaactttaagggttctgcatca

SEQ ID NO: 45134 - DNA, 264 bp, Glycine max
  Clone ID: 701041585H1
gcaatattgtgcacatgatgggatgtttgactgcttacacatgtgctcagatgcgcatgaatgcgtttagtagaaaatgtcctgttaggtagtcatcagcaactgtcttctctgggttccatgccctcgttggcatgcaccataggatgccgagtaaatgctgatgcagataattgcagtttctcagtattctctcaatctcttgaagaaaatggtgtggtcttgcctctatgcatctgcttaccttctgtgggcctcctgtgt

SEQ ID NO: 45135 - DNA, 264 bp, Glycine max
  Clone ID: 701041586H1
gtttctataagtacagccatgtcaaatccattaccagttctaccattccctttaccatttcaaagtatttcaaataaccctttacatttacagggtggagcccatccacctttacctcctggtcgccctcctgctccatctcaaatgataccccatccaaatgctggtgcatttatgccaagccaacagccaactgttggatatactaatttaattagttctctaatgtctcaaggcgtgatctcattggctaaccagctgcct

SEQ ID NO: 45136 - DNA, 262 bp, Glycine max
  Clone ID: 701041588H1
caatcttctgagagtgtttggttgaaagtagcaaagatgtttcctttcgggcaaaagggtcacaagataaaggggactatggtggttatgcagaagaatgtgttggatatcaacagcatcaccagtgttggagggatcgttgaccaaggcttaggcttcataggcagtgcagtcgatgcacttacttttgcagccaccaaaatctccatccagttgattagtgctaccaaggctgatggtgggaaaggaaaaattggaaaga

SEQ ID NO: 45137 - DNA, 178 bp, Glycine max
  Clone ID: 701041589H1
aaaacttgtaaatttcttattttcatacaaagattgtcttgtcctgacgaccgtctttgtatggttggtgctggctttaaacctcgctctcactcgcatccctccttattagctttaatttaaacctctcgtgcggtgttgtcgtctcgcgtccccaaatctctcctcatctcgttcc

SEQ ID NO: 45138 - DNA, 260 bp, Glycine max
  Clone ID: 701041590H1
agttactatactctctctttctgaaacaatttgcccaattgtttgagatgttcaatatgagatttgtatctcaagattgggtggtttcatgtgcactaatacttctggtgtcatgcacaacatactcatcagcttctttggggaaacctgagaacaacataaaaacatctgtttttaaatcacccaagattgagctaggtccagggttagtttcaaacaaattttattttgatgttgactttccaagaggccatattgca

SEQ ID NO: 45139 - DNA, 258 bp, Glycine max
  Clone ID: 701041591H1
actttcttccttaattttctagctcttgctacgtacttgaattcaattagttattaatggctgagattgagggttctcccggaagctccatgcatggagtaacaggaagagaacaaacatttgtagcctcagtcgcttctccaattgtccctacagacaccacagccaaatttgctctcccagtggattcagaacacaaggccaaggttttcaaactcttctccctggccaatccccacatgagaaccttccaccttt

SEQ ID NO: 45140 - DNA, 260 bp, Glycine max
  Clone ID: 701041592H1
ggtgagtgggaggcattttgatttgagaatggcatcagcgtgtctgaaattgagaaatttgagcagaggaggaggagcatttaggtgtgggcgttattcgaagttgatacatgcagagagagagagagaagaagaagaagaggaggtgccgagttctagaatctctaggccgctctctgaaatactgaaagagctgaacaagaaagtaccggactccctcgtcaaaacccgcctccagaaagatcaagatgcctccccca

SEQ ID NO: 45141 - DNA, 261 bp, Glycine max
  Clone ID: 701041595H1
gtaaacttttggtgtgagtgttctgcgcgcgccgcatcaacaataatttctcaaacagcgtcgtttaagttaaagaaacccattagactaggcagatcattatggctgtacattccgaatcagcttcatcagagaagaaatcaagcaatggagtgaatgagttgctgacttttaatgctgagaatatgcaaagcaacatgaaaattatctattacagccgaacatttttatctataattggtggcgttgttgctggaattt

SEQ ID NO: 45142 - DNA, 262 bp, Glycine max
  Clone ID: 701041596H1
gtattttcaaacattagcaaatagcaaccaaacatacaaagatgaaagaaacatgttgttgtgctagttttagttttggcaaggcaaagccttatttgttaacggtgggacttcaatttgggttcgccggtgcatacatcttctccgtcgctagtctcaaccatggaatgaatcgttacgtcttcgttgtctatcgcaatgccatcgctgcattggcccttgctccttttgcattgattttcgagaggaaaattaggccaaa

SEQ ID NO: 45143 - DNA, 187 bp, Glycine max
  Clone ID: 701041601H1
attaaacttgttttttgctagaagcaggaagagaagcgaaacaaacaaacaacaaaataatcaattgagccacttaccatcagatttagatctcccaacagagagtttctcaaaattgccaagtacccttttcaggatcaaggaagagaatcaagaaccaccaaaaggtgttgttctttgttgtagt

SEQ ID NO: 45144 - DNA, 182 bp, Glycine max
  Clone ID: 701041602H1
ccaaatggaagtgaaccatctgaagaagaatcatggggccctgaattgccagattcggtggctaaactgaacactgaggataggaattcaagtgatgaagatcaggaagatataaatacaagtgataacaaatcaaaccaacaaggcgtgcgtcaatacaaacacttgattgcaatccatgg

SEQ ID NO: 45145 - DNA, 275 bp, Glycine max
  Clone ID: 701041603H1
cttattgaagactacccttatgcagctgatggactcctcatatggtccagcataaagaagttggtcaggacctatgtcaacattactataaaaattccaatgccgtttcttctgacaacgaactccaatcttggtacagagaattcatcaatctcggacaccctgatcataaaaatgctagttggtggcctaaacttgacatccctgaggatctcacctccatgcttaccactgttatttggcttgtatcagcacaacatgctgtcttgaacttt

SEQ ID NO: 45146 - DNA, 273 bp, Glycine max
  Clone ID: 701041604H1
tctacaaccaagataagccatgggatgaccattggatcttttgggtaggaccatttattggggcagccattgcagccttctaccatcagttcatcttaagagcaggtgcagctaaggctcttggatcattcaggagtaacccccataattgagttgtctttctcttccttatgatggctctagtggaaagaagataattggagagatggaggttgatatggcaagtttaataataattgggaatgcttttggcttgtgttttgcaacgtttct

SEQ ID NO: 45147 - DNA, 274 bp, Glycine max
  Clone ID: 701041605H1
cttccacttgctctaacttctgcaacaggaaggaaagaacttcccgaggatctgttcactgtaaaatattcttccttccctgctccagtcctaggttggcaaatgggtgttccccatggcatgggtatctcaatgcaatacaataatgtgcctgtgccaagttttccacagccatcaaagtcaacaaatccgtttgatttgcagttggttcactgctgacatcaaaccccaacttttccttccatgtcatccttgcaaggtgccctgcctagtg

SEQ ID NO: 45148 - DNA, 273 bp, Glycine max
  Clone ID: 701041608H1
cagcaagcaacatcaatgttcctcccacaacactactgcacacatggaccctcaccgccgccaccgccaccgccgccgcacgtggtgctgctcctttgccgtccctccctccagccccgacaaccttactaactcctccaaacctctccctcgcaactccgagcctcactccaaacctgcattctccctcccaaactcccccaaatcccgcatcccagtcaagatcgaccctcgccggatcctttccccgggaagagtctcccccatcgactc

SEQ ID NO: 45149 - DNA, 270 bp, Glycine max
  Clone ID: 701041609H1
agtgagtctacgtgtttgagagaaaggttgagctatagcctaaagggagagacacataaatagtttctactttctattcatagatagatggctggcccaattatgagacctcagattgtgctatttggctcctccataattcaaatgagcttcgacaatggtggttggggtgctattctagctaacttgtacgctaggaaggcggacatcatcttaagaggatactctggttggaattcaaggcgggctttggaggttttggatgaaatt

SEQ ID NO: 45150 - DNA, 259 bp, Glycine max
  Clone ID: 701041575H1
cgttccgttacgctacgttcactctgtctgttgggcttttagggttagggttagggttagggttttggtttgtggatctattgttgtcgctgcgatggatcgcaagaggggaaggcatgaagctgccttcaatttcaatggcggcgccaagaaatcgaggcctgaaatggactcctttccaactggtttaggaagcaaatcgaagccatgcacaaagtttttcagcacctctggctgtccatttggtgaaggatgccac

SEQ ID NO: 45151 - DNA, 270 bp, Glycine max
  Clone ID: 701041541H1
ctttctccggcgacgatctcagattccggccactcctctcgccggcgagcccttactcttccctcctccgtcgagccctctccgattcgaatcgttcccagcctcgcaccaccatgaatcccgaatacgattatttgttcaagcttttgctgattggagattctggtgtaggcaagtcatgtcttctcctgaggtttgctgatgattcataccttgacagctatatcagtaccattggagtggactttaaaatccgcactgtggagcagg

SEQ ID NO: 45152 - DNA, 69 bp, Glycine max
  Clone ID: 701041546H1
cccttctccaaagagaaagaacagcaagcaatcgttacccattacctatttcactttccacacaacata

SEQ ID NO: 45153 - DNA, 265 bp, Glycine max
  Clone ID: 701041547H1
gcgctgcattggtcatccattgttggaacattctctgattaccaaacaatgagacccccgagaggcggtggacgcggcggcggattcagaggtcgccgcgacggtggtggtcgcggcagaggtggttttggtcgcggcggaggtggttttggtcgcggcggcggcggatatcgtgacgaaggaccaccctccgaagtcgtagaggtgtcatcttttatgcatctatgcgagggagatgcagtgacaaagcttacaaatgagaaag

SEQ ID NO: 45154 - DNA, 274 bp, Glycine max
  Clone ID: 701041548H1
gcaaattccaattcccaattcccaattcccaattcgaaacccttattcctttcaaagaaccaaattgagtgatcgtgatggcaccaaaggcagagaagaagccagcggagaagaagcccgcggaggagaagaagtccacggtgggagacaaggctccggcggagaagaagccaaaggccggaaagaagcttccgaaggagggaggcgccggcggagaagggaagaagaagaagagaaacaagaagagcgtggagacatacaagatctacatctt

SEQ ID NO: 45155 - DNA, 275 bp, Glycine max
  Clone ID: 701041549H1
ttctagcaagctttcaaaagttgatgagttggttgatgagataaacatatataacattctagaaccatgctatcacggcacagaagcagagaagattacagaatcctatattaggatgccatctaccttccggaagttgggtgagaccgaaagaccttttcctgtgaggaaaagaatgttcggtcgtgcttggcccctaagagctcctgtgagagatggaattgtaccaacttggccacaactgatgaatagtaaatctgctccaccatgcacgg

SEQ ID NO: 45156 - DNA, 276 bp, Glycine max
  Clone ID: 701041550H1
gcaaaatcacccaagctcggtcgtaagaagagttcagcaaattcagagtcagatggaaacaacagcagcagttcacgactagctcgtttaagtctggatgagaaagtgtcagagagtaacctcactaagggacctactcctcctgtccatcaaaagaagccacaacgaagatctcttcctgctcggctggcccctgaaaggaacagtgtatcaaattcaaggactgcaccaacttcatccaaggctatcaaagatgaaaagtcctccttgtctagt

SEQ ID NO: 45157 - DNA, 274 bp, Glycine max
  Clone ID: 701041551H1
gatgacctcaacaacgtttgcatctgccactgttaatgtcctcccggccattacttttgtaatggcactcattttcaggctagagaaggtgaacttgagaaaatttcacagtgtagccaaagtcattggaacccttataacagtttcaggagctatggttatgactctgtacaaaggccctgccttccaaatcataaagggtggaggagccatcagcaaccatagcaactctagcagtactagtaccaccgaaccctctgaccagcactggata

SEQ ID NO: 45158 - DNA, 274 bp, Glycine max
  Clone ID: 701041552H1
gcccggcaaccgctactacggcggcaacgaattcatcgaccagatcgaaaacctctgccgctcacgcgccctccaggccttccacctcgacgcccaatcctggggcgtcaatgtgcagccctactccggctcccctgccaacttcgccgcctacaccgccgtcctcaacccccacgaccgcatcatggggctggatctcccctccggcggccacctcacccacggctactacacctccggcggcaagaagatctccgccacctccatttacttc

SEQ ID NO: 45159 - DNA, 269 bp, Glycine max
  Clone ID: 701041555H1
tccacatcctggtgaattctcagacaattctagaccttttcaccactgttactttatgggtctgcagcgtaagaaggagttccagtgaatgaaggtgaacagtttgatataaggttaactgttgaagaatttaaacattctgtcaacgtttacactctatggaaacctggaatggatatccatgtgtcccatgtgaaacgcagtaacattcctaactacatatttcctggtggtgtgcgacctaccttcccatcaaaagtaactgccga

SEQ ID NO: 45160 - DNA, 269 bp, Glycine max
  Clone ID: 701041556H1
gtgaaatctaacaccgagcgtgtagatagtctatgaaatccaattaaatgttcttctgagaacaaagaacataagataacaaacagaaagcgcttataaatggctttccacgaccatctaccgcacgaaatcacgttccagccgtttaccgaggagcagcagttaggtcagagcagggacatgcagcggctgctcccgctctccggcggggcgccgacgtggctgaacaacagcaccgcggcgacgctccgccagcagaatttcctcca

SEQ ID NO: 45161 - DNA, 266 bp, Glycine max
  Clone ID: 701041557H1
atttgctcttgctgatgtccagctacttcgtagctgcatcttgtgtgtttaggtttcaatttttgcttaatattttacttgaatatgcaatagatcatttatccgcttggattcgaattttcctagcctgccatgttcacacgaacggtgggactaggggtgaaccatatgcctattaatttatatttatttatgtccttttcttttatggaagtcttttttttcactaggatcgagtgaagggaatctgctagtctagttgtagc

SEQ ID NO: 45162 - DNA, 264 bp, Glycine max
  Clone ID: 701041558H1
caaacttcaacttgtaatcaagggagagagaaaatttcaagcacaaaaaatggcggagaagaaagtggtgatcctaggaggtggtgttgccggtgccaaccttgcaaaaactatacaacatcaagccaacgtcacccttattgatccgaagaatattttgagattccatgggcaagtttgaggggattggttgagccaacttttgctgaaaggatagtaatcaaccatagagagtacttcaaaaagggtaaccttgttgtatcc

SEQ ID NO: 45163 - DNA, 267 bp, Glycine max
  Clone ID: 701041559H1
gcagaaacgtgaggtcccacttggcaaggtgttctggttccagtttcagacgatcatcttctcaaacagaaagaaggaagtcatcatggttttgttccctcaatcaatctgttgacacaggcagtggatgctgattacattttggtctttttctttctcaccccaacattataccccatgattccaaatatcatccactgttcactacatttctacattgattgtaaataccaagcccaattgttttcagctgggacaaatttcttt

SEQ ID NO: 45164 - DNA, 78 bp, Glycine max
  Clone ID: 701041560H1
gtgaaacttgttttccttgcgcgaagctttggcattccccaatcgcttcatcctcatctacttaaccctaaccccaca

SEQ ID NO: 45165 - DNA, 265 bp, Glycine max
  Clone ID: 701041562H1
ggagaagaaagatattgtgcaacttcattagagtccatggtagattttgtcacttctaagcttgggaagaatgctcgagttatttctacagaagcagaaaaggaaagtaagtcccaaaaattctcggtgaaagatggagtgaagttgttagcagaagataaggtcattgtttgtcatcctatggattacccatatgttgtgtttatgtgtcatgagatatcaaatactactgcgcattttatgcctttggagggagaagatggaa

SEQ ID NO: 45166 - DNA, 268 bp, Glycine max
  Clone ID: 701041563H1
ttttgcttgtgtgaagtgccaaattaagagagaaacagagagatagaaggaaaagcatcaaagatgaaacccaacttttcatttttgtttaagcttttgatactgcaatatctagcagttctatccatttctcaggaatttgatttcttctactttgttcagcagtggccaggagcatactgtgacacaaagcagagctgctgttatcccaagactgggaaaccttcagcagatttcagcattcatggactttggcctaactacaatg

SEQ ID NO: 45167 - DNA, 269 bp, Glycine max
  Clone ID: 701041564H1
cgcacacgaggagcagcctcaggaggagaaggatgtctcacaggaagttcgagcacccaaggcacggttcactgggatttcttcccaggaagcgtgctgctcgtcacaggggaaaagtgaaggcattccccaaggatgacccatccaaggcacccaagctcactgcattcttgggttacaaggccggtatgactcacattgttagagaggtcgcgaagccaggatcaaagcttcacaagaaggaaacttgtgagcctgttacaattatt

SEQ ID NO: 45168 - DNA, 269 bp, Glycine max
  Clone ID: 701041567H1
caatttccatcttcaacttcaacacttaaactccttttagtttcaataatccacaccccaaaccccatctctttccctatttattttcatcttagttttccctaggaccatatattataccatatttatatatcttcacatacttaatagtatataataatgggtgttgtacggacgtgggagagcaggagggcggactggaggcctttcgccggagcctggtggcagccgccggcatccagcggcggaaagacgatgagggggggaga

SEQ ID NO: 45169 - DNA, 269 bp, Glycine max
  Clone ID: 701041568H1
gcgaagggagagcgaataaaaaaaggcaaatcaaattcgagagaaggagagaatttagagagggaaaggatgaagatcacggcgttgttggtgcttaaatgcacgggcgagggatccgatccggtgattctggcaaacgcttccgatgtcagccacttcggctacttccagcgttccagcgttaaggaattcatcgttttcgttggtcgtacagtcgccagtcgcactcctcagggccaacgccaatccgtacaacacgaagagtacaa

SEQ ID NO: 45170 - DNA, 270 bp, Glycine max
  Clone ID: 701041569H1
gtttctttcttcaacgtttccatcatacacagatcccaatcctctctcaagccctaatttcccctcatttccatggccacagaagagtccactgtcgcggtggaacccgctcccgaacctgcctccgccgatcctcccccggaggagaaggaggagaccaaacctgaagccaaggctaagaaaaccaaggagcccaaacctaaaaaggtttccagacctcgcaaccctcccactcatccttcctacgaagagatggttaaagatgcaatt

SEQ ID NO: 45171 - DNA, 265 bp, Glycine max
  Clone ID: 701041570H1
taattacttgccttgaggaacgttccagaccacatacagaggtttctctagtgatcttcgttcttctgtggagatcttgttttttcatctcacttttcttctaattaaggaacaagctttccgcagttgaaaaccctagctagctagcttccaccaatttgaatcaccaatggctcgctctttctctaacgtcaaggttctctctgctcttgtggccgacggattctccaacactctcaccaggcgtgggtacgcagcagcgaca

SEQ ID NO: 45172 - DNA, 264 bp, Glycine max
  Clone ID: 701041571H1
ggaacattgtaatcgtaagctccgaagcttcatgatattccaacaaccttcaaagacagagaagatagtagaaaacaactccaacaaacaaacatcaatggcaaacacgtattcgtggctcttcctcgcgatttgtgccaccctcttgcttcttctgtcttcgtcgccgacagcggacgcgggagcactgggcatggaaatgacatggataccctccatgcccatggaagaggagttccagctggacagcgagatcagccggcg

SEQ ID NO: 45173 - DNA, 267 bp, Glycine max
  Clone ID: 701041572H1
caaaaaacaaaaaattaaagtaggcagaggcagcgcagcattagcataacaaaattgaagtaagcctcacatcacagatttcccagtaaacaacgaacccatcatctcaatctgcttcttcactctaatcgaatcgaaccacccttcaaatcgcagatcaaaatcgaagcttatacatatacatacaccacgcgtgaatccaacggtgatgatgaccgggaagcaaggtttcttctctctgcgaggctcactcctcttcctcgcagt

SEQ ID NO: 45174 - DNA, 265 bp, Glycine max
  Clone ID: 701041574H1
actcacccttgttgcatgttccttacttcctttgaaacctttggccaccaacacacacacttagatcaactttcctcgtcccttgctttccactccaccaaggtaccaaccaacctaccaaatggcagcaaagccagctgaagaagctcctcaaggagaaaccctcaagtaccagtcgtgggttttgaaagtattgatccactgcgatggctgcaaaaggagagtcaagaaaattcttcagggaattgatggggtttatacaaca

SEQ ID NO: 45175 - DNA, 273 bp, Glycine max
  Clone ID: 701041540H1
ggccaacagaactctctagaacctctctcacacaatagcaaacactggaagactaaaactaaaaccccactctctttttccgagtcttccagtgaaagaaaggcagcgatggaagaagacttcgacatccccggcggcgaggaaatggatctcggcgaagacgaggtcggcgaggagagggagatcggctctggcggcctcaagaagaagctcctcaaggaaggtcaaggctgggaaacccccgaagtcggtgacgaagtccaagttcattac

SEQ ID NO: 45176 - DNA, 281 bp, Glycine max
  Clone ID: 701041503H1
caataatgccccaagatgcaagtggtgaagatattgaggttgataagaatcttgctttcctcaatcaatatgttcagcagtctctggaaaggggtgctctaccctacattccagaggatgagcgcaatggaacagtgaatgtgagcaacttcagaagccaggatcaacatgaatctgcacaacatggtctgagatttgaggcatatgaagttccaaagcctccaatgccgtcaaaagttgctccagtttcactttcatcctcaacagaccttgttccagta

SEQ ID NO: 45177 - DNA, 279 bp, Glycine max
  Clone ID: 701041504H1
ggagcactttatgttgatcgaatagatttcagtgatcatcacatattccatgccagggatattgagatgatcagagccaaacttggagaactagatgggaagtttgttcccaaaccaattgttgtaatgactgaaaaggattatgatagggacccagaaattcttaagcaattgcacccatttaaagtttttgttctctgttctgcattgaaggttctgccctatagaggaagcacagaggatagctttaagaaatttctgaaggaccatttaaaatta

SEQ ID NO: 45178 - DNA, 277 bp, Glycine max
  Clone ID: 701041506H1
aagaaaacggttagagttccggcgattagttcgaaggtcgccgatattccgccggatgagtactcgtggaggaagtacggacagaagccgatcaagggatcaccgtacccgaggtgagtggtttgtggccgttgatttggtgttggctttggtcaaaggtgtgttaactgacgttgatttgttttgtgttctcagggggtattacaagtgcagtaccgtgagagggtgcccggcgaggaaacacgtggagcgtgcttcggacgatccgacgatgttg

SEQ ID NO: 45179 - DNA, 277 bp, Glycine max
  Clone ID: 701041507H1
cagagatgaatcatctccatatgctgctatgcttgctgcgcaggatgttgctgctagatgcaaggaactgggcataactgctcttcatatcaagctccgtgccacaggtggaaacaagacaaaaacaccaggtcctggtgctcaatcagctcttcgagcccttgctcgttcaggaatgaaaattggtcgcatagaggatgtgacccccattccttccgatagcacacggagaaagagtggtagaaggggtagaaggctttaagcttcttatggtata

SEQ ID NO: 45180 - DNA, 257 bp, Glycine max
  Clone ID: 701041508H1
atggaaaaaaatattgtagcaatttcgtcgtagaaacaaaattcccctattttcggcacgccgttgttgaatttccaatctgtgatttttttcttcttctatttatacgtgataattccaaaaagcctaacgcgagagattcatcagcttttcaattattcctcgaattattttgaaggaatcatccaaactgcttgaactattcatcatcaacaacctcacgctgttatagatattctctctctctctctctctca

SEQ ID NO: 45181 - DNA, 276 bp, Glycine max
  Clone ID: 701041509H1
gggagttaggttctgcacgctctgcttccagcgagtgttctttcttcgtttcaacaccttaatttgcacacgctgcttcttcagcttgagaaatggcacaagaaacctttctattcacatctgaatctgtaaacgagggtcaccccgacaagctgtgcgaccagatctctgatgcagtgcttgatgcgtgccttgaacaggaccctgacagcaaggttgcctgtgagacatgcaccaagaccaacatggtcatggtctttggagagatcacaacca

SEQ ID NO: 45182 - DNA, 276 bp, Glycine max
  Clone ID: 701041510H1
gcgtttttctcttcgtcttcttctacgcataatagcatcagaatggtgaagcactacagacccccggggaagaaaaaggagggatatgctgccaaatttgtcattaggtcacaagcaatcaagcagcttcaaatcagtctaccccttttcaggaaactatgtattttgaaaggtgtaactccaagggagcctaagaaaaagttcaagggaactcatcagacttattaccatgtaaaggatgtttccttccttcatcacgagcctttggttgaaata

SEQ ID NO: 45183 - DNA, 272 bp, Glycine max
  Clone ID: 701041512H1
gtggtcttagcagagaggctgaacaggaattcacctctgcttaccctgttacggagtttactattaaacccgctaccaaacattctgttgagttccctgtttctgagaaaagccatcttgtttgggaaatccgagtggtgggttgggatgtcagctatggagctgaatttgtgcccagcgctgaggatggatacactgtcatagtacacaagagcaggaaaattgctcccgccgatgagaccgttcttaccaacggtttcaaaattggtgaa

SEQ ID NO: 45184 - DNA, 276 bp, Glycine max
  Clone ID: 701041514H1
gttgaaaagaaaccctagcaagtggagcaatggcagacgttgaagtcgatgtggcggcagcagcagcagcagggctgccgacgaagagaacgttcaagaagttcagttttcgaggcgtggatctcgatgcacttctcgacatgtccaccgatgaactcgtcaagatgttcagtgcccgcgctcgtagaaggttccagagaggcctcaccagaaagcccatggccttgatcaagaagctccgtaaagcgaaaagggaagctccaccaggtgagaagc

SEQ ID NO: 45185 - DNA, 286 bp, Glycine max
  Clone ID: 701041516H1
cggctcgagtccgaatcttcttctatttctcttaaccactacttcactgacctcctcgaacccgaaattgaatttcctctcttcgaattcgattccaaaccccaagtaatcgacctcgaaaccccgaaaaccctaatttcagctgagaagaagcctcaatttaatcggaaaccgtcgctgctaatcgctgttccgaagaagaccgagtggatccaattcggaaaccctgaggtggcggcgccggagaaccagcctgagaagaagcactacagaggtgtccgtcagc

SEQ ID NO: 45186 - DNA, 279 bp, Glycine max
  Clone ID: 701041518H1
ttcacattctccattccacaacatcaaggttctgatcatgtcggggaagaggccccggccaatgatcggaaagttgtcggagttgttggtctcgagaggccgcacggtggcacttttggacaccactggaagcccaagaggcccattagacatgaagatgatgcaatcaccaagaggcttaaaaaattatgatcttggtggcgttggtcttggaattgtggtggctcttgataaatccaataacgaggttgctgcacgtgaagttttgcccaaacacac

SEQ ID NO: 45187 - DNA, 277 bp, Glycine max
  Clone ID: 701041519H1
atcgtcttctccctccttcttcaatggtcttagggtttccggtgtccatgcgtagagctcgcagtaatgcgcttttgaaacccgtgttcatctgtatccaacgatttactagaaggaggtcgcaatttctccatcttcacatttcgctagcacgtgaaatcaaaagttatcgacactttcgcgcgacacgaaatattgggaaccaagcaaaatatctatggctgacgaaccattatatccaatagcggtgcttatagatgagttgaaaaatgatgac

SEQ ID NO: 45188 - DNA, 276 bp, Glycine max
  Clone ID: 701041522H1
cggagattgcgaattgcgatttgcgatgcgaaaaggaaaggaaaaaaagggtttcctttcttgaattgctgcttgcttcttcttcttcttgttcccgactgacagataaggtgagttgaattactgtgaaggagtgattgagtgagtggtcaatgaacaacagcagcagcagcagcagcagcagcagcattctcatccaattgttgttttcctcgcctcctgcatgggcaactctaatcgcagctgcatttctcctcctaactctaaccctctcca

SEQ ID NO: 45189 - DNA, 273 bp, Glycine max
  Clone ID: 701041523H1
ctcctttctctctcttcacacttcaatggatattctttcttgaattcttttatgggtgtcattcatagggatctcaagccagagaatttcttgctatctagtaaggatgacaagggacttctcaaggccacagattttggcttgtcagttttcattgaagaaggaaaggtgtatcgaaatatagttggcagtgcttactatgttgctccagaagttctacgtcgtagctatgggaaggaagcagatatatggagtgcaggagttatattgtat

SEQ ID NO: 45190 - DNA, 274 bp, Glycine max
  Clone ID: 701041524H1
cttcaaagttcaattctttctctgtcgtcgctctttcttcaacttcaagcttaattcctcatgtctttcagaggcctcagccggccaaatgccacatcaggcatgggtgttgctgatcacagcaaaaacaccttcatggaattgaagcagaagaaggttcatcgttatgtgatctttaaggtcgatgagaagaaaagggaggttgtggttgagaagactggtggcccggctgagagctatgacgattttgctgcatctttgccggagaatgatt

SEQ ID NO: 45191 - DNA, 93 bp, Glycine max
  Clone ID: 701041528H1
gcgggggaatatggatggggaactacacataatgttatttccgttcccaggtcaggggcacttgataccaatgagtgatatggcgagagcatt

SEQ ID NO: 45192 - DNA, 270 bp, Glycine max
  Clone ID: 701041529H1
ggagaaggcattacagaagtctgccttagtgggtttattgcttttgatgttcctcctccaaagggtccattgtggattcttggcgatgttttcatgagggcatatcacaccgtctttgactatggaaatctccaagttggctttgccgaagcagtctaattacgctttctggaggattttctttgtaaatttgttaagcgtgttgtaaataagctgttataattgtagctctggttactttttgaaaccacgaatgtatttatccattta

SEQ ID NO: 45193 - DNA, 273 bp, Glycine max
  Clone ID: 701041530H1
cccgaatccggacccggttgtgatccgccaggtttgggcttcaaatctcgaatccgaattccaactcatccgcgaattcatcgaccactatccttttatctcgatggacacagaattccccggtgttgttttccgaccacacctggaccccacaaaaccctacaaccaccgcaacaacaatcgcaaccgccactccgaccactaccgcctcctcaagtccaacgtcgacgctctcaacctcatccaggtcggcctcactctcaccgacgccgc

SEQ ID NO: 45194 - DNA, 272 bp, Glycine max
  Clone ID: 701041531H1
caaaaccctgaagaaagacacagccattgtttgtttactttccattgattgagcgaaagctttgttttttctgcgatcattttccattgggtggaagaaagtctcaacctttagtcgaaagagcaaggatctgagtgagtgagcgatcatgtgtggtggtgcgattatctccgacttcattccagcgggtcccgccggcggggcgcacgcgtgaccgccgacatcctgtggccgaatttgaggaagcggttctcgaagtcgctgctggacga

SEQ ID NO: 45195 - DNA, 275 bp, Glycine max
  Clone ID: 701041533H1
gcttagaagagcaaagtgtgtgatgtggttggacattcagtcccaatcacatggcttcttcttctccttctcctccatcttatctcacacaccttcctcttcatccctctcaccaaggtgagagtgagaagcgcgtggaggacgatgaatcgcgcgttccgattcacatcgtgaccgcggcgacgcaacttcccgtcgaatttctggaaccctcgcctcaatccaagctcgtcatcggctttgactgcgagggcgttgacctgtgtcgcaaaggc

SEQ ID NO: 45196 - DNA, 275 bp, Glycine max
  Clone ID: 701041537H1
gatgaaacaaaaccttgacatatttgactgggaactgagccaagaggaatcacagaaattcagccagattccgcagcgtaggatgtatcgcggaataacttttgtatcagaaaatgggccttacaagaccttggaagagctttgggattgagattcctgaaatcattcctaatagcagcaaaatgtcatataaggctgtgtgtttggtttaagatgggaggagggaactaggagagaaattttgtacttttcatgtggaactcacatcttttaca

SEQ ID NO: 45197 - DNA, 273 bp, Glycine max
  Clone ID: 701041538H1
cgcgagattagggtcggatcgctcggtctcgctaggtcggagagagagagagagagagagaatgggagtgtttgtttgtgtgtgatgcgagtgagagagaagtgtgaaaaggggcgaatagggttagggttagggtttgattgaggatgccgaagaacaagggaaagggaggtaagaacaggaagaggggaaagaacgaggcggacgacgagaagcgggagctggtgttcaaggaggacgggcaggagtacgcgcaggtgctccggatgctgg

SEQ ID NO: 45198 - DNA, 271 bp, Glycine max
  Clone ID: 701041539H1
ccaacgcgctggggaagcacgtggaatacagtttcggttcgtcacctctgtggcacagcactataaataatcctcaagtttctacactttacctctcccaggaggaacagcgcagaacctaaccctcacgaaagcccttttcgattccgataactctcgttgttccgaaaccctaaccctaaccgggttttttcgtttgtttggattgaattggcatcggagggaggcgatcgattggaaattggtagtagtagtttagcgttgaagaacg

SEQ ID NO: 45199 - DNA, 288 bp, Glycine max
  Clone ID: 701041501H1
cttcctctctttaaatcctccaccagccaacaccctttttctcccctaactctctcacagatccaaaacccaaaaaagagaatagagtgagagaaagagaatcatggaattagaacaaaaccagagatgggaaggctatgtgaactggaggaacaagcctgctctcagtggctgcaatggtggcatgcttgctgcctcctttgttttagtggttgagatattggagaatctggcatttctagccaatgcaagcaatttggtgctgtatctgaggcagtacatgcacat

SEQ ID NO: 45200 - DNA, 267 bp, Glycine max
  Clone ID: 701041470H1
cttctctctctttctccggcgacgatctcagattccggtcactcctctcgccggcgatcccttattcctccgtcctccgtcgagtcctttccgattcgatccgttcccagccttgtgccaccatgaatcccgaacacgattatttgttcaagcttttgctgattggagattctggtgtaggcaagtcatgtcttctcctgaggtttgctgatgattcataccttgacagctatatcagtaccattggagtggactttaaaatccgca

SEQ ID NO: 45201 - DNA, 269 bp, Glycine max
  Clone ID: 701041472H1
ctctcgagccgaatcggctcgagcttcaaatcgattaagttcatagagcgaattgaaatatctacttggtaagtgattgagagactgaatttgtagataataagatgggttcgtcgactaatggtggtgtgccgccagggtttagatttcatccaacggatgaagagctgcttcattactacttgaagaagaaggtgtcctttcagaagtttgacatggatgtcattagagaggtcgacttgaacaagatggagccttgggacttgcaa

SEQ ID NO: 45202 - DNA, 265 bp, Glycine max
  Clone ID: 701041473H1
ctttctaaactaaccaactttttttcaaacaaattcgattctttctccatttttaacctaattttcttttcgatccaaaaaatggctctctcgcgcgttgttgctcaatcgtcgcaatcgaatcttctgaaacccctagcgtcgtacttatcactacgacgccgttcggtttcgacttcgtcagacccactcacgatagagacctcggtgcccttcacctcccacaactgcgacgcgccgtcacgcgccgtggagacctcctcgg

SEQ ID NO: 45203 - DNA, 257 bp, Glycine max
  Clone ID: 701041475H1
ggactcttccccgtcgatcctctttcaggtgcccatattgatcaatgaaagaataagcctcttagaagaagctgttcttaactttctattcttttttgtatgattatcggtctggtgactacgtctgttaacatttatcaaaaaattgtactttatttttagttttttctaaaatttgtatgacaggtgtagataagtactacattttcaagactggactttacaaagttggccgaacaggttgtgatgtcataatc

SEQ ID NO: 45204 - DNA, 263 bp, Glycine max
  Clone ID: 701041477H1
ctcgtttccaggtttcggcgcaatcggcttctgcttcaaggaaggcgagcttgttattctctatcaacaagtaaaatgtcaggtgaagagggtgtcattgcagttgagccagctgctgctgctgctgccatcccaggcgagccaatggatatcatgactgccttacaacttgtgctcagaaaatctctggcttatggtggtttgtcgcgtggccttcatgaaggtgcaaaagtgattgagaagcatgctgcacaactctgtgt

SEQ ID NO: 45205 - DNA, 268 bp, Glycine max
  Clone ID: 701041478H1
catatatcagaatcattaaagataagattatattgctaagaagaaaaaatatgaaggttgtctacttgcttgttgccctcttggctttgacatcaactgttgtctctgcctatgaccctagtcctctgcaagatttttgtgtggcagccaaagaaaaagatggtgtatttgtgcacgggaaattctgcaaggaccccaagcttgtcaaagcagaagatttcttcagacatgtggaacctgggaaaactgacaacccactaggttcaaa

SEQ ID NO: 45206 - DNA, 263 bp, Glycine max
  Clone ID: 701041480H1
gaaacaagtgatcaaggtcaatgattatcagaagagccggttcgtgaatcgcgtggcttcgtcaatgtttaacactgttgcaagcaaaaagatagcaattcttgggtttgcattcaagaaggacactggtgacacaaggagagcaccagccattgatgtgtgcaaaggactactcggcgacaaggcgcgcctaagcatatatgatccacaagtcactgaggaccaaattcagagggctttatggatgaacaagttgattggga

SEQ ID NO: 45207 - DNA, 268 bp, Glycine max
  Clone ID: 701041481H1
catccatcttggttactcatctttggcagatattgaagcagctccacccacagctgaactggagcctatacgttctaattacagtcagcttgatgaagtcgatatgggaatgacttacgaggagctatcagtttatggaagactacgaaaaattttccgttgtggtccagtttccatgttccagaatctatgctacagatggggtgccagattgacaccatcacaagtggctgaaaaagtataacacttcttcaagtattattctatc

SEQ ID NO: 45208 - DNA, 241 bp, Glycine max
  Clone ID: 701041482H1
ccttccctctcttctgttaccaatggctccctcatcaaactacatttctttccttttcctcaccacccttttgtttgctcttcaaatcagtgcaagagacagccagttcttcagcaaagtcacccattttgacaaaaacgtgtcaaagagacagaacttcccaacaaagaagcaccagaagtgaacaagccagagcgacaaccacctttcattccggagactgaaaacagctatgggctat

SEQ ID NO: 45209 - DNA, 173 bp, Glycine max
  Clone ID: 701041483H1
gcaatttcgaaaatttgcactcactcctcttattctcagaacagaaaagagaagaagaaatggtgtcaggcgtgagagagataagctgtagcggagagccagtccttgacagtgatagcggggaggagttgatgcaggtaaagccggcatagacattgtcctcggcgatcttc

SEQ ID NO: 45210 - DNA, 264 bp, Glycine max
  Clone ID: 701041484H1
agggcattggaaatggcattccccttggtgctgttgtaactactccagagattgcagaggtcttaacccgccggagctacttcaacacctttggtggcaaccctgtttgcactgctgcagggttggctgttttgaaagtatagagaaagagcagcttcaacagaacgcgtttgtggttggatcccatttgaaagaaaggctcactgccctcaaggacaaatatgaattaattggtgatgtcagaggaagaggcctgatgctagg

SEQ ID NO: 45211 - DNA, 265 bp, Glycine max
  Clone ID: 701041485H1
gcggcgcagtggtggcgctccgccgccggccaccttcgaacggtggcggcgggccgtggttccttgtcgggattccagcgcagaactaccacacgatccaagccatcccaagggagtgcagcggcagccaagtctcggcgagagaccgaacgcaaggtcgaataccttgcgtcgttttcctccagaaccttctggaaaaaaaccccgacgcgcgttcggaatcgaagaagcacttgctcaccgtcgagaagaagcagattaaggc

SEQ ID NO: 45212 - DNA, 264 bp, Glycine max
  Clone ID: 701041486H1
cgcatttcctcgtttttttcttcccttttctctttctccggcgacgatctcagattccggccactcctctcgccggcgagcccttactcttccctcctccgtcgagccctctccgattcgaatcgttcccagcctcgcacaccatgaatcccgaatacgattatttgttcaagctttcgctgattggagattctggtgtaggcaagtcatgtcttctcctgaggtttgctgatgattcataccttgacagctatatcagtacca

SEQ ID NO: 45213 - DNA, 266 bp, Glycine max
  Clone ID: 701041487H1
cgaaattcaagaaattttttaaacttgacatatctgctatcacctcttccgtttcttgcgattcgacgatggccgatcaaaagcttttaggaccggcgtttagttttaagcatgatgaattgacgagtcgatttcttgaaaactccgacttcttgaagaactccgacttcttcaagaccgactttttaaagaacccgagaacaatgatgaatgtaggaaaaatgggagcctgaaaaggttaactgaccagagtgctgtctgtggat

SEQ ID NO: 45214 - DNA, 255 bp, Glycine max
  Clone ID: 701041488H1
ctgaggtttccttttcttctgccacatccactctttgttctctttcagaatctcttgagagcttttccgctcccaaaaatgctgaggagcatattaacatcaatgcaacaagtattattgattttgaagagtttgctgaaagaatatccaacagtgcttgtgaatcttcattatctcctgctgtgtatcatgaaaggtcggttaaaccacggggtgatcttccgagatttgataaaaaacccgttgtacacgaga

SEQ ID NO: 45215 - DNA, 263 bp, Glycine max
  Clone ID: 701041489H1
tggagatcggtgagagagagagagagagagagagagagaggagggaaaggatgggttgttgccaatcatcgacgttgctgagagtgggagagagggagactcaccctgaaaaggaaaaggaaaaagaccaccagaggctctctgaggccgagaaagagggctttgatttctccttctctgagttctcgctggctgagctgaaggcggccaccaacaatttcagctctgactatatcgtgtctgagagtggggagaaggcaccc

SEQ ID NO: 45216 - DNA, 262 bp, Glycine max
  Clone ID: 701041490H1
cgcaaacagtgagccatggccgtcggatagaacaagtgcatctccatcgggaagaagggtggcaagaagaaggcagctgatccctttgccaagaaggattggtatgacattaaggctccttctgtttttcaagtgaaaatgttggcaaaaccctcgtctctcgtactcagggtaccaagattgcttctgaaggactcaagcatacagtgtttgaggtctccttggctgatcttcaaggggatgaggatcatgcattcaagaa

SEQ ID NO: 45217 - DNA, 257 bp, Glycine max
  Clone ID: 701041491H1
gtcgagctgagaataccagttgctccagtagccggcactaaacaacatggcggacaaggcagtcaccatccgaaccaggaagtttatgacaaacaggcttctctccagaaagcagttcgtcgttgatgtccttcaccagggagggctaatgtttccaaggctgaactgaaggagaagctgggaagaatgtatgacgtgaaagacaccaacactgtatttgtcttcaagttccgaactcattttggtggtggcaagtc

SEQ ID NO: 45218 - DNA, 255 bp, Glycine max
  Clone ID: 701041492H1
ccggacgcgagactttttacaaagttattagaagctgggcatcacaaaagtttatgactggatgtgtcattctctttccaattgcaatcaccttctatataacatggtggtttattcatttcgtggatggatttttctctcctatctatgctcaacttggaattgatatttttggtcttggattcataacttccataactttcatcttcttggtcggggttttcatgtcatcatggttgggtgcatctgtcctgg

SEQ ID NO: 45219 - DNA, 256 bp, Glycine max
  Clone ID: 701041493H1
ctagaatggactttcgatgctcagtcatctcttttaccattctcttctctcttgattttgcaggagagcgccatgtctctgcatcgctacctgaggaagattattgggaagctgtttcgccaaacactcccattcccatgcactgcgagagcttctaaagcctctctctgcatgtgttgaaatcgatgaactccctaagcaaattgatgatacacagtacccaaaaacattcttctataaagcagaccttcatcca

SEQ ID NO: 45220 - DNA, 270 bp, Glycine max
  Clone ID: 701041494H1
atagggtatcaaccaagaccaatcaactccaagtgaaagtgaagttcagatggttcatagtggcacaaaggatttcacaacaaactcaaatgcatccaaggaagggacaaatgatacaaaggaggaaactaatccttcaaaaatgttgcaatagtagtggataaacctattgaagcacttgttatactctcttcaggagaaaaggactatatgaacaaaaaatggaagagggtactgtggaaatcttgtgtttatgcaatcacactagta

SEQ ID NO: 45221 - DNA, 270 bp, Glycine max
  Clone ID: 701041495H1
caaacatggcctccaaatccttcaccctcattctcctcatcctcaccacattcctcacggcccaaacccaagcccaagctcccgcaccggccccctcaggcgcggtgaacctcaccgcgatcctcgaaaagggtggccagacaccaccctaatcaaactcctaaaggacacacaacaactcactcagatcgagtcccagctcaaatcaaactcacaaggcttcactctcttcccacccactgacaatgccttccagagcctcaaacccgg

SEQ ID NO: 45222 - DNA, 272 bp, Glycine max
  Clone ID: 701041496H1
ccactcttaatttctctctgccttgctcatttacacacctctccaacctttcactttcagctttatttgaatccctctctctcctttccaaatggccagcgttgaggttgcacatcaaacaccaacaacagttccagaaaatgaaacaaccgaggtaatcaagacccaggaaacaaccccggaaccagtaccagccactgaggctcctgcaacagaacaagcagcagctgaggttcctgcccaagaagaacaacaagcaactgaggttcctg

SEQ ID NO: 45223 - DNA, 266 bp, Glycine max
  Clone ID: 701041468H1
gctggcggttggcgcaacctttcgatcttcatccaacggggcaacgttggatctgctgaactgaacttctttttatatgcactctgtgatttcactctgcttcgccatcctatgggggacaacaacagcaacaacgatgcttcatgcgcaaccaaaacgccgccgttcaggcccgcaccaaagcgcagaaccgctccaacgtccttcagctcaaactgattggacagagtcacccaaccggtctcacagcgaacctgttgaagctc

SEQ ID NO: 45224 - DNA, 271 bp, Glycine max
  Clone ID: 701041437H1
ctctgttctctctccccctccccgattcgttttgcccctttcgccgccccaatttcaaccatgcctcgccgtagctccggtggaagatctgcccgtcctgctcctcgtgcagcacctcgtcctgctccagttcaccatgctcctcctccagcccctgctcagagcggtggcggatctatgcttggtggcattggttcaaccatagctcaaggtatggcttttggcactggaagtgcagtggcacacagggctgtggatgctgtcatgggtc

SEQ ID NO: 45225 - DNA, 269 bp, Glycine max
  unsure (1)..(269): unsure at all n locations
  Clone ID: 701041438H1
gccatttcaatcctcagtttctttcttcaacgtttccatcatacacagatcccaatcctctctcaagccctaatttcccctcatttccatggccacagaagaacccantatcgcggtggaacccgctcccgaacctgcctccgcgatcctcccccggaggagaaggaggagaccaaacctgaagccaaagctaagaaaaccaaggagcccaaacctaaaaagatttccagacctcgcaaccctcccactcatccttcctacgaagagat

SEQ ID NO: 45226 - DNA, 271 bp, Glycine max
  Clone ID: 701041439H1
ctctttctccgagaacaaaaaaaaaaacgtgattcgctcttctctccgaataaaccacaaaaccaacaaacgagaagaggagtgagagaagatggggttgtcgttcacgaagctgttcagcaggttgtttgcgaagaaggaaatgaggattctgatggtaggtctcgatgctgctggtaagcaaaccatcttgtacaagctcaagcttggagaaatcgtcaccaccatccccaccatcggatttaatgttgagactgtggagtacaagaac

SEQ ID NO: 45227 - DNA, 270 bp, Glycine max
  Clone ID: 701041440H1
gcttgttcaacaggctattatacagaagcaagcagcgagggttcctcgaactcgatttggttctcggaaaatgggtagaggacaatattcactccttggatgaatatcgcgttcgagctctcattcttctcctcgacttggagaatccagatttatggaagtggatatctggacaagagcaacccccagaatcaatccacataaacccagtctttgccgcagtgcgacaaggagttatgaagaatcttgagagtcattctgctcctgaaa

SEQ ID NO: 45228 - DNA, 266 bp, Glycine max
  Clone ID: 701041443H1
acaccacacacatagtagctattatactctctagagtaattgcggaatctgctagaattttctaataatggcgaaagacgttgagcaggtcacagagcaaggtgaatactccgcgaaggactaccatgaccctcctccggcaccgttgatcgacccagatgagctcacaaagtggtccttgtacagagccgccatagctgagttcatagcaacactcctttttctttacatcaccgtgttgaccattattggctacaagagacaga

SEQ ID NO: 45229 - DNA, 265 bp, Glycine max
  Clone ID: 701041444H1
tagcaagggatatatatgagcatgctgttgtccttagtgtgaaaattgaggatcaagatgctttcgaaagggatttcttccagttgaagccttattatacagatgcctgcaatcgtcttccaccatctcctcaggagtaccctatactgggtctcaacctgttgagactacttgtgcagaataggattgctgagttccatactgagttggaattgctttcatctgctgctcttgagaatccttgcattaagcatgccgtggagtt

SEQ ID NO: 45230 - DNA, 269 bp, Glycine max
  Clone ID: 701041445H1
gaaccattcacattcttccagaatcatcaaagccatcaacgggcttgacttggcaactagctggaagatgaagcaagcaactcttttcttcttctcactcttcctactcctttcctccaccaccatggccatttcaccagcacctgcagcagcaccaaaagccacagcaaaaactcctcctaccccaaaggcaacagcaccatcaccaaaaccattagttcccacaatacctcagtctccagactctcctgactcggtccccgacgaca

SEQ ID NO: 45231 - DNA, 274 bp, Glycine max
  Clone ID: 701041446H1
ccctcgagccgaatcggctcgagcaactcttcaaaagggagaagaaacggaaagaaaactctcaaaaaactattatagcaatggcagaacaaaaccaaaaccaaacaactgaagctggaaggcaccaagaggttggtcacaagagcttctccagagtgatgctctttaccagtatattctggagacaagtgtctacccaagagaacctgaatccatgaaagaactgagagagttgacagcaaaacacccatggaacatcatgacaacctctgca

SEQ ID NO: 45232 - DNA, 270 bp, Glycine max
  Clone ID: 701041447H1
ttgatatctggaatgacagcactgaggtcgctaaatgtttcaaattctcgtataaccaatgaaggactacggaatttgaagccttgaaagatttacgcactcttaccttggaatctttcaaggttactgcttctgaaattaagaagcctcagtccactgatcttcccaatttgataagctttcggcccgaataaatcaggagaataagagaattctgttatctgcctgttgaacaattctctgtacatatttatggctactgtttggata

SEQ ID NO: 45233 - DNA, 273 bp, Glycine max
  Clone ID: 701041448H1
ctactgtgaaggtatggaagctaaacaatggactctggaagatggactgcttccctgctcttcagatgcacacggattgggttcgagatgttgcttgggcacccaatttagggctccctaaatctaccattgctagcgcatcacagacggtaaagtgattatatggaccgtggcgaaagagggggatcagtgggaaggcaaggttttgaatgatttcaacacccctgtttggagggtctcatggtcattgacaggaaacatattggctgtggc

SEQ ID NO: 45234 - DNA, 260 bp, Glycine max
  Clone ID: 701041449H1
ttgagatgttggggtggtgggactggatgggctgttgaagatgccaaggacaaaatcatgaagctcttggaggcgtacgagcgtggaggtgttgtgagtgaagcatgccagtgtatccgtgacctgggaatgcctttcttcaacacgaggttgtcaagaaagctttggttatggccatggagacgaagaatgataggatgctggatctgctgcaggaatgtttcagtgaaggtctaataaccatcaatcagatgaccaaa

SEQ ID NO: 45235 - DNA, 269 bp, Glycine max
  Clone ID: 701041450H1
cgcttatggaatcaaatctgtatcccaagatgtcttgcctgtcttgactgatgcattcgatggaaatattttgagccttgagtttgataattttgctgaagtgcacaaactctatgaaggtggagttacactacctacaaacttcttagcaagatcgcccctataccagtgatcaaggaaatttttcgaactgatggcgaacagttcctcaagtatccaccacctaaagtgatgcaggtggataagtctgcatggatgactgatgaaga

SEQ ID NO: 45236 - DNA, 268 bp, Glycine max
  Clone ID: 701041453H1
aagcacttagtgctattcaataattacgaaaaaccaacagcgagtgttgtttttgtctggtccaggctggaccagggaatgaatagagatgagaggctttcggttgaagagaactgagttaagcggcgaaccaaacgcagaatcggcggcagaaattgccaccggaagcacgtcgaagacgggtgaaccaaacacaaaattccatccaccacttctcttttcaatccccaactcaaatctgtgaagaaaatctcaatttctaaattgt

SEQ ID NO: 45237 - DNA, 269 bp, Glycine max
  Clone ID: 701041454H1
aggccagtcaagcatagaaggtccaagttatggcaagaaggtcattgaagaaggtgtgaaactaaccgccaatgttgatttgcaaagagaagatgaatgtgggatttgcttagagccttgcaccaaaatggttttacctgagtgctgccatgccatgtgtattaaatgctaccgcaagtggaacagaaagtcagagtcttgtcctttttgccgtggtagcttgaggagagttaattcggaggatctatgggtattaacttgtaatgatg

SEQ ID NO: 45238 - DNA, 271 bp, Glycine max
  Clone ID: 701041455H1
ctttaagacaaaaaataacttccttaataactaagaaggacaatctcatttcatttgttagttttcacatcctccaacataagtttctgagtttgaaacacagcataaacaaagcaaaatatgaatgccactctccctttttaaatggaaacaaagctgaagacaccacacgagcaatcgatagataacaaactaaagatagagtgagagtgagagacatgtataggttcagcaacacagtaatcgggttcttgaacttgttcacactttt

SEQ ID NO: 45239 - DNA, 269 bp, Glycine max
  Clone ID: 701041456H1
ctcaaacacaaacatccctcttgatttgaaggttgttttgtgcttatagataaaagttctgccaaatcaagaggggttttcagatcatagtgtgtgtgtgtgtgttaaacaatggctaagttctttgctgctatgatcttggcactcattgccatctccatgcttcaaacagtggttatggctgctaatgagcaaggaggccacttgtatgacaacaagagcaaatatggaagtgggagtgtcaagagataccaatgcccatcacaatg

SEQ ID NO: 45240 - DNA, 267 bp, Glycine max
  Clone ID: 701041457H1
catttgaattgggcactgaagccagagagatgccatgcaaccatatttaccattctgactgtattgttccttggttggttcagcataactcatgtcctgtttgccgtgttgagctggcacctcaaggacaggctagttccgtggtactcgaagttggggaggacggaatgccagcaacagcagcagcagtggcagcaatgatagctccaggggcagagagaacagccatcagaaccatggaaggagaaatccattttcatttttgtg

SEQ ID NO: 45241 - DNA, 266 bp, Glycine max
  Clone ID: 701041458H1
gaggaatatggcttccttaagctcctcattagtgctgctccttgcagctctaattctatcccctcaagttcttgctgactatgagacgcccccaatttacaagccacctgtttacacaccgccagtttataagcccccagtcgaaaaaccaccagtgtacaaacctccagtttacaagcctccagttgacaaaccacctgtttataagcctccagtttataagccacccgtttacaagcctccagtgtataaacctccagttgata

SEQ ID NO: 45242 - DNA, 262 bp, Glycine max
  Clone ID: 701041459H1
gcaatatgcattggaagacatgcgtttggtgatcaatatcgggcgactgacacagtaattaaaggagctggaaagctgaagctggtgtttgttccagaaggccagggtgaggagactgaattcgaggtttttaacttcactggtgaagggggtgtttcattggctatgtacaatactgatgagtctattcgttcttttgctgaggcctctatggcaactgctttagagaaaaagtggccactttatcttagcaccaaaaata

SEQ ID NO: 45243 - DNA, 267 bp, Glycine max
  Clone ID: 701041462H1
acccaacaaatacctacaaacacctccaacaccaaaaactcaacattgccaccgaagcatcttcatcggcaaaatataaactgaagctagttcacagagacaaagtccccacgtttaacacctcccacgaccaccgaacccgttcaatgcacgaatgcagcgagacaccaaaagggtcgccgccctccgccgccgtctggccgccggaaaacccatctacgccgaggaggcattcgggtcggacgtggtttccggcatggagcaagg

SEQ ID NO: 45244 - DNA, 269 bp, Glycine max
  Clone ID: 701041463H1
gcaagctagctaggttgaaaatagtttggttttgtagtaagtgaggtgaggtgccaaaatggtgcagataactcttggtactttcgatgactcttttggtgttgcctctcttaaggcttatttggcagagttccatgcaactctgattttcgtgttcgctggtgttggttcagccatcgcttacaacgagcttacaaaagatgcagccttggatccaacggggctggtggcagtagctgtggcccatgcatttgcactgtttgtaggtg

SEQ ID NO: 45245 - DNA, 111 bp, Glycine max
  Clone ID: 701041464H1
ggtagagctaagcgaagagtctctctcttcctatctctctctttcaatgtcaggagcaaaatcttgcagctctacttcttcttcttcgtccttctaacctatatcagaagg

SEQ ID NO: 45246 - DNA, 269 bp, Glycine max
  Clone ID: 701041466H1
cgagatcaacgaagacaacgtcctctacattgttgaaaacatcaacgttgctgcaattgaaacaactctatggtcgattgagtggggcattgctgagcttgtgaaccacccagagatccagcaaaagttaagggatgagattgacagagttcttggagcagggcaccaagtgactgagccagacatccaaaagctcccatacctccaagcagtggtcaaggaaactcttcgtcttagaatggcaatccctctccttgtaccacacatga

SEQ ID NO: 45247 - DNA, 266 bp, Glycine max
  Clone ID: 701041436H1
ctcgagccgctctgatatctctgcttgatcaggcgtgaactcgttgagaatctcaacggtgtttcgtttgtggttctggttttagaatctcattgcttgaaaataaactattgtactgaaatgtcaagcttgtgtgttgtaataaacaagattacttgttggttttatttcggtttgtactcatgaaggaaaccaacgtgtggtataacaagataatcattaagtatcaggctatttctagtccaaaaaataaaaactatagaaat

SEQ ID NO: 45248 - DNA, 273 bp, Glycine max
  Clone ID: 701041407H1
caacctcctcttcagagcttcagcaatggcggcgaagaagcaggacgccggggacaccaaaaagagaaagcgactcaatactgaagctcccaaggcttcgaagctcgttgcctcaaagaagcacaaaccagactccgttgctaaagacaacaagaacaagaagacggcccctcttaccggcctcctacgtcgtcttcatgccaaggaactagcagatgctagacaaaagaagagaaagcgacatttcactcttgagcaagagcttgcacgtct

SEQ ID NO: 45249 - DNA, 269 bp, Glycine max
  Clone ID: 701041409H1
gaagacattgaccttgccgtcaaagcgtctcgtctggctttcgaccatggtccatggcctcgtatgcctgccgtagaaagagcaagaattatgatgaaatgggctgacctaattgaccaacacgtagaagaaattgcagcactggatgccattgatgctggaaagttgtaccatatgcttaaggctattgaaattcctgcaacagcaaatactatacgttattatgctggtgctgctgataaaattcatggagaggtattaaagccggc

SEQ ID NO: 45250 - DNA, 270 bp, Glycine max
  Clone ID: 701041410H1
tatttctatattttggtgctctgtgtctctacgatctggatccaacggtccaaaatgttcggggcttgtgctgcttgttttcccaggttttagagctccaaaccttcatccacctcattcgtctccagatcttccttcctagataacgttttcgggttcgagaaggcacttgtttgtttgtcgtacgaaatggagactaaacagagttcggtgatggttacgctcagttacggcgcgttgacgtgcgccgcggaagttctcgcgactttg

SEQ ID NO: 45251 - DNA, 267 bp, Glycine max
  Clone ID: 701041412H1
tccacgaggagatggccgtcgatctcatcgaggccaagcccggcaacaaaatcctggacgtgggctgcggcgtgggccggcccatgcgggccatcgcggcccactcccgcgcgaacgtggtgggcatcaccatcaacgagtacaggtcaatcgagcacggatgcacaacacgacggctgggttggactctctctgcgaggtcgtgtgtgggaacttccttaagatgccgtttgtcgacaacagcttcgacggagcgtactccatcga

SEQ ID NO: 45252 - DNA, 267 bp, Glycine max
  Clone ID: 701041413H1
gtgggaagaatggattcggatcaaggcaagcttttcatcggtgggatttcatgggatacgacggaggacaagctcaaggagcatttcggtaactacggcgacgttttgagcacttccgtcatgcgggagaagaacactgggaaccaaggggctttggtttcgtcgtttttgcggatcctaacattctagatagggttttggaagacaaacatgtcatagacggcagaacggttgatgccaaaaaggccttctcaagagaggatcaac

SEQ ID NO: 45253 - DNA, 267 bp, Glycine max
  Clone ID: 701041414H1
ttcgatttgtaccaaattttcttcacaaaatgtctggtcgtgggaaaggtggcaagggtttgggaaagggcggtgccaagaggcacagaaaagttcttcgtgataacattcaaggtatcacgaaacctgcgattcgtaggttagcgagaagaggtggcgttaagaggatcagtggtttgatctatgaggaaaccagaggagttctgaagattttcttggagaacgtgattcgagatgctgtgacctacaccgagcacgctaggagga

SEQ ID NO: 45254 - DNA, 91 bp, Glycine max
  Clone ID: 701041415H1
ctgccaaggaataattggacaacacactacaagttgtttatagatttcctagtgcaaagggagcaaaattctcattgttcattggcgtgaa

SEQ ID NO: 45255 - DNA, 271 bp, Glycine max
  Clone ID: 701041416H1
tgaaaagaaaaggtggggtaaaagggatccaatccagtggtagatgagatgaggtgaaatgagactggatcatagcattgatgatagttgagagtgagtgagttaatatgttatcattgttatggtgaaagtgaaaccaaacaccgaagctgttgagtgattttcattgatccagatcgtgtctgttctacgtacgatgtacagcggctccagcgacggcgaaagccatgacgcccctcagagtcagaggaaaattccgccggcatcctcc

SEQ ID NO: 45256 - DNA, 273 bp, Glycine max
  Clone ID: 701041418H1
atttttcttcatcccccaaagtttcaatctttgtattcaattcaccctttctctctctccatggccacttgtgttgatgccccaacccctctttctcggaagcctagcgggtcccaatccgatgatcgttccttcaattacatgaattctgccgacccactttctctgatcgcgttccctgcatacccatttgcaagaatcgtgacactgccttcacacgcgtggaggagtttgacacatgtgtggaggatcatgatgatattgaggttgagg

SEQ ID NO: 45257 - DNA, 271 bp, Glycine max
  Clone ID: 701041419H1
cctcgagccgaatcggctcgagaagtagaccaaatttttgaagaacggtgatgcaggtatggctaagatgattccaaccaagcccatggtggttgaaactttctctgagtatcctccccttggtcgttttgctgtgagggacatgcgtcaaactgtggctgtcggagtcatcaagagtgttgagaagaaagacccccccggagccaaggtcaccaaggccgctgccaagaagaagtgattgcatttgggcaattttgctagcacatgtgat

SEQ ID NO: 45258 - DNA, 269 bp, Glycine max
  Clone ID: 701041421H1
tattaattcacttgcccggaaagccctggtcaatgcagatggtattatacagaaaacattcttgtggggtaggtactctatggaaatgtccgctgtcatttacaaggactgggttttcactgatcaagcattacctaatgatcttgtaaagagaggagttgctgttaaggacccatctgctccccatggagttcgtcttttgattgaggactatccttatgcttctgatgggctagagatatgggatgccatcaagtcctgggtgcaag

SEQ ID NO: 45259 - DNA, 272 bp, Glycine max
  Clone ID: 701041422H1
cagaaccaccccatcttccacccttgccccaatcttccaccgttcaattcgttgcctcacggcaaagggtcctgaaattgagacacatagatggctctcgagtctcgcaaatcccatagatcaagatcagccgtgtcaaattcctgcagagaacagcatctcggggaaaagggtcaccgaaggagagcttgtggaagacttagtgattaatcgctctcacgagcttctcttcacttgctcacccactcttctcttgaacggtttagctaccg

SEQ ID NO: 45260 - DNA, 272 bp, Glycine max
  Clone ID: 701041423H1
tcgggattggtttctatggcttctgaagtaatagagtaccgatgctttgtcggtgggcttgcttgggccaccgacagcgatgctctcgagaaagccttctctcattatggtgagatcgtcgaatcgaaggttatcatcgatcgtcaaacgggaagatcgagagggtttggatttgtgaccttcgcctcggagcaggcgatgaaagacgcaatcgaaggaatgaacggtcagaacctcgacggtcgtagtatcacagtgaacgaagcacaatc

SEQ ID NO: 45261 - DNA, 272 bp, Glycine max
  Clone ID: 701041424H1
cagagagtgatttcagtgagtgatcggtgttcacttgatctcatcataatcgtcagcgtcaattgaagaagatgccgatcagaaacatcgccgtcggaaggcctgaagaggcgactcaccccgacacgttgaaggcggctttggctgagttcatctcaaccttcatcttcgtgttcgccggctcaggctccggcatcgcctacaacaagctcaccgacaacggcgctgccacccctgccggcctcatctccgcctccatcgcccatgcattc

SEQ ID NO: 45262 - DNA, 267 bp, Glycine max
  unsure (1)..(267): unsure at all n locations
  Clone ID: 701041426H1
ctcttcttctcttgcggctanggttttagcgcacttcttctagatttaaggaagatgggtaaggactcccgttcacatcagtattgtggttattggccatgttgactctgggaagtccactaccactggccacctgatctacagcttggaggcattgaccagcgtgttattgagagatttgagaaggaagctgctgagatgaacaagaggtctttcaagtatgcctgggtgcttgataagcttaaggctgagcgtgacagaggaatc

SEQ ID NO: 45263 - DNA, 266 bp, Glycine max
  Clone ID: 701041427H1
gagaataacagcacctctttctctctgtctctctcccctcgttgatcccaaatctactagggattctcattcgatgcgattcggccggaagctttcgttttgcggatttttttaattattatttttcctggctatcaggttcgttgaaaaaaagctggaccatgacaagactggatgccaagctcccccagaaggtcctatattgtgcatcaacaactgcggattttttggaagtgcagctaccttgagcatgtgttctaagtgcc

SEQ ID NO: 45264 - DNA, 267 bp, Glycine max
  Clone ID: 701041428H1
gatctctccgtcaccactttctcccccgatggccgtgttttccagatcgagtatgctgccaaagccgtcgataacagcgggactgttattgggatcaagtgcaaagatggggttatgttgggcgttgagaagcttattccgtcgaaaatgatgcttccgggttccaatagaagaatacactccgttcatcgtcactctgggatggctgtagcaggattagcagctgatggcaggcaaattgttgctagggccaagtctgaagcaact

SEQ ID NO: 45265 - DNA, 268 bp, Glycine max
  Clone ID: 701041429H1
cctcgagccgaatcggctcgaggaaaaacctgatttcttctcttcctctcttctctttcgtatcgatcttcgatctctgaaaatgagagagtgcatttcaatccacatcggtcaggccgctattcaggtcggaaacgcctgctcggagctctactgcctcgaacacggcattcagcctgatgggcagatgccaagtgataagactgttggtggaggtgatgatgctttcaacaccttcttcagtgaaactggggctggaaagcacgtg

SEQ ID NO: 45266 - DNA, 271 bp, Glycine max
  Clone ID: 701041430H1
ccagaatcggtgtaggttacaggtttaagggttttgttttcatttaggtcactaatccgatatcatgaagctcgatacgactagtctcgaatcgtttcccacactgattgcacctcaaaacgacgtcgccggagaactctccgcgctccgttctttgaccttccgaattccaatgacttcgatgggttcttgaaagacgctattcagatggtgaagcccgcgaagggtactacaactcttgcttttatatttaaagagggtgttatggtag

SEQ ID NO: 45267 - DNA, 275 bp, Glycine max
  Clone ID: 701041432H1
gaaaatcgagaattttccgagaaaatccgaagacggcgggccatggtttccccggaaaacagcaattggctgttcgattacccgctgatcgacgacgttactcccgtcggcgacgcctccttttccgtctccgcctccgccttctcctggcccccatctcccgccaatgtcagtgttgaaattgatgcttcgcttgcggattctgatggccccaaagatactgctttgaagaaaagggctagatgtgattcaagtactgcttctagctctaaagc

SEQ ID NO: 45268 - DNA, 276 bp, Glycine max
  Clone ID: 701041433H1
ctcgaagaatacaacacaaagcttcggaccttttttggtctctggagttacactacagccacggagctctaggactgcttattaagtagtttattttagaggctaacatgagcttcgctgcaccatcacttggttctgctggtggtagatctgctagaagagcatttgagtttgggagaacctatgttgtcaggcctaaaggtaaacaccaagcaactatagtctggttgcatggcctcggggataatggctccagttggtcccagctattagaga

SEQ ID NO: 45269 - DNA, 271 bp, Glycine max
  Clone ID: 701041434H1
gctttgtttcactctttgctcttgatttcttcccttgtattggcttctcaaatccatgtttcctctgggaaactagtccctggactatcatggaattactatttgttgacatgtcccaagcttgagaggattataaggaagcatcttgaggatgtcttcgagaaggacagtggagtagctcctggcatacttcgactcttcttccatgactgctttcctaatggatgcgatgcgtctatattgttgaatggagacggtgacgagaagcaac

SEQ ID NO: 45270 - DNA, 271 bp, Glycine max
  Clone ID: 701041435H1
attactttcattattggtggagatcaattatcagtgcatgtctacctgtcttcgtgtggaagattatattatgcgatgattacgaaattaaggtagaaaagcgtactaagctgcaacgataataagagtgctataagacaggacgaggtgcagactttcggttgtctgtcattctttttcctcttggcgtggcatatggctgtcagatgcaaacgccaagagcattatgacactgcaaaacttattttgcaagattatggtctatggattt

SEQ ID NO: 45271 - DNA, 273 bp, Glycine max
  Clone ID: 701041406H1
cacactcacttcatttcttctttagtactactcactctctcaagctctctgtctgcgacaacacaaaacgacatcactctgattgtctcattaacgtcgtcaaaaatgctgcaaacccgtcccggcggctccggtggccgcacggtgctggtgggggtgaagatggactcccccagcaaggaattgctcacatgggctttggtcaaagttgcacaccctggtgataccgtggttgctctgcatgttcttgggaacaatgaaaccgtgaatgga

SEQ ID NO: 45272 - DNA, 243 bp, Glycine max
  Clone ID: 701041371H1
aacacaacaagggtgttgtttagtattattattcattgtctgttgtcatgagcttccacaagctcataatgtcgaatgtgccactactcttggtggtggtggtgtttgcatgctcactgattggtcatgcttcagcttcttgtcctatgaccataaggctatcaccatcaatggattcagaaggatactcctttctggctccattcactatcccagaagcacccctgagatgtggccagatct

SEQ ID NO: 45273 - DNA, 245 bp, Glycine max
  Clone ID: 701041372H1
cactcgagccgaatcggctcgagccacaatcctatcgcacatctttcacagttctacgatggacttttggggtgccgaggtacaggttggagagtctgttaaggtagacccagccgaatttgaggcatgcatacacctttccaggctgctcttggtgaggcaaagatagataagcctgaaccggtggttctctacatgaaagttggtgaacagaaatttgtcttgggaaccctttccagggagaa

SEQ ID NO: 45274 - DNA, 241 bp, Glycine max
  Clone ID: 701041373H1
cctcgagccgaatcggctcgaggaaaagaaaatcctcaattttctgcgcagccaaacactcactctctgtctctcgaaaattctcagtttgcagagaaaatctgaatcatgtcgtggcaagcgtatgtcgacgatcacctctgtgtgacatcgaaggtaaccacctcactcacgctgctatcatcggccaagacggcagcgtttgggctcagagtaccgacttccctcagttcaaacctga

SEQ ID NO: 45275 - DNA, 241 bp, Glycine max
  Clone ID: 701041375H1
cttagcttttccccctttaaaataacaatcatgaaaacatttctcaagacttatagctagtagcaccaacagttccataaccctctctctagcttccttcactcacttaattgtgacaatcccaattcaattcccatcagatgatgaactttcaagcatgttcaaacaccatctcaaacttgttctatgtttgttttgtccttttaccaaccatggccttaggagattgcacttgtgacac

SEQ ID NO: 45276 - DNA, 237 bp, Glycine max
  Clone ID: 701041376H1
caacatttcaagcatttgatttgcaaattgcaaatccctccaccttttcaaaatcttttgtgatcttttccaatggccaccttcatcttaaggtctaacaaagcagtgcatgcctttggttggctttgtctgctactgatgttcataagggtgcttcctatgattttgttgttggtggccaaaagggttggagtgttccaaatgaccccagtttcaatcccttcaatcaatgggcag

SEQ ID NO: 45277 - DNA, 243 bp, Glycine max
  Clone ID: 701041377H1
ctcatttcaacttaacccatcaaaaccatcgctctctattttcgtcctttctacctttctccgatcccaatccctaatctttctctcttcaaactctaattttttcatctggggagatcggctgacgaatcgagaggatctatcgctcgcgagggattagggtttcaatcgatcgcatcacatatcacaatcatgtttagccggatgttcggtaaacctaaacaggaaaccaatgctgttgcc

SEQ ID NO: 45278 - DNA, 251 bp, Glycine max
  Clone ID: 701041378H1
cacagattcatggcttaaaaaaaaataatcacagattcatagtgatctcagctcctaaaaaacagattcatagtgatctcattctcaagtgtattgaattttgcaatagagaatcatcaaataaacagccacctgtaccaatgtcatgacgtgtctgaaaacaagacacgcacctctccatatctttgtcaccttactctatatagagccaccttagcatactgcataatcacagttttcattcaaaattc

SEQ ID NO: 45279 - DNA, 256 bp, Glycine max
  Clone ID: 701041380H1
ggaacattgtaatcgtaagctccgaagcttcatgatattccaacaaccttcaaagacagagaagaaagaagaaaacaacctcaacaaacaaacatcaatggcaaacacgtattcgtggctcttcctcgcgatttgtgccaccctcttgttcttctgtcttcgtcgccgacagcggacgcgggagcgctgggcatggaaatgacatggataccctccatgcccatggaagaggagttccagctggacagcgagatca

SEQ ID NO: 45280 - DNA, 103 bp, Glycine max
  Clone ID: 701041381H1
gcgttcggcaccagcgaaacgctcttcgttatctttttctcgactccgcggcgtagatccgaggagttcgggaaaccctaactcatcttccttcacaacagaa

SEQ ID NO: 45281 - DNA, 244 bp, Glycine max
  Clone ID: 701041383H1
ccggaacataaggcgggcaagagagtttgtctcttctctcttcaatggaaggcggcgaacaggttctcccttcggccaccaccgtcgccgccgccggctatcccaacgtctctcctcctccgctcgctgatcctgtcggtcttccgatctcgctgctgctgcctcggacgacgttgttgcggaacctgaaattcacgcgctgatttcagacgaagagcacgatcacgatcacgatcacgatcac

SEQ ID NO: 45282 - DNA, 241 bp, Glycine max
  unsure (1)..(241): unsure at all n locations
  Clone ID: 701041384H1
caggaatcaccgacatggagattcacttcatccatgtgaaattctattcaatncggggttatttggagccagaagtagtaggccacttggaccagttcaaaggaaaatctgcaaaggagctggaagataatgaagagttctcaatggtctcatttctgccccggtggagaagtttattagacttgtggtgatcaaagagatcaagggtgcacagtatggggttcagattgagactgcggtg

SEQ ID NO: 45283 - DNA, 244 bp, Glycine max
  Clone ID: 701041385H1
gctagttattttttctgcagctaactaccaagcaaacacacagttagctctcgctccctggctgatggatggcggtgatcctaccaaactactcaaagtccatctagtcacctgcaccgactcggccgagttcgcgctccgagctcggcgctgactcggacctcggtggtgggcctggacgcggagtggaagcccgtccgaagattgttcccgagggtggcggtgctccaaatcgcgtgcggcg

SEQ ID NO: 45284 - DNA, 244 bp, Glycine max
  Clone ID: 701041386H1
gagcagttgaaggtagatgtgcacaacactaaaatgatgaaggaaaacgtgacctctgacgatctaaataataagagtcttggggagctgaagaggatgctgaggcagttaacgctaaatgaaaaaccaaaatccaagacaatgatgtcaaggatgtggagaagaaaaggaattcatagcaggtattgccacagaatcagattgatggctgaatgaatagttatggaataaacttggaaatttg

SEQ ID NO: 45285 - DNA, 243 bp, Glycine max
  Clone ID: 701041387H1
tctgtctctctctctttcactcactcaaactcactatataagattcccttctcggcccattcttcttcttctgctacaccattcattcgagcattcggttttgaatcttttgagcgaaaatgcagtcgagtcctttgctctggaggaacccataaggatggcctccatcctcgagccatccaagcctagtttctttccagcgatgacaaagattgttggcacacttggcccaaagtcacgatc

SEQ ID NO: 45286 - DNA, 242 bp, Glycine max
  Clone ID: 701041388H1
cccaatgcaaggccaaggcttcccatttagtggtcaccagcatcctacttttggtggccctggaatgcaattacaagctcctgatgttggtggtggaagaaatcatccagaagcacttcagaggctttttgagatggagtgaggtcaaaaaacccaaagccaatccatgcttcaggtcacagccaggggatgtatggtcaagagctagacttgggttttgggtatagatagtgtactgtcat

SEQ ID NO: 45287 - DNA, 239 bp, Glycine max
  Clone ID: 701041389H1
gtcgttttgatccctcccccaaacgaaacgcaccctctcctctttcggaaccttcgccgcccttctccggccaaattccccgcggtttctcgaacttccgacgccatctccggccacctcagagagtgaagaaggtcgtgacgatgagcaacgtgttcgagggatacgaacgccaatactgtgagctctcggcgaatctagcgaaaaagtgcactgctgctggtgttcttaatggagag

SEQ ID NO: 45288 - DNA, 242 bp, Glycine max
  Clone ID: 701041391H1
agccaattcagggtgattggaatggtgctggtgctcacacaaactacagcactaagtccatgagaaatgatggtggctatgaagtgatcaaaaccgccattgagaagttggggaagagacacaaggagcacattgctgttatggagaaggcaacgagcgtcgtttgacagggcgccacgaaaccgctgacatcaacaccttcttatggggagttgcaaaccgtggagcttcagttagggttg

SEQ ID NO: 45289 - DNA, 245 bp, Glycine max
  Clone ID: 701041392H1
cctcgagccgattcggctcagaggggtgagctaaagtcaatgttccaccctgtcctttccactacgtcacataatcccgctagaggacatggccagactcttcgccttgcacgacgtcgacgtcatcatcatcaccaccgcaataacgccaccgttttccaaaagtccatcgatttagatgcgagtcgcggtcgccccatcagaacgcacgttgtcaacttccccgccgcacaagtgggtctccc

SEQ ID NO: 45290 - DNA, 235 bp, Glycine max
  Clone ID: 701041393H1
ctagaatggaatttcgatgctcagtcatctcttttaccattctcttctctcttgctcttgcaggagagagccatgtccatgcatcgctacctgaggaagattattgggaagctgtttggccaaacactcccattcccactgactgcgagagcttctaaagcctctccctgcacggtgttgaaatcgatgaactccctaagcaaattgatgatacacagtacccaaaaacattctt

SEQ ID NO: 45291 - DNA, 250 bp, Glycine max
  Clone ID: 701041396H1
cttcctttcacctcctcagcagtcgtcagaaagactccataacccacaaatgcctttcaagaggtacgttgagattggaagggttgctcagatcaactatggcaaagagtacgggcggctcgtgatcattgtcgatgtcattgaccaaatagggctcttgttgatgctcccgacatggtgaggtcccaagtgaacttcaagaggctctcgctcactgacatcaagattgatattaagaggattcccaaga

SEQ ID NO: 45292 - DNA, 282 bp, Glycine max
  Clone ID: 701041401H1
cgtcctagatcgcgagcggccgcccgcgatctagaacatgacctgcttctggctgcctctgaggctttggctgcacaagtgagccaagagaactttgctaagggactcatatacccaccattcaccaacatcagaaagatttcagcacacatagctgccaatgttgctgctaaggcttatgaacttggcttggccactcgccttcctcaacctaaagatttagtgaagtttgcagagagctgtatgtataccccagcctacagaagctaccgatgaaaagtg

SEQ ID NO: 45293 - DNA, 275 bp, Glycine max
  Clone ID: 701041403H1
caaagtcctaccactactctacactttcttataagttataacaatcaacccactctcagattacgctctgttgaatgaaaagctaaggaatatgagaaggccatggaagcattctaagaacaaacatgatctctttgaatgtcttccggacgatctcgttgttcttattctttccaagctcagcgccaccgcttcatctccttccgatttcatcaacatcatcttaacatgcaagaggctaaaccgctcaggcctgcaccgtcttgtgttgtcta

SEQ ID NO: 45294 - DNA, 264 bp, Glycine max
  Clone ID: 701041404H1
attactttcattattggtggagatcaattatcagtgcatgtttgcgtgtcttcgtgtggaagattatattatgcgatgattacgaaattaaggtaaaacagcgtactagctgcaacgataataagagtgctataagacaggaggaggtgaagactttcggttgtgcgtcattcttcttcctcttggcgtggcatatcgctgtcagatgcaaacgccaagagcattatgacactgcaaaaattattttgcaagattatggtctat

SEQ ID NO: 45295 - DNA, 276 bp, Glycine max
  Clone ID: 701041405H1
cctgccgaggaaaagaaagacagacaaaaaaaacagcgccctagaactgctcttctttgcttcggaagaaagagaaaaacaaataacaatggcgttcgcttctttcctcggcagagttctcttcgcttccgtcttcatactctctgcttaccaagaatttaacgaatttggagttgatgggggacctgcagcaaaagcactcagacctaagtttgatgcctttacacatcgagtgcattctcaagttggctttcaacttcctgagattgatctgaa

SEQ ID NO: 45296 - DNA, 242 bp, Glycine max
  Clone ID: 701041370H1
cggctcgaggttaaacgttacatggtgggcgtattcattccctttaaccttccttggactagcttgtgctgaatatgctcaagaggtggaaagtggcatggcctcttggttaatgctggttatatgtatggtctccgtgctgtttttattgctttgatgatcatcactgtactcaaaattgagaggctgttccataaaaatgctccgattatgacttgaaaatgaaatgtcattcaactcaa

SEQ ID NO: 45297 - DNA, 257 bp, Glycine max
  Clone ID: 701041331H1
tttctctctccttctttctttgtttctgtgtgttcgagattgaagaagatgatgcaggctggacccggcggcatggcccaacaagcgaaccaacaatacgcacagcaacagcaacaaccctacatgatgatgccgccgcagcctcagccctcagatgtgggccacatcggcccagcctccgtcccagtcggtggctcctccgcaacccaccagcgccgatgaggtccgtaccctctggatcggtgatttgcagtact

SEQ ID NO: 45298 - DNA, 261 bp, Glycine max
  Clone ID: 701041332H1
gaaaatcgagaattttccgagaaaatccgaagacggcgggccatggtttccccggaaaacagcaattggctgttcgattacccgctgatcgacgacgttattcccgtcggcgacgcctccttttccgtctccgcctccgcacttctcctggcccacctcccgccaatgtcagtgttgaaattgatgcttcgcttggggattctgatggccccaaagatactgctttgaagaaaagggctagatgtgattcaagtactgctt

SEQ ID NO: 45299 - DNA, 252 bp, Glycine max
  Clone ID: 701041333H1
tccatgcattgcatgttttgagcaaagtgggccatattatgaccccaaagattctagctcttttaggaatataagctgtcatgatccccggtgccaattggtttcagcccccgatccacctaagccttgcaaggctgagaatcagattgtccatacttttattggtatggtgatggttccaacacaactggggattttgcattggaaactttcactgttaatctcaccactcctaatgggacttccgagttg

SEQ ID NO: 45300 - DNA, 251 bp, Glycine max
  Clone ID: 701041334H1
catcttcctcttcttcttcagtaaattattgtacctgacgatcttctcggtttgatcttatatcaatggaatttttttagacagaactcggattcacagggaaatctgattgcataggaacaaaaaagacaacacctttttatcttacacaagtgattatgtcggttgctgagaatgttggggccaaaatcggttcttccagtcaaaatttggaaaacaatgtagtgtcatcgaactcaggcgaggttgag

SEQ ID NO: 45301 - DNA, 251 bp, Glycine max
  Clone ID: 701041335H1
ttctgctttcactctctgactcaatcgttctaatccacaaaacatgaccttttattacaacattgccctcgccttctctgcggtgctcaccctgctcctctttcccctactgaccgtaggggagctcgtggaggagcagccactatcctcaagtaccacaacggccagctcctgaagggccgcatcaccgtcaatctcatctggtacggcaccttcaccccgatccaacggtccataatcgtggacttcat

SEQ ID NO: 45302 - DNA, 248 bp, Glycine max
  Clone ID: 701041336H1
atcccaattaagtaataacaccatgcaatcatgcaaaatctccttattgtattacccctataacaactatgtattcaaaataaggggttttaagtgtatgctaaggaaataattaataaaatatttgaataaaattcagaaaagattgcccaaaaaaaaaaaaaaaaaaaaaaaaaaaaagggggggcccccgaaatcatggaccttgtaacccggggaattattccggaccgggaatttggggggta

SEQ ID NO: 45303 - DNA, 249 bp, Glycine max
  Clone ID: 701041337H1
cagatcatgagacctggaatgttcagttgtttagatccattgatggtggggctgcttttgggttcccggagactcctgcagatgctgccagagctggtcttattagtgggaaggataatatcattgatcgtagcattcaagatcttatattaatgctattcgacgtgcaaagaacttcatctatattgaaaatcagtatttccttggaagctcttttgcctggagtgctgatgatattaagcctgaaga

SEQ ID NO: 45304 - DNA, 249 bp, Glycine max
  Clone ID: 701041338H1
cttctccttttgattccatcatcttcgatttggacgacaccttgtacccgtcaagcaccggtattgacaagtgcgtcaagaaaaacatccaactctttctcatccagaaatgcggattctcagaatccgaagccttcaccctccggttgatctcttcaaaacctacggaagcacccttgccggtttaagagcactaggccatgatatcaccgcagaggagtaccatggtttcgtgcacggaaggctacc

SEQ ID NO: 45305 - DNA, 245 bp, Glycine max
  Clone ID: 701041340H1
tttctaccaaatccgtgctgcgagggtgtgctcatgtgcgctctggataattggtgagtattgcctgtcactttcggaggttgagagtggcattgcaaccattaagcagtgtcttggtgacctcccgttttatactgttactaggaaggagacggtcaggaggcatcgaaacccatacagcaggtgaactcaaccactgtgtcttctaggaggcctgctattcttgcagatgggacctatgccac

SEQ ID NO: 45306 - DNA, 246 bp, Glycine max
  Clone ID: 701041342H1
atgggatagaggaactgtggagggaagtgagggatttgagtttgggaaacggcggaagagtagagagactagagtctccaccaaccccagttcagctcctgagagacttcatcacaccaaacaagccatgcataatctccacgccattacgcactggcccgcactctcttcctggaccaacccttcccacctctcccaatccctctccggcgccaccgtctccgtccacctcacccccaccggcgc

SEQ ID NO: 45307 - DNA, 249 bp, Glycine max
  Clone ID: 701041345H1
atttcttataacaactctcatattaagccactgttgaatgaaaaccttgggaatatgagaaggccttgcaaacattctaagaagaaacatgatctctttgaatgtctccctgacgatctccttgtccttattctttctaagctcgctccaccgcttcttctccttctgatttcatcaacatcatcttaacatgcaagaggttaaaccggttaggcctgcaccgtcttgtgttatccatagctgcctcta

SEQ ID NO: 45308 - DNA, 252 bp, Glycine max
  Clone ID: 701041346H1
caaagcgaaaccctaaccctaacggagagatggcggacacttggcatcgatattcgggacggagaaggacagggtgaactgtccgttctacttcaagatcggcgcgtgcaggcacggcgaccggtgctcccggcttcacacgaagccacaattagcccaacgttggttctgtcgaacatgtaccagaggcccgacatgaacatgaacatcatcaccaaccccgatcagccccagccccaatctctcgacccc

SEQ ID NO: 45309 - DNA, 110 bp, Glycine max
  Clone ID: 701041347H1
ggctgccaagcttcccctgaccattagccagcatgctagaaaacaactgtttagacaaggaagcccctggcaagacaacaagatgagcatcatctcctccttccacaaaa

SEQ ID NO: 45310 - DNA, 256 bp, Glycine max
  Clone ID: 701041348H1
aagaaatagagggttttggtgtttggtgtttgaatcgtgaaaatgttcagaaaccagtatgacacggacgtgacgacatggagcccggcggggaggctgttccaggtggagtacgcgatggaggcggtgaagcagggctcggctgcgatgggctccgatccaagacccacgtggtcctcgcatgcgtcaacaaggctaactccgaactttcatcgcaccagaagaagatcttcaaggtcgacaaccacatcggcgt

SEQ ID NO: 45311 - DNA, 248 bp, Glycine max
  Clone ID: 701041350H1
gtggtgagataagtttcataagccaaccgcaggtgtgcagcacattttcatttactgcagattttggaacaattaagaaaaatgcaataactgacatgaagaaacataatttggaagatctgccttccaattttagacggcttaagccatagtggttgatggaaaacctgttagagcagcagtgactagataccatctgaagagactagggatacaggctaaagttgcaaatagcttcaataaggctg

SEQ ID NO: 45312 - DNA, 247 bp, Glycine max
  Clone ID: 701041351H1
atccctcttgatttgaaggttgttttgtgcttatagataaaagttctgccaaatcaagaggggttttcagatcatagtgtgtgtgtgtgtgttaaacaatggctaagttctttgctgctatgatcttggcactcattgccattccatgcttcaaacagtggttatggctgctaatgagcaaggaggccacttgtatgacaacaagagcaaatatggaagtgggagtgtcaagagataccaatgccca

SEQ ID NO: 45313 - DNA, 239 bp, Glycine max
  Clone ID: 701041356H1
ctcagctagggagaagaaagatggaagatccagaggttattattgggagcttgaatccaaatgataccaggggaaagaccgttacttgcaaagctgccgtggcatatggtcctggagagccctttgtggtggaacgtgttctgttcatcctcctcagaaaatggaggttcgaatcaagatcctcttcacttcaatctgccacaccgatctcagtgcttggcaaggcgagaatgaggctc

SEQ ID NO: 45314 - DNA, 243 bp, Glycine max
  Clone ID: 701041357H1
ctcaattggttcaattggtctctgatttcgccttcttcaacatccgaagaggaaggggagaaattcgcgacttcggcgacgtcgtttcgggcgataatggggtctccgttgatgcttgagcctctgcaattgtcgcctatcagactcgcgagtaaatgcaacccattaagagaagaagaagaatggaggcaacaacgctgatgctaaaattggcatcaaggagttggagtagagagagagaga

SEQ ID NO: 45315 - DNA, 244 bp, Glycine max
  Clone ID: 701041358H1
gcttcttctagatttaaggaagatgggtaaggaaaaggttcacatcagtattgtggtcattggccatgtcgactctgggaaatccactaccactggtcacctgatttacaagcttggaggcattgacaagcgtgttattggaggtttgagaaggaagctgctgagatgaacaagaggtctttcaagtatgcctgggtgctggacaaacttaaggctgagcgtgaaagaggaatcaccattgata

SEQ ID NO: 45316 - DNA, 246 bp, Glycine max
  Clone ID: 701041359H1
cctcgagccgaatcggctcgaggcctgcagttgttgttctcagtcacaagatcaccgtcgagagctttccccattcaatcaaaccacaaaaatggaggtgactgttttcactcctgcactggaaggaattaagcttgtaaaatcgagcaaggagaaattttgacccagcctttcttggatgcttgcaagcatatacttcctgttatagataagtttggagctgctatggcccttgttaaatctgac

SEQ ID NO: 45317 - DNA, 245 bp, Glycine max
  Clone ID: 701041360H1
taggggccctgatgatctggacactcgtcttctccgtgccatgataaccaagggtctgattgagcccatatctagtgtttttgtgaacttggttaatgctgatttcactgccaagcaaagagggatcaggataactgaggaaaggttattcttgatggttcacctgagaatccactggaattcgttcaggtgcagattgctaatgtggaatctcgatttgctagtgccatatcagattctgggga

SEQ ID NO: 45318 - DNA, 252 bp, Glycine max
  Clone ID: 701041362H1
attttctcactctctctttatcttcaccttttcagtttaaagcttcagatcacaaccgatccaccattcaccactttctcttcacaaggcaaatctaacaagaaaagtagtctctgaagtcgatccagtgccttgtgaatttggaatggtggtgaatttagatctaaaagccatagcaatgtcttttatcggtacccagcaaaagtgcaaggcttgtgagaaaacggtttatcccgttgatcagctttctgc

SEQ ID NO: 45319 - DNA, 251 bp, Glycine max
  Clone ID: 701041363H1
atttttgcataggagtgatccaaagagaatggcagataccttaaaaacgacagagaatgaagaatcatgcacaacttataatatgttgaaggtttcgcgccacctgtttaaatggaccatagaagtctcttatgcagactattacgacgtgccttgaccaatggtgtgctcagcattcaaagaggaaccgatcctggagtgatgatttatatgcttccactaggtcttggggtctccaaggctaaaactta

SEQ ID NO: 45320 - DNA, 246 bp, Glycine max
  Clone ID: 701041366H1
cttttctcttcaaataatctcattcttcagcttcttattactttgtatctctgtgtatatttgaagatgaagaatatgaatatgacactaaacaccattgcattgataattgccattgcattttctgtgtggtcttcaagctcacagcagcacgtgtcagccactggaggaaactgaaagctgctgcatctgctacttcttttaatgtgttagactatggtgctacaggtgatggacatgcagatg

SEQ ID NO: 45321 - DNA, 244 bp, Glycine max
  Clone ID: 701041368H1
cagctttcaatggaaaatataaggaaacttattactgaagctgatgggtatcagcctcatcttatagctccagaacaaggatatcgtcgtctaattgaatcttctctaataactattaggggccctgctgaggcagctgttgtgcggttcactcgctgttaaaggacttggttcacaaagctatcagtgagactttggacttgaagcagtatcctggtctccgggttgaggttggggctgctgc

SEQ ID NO: 45322 - DNA, 255 bp, Glycine max
  Clone ID: 701041330H1
ggcaattatcaccgctgaagaggtattgctgagagatccaacagatgaaaatgtgatccctgttgttgaggaactgcaaaggcggttgcctcaattgagtgccaccggtcttcaacagcaaggagatggtaaagagtatcttggtggcaaaatgatgctgaagccgctgaagaagatgagtcaccctttgaattccgggccctggaggttgctttagaagccatttgtagttttcttgctgcacgtacaacagaa

SEQ ID NO: 45323 - DNA, 233 bp, Glycine max
  Clone ID: 701041293H1
ctttgattcagtgttctgcaacttccctctccgctgtccccatcactacccgtttcaccacgacccacaagtctcgccttcgctgctccttagatgctaatgtttccgacatgagcgttaacgcgcaaaagggttgtctcctccggaacctgaacattatcgaggaccaaaactgaaagtggcaattattggagctggacttgcaggcattccaactgcagtggaactcttgg

SEQ ID NO: 45324 - DNA, 235 bp, Glycine max
  Clone ID: 701041294H1
gcccaaatgattgaaactggggaagatattgactggggatttgcagaggcgcttgcttatgctaccttgcttattgaaggtaaccatgttcgattaagtggtcaggatgttgaaagaggaacttttagtcaccgccatgctgtagttcacgatcagacaacaggagagaaatattgtcccctggacaatgttataatgaaccaagatgaagagatgtttaccgttagcaatagtt

SEQ ID NO: 45325 - DNA, 253 bp, Glycine max
  Clone ID: 701041302H1
gtgctagttgggctggcttcttcattttgcaatcattcactttgaagaagtacccggcagagctctcactgacagcttggatttgtgtgatgggtattattgagggttcaatcgcatcccttatatttgaacgagacttcagtgtatggccataggctgggactcaagacttcttgcttgtgtttactctggggtgatttgttctggaatggcatactatgtacaaggggttgtaaccagggaacgtggacca

SEQ ID NO: 45326 - DNA, 252 bp, Glycine max
  Clone ID: 701041303H1
cgtaatcaacatttcgcagtgtggaggatcgtcttcttcatcccacccacacagagttcacttcagttaggatatctattttttaatggctaatagaccggatccggatattgatgatgatttttgtgagctttataaggagtacactgccccctggggactgctactacaaacatgcaagagagggcaaaatcaaataagaggtctaatgcagggtctgacaaggaggaggaagcccgggaccctaatgct

SEQ ID NO: 45327 - DNA, 253 bp, Glycine max
  Clone ID: 701041304H1
cggctcgagctcgatcccaattccactagggattcaattccgatgcgattccgagcttgttagatccacgacaacgtttcgtttcccagattcttttgtaaaaaaaaataatcttcctttgcccaacaggtaagttggaaaaaaatggccatgacaagactgggtgccaagctcctcctgaaggtcctatattgtgcatcaacaactgtggattttttggaagtgcagctaccatgaatatgtgttctaaatg

SEQ ID NO: 45328 - DNA, 254 bp, Glycine max
  Clone ID: 701041305H1
gtggcatgcagatcttcgttaagaccctcaccggcaagactattaccctagaagtcgaaagctccgacaccatcgacaacgtcaaggctaagattcaggacaaggagggaatccccccagaccagcagaggctgatcttcgccgggaacagctcgaggacggacgcacccttgctgactacaacatccagaaggagtcaactctccacttggtgttgcgtcttcgtggtggtatgcagattttcgtgaagactc

SEQ ID NO: 45329 - DNA, 252 bp, Glycine max
  Clone ID: 701041306H1
cagacttctaacgctgatagggggatatcttctttcccacacgcatcaattgctaaaattggagtgcaggacaaaaacatggaaagaaattttggcaatggcaacttttatcaacatccacctgatttggatgagactgcttcctctgttctgaggacggccctggcattgagaattttcaagtttctggtgatgctattcctggagaaaagcttcttggatgtggatatccagtccgtggaacttctcttt

SEQ ID NO: 45330 - DNA, 250 bp, Glycine max
  Clone ID: 701041308H1
agcaaacataacttgcagtaatggcttcaatgaataaccaaaaagaaattgagctctttgagggccaatctcttctgtacatgcagctatatgggcacctaagacctatgtgtcttaagtgggctgttcaactaggtattccagactaatacagaaccatgccaaacccatttctctttctgacttggtctctactcttcaaattccaccagctaacgctgcttttgtgcagcggttcatgcgcttcttg

SEQ ID NO: 45331 - DNA, 249 bp, Glycine max
  Clone ID: 701041309H1
ctactaccagtctcccatttcttggttgttacacacaaaaaagcagactctgcagcactcaaacgaaacgacagtgaccaaaacagaaaaacgacattacccagagagcgacgatgccggaagaaacgacgtcgatcgactacgtgtggaggctgcatctgggccccacttctccggcctgagactcgacggccgggtcccgtcctccgccaccgccgcgtcctccactcccgattcaaccctaaccct

SEQ ID NO: 45332 - DNA, 250 bp, Glycine max
  Clone ID: 701041311H1
agagaattagggtcacgagggtttcatcctgcggcatcagacatgggaggaggcaatgggcaaaaggcaaagatggctcgcgagaagaacatcgagaagcagaaggccgcctcaaagggaagccagctggattcaaacaagaaagaatgtcgatccagtgcaaggtgtgcatgcaaacatttatgtgcaccacatcggaagtgaagtgtagggagcatgctgaagccaaacaccctaaatctgatgttta

SEQ ID NO: 45333 - DNA, 248 bp, Glycine max
  Clone ID: 701041313H1
cttgttctctgattggcctagccagtagtagccaatttgttggcgctggttgggaatggcgtcgaaaccgaaatcaaatggaaattccaaatgcaacaaaggattcgctgacagctatatgctgttgaatcctgaagacgctcattcttcgatcttgttcatgtgctgtattcccgtaacttgggaaaccgaaaatttgtggacagcaatgctgagggatcttatgagggaagcttccgccaaagatg

SEQ ID NO: 45334 - DNA, 254 bp, Glycine max
  Clone ID: 701041314H1
cactgaggcaatttggatcaaattttatcatctttagtttgggttttttgaagcagaagaatggacttctttactagagacataaatgaggattctatgcttagatgcccattcttgaggaacatcaatgagcctactaacttctcatctcttcacctttggctttaccaatgcctgttcgtggagctaaaggtccaatttttgaagatggtcccaattttgatttggcatttaggcttttccacgggagtgat

SEQ ID NO: 45335 - DNA, 258 bp, Glycine max
  Clone ID: 701041315H1
ctccaatggctcttgccgtttccactacttcttcctcttcagctgcagcagcagcagcagcgtcgagctctttcttctcgcgccttggatcttcatcggacgctaaagctccgcaaattcgttcctttcggtttccggagaggcctcaagttcgtctggtgttgttaatttaactcaaagacgctcctcggtgaggccactcaatgccgaaccgcaacggaatgattctgttgttcctcttgcagcaactatcgttgc

SEQ ID NO: 45336 - DNA, 254 bp, Glycine max
  Clone ID: 701041317H1
ggcgaaaccaggccttctcctccaggatttcgagaagcctcacacccttccttaacaacccctttctttctttcaattaggacatcatatatattatacaaaattaaataaataaacactagtcagtagtagtgactagtgcccaagtgaagtggtgtcaggtgtggttgcttagctttccctgtgtatacttatttagtcctcagcttcactccatctgcagggttgcttggttggttggtgatgcatgcatg

SEQ ID NO: 45337 - DNA, 253 bp, Glycine max
  Clone ID: 701041318H1
ggagatagccagcctagtcaagtgcctcatggaaggtgaacaagggaagaagcttcgttaccgaatcaaggatatcaaggaggctgcggctaaggctctcgctcaacatggttcctccaccaccaacatctccaatttggctctcaatggacccacaaattcaactagtagcttcttcctttcaattatctgcacttaacttatcaaatgtcactttgcatacatgacattaataaaataattgggtaagtgt

SEQ ID NO: 45338 - DNA, 252 bp, Glycine max
  Clone ID: 701041319H1
tttcaaaaccctctctctcgttactcgccatcactagcgagtgctccttcttcctcttcgcgaaattcgtatgcgaagaaggaggtagggattcgcgctcctgctttctcagactgcctaattatcttttattctgcgaagtaactggagattgaagatgggaggagatgattctggtttggagagtgacaattttgattggaacactgaagatgagcttgaaattcagaactataactcgtcgtcttcatg

SEQ ID NO: 45339 - DNA, 249 bp, Glycine max
  Clone ID: 701041320H1
gaatacattaattatatgagtactcattcatacgtagcatatctgggatttcaaatctcaacaagttgttgctactgacatagctttctgtctcatcctcagtgctgctgctccccttgacaaacgtcgagttcgaattcaacggttgggacttgaagaaggcgttgaaagaactgaagcgtactgaagttctggttgctgttattataggaattgttataagttgaggattcagacattggagggtaa

SEQ ID NO: 45340 - DNA, 250 bp, Glycine max
  Clone ID: 701041321H1
cgaacggctacttggtagttggagtggtagcttttgctctactttgctcattcagagtttctttgacagattcagttccactattttcgcctgttcatgacgctgcttctttgactcgcaactctttccctgctggcttcatcttggggctggatcctcagcctaccagttcgaaggagcagcaaaggaaggtggaagaggaccaagcatatgggataccttcacacataaccatccagaaaagataaga

SEQ ID NO: 45341 - DNA, 250 bp, Glycine max
  Clone ID: 701041322H1
atgaaatgacatgagttagcaccaacgctgttttcttctttctttccttcgaatttgttctctgtttctcgcgattgaatttgagggaaccatcctcgattttctctttctgggcacccctgaattgctctgaaagtggttcagtcgaacaacgaaaacgatgtcggctcgattgatgaagaaggttctgaacgaacagcatcaccttccgcaacacgtgagcggagaagaagaagaagaagaagaagag

SEQ ID NO: 45342 - DNA, 246 bp, Glycine max
  Clone ID: 701041323H1
ggcattacagaagtctgccttagtgggtttattgcttttgatgttcctcctccaaagggtccattgtggattcttggcgatgttttcatgagggcatatcacaccgtctttgactatggaaatctccaagttggctttgccgaacagtctaattacgctttctggaggattttctttgtaaatttgttaagcgtgttgtaaataagctgttataattgtagctctggttactttttgaaaccacga

SEQ ID NO: 45343 - DNA, 258 bp, Glycine max
  Clone ID: 701041325H1
gtaatttgggaattattgctcccatcgccattggtttcattgtcggcgctaacattttgttgggtggggccttctctggagcggccatgaaccccgctgtgacatttgggcctgctgtcgtgagctggacctggaccaaccactggatctactggccgggcctctcatcggtggtggaatcgctggccttgtttacgaggttgtctttatcagccacacccacgagcagcttcccaccactgactactagaggggggg

SEQ ID NO: 45344 - DNA, 246 bp, Glycine max
  Clone ID: 701041326H1
gtaactttcttgttttttcactcaagtttggagtatggttagcttcctctagtcatgttatgttagctgaagtcgtccactctgttgccgattttgctaaccaggcactacttgcttatggtttatctagctcgaggcgtgcgcagatgctattcatccttatggctattccaaggaaagatttgtttggtccttgatatctgctgttgggatattttgtcttggttctggtgccaccgttgttaa

SEQ ID NO: 45345 - DNA, 247 bp, Glycine max
  Clone ID: 701041327H1
gtggatttcccagtggaaaatacctctttgctggagtggttgatggaaggaacatctgggccaatgaccttgctgcttctctcactacattgcagggtcttgagggcattgtgggcaaagataagcttgttgtgtccacctcccctcccttcttcacactgctgttgatcttgttaacgagaccaagttggatgacgagatcaagtcatggctagcatttgctgcacaaaaaattgttgaagttaac

SEQ ID NO: 45346 - DNA, 249 bp, Glycine max
  Clone ID: 701041328H1
gcaaaacaaaagacgcagtgatggagaggatgaagagggtgcttctgctgcttctggccttcactgttcttctcatgttgccagaagcttctgctacaaagtttactgttggaaacaaccagttttggaaccccaatattaactaactgagtgggctaaaggcaaacatttctaccttggtgactggctctattttgtgtacgataggaaccaagcgagcgtgttggaagtgaacaagacagattatga

SEQ ID NO: 45347 - DNA, 234 bp, Glycine max
  Clone ID: 701041329H1
gtcattaagctctgaaagaggcaatttatctgattggggaagcaccctggataattctgtaacacccatgtctctgaagtcccctgttcgtgagcatttggttacaagtcagatgactccatctttagatctattcatgtcaagtattgctctgcagtggtgaagaatctgattgaatcaccagagattgcagaatcttcaataccttcagttttcccaacacctatgtcagat

SEQ ID NO: 45348 - DNA, 213 bp, Glycine max
  Clone ID: 701041292H1
ggctcgaggtctcattgctgctaggaggactacgtctcttagaggacacctgctgcaactgctgccaacgctgataaggcttaaagagaacgttgttagggttattatattgattgcaagtttttcagttttgtttttcttttttctgatagtttgtttgttaaactatttgggcacttcttcagaaccattttcttcccaacatatggagtt

SEQ ID NO: 45349 - DNA, 238 bp, Glycine max
  Clone ID: 701041265H1
gattgtcctaatatggacattggtaacttcaccattgcttgtgttgggtggtattgctggtaaaaatagcaaaactgagttccaagcacctgtccgcactacaaaatatccccgagagattccacctctgcttggtacaggagtaccattccccagatggcaatggcaggatttcttccttttagtgccatctacatagagctgtactacatttttgccagtgtatggggccacagaa

SEQ ID NO: 45350 - DNA, 239 bp, Glycine max
  Clone ID: 701041266H1
gttcaactctaatttagcacacatacatatacaccatgttgtgaaaattgagaccttgcttgggattggaaggtagatgaaagattgtaagttggaaaatcgtaacatggattgtatgatctttcaaaatatgcaaaagttgtacatgtaattaagatgacataggtaaggaaaatatcctctaattcatcaacatccaactaatcttaaataaaaattcgtattcataagtttattac

SEQ ID NO: 45351 - DNA, 235 bp, Glycine max
  Clone ID: 701041267H1
gaacgatacagagcagttacgagtgcatattacaggggtgctgtgggggcaatgttggcttatgacatcactaaacgccaaacctttgatcacataccacgttggttagaagaactgcgcaaccacgctacaagaacatagtcatcattcttacaggcaacaaatgtgatcttgagaaccagcgtgacgtacccactgaggatgcaaaagaatttgctgagaaagaagggttgtt

SEQ ID NO: 45352 - DNA, 239 bp, Glycine max
  Clone ID: 701041268H1
cattatttcaccatcatgtcgaatcaacccattgacccctatcaatacctccaaatcttccgcaaccccgacggcaccttcactcgcctaaacgacgccgttccatgcaccccaccctcttccgaccccatctctccgttctcaccaaagacataaccatcaaccaacaaaacaacacctggctccgtctattcctaccccgaacagcactatcctcaaattccaatcccaagaagcta

SEQ ID NO: 45353 - DNA, 237 bp, Glycine max
  Clone ID: 701041269H1
aagccagcgagtgagtgagcgagccaggtagggttttcggtgttcccctctttgtgttcgttcgcgacgatggggtccatccccgatccaggcgagttgagcgagttgactcagccgagcttcgacgagtccagcgccaaacctctctcatgaccagctgcaccctcctctggaaggagctctccgaccacttctcctccctcgagcaagacctcaaccacaaatccgaagccctca

SEQ ID NO: 45354 - DNA, 235 bp, Glycine max
  Clone ID: 701041270H1
cgtcaaactgttgctgtgggagtcatcaagaacgtggagaagaaggatcctactggagccaaggtcaccaaggctgcccagaagaagaagtgaatcgtgcggtttggttcatcaggggatgtcgtttctatggttacaataaatgttggttccttgcccttgtgtcttcgttcctaggtagcttgtttttcggacatagtttgaagtctccaccatcatctcgcaacttttgttc

SEQ ID NO: 45355 - DNA, 238 bp, Glycine max
  Clone ID: 701041271H1
cgaatcgtgatttagtagtgaaacgcacacactcgcacgtccacttccatattctcaattctctcttctccaaaaatctcataccataagtttctactacttacctttagtagctgcttttgcttacaacacctacgctctctctctctctctctctctctctcttcaggttgggaattagtgcctttggtggtcaccatgttccttcttagaaggcaaacccagaatcaccatgaga

SEQ ID NO: 45356 - DNA, 238 bp, Glycine max
  Clone ID: 701041272H1
gataacctctgtcaacacctgtctgtggcgcgcgagagagaaatcggagatgtcatcaaaccctaacgatcctcgtcagccctcggcggcgagaccctacgtggcgccgcagatttcgccgcaggaccttcgatcgactacgccggcttcatcgccgtcatatttggcgtcgccggcgtcatgttcaggtacaaactgagctcttggctggcgctcatattctgcgcgcaatccgtcg

SEQ ID NO: 45357 - DNA, 237 bp, Glycine max
  Clone ID: 701041273H1
gagaagtttcattagtgcttgatcgtatttaagatattaatctttcgcttacattaccaagcgatttaagttagttttcccaagtaatttttagtttcagttaaatgtaaatatttataatttcatatggaaaaaatgatttcaattgaatatgtgaaactgtgattaggataatttgttttgaactatgaactaaaattaatatatatttttttctgataaaataataaaggggtg

SEQ ID NO: 45358 - DNA, 234 bp, Glycine max
  Clone ID: 701041274H1
caaagacatacagaacagaacctgagaaacagaccctctcaaaccggaaagcgcaaatgaagcccattccatgcctaagcattcgcatacttctgctaatcgctatctgtctcttcacctcttcctccgttccaagatcggagaaacttgcgggtcagacaacaaatgcgacgctggactcagctgccaaacatgtcctgccaatgggaatacccgaaccagatgttcgcggat

SEQ ID NO: 45359 - DNA, 233 bp, Glycine max
  Clone ID: 701041275H1
gaaagcttcttgtatacttctgagattcttaggatggctcctaggacttctttgtttcaattggaggcagaaagccaacattattgtgaagatcattgggatgctcttaaaaatcagcataatgaagtgattatctggatttattgaagtattgtttctcttctgcatatatgctagcattactgcatgatgttcttgggattgctatggaagagaaaagccaacattattgt

SEQ ID NO: 45360 - DNA, 236 bp, Glycine max
  Clone ID: 701041276H1
gccgcggacccattacgacgaagcggcgtcgttttatcccacacagccgcgcacgcttcgaacggaacagagactctccgacctttcctcccaattttcccgagaaaatttcgcttcgagaaaatctagtcaatctctccgcaacactcatatatccacgacacctcacacttatggatcggaggagaaacgcgagtccggtgtacgcccggcagtggagcggcggttccagcagc

SEQ ID NO: 45361 - DNA, 247 bp, Glycine max
  Clone ID: 701041277H1
ctcgccgactcggctgctatcagcgagtgagagtgagtgagtggttctcttgcagcaacaaggtttagtgacaccaaacagactggaaatgggtcgtggggtcagtgctggtggtggacagagttccttggattatctcttggcagtggggtacctgccagcagtgcaaatggtgctcgcactcaaaatgcaagtgctccttcaccaccggttgataagcaaagtccagcaccagcagcagcagcag

SEQ ID NO: 45362 - DNA, 232 bp, Glycine max
  Clone ID: 701041278H1
gcagcagcatgcaatattggtgtggggactatggactgcaaaaagttcattgctatatcctgatggtggtgtggaaactttggccagagattattccctactattgtttagcaagagtttgaaagttcagttttctgatgtgagtactcgaggaggtgaacttgttaatcgtgtgagaaactgcctgaagatatttggcgtggagagaaatgatcttgataaatctactgga

SEQ ID NO: 45363 - DNA, 236 bp, Glycine max
  Clone ID: 701041279H1
ctcctctctctctctgtctctctgtctcctccatggccatctccttcagtcccaaacaccctccttacgatgagatgatatacacagcaatcggagctctgaaggagagggatggttcgagcaagcgagcataggaaagtacatagaacaagtctacaaggaccttccacccactcaccctgctttgttgactcaccatctcaaccgattgacctcctctgccctcctcgtcctcg

SEQ ID NO: 45364 - DNA, 239 bp, Glycine max
  Clone ID: 701041281H1
catctctccatggcacacagcgcatccttcaacaataacagcctctcttcacaacgcagcctcgcttcagtcccttccctcaactcacactctcacctcttcattccttccactacctctcactcgtgcccaccactctcaaaccccacacttcctcctccgtatacatctcctgccttaccctcgccggcaacttgctctacactggctcctccgacagagacatcagatcctggaac

SEQ ID NO: 45365 - DNA, 234 bp, Glycine max
  Clone ID: 701041282H1
cctttacaaagctctagttacagatgccgacaacgtcatcccaaaggctgttgatgccttcaggagtgttgaaaaccttgaggggaacggtggccctggaaccatcaagaagatcactttcgttgaggtggagaaagcaagtttgtgttgcacaaaatagaatcagttgatgaggcaaacttgggatacagctatagcgtagttggtggagttgggttgccagacacagtggag

SEQ ID NO: 45366 - DNA, 233 bp, Glycine max
  Clone ID: 701041283H1
ttcacacttgccacgcaacaacgtaacgttgctaattgcttgcacttcccatggtcgcttcttttgtttcacattagctgtttttgtttttgtcttagttttacacctttcctcatttccgcagtagaacctgcgaatcaactctctgagaaaaaaaatggcgtcgaacgggaatggcagcgttgcgaacggtaacgggagcgctaggaacggacttgcgaagattcagacgc

SEQ ID NO: 45367 - DNA, 236 bp, Glycine max
  Clone ID: 701041284H1
ctttctgacgctcccctcacctctctctccgaaatccccaaactgcctgtgaatgctagaaaccctaggcacgttcgatttgatgctctcccatttgcaatcaagggcgagcgcattcggttcttgcagcaaggctggtactaccgctgcatcggcctcgatccctgaattcatcattctttctcgcaccatctttttctattccgattcgatttgttgttgttgttgttgttgtt

SEQ ID NO: 45368 - DNA, 236 bp, Glycine max
  Clone ID: 701041285H1
gatcggtgttcacttgatctcatcataatcgtcagcgtcaattgaagaagatgccgatcagaaacatcgccgtcggaaggcctgaagaggcgactcaccccgacacgttgaaggcggctttggctgagtcatctcaaccttcatcttcgtgttcgccggctcaggctccggcatcgcctacaacaagctcaccgacaacggcgctgccacccctgccggcctcatctccgcctcca

SEQ ID NO: 45369 - DNA, 233 bp, Glycine max
  Clone ID: 701041286H1
gaaccaacaagaggggtattgagattgagattcaagtaatggggaagagcaaggttcttgtggtggggggaactgggtacatagggaggaggatagtgagggcaagcctggcactgggccatgagactatgtggttcagaggccagagttgagcctccagatagagaagctgcagaggctcctctccttcaagaagcaaggtgctcatctcattgaggcctctttcaatgatc

SEQ ID NO: 45370 - DNA, 233 bp, Glycine max
  Clone ID: 701041287H1
cttaaataactgttatggtgctgcaataacgtcatgcgtggcgtttttggaccccctctgccattcaccatctggtatttgccatcacatggagctgtccaccatggagcctgccgtggtgccgcagacccatcttaataagtggcaagaatgggtatgatttcaaatctgtgaggagatggaccagccaaaagaaattgggatatggcctacatgaatgtgataaaatattt

SEQ ID NO: 45371 - DNA, 237 bp, Glycine max
  Clone ID: 701041288H1
ctccacagaagatgggagacccctctgtcgaggttactgaagagaatcgtgatgcatcgcagatggccaaaattaaagccatggatgctatttctgaaggtaagttggaggaggcgattgagaacttacagaagctatttcactcaatcctacctctgccataatgtatggaactagagccagtgtttacatcaaaatgaagaaacccaatgctgcgatccgtgatgcaaatgctgc

SEQ ID NO: 45372 - DNA, 236 bp, Glycine max
  Clone ID: 701041289H1
cctcgagccgaatcggctcgagtattgcacagagagaaataatacacctatagcagagttagaacctgagcagctatcagaaatctccacaacacagctgagaagttcattttcaaaatggccggtgggtggttcctgtggatgcatcaccgattggaaatggcttcgttggcaagataacgctctcagttatcatcacttgcatcgttgctgcatccagtggactccttttcgga

SEQ ID NO: 45373 - DNA, 231 bp, Glycine max
  Clone ID: 701041290H1
agttgttgaagtgcccaatgtcagctgggaagatattggtggtcttgaaaatgttaagagggaactccaagagactgttcaatatccagtggaacaccctgaaaaatttgagaagtttggaatgtaccttcgaagggagtcctcttttatggacctcctggttgtggtaaaacgcttttggctaaagctattgccaatgaatgtcaagcaaacttcattagtgtcaaaggt

SEQ ID NO: 45374 - DNA, 231 bp, Glycine max
  Clone ID: 701041291H1
aatagatgatgctgaggtacagccagtgctaattaatcaggtcatgtcagaaggagcatatatcctattctacatgaggtcctgtccccgtcctccggtagaacatactatgaatgccatgcagcaactgtttatgattcttcaaagcacaatccaatggaaatgcagaaacctaataaaccaggacatagtaggcatggcagtcgtcagttttttgtcccagagccatca

SEQ ID NO: 45375 - DNA, 236 bp, Glycine max
  Clone ID: 701041264H1
caccttcacccttaacttctccaaaggttctagccaagtcattgctcaatactaccaactaattcgccttggttttgagggatatagaaacgtgatggaaaactgcagagacaacatgttggtgctgaaagaggactagagaaaacagggagattttcaattgtgtccaaagacaatggagtgcctttggtggcattcacactgaaagaccacacccactttgatgaattccaaat

SEQ ID NO: 45376 - DNA, 239 bp, Glycine max
  Clone ID: 701041235H1
acaaggtggtatcgggcatggacaaatttcatattggtatgggcagtgtattcatccttcttcaccccaatggagtttgggtttttccgtggcttgcctgagaatctctttatactggacatcattggacaaatgcttttcttgtagatattgtcttgcaattctttgttgcttatagagacagtcagacctatcgtatggtctacaagagaacccctattgctctgcggtatctgaaa

SEQ ID NO: 45377 - DNA, 240 bp, Glycine max
  Clone ID: 701041236H1
caaggatgcaaaacagtgttaacttaactgaagttgatcttatgcaaccccctcttgggtaccctgtctcatccatcaagcttcatgcacatgaagctaagtttcttgcttctaagaggaattgggagtttggtgtggtgttctcttttatgaccgtctttacggcggtttaagcctatctgatgcaattggattcaaaggttgcagggaaattgaagggccttatgacgattaccttga

SEQ ID NO: 45378 - DNA, 236 bp, Glycine max
  Clone ID: 701041237H1
gtgatcactgatcctcaccttttaccacacctacttccaaacccacatgagggatatgaccatggctgccattactgatcaatggatgcagttctatcaacaacctctaatggatagccatggccatgatatcatgctttggcaccaatttccacagaattaggcttctctgatgcaaccgtgactacgacaactagttctcccacccccaccatgccatcatcagagagcaatag

SEQ ID NO: 45379 - DNA, 241 bp, Glycine max
  Clone ID: 701041238H1
gtcttatgattttctttgtcgtaaatcgattcttcagcaattattatcatggaaggaaattcgggttcggatcctgcgcgtcctcttctggctaatcgtgacaataactccgccgagaacggtggtcagagaaccggctcagtcgccggatatcggttagctcgccaagaccctttttaaggtcaaagtttcccgacaaggtccgttctggccttgactccgagtctcccttcgacgttga

SEQ ID NO: 45380 - DNA, 241 bp, Glycine max
  Clone ID: 701041239H1
caaacattgcaattggtctgacagatgtgagacagcctcaacccgatgatattaacaagctgttccaattgattgctgaggaagagctccgaagaagacagccacgccaataccgagatatgacagaggagtctaaaaggatcttttgttcaagatttttgatgttgataagcaaagatacatttatgcccacgttgcagctttcgaaaaaagtgaaactgaaaagatgcagaatgctcaa

SEQ ID NO: 45381 - DNA, 240 bp, Glycine max
  Clone ID: 701041240H1
gacatagtgtttgtctctgtcaacaccccgacaaaaactcgcggtcttggagccggtaaggccgcggatttaacgtactgggagagtgcagcacgcatgattgctgatgtatccaagagtgacaagattgtggtgagaaatccactgtccctgtgaaaactgctgaggccatagagaaaattttgactcacaatggcaagggaatcaagttccaaatcctttcaaaccctgaattccttg

SEQ ID NO: 45382 - DNA, 239 bp, Glycine max
  Clone ID: 701041242H1
gttttattctcttaaatcacagaatctctagtttttgttcaaatttgactttaactttctaaagggtgtttctgtgtgtgtttgtttgttttcatcttccttcatgataattgtttgtgagaaatgggaattcgttttcagcatgtgtgtttagttggcaagaaaacatgagaaaagcaattttgatttttgaattttccgttttagtaatgttaaagggtagtcaatagtcatcactt

SEQ ID NO: 45383 - DNA, 236 bp, Glycine max
  Clone ID: 701041244H1
agacaaagcaacagttttattcagtgtgactcacttcacccagtgaaggccaaaggtgtttgattgtagagtttgtaaagtttgatttgctgatcccattagatggtgtgttgtaattttgtttgtatcatctttgtatatttgctttttggttaacctattgacttcacaaagtttggaaataatgtacactcggctatctgtggtttcggagtgaagaactgagcagaaatatg

SEQ ID NO: 45384 - DNA, 237 bp, Glycine max
  Clone ID: 701041245H1
ctcgagccgcgcgatgttttgttcctctttggttcttcgtccccttcccaatcttcaactacagggttcctttaatctcgttattcctcttcactcccaaactccgttcactccaacaacactctgatttagaatggatggaccagctggtcgaggtggtgctggactggacatgtttctgccaaattataaattgggaaaaacacttgggattggatcttttggcaaggtcaaaat

SEQ ID NO: 45385 - DNA, 237 bp, Glycine max
  Clone ID: 701041246H1
ctttttctccacgtctaaggggtgccctgagatcactttgagcaatggtgaaggctgtggcagttcttggcagcagcgagggtgtcactggaactattttcttcactcaggagggaaatggtccaaccaccgaactggatctcttgctggtcttaagcctggtctccatggcttccatgtccatgccttgggggacactaccaatggttgcctgtcaactggagcgcatttcaatcc

SEQ ID NO: 45386 - DNA, 240 bp, Glycine max
  Clone ID: 701041247H1
gcaatacaccaactaaaaccttctttttcaactttcttctttttggtttgtctttcttcttcttctccttcttccaatccttaaggaaaaaagaaactaaagaaaaaaagtgagccatgtcaggcttgtataacccaacttctctcctgctagagctgcttctcctcagattaggagcaatccagaagtggacagccagtacctaccagagttgctggcagaacatcagaagcttggacc

SEQ ID NO: 45387 - DNA, 241 bp, Glycine max
  Clone ID: 701041248H1
caagaacaccgccgcgtctgccacggtatcctcctcacctacggcgttgacctcgtcctcaacgacgtcaagaagttcctttccgacacgcagtccgaaatcataatcctggagattagaaccgagttcggccagaggaccctcccgaattcgacaagtacctggaggaacagctgggggagcatctgatccatcaggacgacgccgttttcgggaagaccgtggcggagttgttgccaaa

SEQ ID NO: 45388 - DNA, 242 bp, Glycine max
  Clone ID: 701041249H1
ctctgaacggaaaagcaccgtcgcaccttccctgaggcttctcttgtctgtcgcgagtgaccatggtgagggttagtgtgctgaacgatgctctgaagagcatgtacaatgctgagaaaaggggaaagcgccagtcatgattcggccatcctccaaagtcattatcaaattccttttggtgatgcagaagcacggatacattggagagtttgagtatgttgatgaccacagggctggtaaaa

SEQ ID NO: 45389 - DNA, 239 bp, Glycine max
  Clone ID: 701041250H1
ctctttttttctaccttacattccttctccaacaatggctctcgacgtttccactacttcttcctcttcagcagctgctgcagcttctagctccttcttctctcgtctcggatcttcctccgacgcaaaagctctcaaatcggttcgtttcggtttccggagaggtcgcttgtttcgtctgttgttgtcaatgtaactcaacgacgctccttggtgaggccactcaacgccgaaccgca

SEQ ID NO: 45390 - DNA, 240 bp, Glycine max
  Clone ID: 701041251H1
gcagcttcctggtagccgactgaaggctgctctgagtgccagggctctggagatggagatggaactgctcggtctagaaagccctgcccgccaccaccaccaccaacaacaacaacaacaacaactgattgagagattgctaggatctcttccccttctttccggagcaaggaattcaataggattggtgatttgaatcctactaaccttgatgacctgttattagcatctgccgaccct

SEQ ID NO: 45391 - DNA, 239 bp, Glycine max
  unsure (1)..(239): unsure at all n locations
  Clone ID: 701041252H1
cgacagtcagtttctgcctcttattttttccacactctctttctcttactngtcttcttttcctcactttctctctctactttttttttctctttatttctagtcttctctgtctatcacagatcttgaactttctggcaagaactcagagcacttacttcttgcagcatcaaaatgggcttctctctgttaccaaaagcaactccttgcattttgttcttggctctgctgttttgtac

SEQ ID NO: 45392 - DNA, 242 bp, Glycine max
  Clone ID: 701041253H1
cgagggtagggctcagctcagccatattctatctctacgccgctaactctctctcactctcgcgctctctctttcacaaccttcactttactctctctgacagctaaaatgcaaggaggatttcaatcattttagtcacacgggaatgtcattagaaatgctgttctacaacgggtgcgcatggtgaaccccctgttacagccaattgtctcttcgcggtttgaatctgttacacctgctcg

SEQ ID NO: 45393 - DNA, 228 bp, Glycine max
  Clone ID: 701041254H1
cagtcattgcacttaagtgcccatccattgaagtcgctgttgttgatatctctaaatcccgcattgcagcctggaacagcgaccagcttcctatctatgaacctggccttgatggtgttgtgaagcaatgcgtggcaagaacctcttcttcagcactgatgttgaaaagcatgtctttgaggctgacatagtgtttgtctctgtcaacacccaaaccaaaactcaggg

SEQ ID NO: 45394 - DNA, 239 bp, Glycine max
  Clone ID: 701041255H1
gatggagggtggtgttgtgattgggatgattcgctcatgagttgtttttgtgagtttcattgcaaagctacttttctctgtttggggataaataaaatgggttgcttttcatgtttcgattcgagttccaagaggatcacaatctccgtcctcagcaccaacccaatcaacctctcccttctcagatttccagattgccctctggagcagacaagttacggtccagaagtaatggaggt

SEQ ID NO: 45395 - DNA, 240 bp, Glycine max
  Clone ID: 701041256H1
cctagaccttgtgttattggtgttcatttttccattctcaaaccaaggacaaatcctagagtttctcctttggttgaaagagagggacctgtgagtgtcacaaacatgggagaggagaatgttaaacaaccgtgttggagaggaagtactacaaggactgcccaggttgtaaagtggatcaagccaaagagttgagtgagggaaagggtgtacctgttaaaaatctttttatcatgtgga

SEQ ID NO: 45396 - DNA, 237 bp, Glycine max
  Clone ID: 701041257H1
aattactattttggacaattgtcatcaaactgaagacgttggaaagccaaccttggcaaatttcaacccgaaatcgtcgatttcttctaaaatatatacagggcattggtctcctttttgaattgtggttgaggattaaagtactgttattggtagagatggcatgtaggggatgctgggaatgccttttgaagctttttaacttcatattgaccctcactggtcttgccattgtgg

SEQ ID NO: 45397 - DNA, 236 bp, Glycine max
  Clone ID: 701041258H1
aaaagatccagtttgctgatgttggttgtggttttggagggctgctcataagtctttccactctgttcccagaaacattgatgattggaatggaacttagagacaaagtgactgagtacgtcaaggagcgatttcatctttaagggtagcaaatcctggtcaataccaaaatgtttctgtggtgcgaactaactccatgaagtatattcctaattactttgagaaaggaacgctct

SEQ ID NO: 45398 - DNA, 240 bp, Glycine max
  Clone ID: 701041259H1
gagagaaagaaacagaatttggaagaaaaaaagcacaagatgggttattggaagtctaaggttcttcccaagatcaagaaggtttttgagaagaatagcaccaagaaagctgctgctgctgaggccaccaagcctttgatgagtcaaaggaggaatacaacaaagccttcgaagaaaagaagactgaacttcaaactaaagtagttgaaatatacgaggcttcatcaactgaaatcaaaa

SEQ ID NO: 45399 - DNA, 236 bp, Glycine max
  Clone ID: 701041260H1
ctttcttccggatcacagggaaaataaaaaacaatggagttggacctgacaccaaagacagcagaagtgttgtttgagggagatggtggaggttactacacttggtggagttctaaagtgccactgctggcaagaccaatgttggtgctggtcggttagtgcttcagcctcagggctttgctattcctcattattcagatatatccaaagtaggttatgtgcttcaagggaacgat

SEQ ID NO: 45400 - DNA, 237 bp, Glycine max
  Clone ID: 701041261H1
cggccctcaaaaagctggttctaataaggagtggaaaccaaagccaacaaatacgattaatcagggttctggaccagctagtgcatctgaggttcttgtttcagttgactcaactgggcagttacaatctcatctagtgctcttaactctgaagaagctacttcaaaactgcagaggaagctggaggattttcatcttccacagcgtcaacatgtacatattccaaaccatatcatt

SEQ ID NO: 45401 - DNA, 238 bp, Glycine max
  Clone ID: 701041263H1
gcttgtttacgcaacgcaagccattgttagttgtattcgatggactacgatttcagaagcaggtcgggcccacaacctccgatgtaccgtccgccaccgccaccgtcaccgatgtaccgtccatcaccgtacaacagaatcctactccttcttcaggacttggcgttagggttggtataaagccggaacataggatcacaccgccgcctcatttatcatcacttgctggagataatcc

SEQ ID NO: 45402 - DNA, 243 bp, Glycine max
  Clone ID: 701041234H1
accaaacaaagccctagcatgaaatcatccttcgaagaaaaataattccaatcaatcctagaatccaatccctcccctttgaatttgatgcctcctcgcattcaattccacgctctggtggcatcatcatcatggtcgtggtaataacaacaataacggcgttgttgttgttgtcgtttgggtgcgaacggggacacgctctgaaggtgccgtttagagtaaacgacgtgctccccgtgctgc

SEQ ID NO: 45403 - DNA, 244 bp, Glycine max
  Clone ID: 701041205H1
tttacaaatcatctgggaacttctgtactcaatgtgaggctgaaggcttccgtaaaattacattttatcaggatcgacctgatataatggcaaaatatacagttcgcattgaggcagataaatcactgtatccagtgtattgtgcaatggcaacctagctgaacaaggtgacttagaggatggcaggcactacgctgattaggacgaccccttcaagaacccttcgtatctgtttgccttggtt

SEQ ID NO: 45404 - DNA, 231 bp, Glycine max
  Clone ID: 701041206H1
aaaattccaagttggggttctcacgatttcgattaaccctttctcccacaaactccgattcttcttgtaaacagcggtgccaggtgttaatctagaagttgatataggatgggggcaatgatgtcgaggttctggttctgttattccctgcaaaagagtataagattgttgttgttggattggataacgctggaaaaaccactaccctttataaatcgcacctgggtgagg

SEQ ID NO: 45405 - DNA, 245 bp, Glycine max
  Clone ID: 701041207H1
cgactgctagttcaagtccagaacatccatcattgcgagctcatggacggtccaagcttagtggtgacaggacttcttttagagatcttgttgatgaccagtctacactaagatccagctacaagtcagatggcgcttcctcatcagaagctcgtaggatacgaagaagaagtatcagcattacaccagagattggtgatgatattgctagggctgtacgggcgatgaataaaacgctaaagcaa

SEQ ID NO: 45406 - DNA, 246 bp, Glycine max
  Clone ID: 701041208H1
gcgttcaggaatctacatagctttttcctcagagcgttgaaaattcccagactctctcgcttcctcaaaatttcgccctctttcattcaattctcttctctgctcttctcttctgttcccaccttctgatccatcatcctcgttttctccgaacaatggctgctggtgtcactgtcaagtccgaggttctagaatcttctccccctgaaggagtatgttccaacacggaggaaaaccacctggttc

SEQ ID NO: 45407 - DNA, 249 bp, Glycine max
  Clone ID: 701041209H1
atttagttgacagatgaagagagaaagtgagctgatgaaaagatcctgaatcaacaaagaagagacgacacgacacacacacacacaaaaaaaaaagcaaacaagctgactcggagttaaaatagaagaaaggattatcgagtcgcattgtcgattcagagaaaaaaaaattgaattcaatctgatagatcctatcacagcaaaaaaaattggattgaataaggtgtttccgatttcaaaaacaatcac

SEQ ID NO: 45408 - DNA, 242 bp, Glycine max
  Clone ID: 701041210H1
cttgctcttgttctctgattggcctagccagtagtagccaatttgttggagctggttaggaatggcgtcgaaaccgaaatcaaatggaaattccaaatgcaacaaaggattcgctgacagctatatgctgttgaatctgaagacgctcatttcttcgatcttgttcatgtgctgtattcccgtaacttgggaaaccgaaaatttgtggacagcaatgctgagggatcttatgagggaagctt

SEQ ID NO: 45409 - DNA, 244 bp, Glycine max
  Clone ID: 701041211H1
agccgatgtggtagagcagttcctcccagaccacaatgaatccatttctgcagttcttgacaagtttggtgccatgggaattgacacccccggcgtagttgcattgcttggagcacacagtgttggtcgaacccatttgtgaagttggtgcaccgtttgtacccagagattgatccagctctgaaccctgaccacgtccctcacattctgaagaagtgccctgatgccattccagaccctaagg

SEQ ID NO: 45410 - DNA, 242 bp, Glycine max
  Clone ID: 701041212H1
caccgaccacatcgaggtcgacaaggaaaccctcgacatgctccactccctcggtatcaacgacatccccggcatcacccaggttgatcctgtccctgttcagcagaacttccccttcaccaggaggtactgatgatatggaggctcttctgctttgagaaataagactttgttttatgcttctcgtttcgtgttttcgtggtttttattttatcttattttatttctcaagccttttaatt

SEQ ID NO: 45411 - DNA, 242 bp, Glycine max
  Clone ID: 701041213H1
ctgagagaagcagagctgaagaggtgaagtgaagatgatgtccggcaaatatacgtcgattgacgcgcagagcttcagggatctgttcctgccgttccagattcacgacccgccaccgtcaatttcgcagattcaatcttcagacttttcctccttctggagctcagggcaagatcaccgctgcttccgggcctcctcgtgacgctgatgattcattttcaaaacctgtatctggttctgat

SEQ ID NO: 45412 - DNA, 241 bp, Glycine max
  Clone ID: 701041214H1
gttagcctgcgacacatgttgagaaacgagttgggtgtgtctgacacttgatgttaaagtgtgaagggacaaggaaacatagagtctcgttggttcaatacacttgtgcaatttggccactatgaacacagggcttctgcaggtgcagccttgcttgcactcttggctatcaccttctccttgttgagccctcaaaccctgttttctccgcctgagattccgggctcgaaggaccaccttc

SEQ ID NO: 45413 - DNA, 170 bp, Glycine max
  Clone ID: 701041215H1
cacagagtgttggggttgaacacctgaacagaacttgaaccctgcctctgcgctcttgtggaatctgtgcagtgcttgaaccctaataatggctgctttcttgagaaggtttgcgagggccactccgatcctattcgtgcccaatccaattcctctcacaccaatctccg

SEQ ID NO: 45414 - DNA, 241 bp, Glycine max
  Clone ID: 701041216H1
cttgttgttggaaagaaaccctagcaagcggaacaatggcagacgttgaggtcgatgtggcggctgcagcagcagcagggcagccgaagaagagaacgttcaagaagttcagtttcaggggcgtggatctcgatgcgttctggacatgtccaccgatgaactcgtgaagatgttcagtgctcgcgcacgtagaaggttccagagaggcctcaccagaaagcccatggccttgatcaagaag

SEQ ID NO: 45415 - DNA, 243 bp, Glycine max
  Clone ID: 701041218H1
attaaacaccaaaatactaggagactcaaaaaagagttctccgtcaactgaatctccatcatttttcccctttcgcttcttcgtgttttttcttctctctcacttttgcttcttcacgatccactctctctgtttcgtgtcgtggtgctgatcgcctgcgttcatggtgatcgagcatgacattgagagctgcgggagcagagcggtgcaatcttcgcacgcgcaccaccctcggcaccaccg

SEQ ID NO: 45416 - DNA, 245 bp, Glycine max
  Clone ID: 701041219H1
cccttcctcgatctctccaccgccagccccgcctgccaccgccgtccccttccccgccgaacccaacgaccaccttccaccacccattcccgaaccaccttctaaccacccaccctacgccgagatgatatacacggaatcgaggcgctgaaggagacagacggttctagcaagagggcaatagcgaagtatattgagcaagtgtatacgcagcttccaccgaatcactcagacttgttgactca

SEQ ID NO: 45417 - DNA, 244 bp, Glycine max
  Clone ID: 701041220H1
ctgctccgcataactcctcacacacacacacaaaacagaacacaacacatacacatacacatgttgttgatgagtggaggcaacaaaaaacacagatccatcacacacatgaacaattgatctttgtcctttgtataaatttgattctaatttttggcactaagagagccactcaaggctctgggatgtactatacgccattcggggttctgattttcggcggagagaaggttcaagagaccca

SEQ ID NO: 45418 - DNA, 241 bp, Glycine max
  Clone ID: 701041221H1
ctttgcatgtcacaatctcattcatcatcatcttcttcttaaaagttaaaaggttaagagagagagagaaagatgagtagcgtgttggagcatggtgttgtgggatgttgcaaatcagggccaggctatgctaccccctggaagccatgtctggtccaagagagtctcttatttatgtaactgctgtctacacagggacaggaatagagaagccggactatttggccacagtggacataga

SEQ ID NO: 45419 - DNA, 234 bp, Glycine max
  Clone ID: 701041223H1
caactcgcagcaccaccaccagcaccaccaccagcaccgttctattcttcttccacaatgggtatctctcgtgattccatgcacaagaggcgcgccaccggcggcaagaagaaggcttggaggaagaagagaaagtagagcttgggaggcagccagcaaacacaaagctatcaagcaacaagacggtgaggaggattagggttcgctgcggaaacgtgaagtggcgtgctttga

SEQ ID NO: 45420 - DNA, 199 bp, Glycine max
  Clone ID: 701041224H1
ggaaaggagctggttacacatcagagaagccacttgatgcaaaggttttgaatatgatacaaatacatacacatttatttataatctatgatatcaatattatatattgcaaggtatgtctttgtctttggatttttaaatgggaggtaagtcaagatattcttgtttggtttggattcagacactgagacgtttagct

SEQ ID NO: 45421 - DNA, 241 bp, Glycine max
  Clone ID: 701041225H1
cttctctctctacgatggagccttcctcgatctctccaccgccagccccgcctgccaccgccgtccccttccccgccgaacccaacgaccaccttccaccacccattcccgacgcaccttctaaccacccaccctagccgagatgatatacacggcaatcgaggcgctgaaggagaaagacggttctagcaagagggcaatagcgaagtatattgagcaagtgtatacgcagcttccaccg

SEQ ID NO: 45422 - DNA, 245 bp, Glycine max
  unsure (1)..(245): unsure at all n locations
  Clone ID: 701041226H1
cgctcgagccgcgctgcttccgattgaaggcatctaaggagagaaaaatgcacgatttctgcaccacgatcccctacggattgatgttagtgggtggtggactgttcgcctacataagcaaagggagcatcgcttctctcgccggaggcncggctccggtttgcttctcatcgtcgccggctatctcagtctcaatgctttcggcaaacgaaaaaactcttacctcgctctctttctcgagaccg

SEQ ID NO: 45423 - DNA, 240 bp, Glycine max
  Clone ID: 701041228H1
aacatccaggagaaaagctgttgcctctcgaatcagatttctctgaagaaagagatcagttattgtgttgtaatcaactgggctacctccctccatttgagacatcattaatgcaaaattaacagcgccctgaggtctgtccggagaattgtttgcagaaggaagaggtagtcaggtgtgtacccaacctgtttagagtaaatcagaattttgtcaaactccctcctctcagcaaacgca

SEQ ID NO: 45424 - DNA, 240 bp, Glycine max
  Clone ID: 701041229H1
cttgggtggccatggattctctactggcgaactatgcctcttcagatgaagaagaagatcaacagccatccccaccaaaaacgacgacgttttcctcccttcctcaacccaaactttctctgtttcaatcccttctcaacccaaatcttctctgtttcaatcccttcctccacccaaacaaccttccaccgaaagctcttccctccctaaccctaaccctaaccctgaccctaaacccca

SEQ ID NO: 45425 - DNA, 242 bp, Glycine max
  Clone ID: 701041230H1
ccttaagtttgcgataaggatttgagcttcagtggttttttttactatcgcaacgaattcttctaatggagcaacaaagcaacctcccatgccatctcccttgcggttttccaagttctttcagtccaatatgagattctggttactggaggagctggatttattggctctcacctagttgacaaattgatggaaaatgaaaaaaatgaggtcattgttgctgacaacttcttcactggatc

SEQ ID NO: 45426 - DNA, 243 bp, Glycine max
  Clone ID: 701041231H1
ccatctctttctctggctctctccatctatcataagggtcactcacgaaactcctctgagagcacgtgcacagccatcggtaccgcggttagctccctgagtagggtcgatgggtggcgagtcacatgaggaccagctcggcctgtcgggccggagtcacacggtgggaaatccccggctctcagtgctcgggacttactctggaggtcctcgactgacatccaggtcttagacctcgatttg

SEQ ID NO: 45427 - DNA, 252 bp, Glycine max
  Clone ID: 701041232H1
cggtcgagctccttgatcagatcaggggactaagagctcacactgatgctggtggcataattctactcttccaagatgacaaggtgagtagcttgcagctcctcaaggatgaccagtggatcgatgtcccaccaatgcgtcactcattgtaatcaaccttggtgaccaacttgaggtcataaccaatggcaagtacaagagtgtgatgcaccgagtgattgctcaaaccgatggtaccagaatgtccatagc

SEQ ID NO: 45428 - DNA, 245 bp, Glycine max
  Clone ID: 701041233H1
ccgcactctcgctcgcagttacagaaaccatgacgaccgtggtgcccacctccgaagaagacgctgccctctctgttgtccgattcgcctctgaactcgcctgggccgatgccggtcccgaggttgctgagcctcagttagtagactctgcatggaggctgaagagtttatcgttatgggaaaatggttggaactagcatcattgatgattacctctgctgaattggttttctcaaaggtttctg

SEQ ID NO: 45429 - DNA, 243 bp, Glycine max
  Clone ID: 701041204H1
atttattcagctcatttctggtcttactagtttctgatttgttctcttatgccattttttgtctcttctttcaaaggggttactcttgaagttctataaagttcgattctttgttcgtttcactaacttggatgtgagtaggctcttagatccgagggatgaaagttggatatttttagcagtaacacaaatttattcagtgtgaagcaatatgggaaacacatgtgttggtcctagcatttc

SEQ ID NO: 45430 - DNA, 240 bp, Glycine max
  Clone ID: 701041168H1
gagaaagtgaggcttttatttgattctaaaaatgagacgtgctcttgctttgcttcctcttctcttcctgtttgtagcgattggggaatcaagaaaagatggaggaaaatattggaaaatgaacacgagagatcatcagatgccgaaaaaaattaaggctctcctcaaccaaaactccgagatccaatctgaaaagattctcaaaaccaaggaacaaattcttgaaggttctaaacatga

SEQ ID NO: 45431 - DNA, 236 bp, Glycine max
  Clone ID: 701041170H1
cctcgagccgaatcggctcgaggggttttgtgattttttgaagaataccgttttggagttagtacggagatggagctgtcgactccgaattcttcctcgaagcacttgtccattacgccgggttctagggttttgagaaaccctctctccgacgaacagatctggaagcgcctccgtgacgctggcttcgatgaggaatcgattaagcacaaagataaggctgcgcttattgctta

SEQ ID NO: 45432 - DNA, 237 bp, Glycine max
  Clone ID: 701041171H1
gagaaaagtagtccctttcgaggagcttccatcaagtcttccagccgccaagcttgcatcaggtgatattgatgtgagaatgaatcttgatgatccattaaatcaaaacgttgatactgcgagaaatgttctacaagaacttagaacacaacttcccccagaaatatttgatttgtcaaagcttgtgtgtggaacatatgtggactcgaggatgcttgtccttcgaggggttagtgg

SEQ ID NO: 45433 - DNA, 235 bp, Glycine max
  Clone ID: 701041172H1
atttcattgatttctccctcttcgctctctctcagtgaccagagacagatgatgatggagatggcgaacgaaacgctgtcgttgcggcactcgcggcgttggtgctactcgcggcgagtgtggcggtggatgctcaggagaactcggacgtgcagacgctggtgaagtacaagcacgggaagaagtactgcgacaaaggatgggaatgtaagggctggtcaatttactgttgtaa

SEQ ID NO: 45434 - DNA, 232 bp, Glycine max
  Clone ID: 701041173H1
gagccaagcaatttgctattcactattgaactatgaaacctaatatgtagaccaagtgtttgttgtggtgggtaaattgtatctttcttataaaagacttggtcaaaatgattccccaacttaacctgttggaaaaattcttgttttgtaggtttatctcaagacacatgtgattgaatatatattgtctatgtttaaaattctatcttttgttactgcaatccaggtggac

SEQ ID NO: 45435 - DNA, 235 bp, Glycine max
  Clone ID: 701041174H1
ggtggtttgtgtcaccggagccagcggcgccatcggatcatgggtggtcctactcctcctccagcgtggttacaccgtccatgccaccgtccaagatatcaaggatgaaaatgagacgaaacatttggaggaaatggaaggagcaaagagtgatctccatttttttgaaatggatcttcttgacatcgactccattgccgctgccataaagggttgttccggcgtaatccacctt

SEQ ID NO: 45436 - DNA, 237 bp, Glycine max
  Clone ID: 701041175H1
gtatttccctacctctcccttcaagatgcagatcttcgtcaagaccctcaccggcaagaccatcacccttgaggtggaaagctctgacaccatcgacaacgtcaaggccaagatccaggacaaggaaggaatccccccggaccagcaacgtctcattttcgccggaaagcaacttgaggacggccgtacccttgctgactacaacattcagaaggagagtactcttcacctcgtcct

SEQ ID NO: 45437 - DNA, 236 bp, Glycine max
  Clone ID: 701041176H1
aacagctttcatggttccattggtggctggtgatggaaccaaaactcaggcacttgctgtttgccactcagatacttctggaatgaatcatcacatgcttcatgaactcatgggagttgatcctggaactaaccctgtttgccatttccttggaagcaaggccattttatgggtacccaatttatctatggacactgcctatcagactaacgttgttgtttaattagtccatgcat

SEQ ID NO: 45438 - DNA, 238 bp, Glycine max
  Clone ID: 701041178H1
ctcgttgttgcttcgctgttgaatcatggatcagaaggtcgatttcagcgctccccattccatgggaaccactatcatcggcgttacttacaacggcggtgtcgttctcggagccgactctcgaaccagcaccggagtgtatgttgccaaccgagcatcggacaaaatcactcagctcactgataatgtatacgtgtgtcgctctggatcggctgctgattctcagattgtctctgat

SEQ ID NO: 45439 - DNA, 249 bp, Glycine max
  Clone ID: 701041180H1
tatagaatgcaatgactcaactctagatactagatagtgagtgagtgaagctaaagctacaaaaaacaaccaaacaaaacactcaattctcttctcttctcttctgggtttttgctttttcctcattctctcattctcaaacaccacaaaaaaatgggccttgtttcccaggatgccctcaaccaactccaagctctcatggatcaagtgctacttgaggaggagccactgcagagaacgtttcagaat

SEQ ID NO: 45440 - DNA, 242 bp, Glycine max
  Clone ID: 701041181H1
catcattcaaccagatggctgagcagcttcagaaaacttttcaaggagctccacaggatgctatgcctagctttgataatcaacaatatttttcaaccatgcaacaggttatgcagaatcctaattttatgaccatggctgagcgcctgggtaatgcattgatgcaggatccacctatgtctgccatgcttgaaagtttttctaatccatcacataaagaccagcttgaagaaagaatgaca

SEQ ID NO: 45441 - DNA, 237 bp, Glycine max
  Clone ID: 701041182H1
aaggtggcggaagggttcacttgcattggtctaatattccagttggagatgaatatgtccctttggcaagtgtaaagggaagcgttatcactgggttggtatattacaaagaatgccctgctggtacttataaaaatgtcagttggtctgctagagatctttgtcatgattgcccatctcacaagcttccgcatcgtgccagatatatctctgttcgaggtcgtgtggcagacatcc

SEQ ID NO: 45442 - DNA, 236 bp, Glycine max
  Clone ID: 701041183H1
ggacatcttgtgagcactacggattgttataggaagactagaatattcattgagacttttcttccaaagatggggatcacgaccactgtaattgatccagcagatgttggagccttggaatctgcattggagcagcacaatgtgtctctattcttcactgagtctcctaccaattcattcctgagatgtgttgatattaagctggtttcagagctttgccacaagaaggggacttt

SEQ ID NO: 45443 - DNA, 233 bp, Glycine max
  Clone ID: 701041184H1
attctttttccccattttttctctttctttttttttttcttttccttttttcattttcattttccccttcgcttcgtctcaacagttgacgccattctcgtctcccttttccaaaaaaccgtttcctcgggaattgagagagttccaattctgcccctcggggcttcgcgaatttaccaatccgagagtcatggctccagccaccagaaattcctggcccttggatcagcgca

SEQ ID NO: 45444 - DNA, 235 bp, Glycine max
  Clone ID: 701041186H1
gctgtgtcagccacagtaattggctctactgtgggcgattcctcacctcctgatggtgtacttccaaaagataaagctgaagacaaatatgagccacttggtcttcacattcagtccattcccttaggagttgtacctagtagccaagacatgaaaccatcaattatggagactgaatttaaattagaagatggaatcaatgttggtcccagtatcgaacaccagtttatcccga

SEQ ID NO: 45445 - DNA, 236 bp, Glycine max
  Clone ID: 701041187H1
ctctctcaaaggaaagaaaaggaaagaaaagaaaagaaaaagaagagagtgtaggtaaacagaagcacacactacacagttaccaaaatcaggttcaaacgcacagatctgggagaagagaagaagaagaagaagaagatgggacaggatcagaaccagagatcgctgatctacgcgttcgtgtctcgcggcacggtgattctcgccgagtacactgaattcactggcaacttcaa

SEQ ID NO: 45446 - DNA, 235 bp, Glycine max
  Clone ID: 701041188H1
aaggaacaaggtattagctcaagtttggacccataatcttgatagttgtgaaggagatgttgtacagtgctcagaacaagaggcaatgcctagttctcataagactgctcaagactaaattcaccgaacgtcctctcctacggtgatgattaatccttggaccaccattccagaaatcaaccccgttagagcatgctttgatccacatgattcagttgtgcaacaatcatgatgg

SEQ ID NO: 45447 - DNA, 234 bp, Glycine max
  Clone ID: 701041190H1
gttgattcggatctagagtcttttttcactcttcagttctcgttgttgttcttcgctttcctgaaactagggttttcaatttcgattcattcgttaataattaaagatgtttgggagggcaccgaagaagagcgataatacgaggtactacgaaatcctcggcgtctcgaagaacgcttcgcaggatgatctgaagaaggcttacaagaaagccgccatcaagaatcaccctga

SEQ ID NO: 45448 - DNA, 232 bp, Glycine max
  Clone ID: 701041191H1
aatagatgatgctgaggtacagccagtgctaattaatcaggtcatgtcagaaggagcatatatcctattctacatgaggtcctgtccccgtcctccggtagaacatactatgaatgccatgcagcaatctgtttatgattcttcaaagcacaatccaatggaaatgcagaaacctaataaaccaggacatagtaggcatcgcagtcgtcagttttttgtcccagagccatca

SEQ ID NO: 45449 - DNA, 236 bp, Glycine max
  Clone ID: 701041193H1
cttttctgaatctcgcggcgttgttagttctgcggcggttgtagttccggcggcgatgggacagcaatcgttgatctacagcttcgtcgctcgcggcaccgtgatcctagcggagtacaccgagttcaccggaaacttcaccagcgtggcggcgcagtgcctccagaaactcccttcctccaacaacaagttcacttacaactgcgatggccacaccttcaactacctcgttgata

SEQ ID NO: 45450 - DNA, 237 bp, Glycine max
  Clone ID: 701041194H1
caaatgagctgtcctttcaaatgtggacaaatcaaatacaagaaactctaaattctaagaagcaaggcgattctgcttttcatgctagagacttctccacggccattgactgctatacacaattcatcgatggtggaactatggtatcaccaaccgtgtatgccaggcgctgcttgtgctacctgatgaatgacatggcacaagaagcacttggagatgccatgcaagctcaatcaa

SEQ ID NO: 45451 - DNA, 243 bp, Glycine max
  Clone ID: 701041195H1
cccaatttcgcgataccaaaacctcagcaatcaacaatgtcgtttttctcaaggcgccgtcgcgacgacgacacggtggacgactacgacgagtacgaccccaccccttacggcggcggctacgacatcgccctcacctacggccgccccatcccaccctccgatgagacctgctaccctctaggagcctcttcttctgatgacaacttcgattatgctcgccctcaatacacctctaacgct

SEQ ID NO: 45452 - DNA, 242 bp, Glycine max
  Clone ID: 701041196H1
aatagtgttaatctgtctttctctatctctatcggtcatgggtgcttttgcttttgatgaggaaaactcctccaccgtggctccggcaacactctacaaagctctgacaaaagatgctgacactatcatcccagagattattggggccatccaaactattgaaatcgttgaaggaaatggaggacccggaaccgtcaagaagataacagctagtgaaggtgaccagaccagtttcgtgctgc

SEQ ID NO: 45453 - DNA, 252 bp, Glycine max
  Clone ID: 701041201H1
catccctctcgaatagaaaaacagaacagaagacagaagaagaaaagaaaacccaaacaaactctaaaagaaagacagaaagaaagcacgattacctgcacttgttcttcttcctcctctgcagtaaaaccctagccatcttatcgatccgaatcccgagatccgattgcaaggctggcgggtattcgggtcaagtaaatgacggatctcccccgccgcgccttattgataatagggttaccgcgctgctgt

SEQ ID NO: 45454 - DNA, 264 bp, Glycine max
  Clone ID: 701041202H1
cgcgaatcagctcgagatcaacaaccactctctctcccctctctgcagcaaaaccaattctccggcgacatctccggtcaggttccggcagcctctccggcgactcggcatggcaactcaatgaatgcggaatcaccgccggggctcctcatgtcgtttcctgcctctccgactacgacctcctctgcggcgaggactcctccggaatcctctccggagagtcgccggagtgctccttctccgacatcgactcctcacctcctc

SEQ ID NO: 45455 - DNA, 240 bp, Glycine max
  Clone ID: 701041167H1
ctctgaattcctcttattcaggaatttggagagtattgatatatcgcggtaggataaaccagtagccaaggaagatatggagttttctatgattttcattgttagcaacattatgctgcttttcagttcagcatttgccaaaactgctagtcctccctctctgagcccaactccagcacgagcgccggcaccagacttcgtgaacctcactgagttactcagtgttgctggtccgtttca

SEQ ID NO: 45456 - DNA, 244 bp, Glycine max
  Clone ID: 701041203H1
cttttacagttttcccccttcccattcatcaattcttttattgaacatgtttgcacaatagttaacaataccaaatagtggcattgagtgacgtatcccaaaattgagacagtgggtagtggattggttgctttgctgggatcatatattatatattcaagataaataatttcataatttgtagtatagaatacacaaatgcttaaaaataaaatattatctaaaattaaagatataatcataa

SEQ ID NO: 45457 - DNA, 247 bp, Glycine max
  Clone ID: 701041135H1
cacaaaccacattaaaaaaagactaccacgtattcttctctctccgtctctctctctctctctctctcttcacagtgccaatggcggatccaatcgcgaaggttctgatcgcgtttgcgctcttagcttccctcttgctgtgttcgcacgcttcctccgacgttcccttcatcgttgctcacaagaaggcctccctcaacagactcaagtccggcgccgaaagggtctccgtcaccatcgacatctt

SEQ ID NO: 45458 - DNA, 241 bp, Glycine max
  Clone ID: 701041137H1
acttactatatatatatatatagggaattcaagtgagagtgaagtaaaagggttgaaaattttgaatatgaagatcagtattttgctatgtgtggtgcttttgggtttccttggggtttgtcaaggaggcagcctaaggaaaaagttctaccgggattcctgccctcaagccgaggacattattaagaccaaaacccagcagcatgtgtctgctaatcccgatttgccagccaagttgctt

SEQ ID NO: 45459 - DNA, 239 bp, Glycine max
  Clone ID: 701041140H1
gaagacgaagatgaagagatggaaaatgatgcagaaagtctagaactggaagagattaagtctgagactgaccaggagggagatgatgagattgaaataaatgctggtctgggaacttttgaacgtgaagaccagaatgagtttgctgtcaaaattgccattggtggtcttgttcagaaactttctggtaatctatcctctagagatttgcttcgagtccctgctatgctggagatgaa

SEQ ID NO: 45460 - DNA, 237 bp, Glycine max
  Clone ID: 701041141H1
gctggctcaagtatgaacccctttctggataatgacgagtctggtaggcctcaagtaggcagccctaatcttagttctccttcaaatggggaatccgtaccttcaaatgggttgccaactactagcgattctatcaatgggaacagtgactcaagtccaacatctgtagcggtaccctcgctatttgaagaggatgtggaatttgtaggtgtagaattagaaggtacagagaaggca

SEQ ID NO: 45461 - DNA, 238 bp, Glycine max
  Clone ID: 701041142H1
ccggatcccccttcgaagtgaattatattgcagcgaatcacacacactctgaacaacgcccaccatgcaggccagtgataggtttaacatcaattcccagcttgagcatctccaagccaaatatgttggaactggccatgccgatttgaacagatttgagtgggcagtgaacattcaacgagatagctatgcatcatatattggacactaccctttactgggattctttgctattgct

SEQ ID NO: 45462 - DNA, 239 bp, Glycine max
  Clone ID: 701041144H1
cccgcgtgtatcgtactcgtcgcattttccgtgtctcatcacaccctggttatgatcggtcaaacgcaaagtttgttcttatttcgccgatcgaacctcgatctggttcttagggatgattttcgttggaggtttcggcggcaccggtgattatcgtacgtgatctttctgcggtggatgttgatggtctcgtgtcgaaagactcgaatcagagtaattaacgccagattcgctgtgta

SEQ ID NO: 45463 - DNA, 241 bp, Glycine max
  Clone ID: 701041145H1
aaaatagaagccttattttgctctgtgttctttctctcaacaatcgttccaacaaatcaagctacgtttctaccactcaggtttgtttctccgaacgcgaaaatctaatacttcttttagggtttgtgatggatgatctacgagaatctatgttctatccgacttcatttatctcagtgaagcttagggttcctttcaatttatttatttcggggttttcataaggatcggcaatacccta

SEQ ID NO: 45464 - DNA, 247 bp, Glycine max
  Clone ID: 701041146H1
cctcgagccgaatcggctcgagaaagaactttgttctttgaggatactgtccgcaacacacaacgctggaaaacgtgtgggtactcacactgtgctggttggaaaatctcagagaattaacaggagcagattatgcattagaaagcatccacaaccttagggaggcagtgccagaactatgggaagatgacataaaaaaagatgctagcagctttcaaatctttgacatcattggccattttgctca

SEQ ID NO: 45465 - DNA, 249 bp, Glycine max
  Clone ID: 701041148H1
gacgttatcagcatgctagatgacaccgtttccgtttccctcggaattgaagaggaaacagaagcagcagcagcagaagaagatgcagaatctgaagtcagcattttggagtggcaagttttattgaactccaccaatttggaaggaccgaattcggagccttatttcggagatagcgaggatttcgtttacaccgcggagtacgaaatgatgttcgggcaattcaacgacaatgcatttaatgggaaa

SEQ ID NO: 45466 - DNA, 171 bp, Glycine max
  Clone ID: 701041149H1
ctcttcttctcttgcggctagggttttagcgcacttcttctagatttaaggaagatgggtaaggaaaaggttcgcatcagtattgtggttattggccatgttgactctgggaagtccactaccactggccacctgatctacaagcttggaggcattgacaagcgtgttatt

SEQ ID NO: 45467 - DNA, 246 bp, Glycine max
  Clone ID: 701041150H1
caaaagagcaatggaggaggaggaggaggcggagaaacagaagaagcacttagcaatgctggaacgcctttccaaacgcacccaaagctcttcgcaaaaccccgattcctcatcatcagaatcctccacttcctccatcctttcacgcttcacccacttaaaatcctcgattgagtcccaactcgcccaatcccaatccatttcctccgacgcctccaacctcaaactccacttcaatcaaatctc

SEQ ID NO: 45468 - DNA, 241 bp, Glycine max
  Clone ID: 701041151H1
ctcagaattctctaaaagagatctttttctgctctttgaagaaagaagggtctttgcttgattttggagatgtctctgctctcagatctcatcaaccttaacctctccgataccaccgagaaggtgatcgcagagtacatatggatcggtggatcaggaatggacctgaggagcaaagcaaggactctcccaggaccagttagcgacccttcagagcttcccaagtggaactatgatggtt

SEQ ID NO: 45469 - DNA, 241 bp, Glycine max
  Clone ID: 701041152H1
catttctccatttccattttctctctcacttttcaagaatcgtaagctatgggaaagtcttacccaactgtgagtgctgattaccagaaggccgttgagaaggcgaagaagaagctcagaggcttcatcgctgagaagagatgcgctcctctaatgctccgtttggcatggcactctgctggaacctttgacaagggcacgaagaccggtggacccttcggaaccatcaagcaccctgccg

SEQ ID NO: 45470 - DNA, 241 bp, Glycine max
  Clone ID: 701041153H1
tcgagtttgagccaaaacccgaaataattgagccacaattggaattcagttttccaaccacacgctgcaaatcgagtcgaaggccgtcgctgcaaatctctctcccgaagaagaccgagtggatccaatttggagagcccgaggttaccgaaacggtgtcgcagagtaacccgaacgcggaagagaagaagcactacagaggagtgcgacagagaccgtgggggaagtttgcagcggagat

SEQ ID NO: 45471 - DNA, 239 bp, Glycine max
  Clone ID: 701041154H1
ctcacactcgcaagtctcaagcaactcacacaggaagcggcaaacaaagcacacagaaagtaaaaagcggaaattaaggagcggtggtgacggtggtagtgaataaataaaagcagcaccataccatggggggagaagaagtagcaagagtcaaagcagagttgttcgacgacaacgaaagcgatcgcaacgacgacgacgttttgagcgagagcaaggactcgggagtgacgacggct

SEQ ID NO: 45472 - DNA, 241 bp, Glycine max
  Clone ID: 701041155H1
caagtagcgtgtacctgctgtcactactccctaaggaaaaccagaacaacacagttgttcctattagaaatacgcccacatcaatccacgccacccctgtcaaaatcaatccccagataccattccccttcctataacaaacacaaaacaacccaatcattgtttgttcacatccgaatccacaacacactgttaataattattctgattcacgaaaaacaggaaaaccccaaaactctct

SEQ ID NO: 45473 - DNA, 237 bp, Glycine max
  Clone ID: 701041156H1
gagcctttgagggttaatgttctgttccaacatatacaaaatatgctgtctggtgaaactgctgtaattgctgagacaggggactcctggtttaattgccaaaagctgaaattgccaaaggcatgtgggtatgagttccaaatgcaatatggttcaattggatggtctgttggtgctactctgggttatgctcaagccgttcctgagaagcgagtgattgcctgcattggtgatgga

SEQ ID NO: 45474 - DNA, 238 bp, Glycine max
  Clone ID: 701041157H1
gtttttgagaaagccaaaggtgtcaaaaaaggaagaggatgaaatttgtgtgccaataaatggtggttacaatgacgatgatgcagacatagagtccttgcttcttcccagaaggttcgggaactctacttctcttgctgcatccattcctgtggcggaataccagggaaggttgcttcaagatttgcacggaaagggaacacaaggcaggccagcaggttctcttgccgtgcctcgc

SEQ ID NO: 45475 - DNA, 236 bp, Glycine max
  Clone ID: 701041158H1
gtgcgaagaggcagagaaagaagaaacaacgtttctgttcatcttcttcttcttcttcttcctcactctcaatctccaatctctcctcaaaatcccttccaatctcgcgtgcgccacagatctgatagttagattacactgaatcgaatcgaatcgaatcgactcgctgaatcccaatgtcgcagcaattagggttcgcgatcgagctatacctagaccctgcgttggagaatcag

SEQ ID NO: 45476 - DNA, 237 bp, Glycine max
  Clone ID: 701041159H1
cacgaggagacaatcactcagtccccaacaatgtacaaaatatagccaagcctgtcaaaatagatggatcttcccatgcattgcagaatggcatagattcagcaatacgccatactcacagaattttagcaattttagaggcgctgttttcattgaagccatcttctgttggtacctcatggagttacagctcaaatgaaatagttgcagctgctatggttgctgcacatatttctg

SEQ ID NO: 45477 - DNA, 241 bp, Glycine max
  Clone ID: 701041160H1
tgtcacttcaggtgtgaaaaaggttacgaatgatatgaagactaagaatcgcaccgatagaactggagttgttcgtgctattgaaaaagaaactccggcaagttcacgcgtgttttctaaagcaggacctccaaaatttgaactctcaaatgggtcgcaaatgggttgttgagaatcaaattgagaagaaagacttggtgattgaagattgtgattcaaagcagtctgtatatatttatgg

SEQ ID NO: 45478 - DNA, 241 bp, Glycine max
  unsure (1)..(241): unsure at all n locations
  Clone ID: 701041162H1
agcgccctgcgtgaagcggtggtgtactcgactccganctcgtactcgtcgacgacatcgccaagctcgcgacaacctcgttgggagaacacaacaacgttttggcggcgccggaatattgcaacgcgaacttcacctcgtacttcactcccacgttctggtcgaacccttctctgtcgctaacgttcgcggacagaaaacagaaagcgtgttactttaacacgggggtgatggtgattga

SEQ ID NO: 45479 - DNA, 247 bp, Glycine max
  Clone ID: 701041163H1
aacaatactttatatcgcttggtgcttcttatttatttaagctacaattgcatcttaccattcactcactgataaacgctgaattcattcatagcagcaaacccatctccaacaacatgagttcccaaacacgcaacctcaactttgttctgtttcctctgatgtcccagggccacatgatccccatgatggacatagcaaaaattctggcacagaacggtgttactgtcacagtggtcacaaccca

SEQ ID NO: 45480 - DNA, 252 bp, Glycine max
  Clone ID: 701041164H1
agctagtactagctcttgacccttcttcccacctttttctggtccctcatccagaaatggcttccaattccattctacttctttgtatctttcttgtggttgccacaaaggttttttcctatgatgaagatctcaagacagtggttcctgcacctgctccaccagtgaaggcaccaactcctgcctctccagtgaaatcaccatcttaccctccagggtcagtgaccacaccaaatgttaaggtgccccctc

SEQ ID NO: 45481 - DNA, 245 bp, Glycine max
  Clone ID: 701041165H1
gtttttgagcaacagcagttaaaagagaaaagggattcagcgaagatgacatcgcttggtgtggcaccaacttcgggtttgagagaagccagtgggcatggagcagcagctgcggatagattgccagacgagatgaacgatatgaaaattagggatgatagagaaatggaagccccagttgttgatggcaacggaacggagacaggacatatcattgtgactaccattgggggtagaaatggtca

SEQ ID NO: 45482 - DNA, 247 bp, Glycine max
  Clone ID: 701041134H1
gcgaaactgaggtcgtagaaagaatggcgaaaacgacgtcgttgttgctctttacactgctcctcttcggaaccttagctctcatccaggcgaagaaatcgaaggaggatttgaaggaagtgacccacaaggtttactttgatgttgagattaatggaaaagaagcaggtcgtattgtgatgggtctttttggaaaggctgttccaaaaactgcagaaaactttcgagctctttgcactggggaaaa

SEQ ID NO: 45483 - DNA, 242 bp, Glycine max
  Clone ID: 701041166H1
atcgaatcgaatctccgaagatggccgcgagcgatcgcacagtgttgcaattctcttcatcatcttcttcttcgcagagcttgtccccgaaggtccaccctctggtcatcttcaacatctgcgattgctacgttcgacgccctgaccaagccgatcgcgtcatcggaaccctactcggctccgtccttcccgatggaaccgtcgatatccgcaattcctatgcagttcctcacaacgaatct

SEQ ID NO: 45484 - DNA, 249 bp, Glycine max
  Clone ID: 701041104H1
cttttccaatggcctccaacggcgacgcgttcatccccacccttccaaaaagatcaaactcttcagcaattccattaactcaactaattcctcgtttatcacccatgccgagatcgaatcggaattctcccaccaccaccccacggtggcgcgcctcaacaacggcgccttcgggtgctgcccggcctccgtgatcgccgtgcagcgcgagtggcagatgaagaacctccggcaaccggaccacttcta

SEQ ID NO: 45485 - DNA, 246 bp, Glycine max
  Clone ID: 701041106H1
cttcattccattcccaactcccactcaaccaccaaactctattcagcatttcccccaaatcaccgtcacaccatgggctcctccgcgatggtgttggacccgaaaccctcatcggagcctccgccgttcctcccgtctacgaaatcggattaccttcaaggcagcttcggcggcgacgcaccgcctccgacgaggacgacctctacagccgcctgaaatccctccagcgccagtggagttcatcga

SEQ ID NO: 45486 - DNA, 247 bp, Glycine max
  Clone ID: 701041107H1
cccagttgtggatcaaaaggaacagattattcaagatgcatctacctgtgatccttataatgagcagggtatggctagaggatataagagaagaaatcttaacattggggaattatttctaattgaaaagataaagaccaaagttgatgttgtttggcaaaatggtgaacatactttgggattggatccacacaacttagtctttttgaatgtcataaacactcatgaattttggccccagcagttt

SEQ ID NO: 45487 - DNA, 244 bp, Glycine max
  Clone ID: 701041109H1
cgacaggtcaatctctcaagtgaaattcaaggatgacgtagggtgtgtttctgtaaaaagagtaattaagtgcttattgaataagtgcttatcatgtaaaagctttactgcaaaatcagacaagatgaaaagtcgagtgaggttaaaaggcggtgaaagaatgttaggtcaaacttgattcttatagtggctgtaaaccttgtattggtgctattgtttgtgttggattgaccaatgatagttt

SEQ ID NO: 45488 - DNA, 243 bp, Glycine max
  Clone ID: 701041110H1
gttcttgctttcgaagcaggaagaaagcgcaaaattagagtcaatactatatctgctggtccactgagaagtcgggctgcaaaggctattggattcattgatatgatgatcgattactcatcagccaatgcacctctacagaaagaactatcagcagaggaggtgggcaacacagctgccttcttagcatcacctttggcatctgctatcactggtactgttctatacgttgacaatggtctg

SEQ ID NO: 45489 - DNA, 244 bp, Glycine max
  Clone ID: 701041111H1
cgcactctcaactcttcacttgttaatgcttcctcctgaaagttctaaactcaacgcaatggagcttagcaaagtcacgttagagatcttttcaaaattggagcagcaatggctctcgcactacgaagcatcaaccaaaacgcgcattctcagcattgacggcggaggaaccaccgccattgtcgccggcgcctccctcgtccacctcgaagaccagatccgcgcccaaacctccgatcctcac

SEQ ID NO: 45490 - DNA, 246 bp, Glycine max
  Clone ID: 701041112H1
atcatcatcacagaagaacaacaacagaggaaaaaagaaaaagaaaaatgttagaggtgaagagaatcggtgtggtggggagtggccaaatgggatcgggaatagcccaagtcgctgccatgcacggcatcgacgtttggcttcacgacctcgaccctcaagctctctccaaagcctcctcttccatctcttcctccatcaaccgtttcgtttccaaaaaccacatctctcaggttgcgggtgctg

SEQ ID NO: 45491 - DNA, 245 bp, Glycine max
  Clone ID: 701041113H1
ggttagaccatctattacaatttctgatcatacgggaattctttttaccacaagaaagcatcccaaaacaaaggatctaacgccagaagatttctggatcagtgtaccaaagaaaggaattgtggtttttgccctaccaggagagcctggtctagcagagttggtaggagacttcaaaattcagtttcaagatcgacagggagatttctactgttggatgaatacaacgatgacagacaaccgaa

SEQ ID NO: 45492 - DNA, 248 bp, Glycine max
  Clone ID: 701041114H1
cacatagtagctattatactctctagagtaattgcggaatctgctagaattttctaataatggcgaaagacgttgagcaggtcacagagcaaggtgaatactccgcgaaggactaccatgaccctcctccggcaccgttgatcgacccagatgagctcacaaagtggtccttgtacagagccgccatagctgagttcatagcaacactcctttttctttacatcaccgtgttgaccattattggctac

SEQ ID NO: 45493 - DNA, 252 bp, Glycine max
  Clone ID: 701041115H1
acaagttgcaactgaaccaatcaacaactttcttgtattccaaattatcttcaccattacaatcctcaaagtcaaaaagtgaagaccttaacataaaacaaaacacaatggtaatgtgggtatttgggtatggttctttgatctcgaaagctgggtttcactatgacgaacgtattgttggtttcatccaaggctatcgacgagtcttctaccaaggctctactgaccacagaggaacccctgagttccctg

SEQ ID NO: 45494 - DNA, 265 bp, Glycine max
  Clone ID: 701041116H1
cggctcgagattagctttgcgtatctgagaaactaagccatgtcaaaacccttttgcgccctctttgcactgtccatcatccttgtgacatgtcatgctcaaacccttaatacatcaacaacatgtgaaccttctaaatgtggtaacctcaacattagctaccctttttggaagatatccaacaccaacgttcaagaattttgcggttaccctgaatttggccttgaatgtttggatgaccaagccatcatgatttttccaactg

SEQ ID NO: 45495 - DNA, 245 bp, Glycine max
  Clone ID: 701041119H1
cttttctccaaaaccatccaacaagggaaacagaatattattccatttttcaattatggcatcctcaactcaattctccaccactctggttacactatgtctcttccaattcctagcaggttcgtattcaacgacattcacgattgtgaacaagtgcagctacacagtttggcccggcattttatccggcgccggaacctcgccgctccccaccaccggcttcgtcttacaacccggcgagtcca

SEQ ID NO: 45496 - DNA, 243 bp, Glycine max
  Clone ID: 701041120H1
ctcgagccgtgtgtggcggtgacaaccatggccgactcatctcaagaccttgaccaacttaccgatagtgctttggatgattttcagtccttcaacctcaatcctccccctccaagtggggaagcaactgcgaatagcaagaaggagagtccttctttgccgtcgggggttcaaggattgggcaagggtttacccgatttgagaacgaagaaaaaggggaaacagaaggcttccaaagacagc

SEQ ID NO: 45497 - DNA, 245 bp, Glycine max
  Clone ID: 701041121H1
ctcgagccgttcgattctattgttctatggaaccgcagcttcagcccaagctggagcccgcgccagagcttgtgagcgctggcgctgaggattccgagaagtcgcatgtcagtgatgtcacggaggttcgccacgttgccatggctgaggcaaacgccggttgttgcgcttccgttttgaaacggaagcgtggccgtaccggcaagggaagccgcgttccgaaagggatgactccgccgtcgagg

SEQ ID NO: 45498 - DNA, 242 bp, Glycine max
  Clone ID: 701041123H1
gtgatttgaggattgtgagtgatgcaaacatgtttttcattgagaccattctgaagcacttgggaataagggaatacttctcggagattaacactaacccaggttatgttaacgaagaaggaaggttaaggattttgccttaccatgacttcaacaaagcttcccatggctgcactttgtgtcctccaaatatgtgcaaggtaaatacaatttgttttttttggttatctattaccttatca

SEQ ID NO: 45499 - DNA, 244 bp, Glycine max
  Clone ID: 701041124H1
attagattcaaaccttattggcgtcgtagcagaactcaaaagttaacatccttaatctcttcaaacacggttgttcatagcatatggaaacgaggatgttgcggctttcgattcaacgagtgaggaagttgaactttctgaggcctcagatctctgctttgggaaggtcccatttgtcaactgctgctgaaccatcttccagtaagagcactccacctagggttccaaatcttattgggggcag

SEQ ID NO: 45500 - DNA, 242 bp, Glycine max
  Clone ID: 701041126H1
ctttaggtgttcctgctcttccgttgacatacgtggctcacgttctggcagttgttgccagcgtcttggtcgtggtctgggtcgtcaatttcaggggtggcttggcttgggattctgataacaagtccctcatcttcaacattcatccagttcttattgttattggcttactagttcatgggggtgaagctattataagttacaaagcttttcccctaaagaaggaagtgaagacattgata

SEQ ID NO: 45501 - DNA, 240 bp, Glycine max
  Clone ID: 701041127H1
tcgagcacagagagaagagaagagaacttgtattttctgccagtttcccagtatggctgccacaagcacaaatcaatccgagttagaaacaagtaagaaggattccacttatgacagaatagctgaagtcaaagcctttgatgaaacaaaacttggtgtgaaaggcctcttcgattctgggatcacaaagataccacgcatgttccatcatgccaaggtggaggaccacactgaaaccat

SEQ ID NO: 45502 - DNA, 244 bp, Glycine max
  Clone ID: 701041128H1
cttcccacttatctaccccccacactcttcaatgctagctgctctacttccatttataaatccaactcgatcctttctccctctcttgtcttcctttctaccctttctttccctaactttacaaaatcacaacacacacaaatcttctttttaacatttatcatcgtatctgaaactaccaactatcgatggccccttcattcgacacaagtactcacacggtatgcgtgatggatgcttcggg

SEQ ID NO: 45503 - DNA, 242 bp, Glycine max
  Clone ID: 701041129H1
ctgcaagataatcttaggaagagtttcgcgaagcatgggtgcatgacttgtttaacctttacagttcttgctttggctgtgggtgctgctgtttccttgtcccccaatttggaatctttggattttaagaagctctctgaacttttcaacgttcagcactgagtactctggagaatattccgcattaccgcagttggttgcttccaaacggcaattttcttttcagcccatctcattcacaa

SEQ ID NO: 45504 - DNA, 247 bp, Glycine max
  Clone ID: 701041130H1
cattggtatggctatgttactccggatgacgtggcagccttgttggaccgacaaattgccaagggagaggtcataaaaaaactttggaggggtcaaatggggccacccggtgccgaaatcaaggtagcagatgaccataaacttgctaacggagtttataataacaaggccaatctaagcaacaatgaaaatgttacaggatgctgtcagggtgttaatggggtttcttgctgcaggactgcaagtt

SEQ ID NO: 45505 - DNA, 252 bp, Glycine max
  Clone ID: 701041131H1
atcatcgtcaaggttcctcaaaatgtctctgtcttttgtgttgctcttcctcatctcaattccaccttctttctcctctccaattcaccccacaagcaacgaccttcgtttttcttcaacagcagaaaaactcataagagggcttaacctgttcccgaaagaccccattaacacactcgagaatgcccctctttttgtgtcaggaagcattgtggagaagagcttcactttccctagtcttgctgcttcttc

SEQ ID NO: 45506 - DNA, 256 bp, Glycine max
  Clone ID: 701041132H1
gaattatcgtgttttgatcagaatctgaggagaaaatcacataatttcgaatttgagttttcgtgtagaaaaaggaagagaagaaaatggaatcggaggatttggtcaaacaggaattggaggaattgcagaaacaattggggaagaagcaaaagtttgaagcttctgtttcgtctcttaaaacccttctccaacgcacttacccatcagcttccccggcgcttcgtaaatccttttattcagttctatgccgagt

SEQ ID NO: 45507 - DNA, 247 bp, Glycine max
  Clone ID: 701041133H1
agatcctagaaataaggagattgatcttgatagttcaatgtatgagaaaattcctgacctaactgaggaagatatgaaaaaacaagaaggagattacatctaccgttatcgttacaatggtgggggtgcaactcaagtttggctaagctctggcagatttgtggtgattgacctttcggcagggccatgcacttatggtaagattgaagctgaagagggaagtgtctgttctagaaccctgccaaga

SEQ ID NO: 45508 - DNA, 250 bp, Glycine max
  Clone ID: 701041103H1
cacagcttttgttctcgcacttcgctgtctgaggttctggattctcagtgtttgcgaacgctgcatcatcctttacgggaagaatggatcatcaagggcatagccagaacccatctatgggggtggttggtagtggagctcaattagcatatggttctaacccatatcagccaggccaaataactgggccaccggggtctgttgtgacatcagttggtaccattcaatccacacctgctggagctcagct

SEQ ID NO: 45509 - DNA, 273 bp, Glycine max
  Clone ID: 701041070H1
gcaacagaatggggcgataccctgattaaacttgttcctccggtccgctttcgcttcaaacactcctctgctctttcaaaaaccatttgtttacaggtatattcgacagaagcatctcctggcatagagagagttacacatgaagtcctgatagaatttctagccactgctgtaaatgtcaccaacattcaatgtaatagtctaatacggatatatcgataatatatgccaagctggatatctttcagttgccagtcaaatgctagaagtttt

SEQ ID NO: 45510 - DNA, 264 bp, Glycine max
  Clone ID: 701041071H1
acggaatgtacccccaatcgggcggtaaattccgcccaaagctaaatcctggcgagaaaccgatagcgatcaagtaccaccatggagatgaggtgtcaaatgataacgcacagcatcacatctggagcctatggaaatgcgtggctgcttcatagtctctgggcacgttggcgccgtttaagacaccacaattcctgttctatgcctacctcgcgagtgcaaataacaaaccatccaaacctaaacttgagctgggactgtttc

SEQ ID NO: 45511 - DNA, 273 bp, Glycine max
  Clone ID: 701041075H1
gtatttccctacctctcccttcaagatgcagatcttcgtcaagaccctcaccggcaagaccatcacccttgaggtggaaagctctgacaccatcgacaacgtcaaggccaagatccaggacaaggaaggaatccccccggaccagcaacgtctcattttcgccggaaagcaacttgaggacggccgtacccttgctgactacaacattcagaaggagactactcttcacctcgacctccgtctccgtggtggcatgcagatcttcgttaagac

SEQ ID NO: 45512 - DNA, 275 bp, Glycine max
  Clone ID: 701041076H1
cacacccttcatttcctttgctccctctcattgtgctatatttccattacacaattactagtcctctttctttgaaggtgacacacccttttgcttattaaacacatatcataacaaggtataccaaaatgtgcggctctaagaccaaagtgacgattggcttagaagtcatcgctgctgctactactacaacaactgctaagccttcagtggctagaatcaatggaaggccagtcctccaaccaacttgtaaccgtgttccaaaccttgagagg

SEQ ID NO: 45513 - DNA, 264 bp, Glycine max
  Clone ID: 701041077H1
gtgatgtggtgcgatgcctaatgatcaattggaagattgatcaatctactataaaccagaaagactgtgatgggacaacaccgttgcatttggcttcaaaaaatttatttcctaaaggcttgtactttattacacaagataggaggactaatatgaatctcttgaataacaacgggttaacagctcgagatatcgttaacaattatcaactggcgattcgcaagtttctagccaatcgagtgttaccagcatctggtgtcccct

SEQ ID NO: 45514 - DNA, 277 bp, Glycine max
  Clone ID: 701041078H1
ctgataccgattacacaaccatattagaagccattggcggcgacgtcgtcgttgttagatggatttagctccattacctatctcggatttttgagcccaggaaacaaaccaagaccatggatcgcaagaacccgcggaggaagcccaagctcgagcgccgtaacgctcttaaatactcctcctccgaatacgacgtcgtatcctccccctccgacgacacgctctacacgcgctccatggagttctacgaccgcacgagcttccgaatcgagggcgt

SEQ ID NO: 45515 - DNA, 275 bp, Glycine max
  Clone ID: 701041079H1
cagaccagcaacgtctcatcttcgccggaaagcaacttgaggacgggcgcatcctcgccgattacaacatccagaaggacatcaacccttcacctcgtcctccgtctccgtggtggcatgcagatcttcgttaagaccctcaccggcaagactataaccctagaagtcgagagctccgacaccatcgacaacgtcgaggctaagatccaggacaaggatggtatccccccagaccagcagaggctgatcttcgccggcaagcagctcgaggacgg

SEQ ID NO: 45516 - DNA, 161 bp, Glycine max
  Clone ID: 701041080H1
ccattgccatgatcgtgcttggctatatcgacttcggggattcatagaccataggtatgcttataatctagttcgacaatattcacgagcgtagtcatcgaaagattcgagaagtgatctgcttatatgaataataggtctttcaagtatgcctggggtat

SEQ ID NO: 45517 - DNA, 275 bp, Glycine max
  Clone ID: 701041081H1
gtcctagtgctggaaccagttctggaatgcccccggctgttactaatgctgataggcatacaagaagggaagcaggtagactccctgttttggtttcagtggattcctcgaggcgcagaatgtcagggcccattttaaatactttatcaagtgccaatgccttgggtcagtcaagtggatcatctaggagggttgctgtctctagtagccgtgatgcatttgttggtgctgagtcagatatccgtactcgcactgctgaggctagccctggagca

SEQ ID NO: 45518 - DNA, 276 bp, Glycine max
  Clone ID: 701041082H1
ccgaaggtgaaggaagagaaactatgcgcgagagtgaaccgagagagaggcacagttgagtagcaaagcactgagcgcagtgggtgggtttactctcactctcagtcccatcaatttgaaactcccccttctcccttccaatcgcctctttaaccgcactcccttcaaatcttccatttccttctccctacgctccaacgacgagcaacaacccctcggcctcgacatcgccgcactaaggtcagcttccgtgaggctcattgatgggaatcagat

SEQ ID NO: 45519 - DNA, 277 bp, Glycine max
  Clone ID: 701041083H1
cattacatagcctcaataatctgagagagaaacaaaaacaatgaaggtttccattgccaagttccactcccttcccctatgttttttccttctcttggccttcaacacaaaacccctcctagcagcagaaccagagccagtggttgataagcaagggaaccctttggagccaggagtagggtactacgtgtggccactttgggctgatgaaggaggcctcacactaggccaaacaaggaacaagacatgccctctttatgttatccgtgacccttca

SEQ ID NO: 45520 - DNA, 278 bp, Glycine max
  Clone ID: 701041084H1
caaatcttagtcttcttagtttcctcactcacacaaatggcaaagctaatccatttcctccttttccttttcatccaaacaatttcagcccaaacaccagcagcaccagcgggccccaccaacatcacccaagttctagagaaagcaggacaattcacaaccttcattaaactcctcaaagcttcacaaatagctgatagaatcaattcacagctgaacaactcaaaccaaggcctaaccgtgtttgcacccactgataatgcattctcaagcctcaa

SEQ ID NO: 45521 - DNA, 276 bp, Glycine max
  Clone ID: 701041085H1
gatgacctgaatgaaattgttcagcttgtgggcaaggatgctttagctgaaggagataagatcaccttagaaactgcaaagcttttgagagaggattatcttgctcaaaatgcctttacaccatatgacaaattctgccccttctacaagtctgtttggatgatgcgcaacattatccatttctacaatttggcaaatcaggcagtagagaggggagctggttcagatggtcagcagatatcttacacccttatcaagcatcgtatgggagatctg

SEQ ID NO: 45522 - DNA, 273 bp, Glycine max
  Clone ID: 701041086H1
gtccttttcttcccttcaacaaaacacaggggaagggaaagtattactagtagtaaggcacgaaaccccaaaacatgggtggtggtttcttgttaccattgccaaccctcttgctgtgtctctttgttgtgttaatttattattccctccaaacaaaagctgaggaatttgatgagtccttgttgttcaatggaaaaaacgtttccagtttcagcagtggcagacagcttggtgcaggaagatgcaacttgttccgtgggaaatgggtttatg

SEQ ID NO: 45523 - DNA, 276 bp, Glycine max
  Clone ID: 701041088H1
tccctcgagccgattcggctcgagctcactcaaactcgtggatcacagaactccacaacagttcttgcactgaggtttcacgatgtacgctggaacttgcacttggattgtctgtgtcagctttgcttctgcacttgcgtcccacaccaagtgcataatccaaaagcacttcgccacctcccaaaccctccaagctcatagcctcgacttcccttcattggccaccttcacctcttaaaagataaacttctccactatgcgatcatcgatctctcc

SEQ ID NO: 45524 - DNA, 272 bp, Glycine max
  Clone ID: 701041090H1
caatcaaattcttcgcgttgaacacaggggccaagattccttctcttgggttagggacttcgcaagctgaacctggtgttgtagctgaagctctcaccacaggcattcaggttggatacaggcatattgactgtgctagtgcgtataaggatcaagcagagattggttctgctcttaagaagctttttgatgatggtgtggtgaagcgtgaggacttatggatcacttccaaactctggtgttcagatcatgcaccagaagatgtgccaaaa

SEQ ID NO: 45525 - DNA, 272 bp, Glycine max
  Clone ID: 701041092H1
caagatcagggttgctacatgtttggtgctggtcaagttgtgaaagaagaacctcagaaaacggttcatcgcttctttgatgaatggccacacaaaggaagagaaggctcttggcttgatttggatgacaaatcttccacaacccaactttcaatttccatccccacatcttctcatgatttttcaactttcagttccagaacccaccatgatggttgagtgtaggtttccaataatgggtcctctgtacggaaatcaaaggccaaaaatgt

SEQ ID NO: 45526 - DNA, 274 bp, Glycine max
  Clone ID: 701041093H1
gtcccgttgtcatccctgtattactcacacacacacaactgctatctgctctctccaaaccgtgcagcaattcctctcttccctctatccacccctcccatggcggaaccaatggctgtcgactccaatcccgaatccggtctcgacttcgagtcccctttcgcctgggggaagaagcgaggcatgggaggcaaaaagaaggacgtgcagttctacgagtcattctccttcgacggtgccgagtacgccataaacgacaccgtatgcctccaga

SEQ ID NO: 45527 - DNA, 265 bp, Glycine max
  Clone ID: 701041095H1
ctggctttcatcttctaaattggttgttaaacctgacatgttatttcgaaagcgtggcaaaagtggtttggttgccttgaatttggattttgcacaagttgtttcatttgtgaaggagcgtcttggaaaagaggttgagatgagtggatgcaaaggacccataacaactttcattgttgaacctttcatcccacacaatgaagagtattgacttaacattgtctccgagagacttggggacagtataagcttttcagactgtgga

SEQ ID NO: 45528 - DNA, 268 bp, Glycine max
  Clone ID: 701041096H1
gcctcgcaatgcgcctcttctccaccaccaccacagccaccgcgttcgccgttcatttacccaaaccctcatcactctccctctcatcgcgttcattcctcttccctctctcccatgccatcgtccctccctccacccgcgtcgccggaatccggtgccgcgttaaccgcgccggagactcggcgtactcaccgctgaactcggggtcgtcgtcttcgtcgttcagcgatcgcccctccacggagatggcgccgctcttccccggctg

SEQ ID NO: 45529 - DNA, 254 bp, Glycine max
  Clone ID: 701041101H1
aaactccgcaaatactggggcggcaatgacgaagaccctttggcctctgatgactatatgtggaacaaggagtttatgggtcgcttccaaaagttgattgaggaacccaatgctcaaccccctcctgcaaaggaagagccttcagggtttctaagcttaaatagagtcatgagcctggacagtttggaagttgatttgagcaaagaactcgcagctcctgtaaatcataatgcacacctgcaaattgatgcaga

SEQ ID NO: 45530 - DNA, 249 bp, Glycine max
  Clone ID: 701041102H1
gaagtctgatctttaccttttacaaggctcagggttattcagttgggtcatctcttgtggaggaagacaagcttagccttgcaactacacttcttgaaaaggccaaggctaaaggggtttctttgttgcttccaactgatgttgtcatagcagacaagtttgctgctgatgctaacagcaagactgtgccggcatcaagcatcccagatgggtggatggggttggatattggtcctgattccatcaaga

SEQ ID NO: 45531 - DNA, 276 bp, Glycine max
  Clone ID: 701041069H1
gcaatggcaaagtgccggacactgttccagcttaatcttgtattataatgtatatctcatgattgggcaagacttaagctttatgtattctcctgctaagatacatactcctggcccaatttaatagtaatactaataattaaaactctggggatgcacaagcacagatacattgcctctctctgtatatatggcgttagacagcctcttgcacttatggtgtcattgtgcatgccatctctctgtaatataatgaatgtagctgtgctcaggcag

SEQ ID NO: 45532 - DNA, 282 bp, Glycine max
  Clone ID: 701041041H1
ttttcttatctgtgtttttcttcgaattgcatgacgtgggtttttctagggtttggaggctatgccgaaaacgggttaaataagctcggaaaatgattctcacaaagcagtaccgatgcatacactcagctagttgtcaatgtactaaagggcatttaagtgaagatatgatattcttagtatttcataatttgaattggaatcccaagctaattgcaactctatcatgtgtgtgcaaatggtttgatgatcttgccaagcgagttctatggaaagagtttt

SEQ ID NO: 45533 - DNA, 244 bp, Glycine max
  Clone ID: 701041042H1
caagaagaaaaataccaataataacaacaacaataataataaatatattattgttgttattgttattaaaaattatgacggaagtgcttcagttgccttcatcctcaagctgttcgcgtcggccatgtggtggtctcacacccactgatgggccttgccaattccccttattaacgctcccactgtggaagaacaacaaagtgtggaaattgaagaagtagaagagaaagacagggaaagggag

SEQ ID NO: 45534 - DNA, 278 bp, Glycine max
  Clone ID: 701041043H1
cacgttttcatgtgaaaatggattgagaatctctttctattgtcatattttctttcgggtcaattagggttttttgctggcgtgcttctgaaagcttggatctggatatcttctttgcttctttgctatggaagactcggattcagttgctacattgatagattctactacttctaagatacaacagctgcagaaggcatttgctgaacttgaaagttatcgggctgttactcttaacttgaaatggaaagaactagaggaacatttccatggtcttg

SEQ ID NO: 45535 - DNA, 279 bp, Glycine max
  Clone ID: 701041044H1
caaaatttaataaagtgctgagggtttctgctaacgtgaacaatgcaggtaggaccaagtggccaggatatgcttgcaaattagtttacagctatttttttctttaaagtgtcagagctcttgccattttttctctttaccttaataatatattgacagagttttcaatttttgccattttttaaatataacgaatgcaatttgcaattatatatcaggagttacaaaaggtcatggccttttttaccacagaatcatttacaggagttttattttatt

SEQ ID NO: 45536 - DNA, 279 bp, Glycine max
  Clone ID: 701041045H1
tcgggaagccggctattcaggcatcatggctaaggttttggctcagtctattaatgtccctggtctattggctgagcataagcatcgtcagcattaggcatcaggaatattattcagatagaccataatgatgagtgctttacgaacaaatggattatgaatgtcaggtatctcaaggcttcgtactttcaatcctttggatactatgttgagatctggaatagatagtcattctacggtctccattgcaacttcttcacggcgcgcttgacctaccaa

SEQ ID NO: 45537 - DNA, 279 bp, Glycine max
  Clone ID: 701041046H1
ctcttccttcagcaactacgatcttcgatagtgatttatcagattcttcctttgcggtcgaatcatggagcccatggacatcgttggtaaatcaaaggaagacgcttcgcttcctaaagcaacaatgaccaaaattattaaagagatgttacccccagatgtacgtgttgcaagagatgcccaagatctattgattgagtgttgtgtagagcttataaaccttgtctcgtcagaatccaatgaagtctgtaatagagaggataaacggacaattgcacc

SEQ ID NO: 45538 - DNA, 276 bp, Glycine max
  Clone ID: 701041047H1
ctgatctctctgctgttgtgttttgttaatctcattcagacaatcacagttatactctctctctctcactttgatcactgatctcatctcaattttcagatatgtcgacatctgataagccagaagaggtggaaaggggtagcaaggatgaaaagcacaaggcagatgatcaagaggaggggaagggtggattcattgagaaggtgaaggatttcattcatgacattggtgagaagattgaggaagctattgggtttgggaagccgagtgccgatg

SEQ ID NO: 45539 - DNA, 275 bp, Glycine max
  Clone ID: 701041048H1
acctttctcctaaaacatctccagtgggttcttcttcttctattacaacaacgtcgtccaagaccatgaccatggccatggccacgatcctgctcctgttcacggtcttcgcggtttcatcggccctagacatgtcgataatctcgtacgacaacgcccacgccgccacgtcgcgcagcgagagcgagctgatgtccatgtacgagcagtggctagtaaagcacggcaaggtgtacaacgcgctcggagagaaggagcagaggttccagatcttc

SEQ ID NO: 45540 - DNA, 283 bp, Glycine max
  Clone ID: 701041050H1
ctgcgcttcacgatgggtgcttacaactatgtttcggagctatggcgcaataagcagtcttatgttatgagattcttgcacccagtgaggtcgttggaataccgccagagacctactattgtccggttgacaaggtctactcgcccagacaaggctcgcggattgggtttcaaggctacgcagggttatgtgaattcacgcattcgtgtacgaaagggttgtcggaagagaccatctccctaaggcattgtacgtggtaatccctccaaccaaggtgttactc

SEQ ID NO: 45541 - DNA, 283 bp, Glycine max
  Clone ID: 701041051H1
tcgatcattgcttgagatctgcccttgttatgctacttctggattcttcacagattatgaacattgaaaaaaccaccactcttcaaagccatgatatagcaaaagatatagaaatccttcaagtagttgatgcctatgttcatgaattgactgtctgagagaaggcttgttcaacgttctcaagagatgcaaagatggagaagaaaagaaagattgtgcagtatagggagaggctggataggactcatgactcacctgatcttgcaaatgatgagatgctcaa

SEQ ID NO: 45542 - DNA, 277 bp, Glycine max
  Clone ID: 701041052H1
gtctcttccattcacaaccttaaacctttctttcttgtaaactttattgattgattctgagaatagaactacgagggtatagacatggctagcgcaattgcagcttcttttttggttctgcttctggctttccccactgtatttggagctgaccatgaagttggtgacactagtggatgggccctcggagttaattacaacacctgggcctctgggaaaactttcacagttggtgacactttggtgttcaagtatgactccactcatcaagttgatg

SEQ ID NO: 45543 - DNA, 280 bp, Glycine max
  Clone ID: 701041053H1
ctcttcttcttcctcgcatctcttttgcctctttctttctcaaaccctttttcttattcctcgggatccagttcaagaaccacgtgtctcgttgcttctgttctatgtttataagtaacttgagttccttctatctcttctctttttgcattgaaatattgtgtctgatttggttaagttgggagatatatatactgtttagttaacttgcatcatatctcagtgtcaaagaccagttcatcatttttctgagacattaagggattttaatttgcatctt

SEQ ID NO: 45544 - DNA, 280 bp, Glycine max
  Clone ID: 701041054H1
ctctttctccgagaacaacaaaaaaaccgtgattcggtcttcgctaccgaataaaccacaaaaccaccaaacgagaagaggagtgaacgaagatggggttgtcgttcacgaagctgttcatcaggttgtttgccaatatggaaatgaggattctgatggaaggtctcgatgctgctggtaagacaaccatcttgtacaagctcaagcttggggaaatcgccaccaccatccccaccatcggatttaatgttgagactgtggagtccaaaaacatcagctt

SEQ ID NO: 45545 - DNA, 279 bp, Glycine max
  Clone ID: 701041056H1
ctccacgtggctaacagaagaaaaggtttcttgaactacatgcttcttctaagactgactccgacactagctaacacatttagtaattgtgcttcaccaattgtggatgtgccttatcatattttcttcttggcaactgttattggactaatacctgctgcttatgtcactgtcaaggtacgtagctatcagcataataatttttatttagaaatgttattgatattttataataaaaagatagatacgatagcgaaaagtgagatgtaattactgatg

SEQ ID NO: 45546 - DNA, 280 bp, Glycine max
  Clone ID: 701041057H1
gttttctacgattattcatagtgaggcaatagtagcagcaattcacactggtctttgcttctcgttactcatttctcacctaactttctattcttctcagtctcagatcagaaccttggccatggcagcgttccagaagatcaacgtcgccaaccccatcgtcgagatggacggagatgaaatgactagggttatctggaagtcaatcaaggacaagctcattttgcccttcttggagttggacatcaagtattatgacttaggccttccttaccgtgat

SEQ ID NO: 45547 - DNA, 276 bp, Glycine max
  Clone ID: 701041059H1
caacagtctctgatgagctgaaggtagtttgcagccaaaaaagatattgaagcaagcactgtagaaggaagatacaggtaggaaattcacaagagtccagctttttgaattctgaagcaaaatcactattgaagttttacacacctcagtgtgttttgagctttaattggtattgaactctgttctgcttcctggtattttctgcctctgctggctctacttcaggactggaccatagtccaacatatctgctccaatagtttagtatatcatcaa

SEQ ID NO: 45548 - DNA, 278 bp, Glycine max
  Clone ID: 701041060H1
cgacaaactccaaacaccaaccttttcttgtcgttttattaccataataataataattattgttgttgtttctgagccattcccagtgtttctttatggaagaacgttcccgacacggcggcgaaccggtccgagccggggctcagggcggagatcgacacatcggcgccgttcgaatcggtgagggaagccgtcacgcgattcggtggagttgggtattggaaacccattctcaacggtcttagtaacaagcattttgctgccactgagccacatca

SEQ ID NO: 45549 - DNA, 278 bp, Glycine max
  Clone ID: 701041061H1
agcgcgtatattcaagtggagatgtctatccaagctcttctaatcttcccaatggagaatatattttacagttatatttgaggcatgacaatgtgcagattttggaaaagatgaggcatttggtgttattcattgagcgaaatttggaagagaaggatgtcattcggctaagctttttctctcaacccgatggctcgctgatgggaaatggttcctttaagtcctcatcactagttccaggtataaaagaaggaatatatcttggtccaccaccaaaa

SEQ ID NO: 45550 - DNA, 239 bp, Glycine max
  unsure (1)..(239): unsure at all n locations
  Clone ID: 701041063H1
gtaaatcacaaccaccgtgacgtgcttattcttccgccctcggtggaggctctgatcgagagcatctgccgcgaccagatcaagcctccgctcgattacagcacccgccaccgtctcaaactacagggcgaggaacaatcccttcgcattctcaacaaaatcgccgccacccgtatccgattatctttcgcaggcttcgtcaaccacatgctcgccgacatcaancaccaacacaataa

SEQ ID NO: 45551 - DNA, 266 bp, Glycine max
  Clone ID: 701041064H1
ctcataaagttgccagacttaaagcaaaaaccaaattgagagagcacatgatgaagccatcgatgctcagatctcttcactctgccgccactcgctgcgcctcccacctctcccgccgtggctacgcctccgagccggtgccggagcgcaaggtggccgttctaggtgccgccggcgggatcgggcaacccctctcccttctcatgaagctcaaccccctcgtttccagcctctacctctacgatatcgccggaactcccggtgtc

SEQ ID NO: 45552 - DNA, 214 bp, Glycine max
  Clone ID: 701041066H1
caaagaaggcgtcttcataaacgcctttcttctccgtttccgtttcctcgttcgaattcgcgttttgatctgcgaacatgagagagtgcatctcgatccacattggtcaggctggtatccaggtcggaaatgcttgctgggagctctactgcctcgagcacggcatcgggcccgatgggcaaatgccaagtgtacagacagttggcggtggtga

SEQ ID NO: 45553 - DNA, 271 bp, Glycine max
  Clone ID: 701041068H1
caagaagtgttggttgttaaagacattatagagtggtggattggtagaaagacgcttgatcagcatcctcttgtggctttgggtgcttcctctggagggtatttcgtgtctgtgcttgccaccgccatgaagtttagtagtactgtgctcatgattgctgaggggatgcttgagcacattgatgttaaaggggactacccgccgcacctttttgttcacatgcccaaagatctttataggcagcagacaatagatgaatatgtggaggttt

SEQ ID NO: 45554 - DNA, 281 bp, Glycine max
  Clone ID: 701041040H1
cctcactctggctttgccttcaccttcacttctacgccaaatcccaatctcaatcccgaaaaccatttcactgatcgcctacctctccccctaactccaacaatggtccgacacccttaaaaaatcaaaacctcaaaaaccaaaaaacatcacaccatgtgttccttccctcacaatgtctctactacccatccttgtctttccaatcattatttgttgctgctccgcctccttgtagggtcggagcaatgcgacgacaatctacggggtcctgagcgagc

SEQ ID NO: 45555 - DNA, 279 bp, Glycine max
  Clone ID: 701041013H1
gaaagctacctagagcttgcacctattggtatcttctacaatatcctctcatagtgctcttcttcttcttcattctcattatcaagatgtctttgctttcggatctcatcaacctcaatctctcagaatccacagaaaagatcgttgctgagtacatatgggttggtggatctggtatggacctcagaagcaaagccaggactcttcctgggccagtgagtgaccctgcaaagcttccaaagtggaactacgatggctctagcacagaccaagctccag

SEQ ID NO: 45556 - DNA, 281 bp, Glycine max
  Clone ID: 701041015H1
gaacgctgctgccgaaacccttccggaaccctaaggtaagtgagtaatcagtggttgagaatggtggcgaaggcgaagggtagaaaggaggaggtggttacccgtgagtacaccattaacctccacaagcgcctccatggctgcacatttaagaagaaagctcctaaagctattaaggagataaggaaatttgcccaaaaggccatggggaccaatgatgtgagggtggatgtgaagttgaacaagtttgtctggagccagggaatcaggagtgttccaag

SEQ ID NO: 45557 - DNA, 264 bp, Glycine max
  Clone ID: 701041018H1
tttccctttctctctctcattctcttctccatcgcgcgtaagaaacacattttagttgctactaatgggaactgttgaagctgcaaacaaggatgcaaatggaagtctcctagagaaaaatccttcagttgtttttgtgttaggtggcccaggaagtggaaagggtacccaatgtgcaaatattgtccaaaattttgggtatactcatctcagcgctggtgatcttctgcgagcagaaatctaatctggttctgaaaatggtac

SEQ ID NO: 45558 - DNA, 288 bp, Glycine max
  Clone ID: 701041019H1
ggcttcttcactgggtcgaagaagaacccacgctcccaaatcttcctccaccctaaacgacgacgtttcctgcgaggactgcggcgacggccactctccttcgaagcttcttctctgcgacaaatgcgaccgtggctaccacctcttctgcctccgtcccattcttccctctgtccccaaaggctcttggttctgcccctcttgctccaatcacaaacctaagtgtttccctcttgtgcagaccaaaatcattgacttctttcgaatccaacgctcgcccgaggcatt

SEQ ID NO: 45559 - DNA, 285 bp, Glycine max
  Clone ID: 701041020H1
agcaaaaggaaagaatatcaacaaggtaaagtagattccttactagacatggcgttgaaggacacattctacatatctcatggatcaccaactttgtccatagatgaatccattcaggccaggaagttccttcagtcatggaagaaggacgtgtttcctcaaagaccctcttcaattcttgtcatctctggtcattgggaaaccgcagttcccacggtcaacgtcgttgactccatcaacgacaccatctacgatttctatggcttccccaaacaaatgtaccag

SEQ ID NO: 45560 - DNA, 282 bp, Glycine max
  Clone ID: 701041021H1
ttctaatcctgaaggtgaggcaacaagcagaatcttgctctgttcaagtgctttgtcctgttaaatgtaatggaatgtggatggttttatctgtcaagaagcaacgatgtcttttcaacagtgttcaagaattggcagctcaattatgtaaaagtaatcttttgatctatacaactggaaagtgttttcttttatcataaaacgcttagcccttgcatctcttgataatttcttagaaactgtcattaaaatgctagttatttgaaaaaagaaaaagattta

SEQ ID NO: 45561 - DNA, 264 bp, Glycine max
  Clone ID: 701041024H1
gtatgaccctagtgctgttcggaacgataccccgcatttactcactagggggtcaaacaatctaatgcccacgagctcatacatcacgtgactgttgctgaacaggagtgacattgctaaaagtggacctctcgagatataggggcagtctaaccggctttatgggatcgagcacatgctctaggacattatgtacgcgcttaagatggggcttgaaccgattcctgggcatagcgggcttggaggcgcttactatttcagaaa

SEQ ID NO: 45562 - DNA, 284 bp, Glycine max
  Clone ID: 701041025H1
cggcttcttcaccagcaaagcagggattcgaatgcaatgagctccaatgattctaacatggatatgcatgcagactagccttgttggtttattaattgggaattcttaactcatcagccttctgcaacagctacaaaagaagccaacaacaaccttcggaatttcgtatctgggtttgctcattggatcctgcaagacatgacaggagggtggaaccaattctgttaaagttttactatgcttatgtcaaccgagcgattggtttggggtctcaagtggttttt

SEQ ID NO: 45563 - DNA, 281 bp, Glycine max
  Clone ID: 701041026H1
cagaatgctactgggcccaaatcagggttgtttgttccagaagtgccatttgaagtccttgtgcgaaggcaaatatcacgtctattggatccaagtcttcaatgtgccaggtttatatatgatgaattaataaagatcagccatcgctgtatggtaaatgtactgcagcgattccctttcttgcggaagcgcatggatgaagttatagggaactttctacgagaaggccttgaaccctcagagaacatgattgcgcacctcatagaaatggagatggacta

SEQ ID NO: 45564 - DNA, 281 bp, Glycine max
  Clone ID: 701041027H1
caaagacttgagatctcagattacaccctttcttcctttgttttctcattcctgtcctttctcagacaacaccatctctctctctctttccctttttagggtttttgtaatgggtctcggtaacgacgaagaagaggataacaataacaatgataaggttgtggatgacggagatgttggaggaggaaagtctttcggttcagtgtcgtgttccatttgcctcgaggttgttgccgataatggggatagatcctggtctaagcttcaatgcggtcatcaat

SEQ ID NO: 45565 - DNA, 284 bp, Glycine max
  Clone ID: 701041028H1
ctatagaagagccttccatatatagcctcccaaaaaaatgaagagtactacctctttggctctctttctactttgtgccctaacttcatcatatcagccttcagccaccgctgatattgtattcgacaccgaaggcaatcctattcgaaacggcggcacatactatgtgttgccagttataagaggaaagggcggcggaatagaatttgccaaaaccgaaacagaaacatgccctctcactgttgtgcaatctccctttgaggtctcacagggtctaccactga

SEQ ID NO: 45566 - DNA, 280 bp, Glycine max
  Clone ID: 701041029H1
gattgctagaatggaatttcgatgctcagtcatctcttttaccattctcttctctcttgctcttgcaggagagagccatgtccatgcatcgctacctgaggaagattattgggaagctgtttggccaaacactcccattcccactgcactgcgagagcttctaaagcctctccctgcaggacttgaaatcgatgaactccctaagcaaattgatgatacacagtacccaaaaacattcttctataaagaagaccttcatccaggcaaaacaatgaaagta

SEQ ID NO: 45567 - DNA, 276 bp, Glycine max
  Clone ID: 701041030H1
ctttcattgatttctccctcttcgctctctctcagtgaccagagacagatgatgatggagatggcgaacgaaacgctgtcgttgcggcactcgcggcgttggtgctactcgcggcgagtgtggcggtggatgctcaggagaactcggacgtgcagacgctggtgaagtacaagcacgggaagaagtactgcgacaaaggatgggaatgtaagggctggtcaatttactgttgtaacctcaccattaccgattatttccagacctaccagttcgaga

SEQ ID NO: 45568 - DNA, 247 bp, Glycine max
  Clone ID: 701041031H1
gaaacaaagaagtgaaaataacagcaaaaagtagcagctgctgcagctcccccgaagcttatctcagcagcagatactcaaccctgtttgagtagccgagaataacaccaatgggagaggaggaaaagaaaccagaggaacaacccaaggcagaggagaaaaaaccagaggaagagaagaagacagaagaagcagcagcagcggaaaaaccaagcgaagagacaaaaccggaacaagagtcgaaaga

SEQ ID NO: 45569 - DNA, 210 bp, Glycine max
  Clone ID: 701041033H1
tacaagataacgattttgacttgaatgcattggaaagccttaaaaatcttcccgcttctcagccacgtcagtcattcacctcatcggatcactctccgagacaaccgaggcaaatcaccaccatcaatgcctccgggcatctaaccgaaccttccttggaagcttcgcatattgacctatctcctcaacctcctgatcaacgcctctcgc

SEQ ID NO: 45570 - DNA, 180 bp, Glycine max
  Clone ID: 701041034H1
acatcggcatggatttcgacaacaacggggaattcgaaatcaccttcgacgaactcgacgaactcgacgacatattcatcccctccgacgccgaggatttcctcatacccgacgtcggtaactctaagtacgactccgcttcgccgccgatcgacgcacagaattccgattcgccggatt

SEQ ID NO: 45571 - DNA, 279 bp, Glycine max
  Clone ID: 701041035H1
caaatgactcaagcccagattcaaccagttaaacttggaacccaaggctttgaggtactattaactacattacttgctcttattttgataattgatacaattaatctcattctaggtttcaaaattgggattcggatgtatgggccttactggagcgtacaatgaccctctccaagaacaggatggcatatctgttatcaagtatgcgttcagtaagggaatcacattttttgatactgcggatgtttatggagccaatgctaatgaacttttggttgg

SEQ ID NO: 45572 - DNA, 282 bp, Glycine max
  Clone ID: 701041036H1
cgatgtgtcattgagacagaagaagaagacgaaattggagggggtgtgtgatcgggtcctcaggtgaagatctgcggctgttggtgtctcttttcttttctccgagttccaaagatgagcgcttctaggttcatcaagtgcgtcactgtttgggatggtgctgtgggcaaaacctgtatgcttatttcctccaccagcaacacttttcccaccgattatgtgccgactgtttttgacaatttcagcgcaaatgtggttgtcaatgggagcattgtgaatctg

SEQ ID NO: 45573 - DNA, 283 bp, Glycine max
  Clone ID: 701041038H1
ctaatcctcaaaagcggggaaaggaagattggattctgggactttgacgttgtttcaattgtggtcgtgtcggtgcccgatctcaaacgacgatgtcatctttatatagaggagaatccaggaggtacaacaataaaccaagaggacgtcataatttgacaacgcagaagaagcaggagattaaggaagcctttgagttatttgatactgatggctcaggaactattgatgccaaagagctgaatgttgccatgagggcccttggatttgagatgacagaaga

SEQ ID NO: 45574 - DNA, 282 bp, Glycine max
  Clone ID: 701041039H1
acagtactaggtgatacctaaatggtaagctgacctaagcgaaaatttgttccattctttccaatttcttaaaagaagttagctcacagcagatccatacaaacatgatgactccaaacttgaatctggaaccagaaggtggtttaaaagtcctcagccaagtaggtttcgataaatcaatacaagagacatctcatgatcttaccaaggacagcactgctacttcctcctgtcttaccaaggctgatcctgacccaggttctgtttcccttgacttgtccc

SEQ ID NO: 45575 - DNA, 284 bp, Glycine max
  Clone ID: 701041012H1
ccccgttatagatctttctccctccctctccggcgagtgggacccacttctctgcgccgaggtcagccgcagcctcagggaaaccggcgcgctcctcgtcaaggaccctcgctgcaccgtcgaggacaacgatcgcttcatcgacatgatggagcgctacttctcaaaaccccgcgacttcaaacaccgccatgagagaccccacttgcattaccaggttggggttacaccagagaaagtagaagttccaagaagcttggttgatgacgaaatgcaggagaaac

SEQ ID NO: 45576 - DNA, 264 bp, Glycine max
  Clone ID: 701040983H1
gcttcttgcaagaagtttctgagcttttatatcctctatatatagttctctggcaattaaggtctcatccaaataagcactaatgggtatccagagttacttcaaggctttgattatttgccttatagcactaattggatcaactcaagctcaattgcagcttggtatctatgccaaaagttgtccaaaggctgagcaaataattctgcaatacgttgttgagcatatccagaacgctccatcactagcagctgcactcataag

SEQ ID NO: 45577 - DNA, 263 bp, Glycine max
  Clone ID: 701040984H1
aatggctctatccctgatgctcttcagattttcccgaattcttcctttgagggtaactctctatgtggattacctctagagtcatgctctgtagtctcctctacacctccatcatctcctgtctcacgatccactcctgcaagacacatctccaaaagtatactgagcaaggcagctatcatcgcagttgcagtaggtgggggtgtgctattgcttgtagtagctctcatcactgtgctgtgctgttcgaagaagcaagatga

SEQ ID NO: 45578 - DNA, 262 bp, Glycine max
  Clone ID: 701040985H1
ctcgagccggtgtacactgcatacgttagaaccggttcggtgatgaagggcggaacggactataagatcgggctgaagctgtacgacaagtacggctactacatctacattaaaaacctcgaagcatggggcggcttgatgggcaagggctacgactacttcgagcgcggcaacctcgacatcttcagcggaaggggaccctgtcttgacggacacgtctgtgccgataacgttacttctgacggatcgggttctcaccacg

SEQ ID NO: 45579 - DNA, 263 bp, Glycine max
  Clone ID: 701040986H1
gaaagagcccctctcttggaggctgagcgtgctggaagaggaaagagggatggtgcctcggaaggtcaagcctcagaccttgagcatggtgatgcagtgccggcggcaaatgtgggattctgtagggtgctttcacttgcaaaacctgaggctggaaagttggtgatcggtactgtggctctgttgattgcagccacatcaagtatcttagttcgaaaatttggtgggaagatcattgacattgtctctagggaaatgataac

SEQ ID NO: 45580 - DNA, 256 bp, Glycine max
  Clone ID: 701040987H1
ccctgagaagaagtgggtgtttttcttctttgctttcaatcaagtctcaaactttttttaagctcttgtggatttataaaactgtgaaaatgggtttctttctttttgtatggttttattgggttaagttgaatttttctattgcttctcaaaccataagaagaactgtgtgattgcaggtgttccttgttaagatctgtggtttggttttcgggaggaaacaaaaaaaggatagaaagaattagattattaagta

SEQ ID NO: 45581 - DNA, 263 bp, Glycine max
  Clone ID: 701040988H1
tgtagctgggatggccctccgcaacagtactactagagaagaggtggttgtgaagcttaagaagggagatgttataccagtacctattggaagtgtctcgtggtggttcaacgatggggactcagatcttgtcattgtttttcttggagaaacttcaaaggctcttattcctggcgaaattagttatttctttctaaccgggcttcaaggagttataggaggcttctctaatgagctcacaagcaaaatatatggtttggaca

SEQ ID NO: 45582 - DNA, 258 bp, Glycine max
  Clone ID: 701040989H1
ctttaggtgttcctgctcttccgttgacatacgttggtcacgttctggcagttgttggcagcgtcctggtcgtggtcttgggcgtcaatttcaggggtggcttggcttgggattctgataaaaaatccctcatcttcaacattcatccagttcttattgttactggcttactagttcatgggggtgaagctattataagttacaaagcttttcccctaaagaaggaagtgaagacattgatacacttgttttccatgc

SEQ ID NO: 45583 - DNA, 259 bp, Glycine max
  Clone ID: 701040990H1
caatttccaatcttaaaaaacaaaaagaagagctttgaggaggtgtaacataattcctcatgtggtgttgagttcacgttcacgcccatcccagtaaaggtggaacccccatggctgctacagcctctagctttggaactacatggtgtcttagaagagcagctcaggcttttgctatctctcattctcatattctccgcaacaatgttaaactctctttgcagaggaacttttgctctcatcttctctccgtttctac

SEQ ID NO: 45584 - DNA, 258 bp, Glycine max
  Clone ID: 701040991H1
catttgatcagattaatttattacatgttacttccatctctaaattaatctgatcaaatgcacaatataaactttcgagaacaagcacgtgttgagaaatgaaatgcttttaaagttaaggcgtatacagctttggagtaatattatgggaaattgcaactgaaaagataccttgggataatctcaactcaatgcaggtgattggagctgtaggattcatgaatcaacggctagagattccaaaaaatgttgatccac

SEQ ID NO: 45585 - DNA, 264 bp, Glycine max
  Clone ID: 701040992H1
aacaaaacgtacttcacttcgtgccttcagaaaccctaattcccaaatctcaaacgaaccatggaattcaccaagaagcgcaaaaccgaagagaacggcgacaccaccgattatccgccgcagcaatccaccgaagaatccccaatcgccgccgtagcccccgcccccctcgccgccgaagacatccgcaagatcctacaaccgttctcccaggagcagctcctcgacctccttcaatcggcatcgctccgccaccccgacgtc

SEQ ID NO: 45586 - DNA, 262 bp, Glycine max
  Clone ID: 701040993H1
ctgtgttcaatcttcaaagacttgaattcttcttacttaggttctgaatggctggaatttgctgtggtgttgtcggagaaggtgacactccggctccactcgagccaactactcgcccctccaggcgccggagtttggacatcttacccttaaaatacatcgctgacatggcggtgccgccgtcggatggttcacggaaacgtcccaagctggatctcagggaccgcgataacctagttcacaattgcgacggatccactgg

SEQ ID NO: 45587 - DNA, 265 bp, Glycine max
  Clone ID: 701040994H1
gccttggtcagcgttgcgccaagtactatgaagccggtgcacgttttgccaagtggcgtgctgtgctgaagattggtcccaacgagccatctgagctggctatccatgagaatgcctatggcttggccagatacgctgtcatatgccaggagaatcgcctggttcccattgttgagcctgagatccctgttgatggatctcatgacattcactagtgtgctgccgtcaccgagcgtgtccttgcagcatgctacaaggctttgaa

SEQ ID NO: 45588 - DNA, 267 bp, Glycine max
  Clone ID: 701040995H1
aaaaatggcacctgcaacactgtctctgtctctcctcctcctgttctcactcagcatcgccgtaaccgttagatcgagcgactacgactacgattgtgtgtacactgcatacgttagaaccggttcggtgttgaagggcggaacggactctaagatcgggctgaagctgtacgacaagtacggctactacatctacattaaaaacctcgaagcatggggcggcttgatgggcaaaggctacgactacttcgagcgcggcaacctcga

SEQ ID NO: 45589 - DNA, 271 bp, Glycine max
  Clone ID: 701040996H1
caggtaatctgttggcgatacctgctggaacactatcagagcaggcagcatggagctcatgctccgcgcatcaatggattccattccacgcgcagtcttcaccaattcctcttccttcgttcctttctgtacctacacggttcccgacgctagcaggcgtcgaaacggcaacaccggcagtcgttccactcacaaaatcactcctttgcgtaaggagaaacatcccaatgaacagaaattgaagctcgaccatcaaaaccaaaaccccttg

SEQ ID NO: 45590 - DNA, 289 bp, Glycine max
  Clone ID: 701041001H1
gttctgcatcatcacccacaagctcaatctcaccgttgggatcatcccttctcttaatgttgctgctggcttgttggggttcttctttgtgaggacctggactgggttgttgaccaagatgggatttttcaccaagccctttactaggcaagagaacactgttattcagacctgtgttgttgcttgctatggccttgccttcagtggggggtttggttcatccttgattgccatggatgagagaacatatgaactcataggccctgattaccctggtaatagagctgaa

SEQ ID NO: 45591 - DNA, 287 bp, Glycine max
  Clone ID: 701041002H1
tcgcaatacgtggattactattgaaaggtggagattatattgaaacactttctggaattaagacagttgcttttgataaaacgggcacaataacaagaggagagttcactgtgacagatttttctgtatctgtagatgacattagcattgaaactttactgtactgggtttcaagtgttgagagtaaatcaagtcatcctatggcagctgcactagtggaatatggaatgttgaattctgtcaagccaatccctgaaaatgtggagaatttcaaaattttccagggg

SEQ ID NO: 45592 - DNA, 289 bp, Glycine max
  Clone ID: 701041003H1
agaaggggtcatcagaaaaagaagggaaattgaagtataacatgaatgatttgttgccttatggcaaggttggatatgaagccttcctcatattccttggctatgtatatactggtaaactcaagccctctccaatggaggtgtctacttgtgttgacaatgtttgtgctcatgatgcgtgtagacctgccattaactttgctgttgagttaatgtatgcctcttccatttttcaaataccagagttggtatcacttttccagagacgtctacttaactttataggaaa

SEQ ID NO: 45593 - DNA, 289 bp, Glycine max
  Clone ID: 701041004H1
caaaaaagaaaaaagaaaaaagaaaagcactaaaaaaaatgaagaagggtttctcccttgtgctgctgattcttctgatccagtacaacaacgttgtcaacgccaacaacaacaaaaactgtgtcacagaggattgcctcatcggcaacaaggatttggaatcagagttctactttggatcccatgtggccagaatgctctacgatgtgagccaatctgtgagtggcaaaacaggcaataaaaataacaaagctgttaattgtccaaataagcaaggctaccgaagctg

SEQ ID NO: 45594 - DNA, 287 bp, Glycine max
  Clone ID: 701041005H1
tgtggctgatgtcaacacccagttgaagaacaaaaacatcactactgatatcaaagttgatacagattctaatctcttcacaactatcactgttaatgaacctgctcctggtctgaaggctatttttagcttcaaagttcctgaccaaaggtctggaaaggtggaagttcagtacttgcatgactatgctggaataagcaccagtgttgggttgacagcaaacccaattgtcaacttctctggtgttataggcactaatgttcttgctcttggtgctgatctttctt

SEQ ID NO: 45595 - DNA, 180 bp, Glycine max
  Clone ID: 701041008H1
tttctcacttctcagcactcagcagcgatatcagttgaagaaacagacacaaactcaagacgcagaagatgttgtgggtggacaattatcgtcccaaaaccctcgaccaggttatggtccacaccgacatcgctcgcacatctcaagaaattggtaacggaacaggattgcccccattta

SEQ ID NO: 45596 - DNA, 285 bp, Glycine max
  Clone ID: 701041009H1
ctatttctcagtctctgtgtttgcggctgaggattccgaacgagtgaccttcttcgtttctcgcaaagtttaagtaatcatgggtaacgaaaaggttcacatcaacattgtcgtcattggacatgtcgactctgggaagtcaactaccactggtcacttgatctacaagcttggaggtattgacaagcgtgtgattgagaggttcgagaaggaggctgccgagatgaacaagaggtcattcaagtatgcctgggtgctcgacaagctcaaagctgagcgtgaaag

SEQ ID NO: 45597 - DNA, 287 bp, Glycine max
  Clone ID: 701041010H1
ctctttttttctaccttacattccttctccaacaatggctctcgacgtttccactacttcttcctcttccagcagctgctgcagcttctagctccttcttctctcgtctcggatcttcctccgacgcaaaagctcctcaaatcggttcgtttcggtttccgattccgtcgcttgtttcgtctgttgttgtcaatgtaactcaacgacgctccttggtgaggccactcaacgccgaaccgcaacggaacgattctattgttcctcttgcagcaactatcgttgctcct

SEQ ID NO: 45598 - DNA, 282 bp, Glycine max
  Clone ID: 701041011H1
gggagccgtagcagcggaagctctagcttgggtagcgaatcacaatggcgagaggattaaagaagcatctgaagaggcttaatgccccaaagcattggatgcttgacaaactgggtggtgcatttgctcctaagccctcatctggaccacacaaatcgagggaatgcctgccactcatactcattttgcgaaaccggctgaagtatgctctaacataccgtgaagtcattgctattctgatgcagcgacatgtccttgttgatggcaaagtcaggactgaca

SEQ ID NO: 45599 - DNA, 209 bp, Glycine max
  Clone ID: 701040982H1
caaattagttcattctctttgcgcagttccctacctctccttacaagatgcagatcttcgtcaagaccctcaccggcaaagacatcacccttgaggtggaaagctctgacaccatcgacaacgtcaacgccaagatccaggacaaggaaggaattcaccaggatcagcaacgtctcatcttcgccggaaagcagctcgaggacggacgt

SEQ ID NO: 45600 - DNA, 258 bp, Glycine max
  Clone ID: 701040956H1
attctttcatcgcttcggatcttcaatctcatctccgatctcaaaatgcccgctgtttatggagctcgcttgaccaccttcgaagactccgagaaggagagtgaatacggttacgttcgcaaggtttcaggacccgtagtcgttgcggatggcatggctggtgctgctatgtatgtactcgtgcgtgttggtcatgataatctcattggtgaaattattcgtctcgaaggggattctgctaccatccaagtttatgag

SEQ ID NO: 45601 - DNA, 265 bp, Glycine max
  Clone ID: 701040957H1
gtttctttctctctcatgttgtagtatctcacttgtgtttttcattcgtttctgaaccacacaaacatcaccaccgaacaatgccgacggggttaccggcggcgaattccttagtggcgccggacgaagaggggtgggtgtgggggcagatcaaggcggaggcgcgccgcgacgccgagtcggagcctgctttggcgagctacctctactcgacgatcctctcgcactcgtcgctcgagcgttctctgtcttttcacctcggaaa

SEQ ID NO: 45602 - DNA, 265 bp, Glycine max
  Clone ID: 701040958H1
gttgatgttacaatggcacgaagcattcagctcctacgctggctccgcaagtgcgatcatcgacccttccaaggtcaaacaagtttcgtggaaaccgagagctttcgtttacgagggttttctgacggaattggaatgcgatcacttgatttccatcgccaaatcggagcttaagagatccgcggtggccgataatttgtccggcgagagcaagttgagcgaagtcagaacgagctccggcatgttcattcccaagaacaaggat

SEQ ID NO: 45603 - DNA, 263 bp, Glycine max
  Clone ID: 701040959H1
attgcggctagggttttagcgcacttcttctagatttaaggaagatgggtaaggaaaaggttcacatcagtattgtggtcattggccatgtcgactctgggaaatccactaccactggtcacctgatttacaagcttggaggcattgacaagcgtgttattgagaggtttgagaaggaagctgctgagatgaacaagaggtctttcaagtatgcctgggtgctggacaaacttaaggctgagcgtgaaagaggaatcaccatt

SEQ ID NO: 45604 - DNA, 266 bp, Glycine max
  Clone ID: 701040961H1
acccaattcaaaactctcactccgttagaagcaccaaatcctgatggcaccaaaggcagagaagaagccagcggagaagaagcccgcagaggagaagaagtccacggtgggagacaaggctccggcggagaagaagccaaaggccggaaagaagcttccgaagagggaggcgccggcgggaagggaagaagaagaagagaaacaagaagagcgtggagacatacaagatctacatcttcaaggttctgaagcaggttcaccctgac

SEQ ID NO: 45605 - DNA, 270 bp, Glycine max
  Clone ID: 701040962H1
attgtctttctctctttccgcggcctagatctgagcagtttggaaaccctaactgctctcaccaacgacatcaccactctctccgatcaactacctctttcgtcgccctaagtcatggcaggaattgcacccgagggatcacagtttgacgctcgtcaatatgataccaagatgaatgagctgcttacgtccgatggacaggatttcttcacatcctacgatgaggtttatgacagttttgatgctatgggcttgcaagagaatctcctg

SEQ ID NO: 45606 - DNA, 270 bp, Glycine max
  Clone ID: 701040963H1
ggaaattaagggagtggatattaagcacaagagtgagatcaagagcgatcaacatggtatcttggtgtcggcaaacagcattggtgtttaccacgaccacttctacatttaccatcttgaccttgacattgatggtgttgccaactcttttgagaagacaagtttgaagactgtaagagtgacagatggaagttcgaagaggaaaagctattggacaactgaggttgaaactgccaagactgaaaatgatgcaaagataatacttgggtt

SEQ ID NO: 45607 - DNA, 279 bp, Glycine max
  Clone ID: 701040964H1
ggtgactcagagaaatctattgaagaaaacaatgtgaatgaattgagaacaagcaacaaagcagaaatgacaagtgattcagtacagcaatctagtgagaattgttgtgctgacaaagatggtgctgaaccagctattagtattgttgaggacaagaatatcaaaataggtgagtgtcaggaaaatgctttgcagggtcatttttcaaatttgtcctgcaaaacatttttaggcagcaattttgacacggattccaatattgaatgctcagtgatgtat

SEQ ID NO: 45608 - DNA, 281 bp, Glycine max
  Clone ID: 701040965H1
gttcttccacccccgtaccgtctctgcctctctgcaatccacagccgaaaatgcctttcaagaggtacgttgagatcgggagggttgctcaaatcaactacggcaaggaatatggcaggctcgtcgtcatcgtcgacgtcattgaccagaacagagcacttgtcgatgcccctgatatggtgaggtcccaagtcaatttcaaaaggctttcccttaccgacatcaagattgacatcaagagggtccctaagaagaaagatcttgtcaaagccatggaggat

SEQ ID NO: 45609 - DNA, 275 bp, Glycine max
  Clone ID: 701040966H1
cttttattggtctctggagttacaccacagccacgccgctctaggactgctcattaggtagttttttatttagaggctaacatgagctttgctgcgccatcacttggttctgctggtggtagatctgctagaagagcatttgagtttgggagaacctatgttgtcaggcctaaaggtaaacaccaagcaactatagtctggttgcatggcctcggggataatggctccagttggtcccagctattagagacccttcctcttccaaatattaaatg

SEQ ID NO: 45610 - DNA, 268 bp, Glycine max
  Clone ID: 701040967H1
caaacataacttgcagtaatggcttcaatgaataaccaaaaagaaattgagctctttgagggccaatctcttctgtacatgcagctatatgggcacctaagacctatgtgtcttaagtgggctgttcaactaggtattccagacataatacagaaccatgccaaacccatttctctttctgacttggtctctactcttcaaattccaccagctaacgctgcttttgtgcagcggttcatgcgcttcttggcacacaatggaatctttg

SEQ ID NO: 45611 - DNA, 268 bp, Glycine max
  Clone ID: 701040968H1
aagacttttgctgcagtatacaggaaactttcgggcaaagatattgtgtttgagtatcctaccaccgaggcttaggttctatttgttagctttgcatttgtttctgaattatatatggtggatgctggttttgttaagttggctttaattctggattttctttaggggtggtacttatagaaaatactgtctcctggtatatcaatgtagaatttgatatattttcttataacaaatgatgcccgtatttctactatttatgtcagtg

SEQ ID NO: 45612 - DNA, 264 bp, Glycine max
  Clone ID: 701040969H1
ctccgccatttcccgagaaaatctcgccaggtttggtatgctagctaaatctcatgctttccaaataattctcatggtggatgtatctgcttttaacacatgcttccaaaggatgatagttggtattgatatttgattatcagttacatagcagactaaaaagaaagaattgaatcttgcactgctaatcagtgaaagttttcctacagttatttctttgaatctgatataccatctgcatcccttttttctcttctatgtgtg

SEQ ID NO: 45613 - DNA, 266 bp, Glycine max
  Clone ID: 701040970H1
caaattaatcaaacatggctagggttagtgctttgtttcactctttgctcttgatttcttcccttgtattggcttctcaaatccatgtttcctctgggaaactagtccctggactatcatggaattactatttgttgacatgtcccaagcttgagaggattataaggaagcatcttgaggatgtcttcgagaaggacagtggagtagctcctggcatacttcgactcttcttccatgactgctttcctaatggatgcgatgcgtct

SEQ ID NO: 45614 - DNA, 267 bp, Glycine max
  Clone ID: 701040971H1
gcttctttacttattctatagagagtgctttgtgttgttagtgagttcagtttccatggatcgtacgcttgttatgtcttcacctaatgtctgttcaaacactaatggtggaaatctcatgcgcaggaaacattccaccatggccaacaatatatactatccagcttcttgagtatcacaagcttcacaatgccagaggccaactctcatagaatgcaatcatttgaggtcacaacagtcaattttgaatcagcattacgaatgcat

SEQ ID NO: 45615 - DNA, 264 bp, Glycine max
  Clone ID: 701040972H1
tgccatttcaatcctcagtttctttcttcaacgtttccatcatacacagatcccaatcctctctcaagccctaatttcccctcatttccatggccacagaagagcccactgtcgcggtggaacccgctcccgaacctgcctccgccgatcctcccccggaggagaatgaggagaccaaacctgaagccaaggctaagaaaaccaaggagcccaaacctaaaaaggtttccagacctcgcaaccctcccactcatccttcctacg

SEQ ID NO: 45616 - DNA, 259 bp, Glycine max
  Clone ID: 701040973H1
taggttatagtcttcctctgcagtctccttctcttctattctccgtcaattcgtggctccgacgatgacgtggcgctgcacgcgaagaagctcatcagggtcctcgacttgtacccctgcgctgacgtcaacatcgttcccgatggtaattgtaccctcgaaacccgcaggatcgtctagaagtgcctgatgttccagaagatgttagattcggattacgaggctacgggatcatgataggaggaccacgctggctatt

SEQ ID NO: 45617 - DNA, 260 bp, Glycine max
  Clone ID: 701040974H1
caatattattgctataggcatggatgattcttccatacaaatatataatgtccgcgtagatgaggtaaaaagtaaacttaaaggccatactaaaagaataactggtcttgctttttctcatgtgttaaatgtgctagtttcatctggggcagatgctcagatttgtgtacggaatactgacggatgggaaaagcaaaagtctagattcttgcaacttcctgctgggaggactccaccagcacaagcagatacccgtgtac

SEQ ID NO: 45618 - DNA, 260 bp, Glycine max
  Clone ID: 701040975H1
gtctcatcacatctcgcgaatccaagccgaagggaagggggtttgataaaggttgacattgaaatttgaagccatggttcttgactccattctgacatctcctcgtctcaagtctccatctttcaggagacagtttaaaaaggatgaactgggtagttggtccacacttttccagaggcatcgcttcctcttatctgctcttgttctgctaactctcctctgcactgtttatctttactttgctgtcactttaggggcta

SEQ ID NO: 45619 - DNA, 260 bp, Glycine max
  Clone ID: 701040976H1
ctctctctcaccaaagccttcctagaacgaaaaaaaaaaagaagagcaattttccctcaccaaagaagaagaagcaaacaatggccgatcaacttaccgatgaacagatctccgagttcaaggaagccttcagcttgttcgacaaggacggcgatggttgcatcacaaccaaggagcttggaactgttatgcgttcattggggcaaaacccaactgaggcagagctccaggacatgatcaatgaagtggatcctgatggg

SEQ ID NO: 45620 - DNA, 111 bp, Glycine max
  Clone ID: 701040977H1
tacaatccctgcttcgttagagaatctagggtttccagctcccaaactcattcttcaccgtctaaacaaacgcaggaggcaacatggcatttcttgtttccacacaacata

SEQ ID NO: 45621 - DNA, 242 bp, Glycine max
  Clone ID: 701040978H1
cagatttgattcagattatgctttgtcttcttccatctccttgtgccaattaagatacaatatgacacagatactacgatgaagagaggggacgacgaagacaagtccgggggggcccatgttcccaaggctgcatgagaatgatagcagagcaaggaggtgcaatagcactaccagcgtgcaagacggctctttatgaacagttcagtattccatctcagaagttccatccacgccttctt

SEQ ID NO: 45622 - DNA, 270 bp, Glycine max
  Clone ID: 701040980H1
aaattattgtgtaatggcttgggtggctaatcatgcaacattaatcaagtgggaagatacatcctggaatttggcagggcaagagcatttaggacctctctgcacactgtatgtgtttttaataggggtattgaatttttattcccaccaacttctgaagctagagattcaatgtttgatgaggctttagctcatgcattaggtgctactgaattcttcacctggacatatcaattgtttagcttttgcccatataggtgctactaaatt

SEQ ID NO: 45623 - DNA, 251 bp, Glycine max
  Clone ID: 701040981H1
gtctcgctgttccaagatgggtgtggctgagaacattcccgatatggaggagggtaccttggagattggaatggaatacagaactgtatctggagttgctggaccattggtcattcttgacaaagttaagggacccaaatttcaagagattgttaatattcgtttaggagatggagctactcggcgtggacaagttctagaggttgatggcgaaaaggctgttgttcaggtatttgaaggccatctgggat

SEQ ID NO: 45624 - DNA, 269 bp, Glycine max
  Clone ID: 701040955H1
attctcactctcgtttaccaagagcgagatatctatttagatctctgaaaaacagagtttcatttcaattcagtcttattattagggtttgccgattgagagagaaagagaaatgggagaacgaaaaggaatcccaatggctttggggctcttggcgatgatcctcttcttcattgcatcctcttcctctcacctcgatcgcgcttccggtgacgccgacgacgcgatcttctacgagtcgttcgacgaggattttgatggacggtgga

SEQ ID NO: 45625 - DNA, 269 bp, Glycine max
  Clone ID: 701040929H1
tgcccatggacactatcaggacggtaatggtagcacctggtggtgaagccttgggaggtgtgattggtgccttccgccacatgatcaaaacagagggcttcttttctctttacaagggtttatcaccctccattatcagcatggcaccttcaggtgctgtctactatggtatttatgatattttaaagtcagcatatctgcattcacctgaaggaatgaaaagaatccaacacatgaaagaagagggtgaagagctgaatgcactggaa

SEQ ID NO: 45626 - DNA, 274 bp, Glycine max
  Clone ID: 701040930H1
acgactttgaccgagtcaaacgctggaaggccaaggattgggcccggcccatggccctcatttcccgcgacggctcctccgacctcgtcgaccaggccgtcgccatggcctttggtcagtgccgcagcaccaattatgtccgcattcaggcaaatgggtcaagtatggggcgatgtggacccaatgtggatacagattcaagtcccggcaatgtgaagatgctgataggaatagcagaggagatgttgaagcaggagaatgtagagtctgttct

SEQ ID NO: 45627 - DNA, 274 bp, Glycine max
  Clone ID: 701040931H1
cgtcgataagcaccgcgatgctaatgtctctggcgacgatgcctttgccagactctacgcctccgtcgacgccgacatcgaggccctacttcagaaagcagaaagtgcttccaaggagaaaggtaaggcatcagctgtagcgatcaatgcagagattcgtcgtactaaggctcggttgctggaggaggttcccaagttgcagagattagctgtgaaaaaggtaaaggggctttcatcacaagaatttgctgcccgtaatgatttggttcttgca

SEQ ID NO: 45628 - DNA, 282 bp, Glycine max
  Clone ID: 701040933H1
atttctccctcttcgctctctctcagtgaccagagacagatgatgatggagatggcgaacgaaacgctgtcgttgcggcactcgcggcgttggtgctactcgcggcgagtgtggcggtggatgctcaggagaactcggacgtgaagacgctggtgaagtacaagcacgggaagaagtactgcgacaaaggatgggaatgtaagggctggtcaatttactgttgtaacctcaccattaccgattatttccagacctaccagttcgagaatctgttctccaagc

SEQ ID NO: 45629 - DNA, 270 bp, Glycine max
  unsure (1)..(270): unsure at all n locations
  Clone ID: 701040934H1
atctctctctcagttctcaaattccacacgagatgagaaatgangccnacattctagggaagcgtaacccaaaattccattgccagatttattagagatcannacagaacaggagaaagcagcaagattccttgtataccgctcttggtgtcatatcccctaaatgtaattttacacactcgctggttataggaaaaagttgagatagatggaaggtaatagcagctcggaggggatggtcgatgatttcttcgagcagatcatagcagt

SEQ ID NO: 45630 - DNA, 277 bp, Glycine max
  Clone ID: 701040935H1
aggacataaaatattattgtcctttgacttgtttcatcaattatagcaaaaatgagaacccattttcactctctcccattgatttttttgttcaccctttcccttctattgggtaaaacccgacccgaccctgatccacttcaagattattgtgtagcagatagcaaaagtgaatttttcattaatggggtgccttgcattgacccagataaagtttcctcctcccattttgtcacatctgctttatcaaaaactggcaacactagcaaccaatttg

SEQ ID NO: 45631 - DNA, 276 bp, Glycine max
  Clone ID: 701040936H1
cagctttcccccttttttctctaaactctgatttcaatacccgaaacttaaaactacgatattttcctcagctgtcgtttattccctttccgattctccaacgacatcccttcaacttcgtgtttaaactcctacttgctgcgctgttaatatattctttattcttttttttcctcccgtttctagcttgatccctcacacagagctcaaaagttgttccaattccccaagaattcgaacacgagattagttcctagctctctctgttcgagttct

SEQ ID NO: 45632 - DNA, 273 bp, Glycine max
  Clone ID: 701040937H1
ctcttagatttagctgtttccaatcgtttcgaccaaaacccattaaccccttttgcagaaaagcaagattgtgctctctgcaagggtcaacgagtgtgaaaagcagaaaaagtttggtgctttgtgctaccaacatgactatagcagaggatagtttgatgcaggtggtggaggatgaagagggtcctcctgattatgctttgcttgatcctgaggacaattctaggcctcgtagaattgctctcttcgttgagccttctccttttgcatatg

SEQ ID NO: 45633 - DNA, 273 bp, Glycine max
  Clone ID: 701040939H1
cttacaaaagtttgttttcaaagtgtgttttgtttcccaaatcctacctcttgtgaccagaacccttcctcctctttcttttgaaacctctttttttctattccccaaccaaacaagcaaacgctactcactcatcatcactgagatcatggctcctaatatcaccactgtcaaaaccaccatcaccgacgctcaagccaaggtcgccaccgatcatggtcgtgcctacgtcaccttcctcgccggaaacggtgactatgtgaaaggtgtcgt

SEQ ID NO: 45634 - DNA, 271 bp, Glycine max
  Clone ID: 701040940H1
agaggagacaggggtacgccgttcaaagctagatgcggtggccgtggtggccgcggaggaggcaggggtggtggccgtggcggcggcataggtggaatgaagggaggtagcaatgttgtggttcagccccataggcatgatggcattgtcattgctaagggtaaagaagatgctcttgttactaagaatcttgtgcctggtgaagctgtttacaacgagataaggattaccgttcagaacgaagacagttccagagatgagtacagagttt

SEQ ID NO: 45635 - DNA, 269 bp, Glycine max
  Clone ID: 701040941H1
agatagagagatagagagatagaggagaagatgaacggtggtgaatcttacggtgctattgagacacaatacataaggaggcatcacaaacatgaaccaagggaaaaccagtgcacctctgcacttgttaaacacataagagctcctgttcaccttgtgtggtcgctggtgagaagatttgatcaacctcagaaatataaaccatttgttagcaggtgcatcatgcaaggggatcttggcatcggaagtgttcgagaagtgaatgttaa

SEQ ID NO: 45636 - DNA, 265 bp, Glycine max
  Clone ID: 701040942H1
gacacattatggccacaccagcatccatcaccaaagtcactgtggagttccttcaattccccgcggtggtgatacctcatggctctaccggatcctatttacttagcggcgcaagggtgagatggtagaataatgacgaagaatttgtaaagtacacgggcataggtgattatttcgaagacaaggccgtgtcatcactcggtgccaaatggaatggcaaaagtgcagctgaattgctggactcacttgacttctacagagatat

SEQ ID NO: 45637 - DNA, 266 bp, Glycine max
  Clone ID: 701040943H1
ctcgagccgctagaagtggcaagagaagcttcaagtcacattcatctaccctaccttaacactaaccaaatcccaaatattaaccccccctttttttaatgttgatgtaaggaactaatttgaagggtggtggtgattaggttattagcccttagggtttataaatgttgagtacctctacttattctgtcttcacccgttcctttctccccagtccaattaagggtatcccccgaccagctacacttcgaccttttcctgggatc

SEQ ID NO: 45638 - DNA, 264 bp, Glycine max
  Clone ID: 701040944H1
gtttatgctaagattagtctgaccagtaatcctgagaccaccatgtctaccaaaaccatcaatggaggaggaaggaaccctgttttcaacgagaatcttcgtattgatgttaggactgttgatgcatctctcaagtgtgagatatggatgcttagcagggtgaagaactaccttgaagaccagttgcttggttttgctttggtacccttgtctgaagtactggtccagaatgggaaacttgagaaagagttctctctttcttca

SEQ ID NO: 45639 - DNA, 267 bp, Glycine max
  Clone ID: 701040946H1
caggtacaaaagatagagatactcaggcaggcaattttagcttggagcagatcagagttgctactgatgacttctcttctgctaataagattggggaaggtggttttggtcctgtatacaagggtcaattgctagatggtacttttatagcggtcaagcaactgtcatcaaaatcacggcagggaaatcgtgaatttataaatgaaataggcttgatatcttgtgtgctcaccctaaccttgtaaagctttatggatactgtgctga

SEQ ID NO: 45640 - DNA, 286 bp, Glycine max
  Clone ID: 701040948H1
ttcggctcgagaggctcgaggcagagacaaagcctcacgctgtgttcactccatatccacttcaaggccatattaacccattgttcaaactagcaaagctgcttcatctgaaaggctttcacataacctttgtccacactgagtacaactacagacgcttcctcaattcaaagggtcccgacgcccttgatgagcttcctgattttcgcttcgaaaccatcccagatggccttcctccctcggatggtgatgtcagtcaagacataccctctctttgtgactctct

SEQ ID NO: 45641 - DNA, 282 bp, Glycine max
  Clone ID: 701040949H1
agcagctcccacaaaaaccagacatgtccgagtcggaagtagcaggtcagaggtaccgtgtgggctatcctctccaaggcaagaaagtcgaaagcttcattcaaccctcactcctcgatcacgccaaacaacacagcatcgatctcgtccaaatcgaccccaccgcacccttacaacaacaatgtcctttccactgcatcattcacaaactccacacccaacactggaaaaacctcctccaacaattctcatccaaacacccaaacaccgtaatcatcgacc

SEQ ID NO: 45642 - DNA, 270 bp, Glycine max
  Clone ID: 701040950H1
agaaggcccttaaactttctttctctctctctctgcttcactttctcacttttgcattttcttgtgaaaaaaaaaatcctcagaaccaaaatcggttttcttctgtctctgatctctcaaagcttcaaattctccttgtttggtttgtatgtgtgtatggagtatgatgtcgccgccggcggtggtaacggaggacgatgggcggacaacgtgtcgtcgaccgtggcgtctggttcttcgaaatccttggaccgtttctctcagaatggg

SEQ ID NO: 45643 - DNA, 273 bp, Glycine max
  Clone ID: 701040951H1
agaaaaaccatggcaataacactcaacaatggcttcaagatgcctatcattggattgggcgtgtggcgcatggaaggaaacgaaatcagggacctaattctcaattccatcaaaattggttatcgccattttgattgtgctgctgactacaaaaacgaagcagaagttggagatgcgcttaaggaggcttttgatagtggccttgtgaagagagaggatctcttcattaccaccaagctttggaattctgatcaaggccacgttcttgaggcg

SEQ ID NO: 45644 - DNA, 269 bp, Glycine max
  Clone ID: 701040952H1
attctggtagtcttggaaggtaccctctacgttggttttgtcgcgtccaatcaaaacgacaaccggttattcaccaaggtgttgtacaagggtgatgtgtttgtgttcccaatagggctgattcacttccagcaaaacgtaggttatggaaatgccgtggccattgctgctcttagtagccaaaaccctggagttattacaattgcaaatgctgtttttggatctaaacctcctatctctgatgaagttctcgccaaagcttttcaagt

SEQ ID NO: 45645 - DNA, 263 bp, Glycine max
  Clone ID: 701040953H1
gcctcatatatcaataatggatttgatctgattctggctcaacgttcatgacgatcaccacccactactccattccgggaagctctgggtatctggacatatacccagagaggaaagtctctgcctttcaaaacccttacattatgggcttcactgctgtcgctatcattggtggattgctctttggctacgacactggtgttatatctggagcccttctctatatcaaagatgattttccggaggtcaggcacagtaatttt

SEQ ID NO: 45646 - DNA, 268 bp, Glycine max
  Clone ID: 701040954H1
aagatggcttcttttcatatccaatattcattccttgtgcttgtgcttgctatggtgatcacattgatgaaccctaccaatgcaaccctctctccccatttctatgataaagtttgccctcaggcattgccagttataaagtcagtggttcaacgagcaattatccgtgagcgacgcatcggagcatctcttctgcgcttgcatttccatgattgtttcgtaaatgggtgtgatggatcaatattgctagatgacacccgaaacttca

SEQ ID NO: 45647 - DNA, 267 bp, Glycine max
  Clone ID: 701040928H1
ctgcatgcctgttgcagcctctggtggtctggtttgctaccgcaacactgttgggaaactttgttgtgtgcaatcccgttaccggatcctgtagcgaactccctccattgcattttgccctggaaaaccagtctctcaatgcggttgtgatgagtacaactttcaatgatcaaatgtcctataagattgtgttagtcttcggtgaactccctaaccttttgtttaaagtctacaactctggttctagctgttgggaagatgaggctg

SEQ ID NO: 45648 - DNA, 195 bp, Glycine max
  unsure (1)..(195): unsure at all n locations
  Clone ID: 701040895H1
ctttttcttttagttggttggtatgcttccacgtttttctttatgcancaatgttagttgttaatattgttagtttttgttagaggggatttgaatctgtgtgtaatgctgagaatgacatgatgtggttgcttagtgtgtgtgtgtgtgtgagtgttgctgctacttgctagatagttccacatcttcttgagg

SEQ ID NO: 45649 - DNA, 291 bp, Glycine max
  Clone ID: 701040901H1
atcttctccctttcttagattctccctcttttctctctgccctccgccatgactgaggataaggagatgtcttcctctgtcaccaatggcgatgattccctcactggtcacatcatatctacaactattggaggcaaaaatggggaacccaaacagactattagttacatggcagaacgggttgtaggaactggatcatttggaattgttttccaggcaaaatgcttggaaactggggaagcagtggctattaaaaaggttttacaggacagaagatacaagaatcgcgaa

SEQ ID NO: 45650 - DNA, 286 bp, Glycine max
  Clone ID: 701040902H1
gattgttgtgactcgttcttcttcgtcgttatcttcttcttttgtagtttgtgtgtttgttttttctctcacctgaaaatgtcttgctgcggtggtaactgtggttgcggaagcgcctgcaagtgcggcaacggctgcggaggctgcaagatgtacccagacttgagctacaccgagtcaaccaccaccgagaccttggtcatgggagtggcaccagttaaggctcaattcgagagtgctgaaatgggtgttcccgctgagaacgatggctgcaaatgtggagcta

SEQ ID NO: 45651 - DNA, 274 bp, Glycine max
  Clone ID: 701040903H1
gtggtttcagtgagtgatcggtgttcacttgatccttcataagtcgtcatcatcatcatcatcatcaccgttgattgaagaagatgccgatcagaaacatcgccatcggaaggcctgaagaggctactcaccccgacacgttgaaggcggggttggctgagttcatctccaccttgatcttcgtgttcgccggttcaggttccggcatcgcctacaacaagctcaccgacaacggcgccgcaactcccgccggcctcatctccgcttccatcgc

SEQ ID NO: 45652 - DNA, 276 bp, Glycine max
  Clone ID: 701040905H1
atttgatcatgcttcaaatatatctgatattctgcataaactgggagtttgtcaacgaagaaacctttggcttgcaatttttgttaaagacaacattgagttttgtgatgcttacagattttgagtaactatggcatctcatcctgaatggcttcattttgtatccagatttgcttcagtggtgatccactaactaattatcgtcacttatgtttttttatcagtaaatgttagtttgttagttttgttggaaatgtcagtagggagattcaaaat

SEQ ID NO: 45653 - DNA, 274 bp, Glycine max
  Clone ID: 701040906H1
actttatcctctctctctatctctctctcaaaagcttttatttgtttccgtcgtacgttgtatgcttgggagcacaacacaatgaaagaaaacgtaggaaaccctctgcacctaaagtctgtgaaccatatctctctcatctgtacctccgtgaaagaatctatcaacttctaccagaaccttctcggattttttcccatcaggaggccgggatcatttgattttgacggggcatggctattcggatacggaattggaattcacttgctgcaag

SEQ ID NO: 45654 - DNA, 277 bp, Glycine max
  Clone ID: 701040908H1
caagtttgagcgttaatacacttagaagtgaaatggcttctcgacccttggtctctatttataatgagaaaaatgagccaaccggcaagcaaatcaagcttccggccgttttccgggctccaattcggcatgacattgtgagcttcatccatgaccaaattcgcagaaacaagcgacaagcgtatgctgtgtcaaccgctgccggtcatcaaacttccgccgaatcgtggggcactggtcgcgcactggcgcgtattccgagcgtccgtgagcggtg

SEQ ID NO: 45655 - DNA, 275 bp, Glycine max
  Clone ID: 701040909H1
atgcaaagcatccttcgcttcaatctctctctctctctttgcgctttctgcaaaccgaacatttcatctccaaagggatcaacaggtcgaaggagaaatggggctgacattcacgaagcttttcagccggcttttcgcgaagaaggaaatgcgaattctgatggttggtcttgatgctgctggtaagaccactatcctctacaagctcaagctcggagagatcgttactacaattcctaccattgggttcaatgttgagactgtggaatacaaga

SEQ ID NO: 45656 - DNA, 252 bp, Glycine max
  Clone ID: 701040910H1
ctcgagccgaatagtgttaatttgtgcttctctatctctatcggccatgggtgcttttgactttgatgaggaaaactcctccaccgtggctccggctacactctacaaagctctgacaaaatatgctcggcactatcatcccaaagattattggggccacccgggctattgagatcgttgaaggaaatggacgacccggaacacgtcaagaacattacagctagtgaaagtgaccaaaccatgttcgtgccg

SEQ ID NO: 45657 - DNA, 268 bp, Glycine max
  Clone ID: 701040911H1
attatttcattgatttctccctcttcgctctctctcagtgaccagagacagatgatgatggagatggcgaacgaaacgctgtcgttgcggcactcgcggcgttggtgctactcgcggcgagtgtggcggtggatgctcaggagaactcggacgtgaagacgctggtgaagtacaagcacgggaagaagtactgcgacaaaggatgggaatgtaagggctggtcaatttactgttgtaacctcaccattaccgattatttccagaccta

SEQ ID NO: 45658 - DNA, 272 bp, Glycine max
  unsure (1)..(272): unsure at all n locations
  Clone ID: 701040912H1
gaagtggtaagaanacaactccttaaacctctccgttctacttttctaacaccctaactcttgccacactcctccgttttctacgctccgcataagttaattcattcgataatggcatcgcgagcaattttgagaaggaggagaagtttaatccatcaatacttgaataactgtattgcttcttcttcgccgtctcccagtaatcgctctctggaattcgctatagctacgacgtcacctttgtttccttgtaagcatggaacgacgccgta

SEQ ID NO: 45659 - DNA, 271 bp, Glycine max
  Clone ID: 701040914H1
gccatttattcctctcagcaccaaagcgtgacactatttgctttcttaccttccattctttcattctctctcttgcattacagcgacactgttcaaatctcttttctttctaaaaattaaaagcaaagaatttacgtaagagactgagattgagtgagtgaatggagtttagtaacctcactctggagatcttctccaaactggagcaaaaatggctctcacattgtaaagccaccaacaaaactcgcattctcagcattgacggcggagg

SEQ ID NO: 45660 - DNA, 276 bp, Glycine max
  unsure (1)..(276): unsure at all n locations
  Clone ID: 701040915H1
ganattctgaatgtctggaggaatcaggggtaacttgcaatggaagaagttgaaggaacatcttttcgaaccgagagcctgatattattggaactcctgctaaaggaaaaaaattgcctcaggaagagctttctctacaacagaaattatcagttgcagatgtgacatgtacaatgtgcaagcaactgctctttcatcctgtagttctcaattgtggtcatgtgtactgtcaaatttgtgtcatcaacatagatgacgagatgctcagatgtaaag

SEQ ID NO: 45661 - DNA, 276 bp, Glycine max
  Clone ID: 701040916H1
aggctcgaggggataccccaatacggaggcagcatggctgggaacgtgttgtacccaaaggacaacaaaaagggttgcaaggagttcgatgagtatgggatttccttcaaatccaaacccggtgctcttcccactatcgttttgctcgatcgaggaaattgcttctttgctttgaaggtatggaatgcacagaaggctggagcttctgctgatcttgttgcggatgatattgtggaaaagttgataaccatggacactcctgaggaggatgtgtca

SEQ ID NO: 45662 - DNA, 275 bp, Glycine max
  Clone ID: 701040917H1
ctgcaacacaactctgaaatttttgtgagtatttggatgatgaattctcgtgtcgttcgaagtgtttcagaatgttttatcaaaccgttgggccaagctaaagagtcaaacctaatatgtcatttaacaccatgggatattgctatgatgtctttgcactacatccagaaaggtctactcttcaagagagctgcaacacttgttgatccacaagatctcatgggagatctgttagagaagcctgaacactctccttctctcacctcttccattct

SEQ ID NO: 45663 - DNA, 283 bp, Glycine max
  Clone ID: 701040918H1
gcctcagctaataacaacaatgcttctgcttcattgggtgtccatcgtcgacgacgcaggaagaaatcagaaataaaaaggagagatcctgctcatccaaaacctaacagaagtgggtacaatttcttctttgctgagcagcatgcaagactaaagctacttcaccatggaaaggacagagagattagtaggatgattggtgaactctggaacaagttaaaagaatcagaaaagacggtttatcaagagaaggccatgaaggataaagagaggtacagagtag

SEQ ID NO: 45664 - DNA, 280 bp, Glycine max
  Clone ID: 701040919H1
gtgaggtgaggtgccaaaatggtgaagataactcttggtactttcgatgactcttttggtgttgcctctcttaaggcttatttggcagagttccatgcaactctgattttcgtgttcgctggtgttggttcagccatcgcttacaacgagcttacaaaagatgcagccttggatccaacggggctggtggcagtagctgtggcccatgcatttgcactgtttgtaggtgtctccgtcgaagccaacatctcgggtggccatttgaacccagctgttactt

SEQ ID NO: 45665 - DNA, 276 bp, Glycine max
  Clone ID: 701040920H1
ccgcacaccacttcgttgcgccatcttctttcaacaatcagccacagctcttctcccactttccctaacttcgaggccaccaacttctcatatttcaagacaaaaggaatggtgggtttatctcttggagaaacgcatttcatccaaggtggcattgctcaagatcttcgttgtgatggtagaaagagattgacatatcgaccaatctctgttgatactggagtgattccccagaccaatggttcagcaagagtcagaatgggtgccacagatgtt

SEQ ID NO: 45666 - DNA, 272 bp, Glycine max
  Clone ID: 701040922H1
aatatattccattctctctgtgtatttccctacctctcccttcaagatgcagatcttcgtcaagaccctcaccggcaagaccatcacccttgaggtggaaagctctgacaccatcgacaacgtcaaggccaagatccaggacaaggaaggaatccccccggaccagcaacgtctcattttcgccggaaagcaacttgaggacggccgtacccttgctgactacaacattcagaaggagagtactcttcacctcgtcctccgtctccgtggtg

SEQ ID NO: 45667 - DNA, 270 bp, Glycine max
  Clone ID: 701040923H1
ctcactgtgattggttacaagagccagagtgatgtcaaggccgggggtgatgtgtgtggtggagttggcattcttggcattgcttgggcctttggtggcatgatcttcatccttgtttactgcactgctggaatctccgggggtcacataaacccagcagtgacatttgggctcttcttggctcgcaaggtatctttgattagagccataatgtacatggtggctcaatgcttgggagccatatgtggagttgggttggttaaggcattc

SEQ ID NO: 45668 - DNA, 276 bp, Glycine max
  Clone ID: 701040924H1
gccgtgactagacactcatctcactcgcgccatcgtagggtttctccttttgtttcgcaacatggttgccgctaagaaaactaagaagacccatgagagcatcaacaacaggctcgctcttgtcatgaagagtggcaaattcaccctcggttacaagaccgttctcaaatctcttaggaactccaaagggaaattgattatcattgctaacaactgcccccctttgagaaagtcagagattgaatactatgctatgttggcaaaggttggagttca

SEQ ID NO: 45669 - DNA, 270 bp, Glycine max
  Clone ID: 701040925H1
agagagtgagagagtgagtgagatagagagagacgcttcgcaaatctcaatcgaatctcagaaaaatgagagaaatcatcagcattcacataggtcaggccgggatccaggtcggaaactcctgctgggaactctactgcctcgaacatggcatccagcccgacggcatgatgccttctgactccaccttcggtgtagcccacgacgccttcaacaccttcttcagcgaaaccggatctggcaagcacgtcccccgtgctgtcttcgtcg

SEQ ID NO: 45670 - DNA, 267 bp, Glycine max
  Clone ID: 701040927H1
gctggatcatcagagcttaagctacggcttgatggtgttcagaagaaatggggtaaaccaatgtattcgtcttcaacatcatctgcctctgtctcgtattctacttcccaaaaaccaacgaatggggcaactcaggtggatggtgctacaactgtcaattcaaaagtgcgtgatagttatgattcaagaaagacacaggttgagattactccagaaaagcaaaagcttgctgcttctttgtttggtggttcaactaaacctgagaaa

SEQ ID NO: 45671 - DNA, 194 bp, Glycine max
  Clone ID: 701040894H1
atcacaagctcccaatatagcaagcagcaaacatgatttcttccgtgtcctttccagcgtctcttcccgccgttaacttctccggcaacgccatggcttcgccgtcgtgccgcgtcaaatcccggccaatagtcgccttcgccaccgccactgccaccgctgaagctcgctcttcctggacggagcaaccgaga

SEQ ID NO: 45672 - DNA, 205 bp, Glycine max
  Clone ID: 701040853H1
gcctggtcttggcatctccgcagcaccacccaccctggacccaggtcttcaacagagagaaagagaaggaaaaacacacacacacacacacacacacgttaaactaacattttttattagtaagaagacatggctcaacccagttccaacggggatctgaataataaccagcagggtcaggttcagcaacagcagcagcagtggg

SEQ ID NO: 45673 - DNA, 200 bp, Glycine max
  Clone ID: 701040854H1
tctctctccatgagcacagtaccgtaacgtaacgtaaccacgagatgcctctattctagcacttggaaccccaaatccgtgccaattcctccgctccttttcgcagacgaaggcacattctgacgttcacaagattggaaggcaagactaaagattccaccacctgatacaagctagaaaacagaggtttgaaatggctg

SEQ ID NO: 45674 - DNA, 198 bp, Glycine max
  Clone ID: 701040856H1
caattttcagctagtcatgaagatccactgcgacgtgtgtaacaagcaccaggcctcttacttctgcaccgccgacgaagctgccctatgcgacggctgcgaccaccgcgtccaccacgccaacaagctcgcctccaaacaccaacgcttctccctcacccacccctctgcgaaacattttcccctctgcgatgtttg

SEQ ID NO: 45675 - DNA, 196 bp, Glycine max
  Clone ID: 701040860H1
cacaaacagaggctacgtacgatcaaattaattaagatggcggaagtgaggaacaaacaagtggttctgagggactatgtgagtggttttcctaaggaatccgacatgaacatagttgaaggaaccacaatattgaagcttccacaaggttccaatgatgtgcttctaaaaaatctctacctttcctgtgaccctt

SEQ ID NO: 45676 - DNA, 199 bp, Glycine max
  Clone ID: 701040861H1
ttttgttccaaacaaaaacgtatgaattggtcggtttttactccggagtcgtcttcacttttctccgagtttttattatcatcatctctctcgtgcccctgtctccatctccatctcttagtttcttcttcaaatggcagaagttgaagacatagacaaccctcatcacgaccaccatcattacctttcttcttctaca

SEQ ID NO: 45677 - DNA, 200 bp, Glycine max
  Clone ID: 701040862H1
gcaatattatagtggacattgaatactttaaagaagccctttccaaagtagactctcagatgaaaaatcttcctgcaacagctcaggtagctgcacaacaaggagtctatcttgcagactgtttcaaccgcatggaggagtgtgagaagtatccagaaggccctctcaggttcaggggagttggacgccatcggttccgt

SEQ ID NO: 45678 - DNA, 199 bp, Glycine max
  Clone ID: 701040863H1
gttactacaaaaattcgaggagtggatcatgaaaattgaattggatctttatccataagaaacagaatgagagaaagaaaaaggatgagaaaaccatttcagaattcataatcatacctttttccactctgacgccatttaattattcattcatattaatattaggctctcaccctccattccaattgctattagattc

SEQ ID NO: 45679 - DNA, 198 bp, Glycine max
  Clone ID: 701040864H1
tgagtctacgtgtttgacagaaaggttgagctatagcctaaagggagagacacataaatagtttctactttctattcatagatagatggctggcccaattatgagacctcagattgtgctatttggctcctccataattcaaatgagcttcgacaatggtggttggggtgctattctagctaacttgtacgctaggaa

SEQ ID NO: 45680 - DNA, 208 bp, Glycine max
  Clone ID: 701040865H1
cacaagctcacagagcaagaacactgttccaatacggaatctaaggcaaagcaaaccaaacatcttgaatcatgggttcaacaggtgagactcagattaccccaacccacgtatctgatgaagaagcaaaccttttcgccatgcaactagccagtgcttctgtccttccaatgatcctcaaatcagcacttgagcttgatctgttgga

SEQ ID NO: 45681 - DNA, 201 bp, Glycine max
  Clone ID: 701040866H1
gaggtgccaatatggtgaagatagctcttggtactttggatgactcttttagcgctgcctctcttaaggcttatttcgcagagttccacgcaactctgattttcgtgttcgctggtgttggatcagccatcgcttacaacgagcttacaaaagatgcagccttggatccaacggggctggtggcagtagctgtggcacatg

SEQ ID NO: 45682 - DNA, 204 bp, Glycine max
  Clone ID: 701040867H1
acgaaagcaacagcagcagagttataaggttccacagcgtcatcaagtgttcgtggttgaagccaagggcaaaaagggaatgatgtctcgtcaatttcagcgcaatgctcctcctcctttacccaagattgaagacgatggcaatcccaaattcgtcatcttcattcgcatggccaatgtatacctttggtaccctcttagtat

SEQ ID NO: 45683 - DNA, 200 bp, Glycine max
  Clone ID: 701040868H1
atctatttcgtataacatttcatttcacttcacttagggtggtgcatttgcaaccctttaatttcctcacaaaaatggaggaacgtagtttgtactcactagtgtttcttgtgcttgctttggctattgtgaacaaagtgcatgggcaaggcacgcgtgtagggttctattcgagtacatgcccacgcgctgagtccatt

SEQ ID NO: 45684 - DNA, 192 bp, Glycine max
  Clone ID: 701040870H1
gcttacaatcccttcttgtaggcgagggggattgcatttggacagaaaaatgcgtactgttttgataaatttagctacttctcaagttggaagggaggaaattgtatctactcctggactcattggtgcattggcttcgatattggacaccggtgagctcatagaacaggagcaagctgtctcttgtctcct

SEQ ID NO: 45685 - DNA, 199 bp, Glycine max
  Clone ID: 701040871H1
tgtgcttccatggcaaaaccaaagcttcacttgctgtcctttctcttctgcagcatcttgctaagcttcttccactgcacattttcactcgatcaacccagaggatgagcccagctggattggcatggaaactgaagacattaacattgtaagaacccggagagatacttggaaaaaatgtgactactctgttggaaaa

SEQ ID NO: 45686 - DNA, 197 bp, Glycine max
  Clone ID: 701040872H1
cagaattcgaaacagaaccatcgaataataaaaaaggaaaactaaaattccaaaaacgccactttcattcagctaagcttcgtctccaccatcatcatcatcttctttttcttctctacctttggatcctttcactttggcgtgaccgaaccattccactccctcgcaaaacggtgtcgtgtcgatcgcgttcggtt

SEQ ID NO: 45687 - DNA, 195 bp, Glycine max
  Clone ID: 701040874H1
tgatgaaccttcctaggacttggtaccttacttaccttttggatatgaattacttgggtccaattttatctgatggctcttattgctcaaccttggattttcaaattaacaatggggattagacccttttgtgaaatctcaaccggttgaaatgaacaattatgtagcagattcagggaagtaccaagtgaaaca

SEQ ID NO: 45688 - DNA, 196 bp, Glycine max
  Clone ID: 701040875H1
attttgtttatcataggaggatctgatgtactcgctcgtggatctcaactatattcacgatcatgatggcccttgaaaattctgaaaatatgcaaatacactgtgaggcatctttaaaatgcctccagggcaagggatttccttgcaattttcagagtaatgggagttctatggaaggctttacagagcttaaaaa

SEQ ID NO: 45689 - DNA, 196 bp, Glycine max
  Clone ID: 701040876H1
gcaagataagaatgatgagttgcaaagaaaatggggaggatgacatttacctctcaggtttgacactatgtttcaagccgaatttttccggcaatcttgaacgctgctgttgatctgaatttgtttgatatcatagacaaggcagagagttcaaatttgtcagcctctgggattgcttctttgcttccaatccaca

SEQ ID NO: 45690 - DNA, 58 bp, Glycine max
  Clone ID: 701040878H1
ctgtgtgcatcgacgctctcacacaacaacttctcagtccatgcgatgatgatcttct

SEQ ID NO: 45691 - DNA, 194 bp, Glycine max
  Clone ID: 701040880H1
cacaaagcgggttactgtctgttcaagctaccatctctctctctctttcttagtgcctccttgccagaagttaaaatggcccaagaaactttcctattcacatctgaatcagtgaacgaggggcaccctgacaagctctgtgaccagatctccgatgctgtgctcgatgcatgcttggagcaggaccctgacag

SEQ ID NO: 45692 - DNA, 87 bp, Glycine max
  unsure (1)..(87): unsure at all n locations
  Clone ID: 701040881H1
ctaccgcactgccgctcaagatgctatagctanagcaaacccagttgtcaaggctgaaaagcttgataagatctaagatttgaagtt

SEQ ID NO: 45693 - DNA, 200 bp, Glycine max
  Clone ID: 701040883H1
ctcacgacaaattcacatcctccttctttcatctctctctctctctctatatctctgtcttttcctttgcccgtgcgtgtgaaagatcgcagcaactccaccaccatcacaacagcaccgtaaccgatttccaaggttgagttatttgctggtctaacttaaccatactgtctattttgactcctgagattgctagtgag

SEQ ID NO: 45694 - DNA, 95 bp, Glycine max
  Clone ID: 701040884H1
gtgattgtgggaaaagatgcctcagaggcactcgaagaacaacaacgatctcgcgttcttcacgtacgacgagaagcggaaactaggttatggta

SEQ ID NO: 45695 - DNA, 198 bp, Glycine max
  Clone ID: 701040885H1
ttcaaagcgaaaagagattcgaatccaaggaagggaaaggaaagtaagagaagagaagaatggccgaagagggacaagtgattggtgtccacagcgtggaggagtgggaggaacatctcaagaagggacaagagtccaagaaattgattgtggtggattttactgcttcttggtgcggcccatgccgtttcattgccc

SEQ ID NO: 45696 - DNA, 197 bp, Glycine max
  Clone ID: 701040886H1
ctccttctccccctgtttttgcttgctgcgtaatacgaaataaatttttaaaaaaaaacgttcgctggttaatggttttaattttattgttctcagattaacctttctctttgtgaatgctattcaaacgtcgattgtgaatctgagtgtttttttactttgattcgattcgatatgaagcgagcgaggaaatccaa

SEQ ID NO: 45697 - DNA, 204 bp, Glycine max
  Clone ID: 701040852H1
ttccaatatattccattctctctgtgtatttccctacctctcccttcaagatgcagatcttcgtcaagaccctcaccggcaagaccatcacccttgaggtggaaagctctgacaccatcgacaacgtcaaggccaagatccaggacaaggaaggaatccccccggaccagcaacgtctcattttcgccggaaagcaacttgagg

SEQ ID NO: 45698 - DNA, 197 bp, Glycine max
  Clone ID: 701040887H1
actcgagccgaatcggctcgagcagaatgtgattttggattcaaaacagaagcttgagttataccgcaacaaaatgcaggaactggttctatataaaagcagatgcgataatcgactaaatgagattacggaaagggcatctgcggataagcgtgaggcagaatcattgggcaagaaatatgaagagaaatacaaac

SEQ ID NO: 45699 - DNA, 195 bp, Glycine max
  Clone ID: 701040888H1
tctcagtccatgacccaagctggcctcactcgctacggttccgcccccggttctcttctcaccagcacggttgattctcatattggtggatcccgtcccagtccctacttttccggagagtcttctgagtctccctgcaaagagcaaagatctttccacaaccaccccccctccttcgcttcctccttgctccgc

SEQ ID NO: 45700 - DNA, 195 bp, Glycine max
  Clone ID: 701040889H1
gcgatatcttgctttcatatggatcttcttagcgaactgacagctgcattacgtcctgccgatgagcctggtgcagaggttccaaacggtgcagctggtcattatctattagggctcatttacagatgcactgacagaaggaaaaatgccatacaacatttcaagcaggcactgtcaatggatcctcttatgtgg

SEQ ID NO: 45701 - DNA, 194 bp, Glycine max
  Clone ID: 701040890H1
gaggagcatcctgagtgggagattaagaatgatagtgtctttttccaaaaggcaaaagaatctgcaccttgcaaagaaataccctctctgcagctcatcaaccagacacttagttatgctagggagttggagaggattgtctgagtcgaaatgcaatggcggcttttgtgtttccaaaatttttaggtgtctgg

SEQ ID NO: 45702 - DNA, 191 bp, Glycine max
  Clone ID: 701040891H1
cgaaaagggcttgattgcacatccttttttctttctgggatggaagaacttttccgataaaagattgattcactagaaaaatggtgctggatccagcaaggctggtgctggtgcttttgatcagcacctgcattttggccatcaatggtgacacagatccaaatgacgttacttctctaaaggttttgttt

SEQ ID NO: 45703 - DNA, 192 bp, Glycine max
  Clone ID: 701040892H1
ctgttcaccattttcaattcattcctgtgttagattccaagtggtttggtttggtttgacataaataaacctttcaagatctcagacgggcagaagatcaaagccaagacaacacactctcatatataaaagagtgtctctgataatttgatctttgtatcttctctttctctcctttgagatttttcagca

SEQ ID NO: 45704 - DNA, 194 bp, Glycine max
  Clone ID: 701040893H1
gaaaaagaggattggagggtcgccacgtttagcaacaaccaaaccctctctactctttcttcttctcttcgctagggttttagcttcttcctcttcacttcgttcttctggcctctacaatgagcaacgacaaggacaccttcaacgtcgctgatctcacttccgctctcaacgaggacaatagagcagacctt

SEQ ID NO: 45705 - DNA, 213 bp, Glycine max
  Clone ID: 701040814H1
ggctcgagtctacatttcagtaacgtactaaaacatcccaatacactttcacttctatattcctacttctcgatctctggtttctcctcttaaacatgaagcttttcgtgtttttacttgcatgggctatggctcttcttgcttcttcctttgattcagctgctgtagtggaacgcactttcaaagttcaaaacaagactatcaaacgcttgt

SEQ ID NO: 45706 - DNA, 215 bp, Glycine max
  Clone ID: 701040816H1
cggctcgagcggaaaccgtcgctgctaatcgctgttccaaagaagaccgagtggatccagttcgggagcccggatccgaacccggtgatggctgcgccggagaacctgccgcagaagaatcactacagaggtgtccggcagcggccctggggcaaattcgccgccgagatccgcgacccgaacaagcgcggctctagggtttggctcggaacctt

SEQ ID NO: 45707 - DNA, 205 bp, Glycine max
  Clone ID: 701040817H1
ttgagtctcgagatcttgtcagatcggaacgcaaccgccaccgagatcgactttgtttgtgcgttatgggaagggaagttactggcatacaggttatggaaaagaagccaaatggtgccataggggcttcaaatggcagtttaagtgatagaatgcgtgtttctcccaaaattgcggaaatggttcaagcaatggatcatgagat

SEQ ID NO: 45708 - DNA, 216 bp, Glycine max
  Clone ID: 701040818H1
ctcgaggtttacaattattggagagtcatggcaacaagggtgcttttgttgatggccctcaccctctatatcttccccattgctacagcaacattccatgtcaagggttccgtttattgtgatacctgccgtgctggattcgaaaccaatgccaccttttatattcgaggtgcaagggtcggaattcagtgcaaagagaggaagaccatgaaggta

SEQ ID NO: 45709 - DNA, 215 bp, Glycine max
  Clone ID: 701040819H1
gctcgagcccttcctctatttccatcatttcgtgacaacaacaacataaccctctcacccccaacacacacctcttctttttaagggtttatcttaaaccaggatttttggcactaatttctctatgggagaagcaccagcattgcttgttgatgacgtgcaggatggggctctgaatggccttgaattgaaaaatggaacttgcaaaacaactg

SEQ ID NO: 45710 - DNA, 213 bp, Glycine max
  Clone ID: 701040820H1
cggctcgagcacaaaacttgctatagcagtaagctataactcatttgaggctctgtgagaattgagaaatggctaaagatgttgaggttcaagagcaaggaggagagtactctgccaaagactaccatgaccctcctccagcacctttgttcgacccagaggagctcacacagtggtccttctatagagccctcatcgctgagttcatagcaa

SEQ ID NO: 45711 - DNA, 212 bp, Glycine max
  Clone ID: 701040821H1
tcggctcgagcctcgctctgtttctgtctctgtgtttgcggctgaggattccgaacgagcgaccttcttcgtttctcgcaaagtttaagtcctcatgggtaaggaaaagactcacatcaacattgtcgtcattggacatgtcgactctgggaagtcaactaccactggtcatttgatctacaagcttggaggtattgacaagcgtgtgattg

SEQ ID NO: 45712 - DNA, 213 bp, Glycine max
  Clone ID: 701040823H1
cggctcgagattcgttgattccttcatttccttgcagttttgttgctgagtgtgtgtgaaactgtgaaagagagttatggcaggaggtggtggagctccagcacctaagattgatgagccacaacctcatcccccgaaggatcagttaccgaatgtttcttactgcattacgagtcctcctccatggcctgaggccatacttcttggttttca

SEQ ID NO: 45713 - DNA, 217 bp, Glycine max
  Clone ID: 701040824H1
tcggctcgagactgacttattgaccttaccttccacagtgtcagtgaacaacctatctctcacctacctacccactcaaatgcttgtattatcttcatttgtataaaaccaaagacctctcaatccatcatttgtctccagctcatgagaagtgcatcatagttagaagcaaacccacccttttcatccaattttgattatagatggaaaaccagcc

SEQ ID NO: 45714 - DNA, 214 bp, Glycine max
  Clone ID: 701040826H1
attcggctcgaggaaaccttgtcttaaggagattccttgctccactctcattttagtgtgctagtggtgtcagttatataagtaaggggtggtgaacgggatagttcccacttgtgaatcatcattatcattattaccaaacttctctacaaaaccaaaacctccaagcccttaacttttgagtcaaaatttatcatttcaaagcactctccaa

SEQ ID NO: 45715 - DNA, 214 bp, Glycine max
  Clone ID: 701040827H1
attcggctcgagcggtctctctcggtttcaactgtgaactgtgagctggtaatggtttcataaatctcactgcatccatggcttcggagaagatttcctcgattctcttgttttctgctgtaattttgcttgtccgtgatgctccttctgccatagctggggacatagttcacgacgacgattcaactcccaaaaagcccggttgcgagaacca

SEQ ID NO: 45716 - DNA, 197 bp, Glycine max
  Clone ID: 701040828H1
attcggctcgaggtctaattaacgacaaagtatatatgtattgttatttgtttttgtttttttttttcgtttttgggtcttatgaacgaaccacgtctatagttttaatttggatgacctttttgtatacaaagtcacatgtgacgtcttacagcttttgattattattaagatttaattatatgagtccttaactt

SEQ ID NO: 45717 - DNA, 214 bp, Glycine max
  Clone ID: 701040831H1
tcggctcgaggtttgtttgtctgtcacgagactcatacattgtgctgccaattatagtaactctctatttctctttccatctctcaagttctgaagaagaaacatgtgtggaggtgctatcatctcagacttcattggtgtgaagcgtggccgcaacctcgccgcgcaggaactatggtctgagcttgaccctttctctgacttccttggcttc

SEQ ID NO: 45718 - DNA, 216 bp, Glycine max
  Clone ID: 701040832H1
ttcggctcgagttttgtggtggctacttgcgattccaacaattcgtgagtacaactcataccttcaagacagaaagccagtgaaaaaggttggggcatattgttggctctctcttgccattcgcattgtggaacttctgatttgcattaagtttggacacggcttgtatccaaaaccaatgcctatatggctggtaatattctggtcgggtgttgg

SEQ ID NO: 45719 - DNA, 221 bp, Glycine max
  Clone ID: 701040833H1
ggctcgaggtggtgtgagacagtgtaactcggaagcgcagcagcaatggcaagagcgactctccttcacttgctgcggtcacagagcctccgccacgtgtccaaaaacgctccttcagcatatcgttgttttgggtcctctacctgtcaacgacccattagccccaatccatcattcaaaacttcctcccatcttgctgttttccaaagaagatgggcatc

SEQ ID NO: 45720 - DNA, 218 bp, Glycine max
  Clone ID: 701040834H1
tcggctcgagacttttatagtatatggaatgagtataggtacttgattttatgaaataaatatcagtacgtgagaggtattaattcataaccttttacatataaaagtgttgcaacaactccttggtaaaaatccattccattaatgtcaattttcttagcctagtcagtaccctgccttacatctgcgcaaatcgaacttgtaaacctttgcttcac

SEQ ID NO: 45721 - DNA, 202 bp, Glycine max
  Clone ID: 701040835H1
gcgaatcggctcgagaaatactcccgctcccgtctccacatatttgcgaacccactttctttgtgagagaccccctatcagagaatccagaaggcgaagaagaagaaacgacagagcaagaaggaaatggcgaccaacattgggatcatggatgcggcttacttcgtcggcagatctgagattctttcttggatcaactcaa

SEQ ID NO: 45722 - DNA, 216 bp, Glycine max
  Clone ID: 701040836H1
attcggctcgagaagaaatgtacttggaagaaatcaaggagcatgaacaaggtaatggctcagaaaacaccaaatcaaaagaatcgagcaaggagttggcttcaacagcaaatgttgcactcgatcatctccaatcaaaacatgaaagcttcaacaaccaaaatacttccccaaccgagatctcaacaagctcttcaatgtctccaatgggagggt

SEQ ID NO: 45723 - DNA, 204 bp, Glycine max
  Clone ID: 701040837H1
tgaagatatattatggcattctctatcttcaaacatgttctgtcgttattccttctttgcattttcttgcaggaacctaccaatgcccttagaaagacctacattgtgtacatgggaggacattctcatggtccagaccctttgcctagtgatcttgaaacagccacaaattcccatcatgatttactcgcttcttacttagga

SEQ ID NO: 45724 - DNA, 198 bp, Glycine max
  Clone ID: 701040839H1
attcgggtcttttttttttcttttttttttttttggttcttttttcaaaaacccggggggcttttccccccctttctggggaaatttccccggtttttctggaaaaattaaagcgaatttaggggttttagggaaatgggggcggggggcctttgggttcaaggcggggtttaataaatgggaacaaagcccccagga

SEQ ID NO: 45725 - DNA, 203 bp, Glycine max
  Clone ID: 701040840H1
ctagtcccaaagagctaacaagagattcaagaccggcatggctaatgaagaggaacagaaaaaccacctcttcggcatcaaagatctcggtcacaagactctccttcagagtgatgcactctatcagtatatacttgaaaccagtgtctatccaagagagcacgagtgcttgacagagatacgcaagatgactgcaaaacacc

SEQ ID NO: 45726 - DNA, 200 bp, Glycine max
  Clone ID: 701040842H1
gctggccatgctgaagcagctcattgcgcagttcaacacctctttgacacttaccactctcaatcttctctcatctttcaacaacaacaccccagatggacgacatcccttgacattgaagataactctgtagatgacttctgtggccttgtaatgacagctggaaagtctggcagtttcaggatgtcggagcctggaaa

SEQ ID NO: 45727 - DNA, 200 bp, Glycine max
  Clone ID: 701040843H1
ctaacttctctctctctctctttggcggctctcaattctccaacccccaaccctagttccatttttttttaatcctaaatcatgcatactccagacacctagtttcatttcatcattacacgcacaccttatttatttatatggaaaaaaaatcaaatcaatagagccagacaagtgttgtgttgttgaggttgaggttg

SEQ ID NO: 45728 - DNA, 199 bp, Glycine max
  Clone ID: 701040844H1
ccgctcgagcgccaacgcctccctctcggtggccttcgtggcggctccgcccaatcccggcgaatgggtgtcctgggggatcaaccccagcggcaccggcatggtgggggcacaggtgctggccgcgtacaaggcggagggcaccggtgccgtcaccgtgaaaacgttggaccttaaatcttactctgccattgttccg

SEQ ID NO: 45729 - DNA, 202 bp, Glycine max
  unsure (1)..(202): unsure at all n locations
  Clone ID: 701040845H1
actcgagccgattcggctcgaggttttttcctcggtcaccatttccgnagttcctgaagaggaacttgaattttatcaccatccaatttacctccctcgcgaatttcaatctcatatcttgtcttccttcctttcatcactactactcaacttaatatataggaagctagctgttagtcctctactgcttgcatcacttcaa

SEQ ID NO: 45730 - DNA, 201 bp, Glycine max
  Clone ID: 701040846H1
atccgtgttcctctctctcatctctctttctctctgttccctcggtttccttactttaaagtttaatccaatccaataatccaataactacatacaaagttgaacaataccaccatcatagcgtatcatcatcagaattccaaggtggatttgcttcatcttttactccggcttcatgttgcatgagtaaaggccgttatg

SEQ ID NO: 45731 - DNA, 203 bp, Glycine max
  Clone ID: 701040848H1
cgaaatcgcgaacagaacagcaacgttaacaatgggttctcgctacgaggtggaactgaagctctcatcggcacgcgctctcaagaacgtgaactggcgccatggcccgaaccgcccatacgtcgtcgtttgggtcgacccaagcaacaagctctcgacgcgcgtggacgaaagcggcgacactgacgcgaattgggaccaaa

SEQ ID NO: 45732 - DNA, 203 bp, Glycine max
  Clone ID: 701040851H1
gtctttatgtctttctattcttcctttgctttccttccccttgaaattttgcaagatttgttttctttttttgtttgaagttccttccatttagatctaagaccagcacagtttcctcaaccttagaactagttgcgccagaacggcatcactcaaagctcaactttgccatagttctacttttttaatgccccacttgtttg

SEQ ID NO: 45733 - DNA, 214 bp, Glycine max
  Clone ID: 701040813H1
cggctcgagctctttctccggcgacgatctcagattccggtcactcctctcgacggcgatcccttattcctccgtcctccgtcgagtcctttccgattcgaatcgttcccagccttgtgccaccatgaatcccgaatacgattatttgttcaagcttttgctgattggagattctggtgtaggcaagtcatgtcttctcctgaggtttgctgat

SEQ ID NO: 45734 - DNA, 190 bp, Glycine max
  Clone ID: 701040766H1
ctcgagccgttcttccctcaaatagttaaagagatgaaaatcttggagttaggagaatggtggctttgcaacaccacttgtgatcttgagcctggagcacttgccatatctccaaggttcctcccaattggcccattgatggaaagtgacaccaacaaaaattcattctgggaagaggacataacttgcc

SEQ ID NO: 45735 - DNA, 188 bp, Glycine max
  Clone ID: 701040767H1
ctcagtttctttcttcaacgtttccatcatacacagatcccaatcctctctcaagccctaatttcccctcatttccatggccacagaagagcccactgtcgcggtggaacccgctcccgaacctgcctccgccgatcctcccccggaggagaaggaggagaccaaacctgaagccaaggctaagaaaa

SEQ ID NO: 45736 - DNA, 185 bp, Glycine max
  Clone ID: 701040770H1
aactttctctctctctctctacaaaacttagctctgtttttaattattccttgcattctcttgtattaagatggaagcaactaccatcaccaatgggagccaaaacggttcgttttgcttgtccactactaagggaagtagtgatccgttaaactggggagcggcggcagaggcgatgaagggga

SEQ ID NO: 45737 - DNA, 159 bp, Glycine max
  Clone ID: 701040771H1
caagaattaggtgcctcgagttaggaggacgatagtctaagcatcttttctcacagggatttttgagtcagtttctgtttatatttattatatgcataattggtttttatgtttgcagtacactcagaaatcagaatgtttttattgtttgaggtgatt

SEQ ID NO: 45738 - DNA, 183 bp, Glycine max
  Clone ID: 701040772H1
ctttcttctttccaagattctggcagttactgtcagattcattatcaaagatgcagaggagaagaaggcctcttttaatccaaggccacttttcagattattcatcaactggcttctagatcttggttcacttgagcctgttactgatggtgcaaatcttcagattttaactgcttttgccaa

SEQ ID NO: 45739 - DNA, 165 bp, Glycine max
  Clone ID: 701040775H1
gtcaaggtctattcgggcaggcactatatggatcaactgctatgccatacttggcattgttagcactcttaattgcttccccagtgatggcactggagaagttcaagcgcactgaggcctcaattaagagtgctaactataccctgtatggcctaccagtaggca

SEQ ID NO: 45740 - DNA, 182 bp, Glycine max
  Clone ID: 701040776H1
gtgcgatctcacggcaaataaagttgtgtcctatgagacagcaaaggcttttgcagatgaaattggaattcccttcatggaaactagtgctaaaaatgccaccaatgttgaacaggctttcatggccatggctgctgaaattaaaaacagaatggcaagccagccagtgaacaatgcgaggc

SEQ ID NO: 45741 - DNA, 185 bp, Glycine max
  Clone ID: 701040777H1
ggttggtaatttgcgtaaatcaaaatggtagtactaattaatctactaatagattaatttgcaagtgaagatatatgggtttgtataatgtaaatataggatagtatgaagcaagatttttttgtttgttaaaaaaaaaaaagctctcatgcttatcttcttcccttagttatgtttcatttggg

SEQ ID NO: 45742 - DNA, 204 bp, Glycine max
  unsure (1)..(204): unsure at all n locations
  Clone ID: 701040780H1
cgtagtaagtcggattcngctcagccggtgaacaacgagaagacgttcgtttcctctgcttttccaagttttcatcgactcaaccatgctattcttacataactagggttaggagttagggcgttcttatcgttttcgctccgttaattacaacaacggccaacatggttgttctttcgctttcacctcccagcctctctaccg

SEQ ID NO: 45743 - DNA, 189 bp, Glycine max
  Clone ID: 701040781H1
cagcgtcttcataaacgcctttattctccatttccgtttccttcccggaattcgatttttcatctctgcaaatgagagagtgcatctcgatccacattggtcaggccggtatccaggtcggaaatgcttgctgggagctctactgtcttgagcacggcatcgggcccgatgggcaaatgccaagtgaca

SEQ ID NO: 45744 - DNA, 184 bp, Glycine max
  Clone ID: 701040782H1
tctggattagctgttcattaagggaattcatccccaattcttcacttctgaagagagttcagttttccctccctttggataagtctaagctagacactgtaaattggatttaattatcatgatttagttatcctctacatttatgtagagtaactattaagataattgtgctcttcagaagaga

SEQ ID NO: 45745 - DNA, 184 bp, Glycine max
  Clone ID: 701040783H1
ttcaaacccaaacaaaattgacaacatccatatcaagacaaactaacgcttaacgcaataccaaataccacagtttcaatcacatctctctctctctctctttctcgcaaatttctactttctgggttttctaatttgagattcgttgttccaatgagcgatccacttggtggtgttcgttgac

SEQ ID NO: 45746 - DNA, 176 bp, Glycine max
  Clone ID: 701040784H1
accttggatcaggtttagggaatggctgcaatcttagctcgaaaatcactccttgctcttcgtgcgcgccaattggctgtaagcggtcaagggctgcacagctcccaatactatggccttcggttaagtgcacactccttctctaccaaaagagaggatgaggaaagggagcaact

SEQ ID NO: 45747 - DNA, 70 bp, Glycine max
  Clone ID: 701040786H1
aggggaacggatctgctgggtgggactagataaagtgaagcaagctgacaagactaagggaagattggat

SEQ ID NO: 45748 - DNA, 183 bp, Glycine max
  Clone ID: 701040789H1
gcatgaggcaatttcaaagtttatacaaggcactgttgctgatggtgcaccagtagtacctatttcagcacagttgaagtataatattgatgttgtgtgcgaatatattgtgaagaagatcccaatccctgaaaggaactttgtttctccacctaacatgattgttattcggtcatttgatgt

SEQ ID NO: 45749 - DNA, 181 bp, Glycine max
  Clone ID: 701040790H1
ctcgagccgctctgtttctccctttctctctgtctctctctcgctcttcttctcatccagcaccgagtcacagactcaccgatcttccgattccctttcgtcttggtttatgagctcgaaggagagacccactcttggtggcacgcggattaagacccgctaacggtatattgctgcgccg

SEQ ID NO: 45750 - DNA, 181 bp, Glycine max
  Clone ID: 701040792H1
ctgttcaccattttcaattcattcctgtgttagattccaagtggtttggtttgttttgacataaataaacctttcaagatctcagaggggcagaagatcaaagccaagacaacacactctcatatataaaagagtgtctctgataatttgatctttgtttcttctctttctcccctttgag

SEQ ID NO: 45751 - DNA, 181 bp, Glycine max
  Clone ID: 701040794H1
gcgtttgctcacgacttggagttggaatcctcttcttcccctctggtgttctcagtacggaggagtgaaccggagctggtggctccggccaagcccactccccgcgaaattaagatcctatctgagatagattctcaggcgggtcttcgtacccaaattccaatcatacagttctaccgta

SEQ ID NO: 45752 - DNA, 186 bp, Glycine max
  Clone ID: 701040796H1
gacaaatgcaaggtgttggtcaacattgagcagcagagccctgatatcgcccagggtgtgcacggtcacttcaccaagcgcccagaggaggttggtgctggtgaccagggtcacatgtttggctatgccactgatgaaacccctgagtacatgcccctcagccatgtccttgcaaccaaactcggt

SEQ ID NO: 45753 - DNA, 222 bp, Glycine max
  Clone ID: 701040801H1
cgagatctcattcttcacctgcaactatttggattgctgatttttgttaataccatatttactgatattggcgcatttctttgagaaagttactaattcctagatagaggcaaaaatgttgggaattttcaaggagaagttggttaaagcacccaaagagctgaacagtccagcttcgttgaattcatgcactaagcctaagctaagtcacgaaatccttca

SEQ ID NO: 45754 - DNA, 216 bp, Glycine max
  Clone ID: 701040802H1
tcgaggttgaatttcgatgaggagtcgcccaagctgcctccttcccccgggcagagaagtgctctgatgtcgcctgctggtggaattgatgggaattcggcggccttcagcttggagtttggaaatggggagttcagtgggcctgaactgaagaaaattatggccaatgaaaagcttgctgagattgccttgatcgatccaaagcgtgccaaaagg

SEQ ID NO: 45755 - DNA, 215 bp, Glycine max
  Clone ID: 701040803H1
cgagtataactcctgtttctttattaattctctctttcaaatatatggcagaagatgcttcaattattccaacacacacaaaagcttggtactactctgaacatggtagtccaggtgatgttctcaaattagatcctaattggcccttaccccaacaactcaatgatgaccaagtgctcatcaaggtcatcgctgcatccattaatcccgttgat

SEQ ID NO: 45756 - DNA, 211 bp, Glycine max
  Clone ID: 701040804H1
gctcgagagaaaacgaaaaggagaagatgaaatgggatatgcagatggaggaaatcgaagcgattatggagaaaatttgggacctccacgataagctcagcgacgccattcactccgtctccagatcccactttctcacttccgtcaaaaccctcaaactcaacaactctccacggcaccttcccaacgccgccgtcgccgctgccgatga

SEQ ID NO: 45757 - DNA, 214 bp, Glycine max
  Clone ID: 701040805H1
tcgagctttatttttctcgtttttatttttttataaaaaaaaagaaaaacgaaacatattcttgcaatttcgttgtacaaacaaaattcccctattttcggcacgcctttgttgaatttccaatctctattttcctttctttctatttatacgtaataattccaaaaagcctaacgcgagagattcatcagtttttcaattattcctcgaattt

SEQ ID NO: 45758 - DNA, 209 bp, Glycine max
  Clone ID: 701040806H1
gctcgaggtgatggcaaggggaacttttgccaacattcgtcttgttaacaagctcttgaatggagaagttggtcccaagacagttcacattccgaccggggagaagctttatgtgtttgatgcagcccagagatacaaggctgaagggcaggacaccattgtgctggctggagctgaatatgggagtggaagttccagagattgggctg

SEQ ID NO: 45759 - DNA, 190 bp, Glycine max
  Clone ID: 701040764H1
ctttttcacgcgacgccctagttcatttttcttctccgtactctactctctctgttcttcactcactctcattcattcaccatgacgaaacaacatgccaattggtctccttacgataacaacggaggatcatgtgttgcgattgctggagcagattactgcgtcatcgccgcagatacgaggatgtcca

SEQ ID NO: 45760 - DNA, 212 bp, Glycine max
  Clone ID: 701040807H1
gctcgagttgggagagtagagtaccattgctccactgtcgccggccaccatgtctttctcggagttccgaccactcgacgacacgtccctcatcgaatacataaagtccgtccccgccctctcctccaaactcgccgacaacctcgacgacttatcagtcaaagaagtcggagatggcaaccttaacttcgtcttcattgtttccaaccccg

SEQ ID NO: 45761 - DNA, 209 bp, Glycine max
  Clone ID: 701040808H1
ggctcgagcacaaccatttcttttcctctcctctcttaatttgattcatgttaaaacaaatttcaataatattttttagaagaggagagagaaagagatagagaacccgttcttctttttttccattaacattttcaatctctttcaactaagacacgttcctctttccattcctttcttcctccgtcccattctcgaattggcgtgtg

SEQ ID NO: 45762 - DNA, 216 bp, Glycine max
  Clone ID: 701040809H1
ggctcgaggagaaacccaatgtggatctctcagcaagacaactcttcaagttggttcttcctcccagttgttaccttcatcatcctctttcttttacgtactttcctcaatcttttatccaaacggaacaatgattccaaaaaaccctcaccaccgtctcctccaaagcttccaataataggaaacctccatcaacttggtacccacattcaccgc

SEQ ID NO: 45763 - DNA, 211 bp, Glycine max
  Clone ID: 701040810H1
ggctcgagctcaaaaatctcatgccataagtttggtactactaaccttttagctgcttttgcttacaagctcctacattctctctccaggttgggaattagtgccattggtgatcatcatgttccttcttagaaggcaaacccagaataaccaggagaatgattcctcatatcaagatacaaaggtggctgaactcaagacaggtcttggg

SEQ ID NO: 45764 - DNA, 214 bp, Glycine max
  Clone ID: 701040811H1
cggctcgagttaggatccaatctttggaaggaagatactggctgtcttgattggcttgaatccaaggaacccagatccgttgtttatgtgaattttggcagcatcacagttatgtctgcagaacaactcttggagtttgcttggggtttggccaacagcaagaaaccctttttgtggatcattaggcctgaccttgtcattggtggctctgtga

SEQ ID NO: 45765 - DNA, 215 bp, Glycine max
  Clone ID: 701040812H1
tcggctcgagccacctccgaaccctccctcgccgtcgaaatcgcggacgccgctaccgccaaaggctgccactcaatcgacgcccccgtgtccggcggcgaccgcggcgcgaagaacggaaccctagcaatcttcgccggcggggaagaatcgacggtgaagcgtatggaagccttgttctcccatttggggaaagtgaactacatgggagggag

SEQ ID NO: 45766 - DNA, 192 bp, Glycine max
  Clone ID: 701040719H1
agagattctaaagcctctccctgcaggtgttgaaatcgatgaactccctaagcaaattgatgatacacagtacccaaaaacattcttctataaagaagaccttcatccaggcaaaacaatgaaagtacaattcaccaagcgtccctatgcaaaaccttatggtgtatatacatggttaacggatattaaaga

SEQ ID NO: 45767 - DNA, 193 bp, Glycine max
  Clone ID: 701040720H1
ccttatattgccggtcacacccgagtctgtaggagcaagagaggaagatgaattcagttgtcctattaaaagcggagaagaagcggcagagcctctgttaaggcaagagactccagttgaggagaaagaagcagttgggttcatagaggcatggaaaattcctggggttgctccttttgctctgtgtctattt

SEQ ID NO: 45768 - DNA, 194 bp, Glycine max
  Clone ID: 701040721H1
ctcactctgcacccaccattactcagcactgccattcttcaatcacactaatggctgtcaaccttctcagatcttcacaccgaagagggcatcaaatccctcgatcaattcctttctgggaaaacctaatatctctggggatcaattgacaaaggatgatatcaaagtgtatgcagctgttgtggaaaagccag

SEQ ID NO: 45769 - DNA, 193 bp, Glycine max
  Clone ID: 701040722H1
caaaaacacaccatgaagtccaatccaaaatcaaaaccaccaccccacttattatactttctaataatcctctccctatcgttctttttcccgtgtgtatcctcctctagaaaacaacaattcaaagaagcccctcaattctacaactccccaaactgcccctccatcgaacaccacgacatattaagctcct

SEQ ID NO: 45770 - DNA, 189 bp, Glycine max
  Clone ID: 701040723H1
ttctggctgtgttaatatgcgtttcagcactgtcactgagtccttctgttgcgggggaagggcaaaataatggccttgttatgaacttctacaaggaatcatgccctcaggctgaagacatcatcacagaacaagtcaagcttctctacaagcgccacaagaacactgctttctcctggctcaggaaca

SEQ ID NO: 45771 - DNA, 189 bp, Glycine max
  Clone ID: 701040727H1
aattggatgagaaaagaaaatcctttgaagatggattgaagaataaattggtggtagtgggaaagaaagaagctgaaatcactcacatggaggagaaagttgcgaaacggaaacaagccttgggaaagaaagcagagaagcttaaagagaaagagatagcgtatgaacaaaatgtcacagctttgaggg

SEQ ID NO: 45772 - DNA, 191 bp, Glycine max
  Clone ID: 701040728H1
cttttctcactaaccaaacatgaatatcaaacccatcatcatcatagctttcttaatttccctctctttaacaaacgtcgtcgtttcagctcgactctttcccaacgtctcctcctggctcaacgcccacgcccctactggaggcgcgtgggatgcctttctcaactttaccggttgtcaccgcggcgaca

SEQ ID NO: 45773 - DNA, 169 bp, Glycine max
  Clone ID: 701040729H1
ctaattcatccaggaatatggctgtctacgctagcataataccaggagaccctattgatccttctcctggttctcctggttcttggtaatttatttcctcaccaatctctcatcatatatgtgacattatttacttgtgtttttctttatatagtttaatttgacttgg

SEQ ID NO: 45774 - DNA, 191 bp, Glycine max
  Clone ID: 701040730H1
cggaacctctttctcaggttttataaaatctcatgtctgttcaaagctttcttattcttcgtattcatcatacaccacgccaaatcacaatacccttcagtttttgggaattttggctcagttgagatctctgtgaaacgggtttggaaaatttttctgatcttgaggtttatgagattttaactgtggaa

SEQ ID NO: 45775 - DNA, 176 bp, Glycine max
  Clone ID: 701040731H1
gaaaggagtgggtttcattaggtgaaagacaaacaagttgaccttaaagttaaagtcttaaagtatgataaacgagatatagaaattagaaagcgtgaggaggattttgctggttttatacgcgccgaatgtgtgagagcgaagggagagctggatacagctaaatggctatggtt

SEQ ID NO: 45776 - DNA, 202 bp, Glycine max
  Clone ID: 701040732H1
cgcggcttgagtcttcttctctctttcttagattctctcttttttctttctgcactccgccatgattgaggattaggagatgtcttcctctgtcaccattggcgatgattccctcactggtcacatcatatctacaactattggaggcaaaaatggggaaccaaacagactattagttacatggcagaacgggttgtaggaa

SEQ ID NO: 45777 - DNA, 196 bp, Glycine max
  Clone ID: 701040733H1
atttgactcttgttctgaacgacttttcaagagaatcaaaccatggcagtgaaagtatacggtccccactgtgcttccaccaagcgggtgctggtttgtctggttgagaaggaagtcgaatttgaggttgtccctgttgatgtcactaagggggagcagaaggatcctgagtacctcaaactacagccatttggag

SEQ ID NO: 45778 - DNA, 196 bp, Glycine max
  Clone ID: 701040734H1
actcgagccgaatcggctcgagcaatgtttggaactcgattgcctccagtaattggagggtactacacctttgttccaaccacaatctcaattatccttgctggccgattcagtgatgaaccagatcctatagagaaattcaagaggataatgaggtcaatccaaggtgctcttattgttgcttcgactcttcaaa

SEQ ID NO: 45779 - DNA, 192 bp, Glycine max
  Clone ID: 701040735H1
tgaagggccatgactttaggctacttccattcgggtcgggtcgacgagtatgcccgggtgcccaacttggtatcaacttggcagcatccatgttgggccacctcttgcaccatttctgttggaccccacctgaaggaatgaagcctgaggaaattgacatgggagagaatccagggctagtcacatacatga

SEQ ID NO: 45780 - DNA, 184 bp, Glycine max
  Clone ID: 701040737H1
aaggcaaaggggatcgctgaaatcaattagtctggttgtagtgggaaaagaaaagaaaatgaaaatgggtggtgggtgcaagtgtttggtatcgttggtgttggctttggtgttgatgaggagtttggcggaggcgcaatcgggcaccagcaccacttgcgcccaggagctaatcccatgtgtg

SEQ ID NO: 45781 - DNA, 77 bp, Glycine max
  Clone ID: 701040739H1
ctcttcttcacaccaattgacaaatcaccaaaagcaccactgctattgagagagaggattcagaaagacaacatcaa

SEQ ID NO: 45782 - DNA, 188 bp, Glycine max
  Clone ID: 701040740H1
taactaacgacttaccagtaaagagacattaattaatttgcaaaaagaagaagcattgagattgggattgcggagatggagcggaagtggagcagtgaatctggtgggaatgtgatatcgtcgccatcacactcgcgtaatgggcattctcgctcctcttcgctcactatccccggaggaggaatttc

SEQ ID NO: 45783 - DNA, 190 bp, Glycine max
  Clone ID: 701040741H1
aaaagttggcaatcttcacagcacttgctttttcccagaagctgtctggtctcccaccagaaactgtgttccaaccacttcttaaagataaccttgtggccaaagggctagttctgtcatttatgactgacttctttaaggagtatctgattgacaacagtcttgatgatcttatttcaattctaaaacg

SEQ ID NO: 45784 - DNA, 187 bp, Glycine max
  Clone ID: 701040743H1
ctcgagccgccctcctcatttttcttcttttccgttcacgaaatcgatggattttctggtcggtcccactttcaccatcgacgtcgcctcctccccgcctccgtacgacgccgacctccccggtgtcgccaccgccgccgaccgaccgtacggactcttctccggccactcctccgacagcgagtcc

SEQ ID NO: 45785 - DNA, 188 bp, Glycine max
  Clone ID: 701040744H1
ggaaaaatggcacctttcgtttccctctctttgttgcttctctttctcaaccaccccctcctttccctctcaaccaaccctgaagggaacgctctgcatgctttgagaagcaggctttctgatcccaacaatatgttgcagagttgggacccaacactggttaatccctgtacttggtttcatgttac

SEQ ID NO: 45786 - DNA, 184 bp, Glycine max
  Clone ID: 701040746H1
cgccattctctccgcgcacgttttccgggagtcgcggcgagtcaccgtcgtttccgccggcaagtctctctcaccgttgccatcctccttcagagaagttgagaaaatggacggccatatgggaatgaggaaaatcagctctcactgctctatccctgatttggatgattctgatatcttacgt

SEQ ID NO: 45787 - DNA, 191 bp, Glycine max
  Clone ID: 701040748H1
gaaaatctcaggatgagttttaagaagatatgtgtgagtggggacaatgccactctatctgagtttgaggaggtgctgaaagcaatgaacatgccatcactgatccctctagcaccgcgaatatttgacttgtttgacgacaaccgagatggaacagttgacatgagagagatactatgtggtttttccag

SEQ ID NO: 45788 - DNA, 193 bp, Glycine max
  Clone ID: 701040749H1
ctctctctctctctctcattcacacgaatcacactctccacagtgcgattcattcaccaatggatcgcaacggtgttctctctcttgcattcatctgcattgtagtcgccggcgtcggaggccagtctcccgccgcagcgccctcgaacactccggcaacccccgccgccgccactcgcgcccaagcaccttc

SEQ ID NO: 45789 - DNA, 179 bp, Glycine max
  Clone ID: 701040752H1
aaaattaatcatcttacttatttattctccgaaaatggttgatttacattggaaatcaaagatgccaagttccgacatgccttccaaaactctaaaactctctctctccgacaacaagtccttaccctctttgcaactacccttccgcaccacagatatctctcacgccgcaccttctg

SEQ ID NO: 45790 - DNA, 192 bp, Glycine max
  Clone ID: 701040718H1
cacgaatatcttgttgtttggagcgatccgagaataactctgtaaacatgttggtttaccaggatctccttataggtgatgagctctctctctgagtccttccgttacatggaaattgactctggaatgctgtggtaagttgaggggaagtgggctgttaaaggagcagtcgatgtagacattggtgcaaac

SEQ ID NO: 45791 - DNA, 189 bp, Glycine max
  Clone ID: 701040753H1
gcagaatttttggagtcaaacacggcgttaagtgtgcaacaagagaatcggttaaagccaaatgggggcaacagttaggaatggagggtcatacgttgagagactgaagctgaatgaagtaagggaaaaaatggccaaaaatgtaatgggaaagatgtcagtggagcaattgtctgatctgctctcttt

SEQ ID NO: 45792 - DNA, 180 bp, Glycine max
  Clone ID: 701040754H1
gtgatttcagtgagtgatcggtgttcacttgatctcatcataatcgtcagcgtcaattgaagaagatgccgatcagaaacatcgccgtcggaaggcctgaagaggcgactcaccccgacacgttgaaggcggctttggctgagttcatctcaaccttcatcttcgtgttcgccggctcag

SEQ ID NO: 45793 - DNA, 180 bp, Glycine max
  Clone ID: 701040755H1
cctatccccttcttctctctcaaacagaatgggaagtgctggaagaactgattatggtgcatacacctatgagaatcttgagagagagccttactggccatcagagaagcttaagatttccatcaccggtgctgggggttttatcgcatcacacatagctcggcgcctcaagacagaggg

SEQ ID NO: 45794 - DNA, 187 bp, Glycine max
  Clone ID: 701040757H1
gcgggagacagtagcaaatagaaccaagccaacaatgggtaccgacaagccaaaccgggtcgggtcgtttatatacatcactgatccgattcgtgttttcctctccggcgcgtcgaaagacgcgactctctccgacgagcttcgacgaacatcctccgatctgctcctccaatcggatgtaccctac

SEQ ID NO: 45795 - DNA, 183 bp, Glycine max
  Clone ID: 701040759H1
cttagttctttccttatcctttcgctatccagacatgtaatctctcctttaccaagtaaatccatccttcttccattcatttctcatccctttgttctacatttaatcacctcatttactaatttttctttctttcttagacctttgctcgatctgattttgaaagcttgactttgggtttag

SEQ ID NO: 45796 - DNA, 183 bp, Glycine max
  Clone ID: 701040760H1
gaagtatgcagagcgtttggagtccatttgagtacaattgccttgcacagaaatgggagactataagacttgaggacctcacaattgataggagtgcaagtaactgtggttaactgtttgtacagattgaagaacctttccgatgaaaccgtgactgcaaactgtccaagagatgctttgctg

SEQ ID NO: 45797 - DNA, 188 bp, Glycine max
  Clone ID: 701040761H1
caaagcagcacccatttggatcctctcttctcttctttgatctccgttaccctttttgttttctcaacagagagagagagagagaatctttcgaagttcgtttgcgtgtgttgtgtggtcagtcaccgatggcagcaccacctgcgagggcacgtgccgattacgattacctcatcaagcttcttctt

SEQ ID NO: 45798 - DNA, 185 bp, Glycine max
  Clone ID: 701040762H1
cttcagtgatctttgattagtactaagctaaaccatttcttattccctcaaaatcaaaacctttttctttctagctatttcccttttcaaatcatgccacctaacatcaccaccgttgttgccaatgtcaccaccgagcaattacccaaggctcgtggaggaagtgggcgtgccttcgtgacctt

SEQ ID NO: 45799 - DNA, 261 bp, Glycine max
  Clone ID: 701040682H1
cgaagtttccctcaggatagctggagcccgcgggcgagttctatcgggtaaagccaatgattagaggcatcgggggcgcaacgccctcgacctattctcaaactttaaataggtaggacggtgcggctgctctgttgagccgcgccatggaatcgagagctccaagtgggccatttttggtaagcagaactggcgatgcgggatgaaccggaagctgggttacggtgcccaactgcgcgctaacctagaccccacaaaggg

SEQ ID NO: 45800 - DNA, 259 bp, Glycine max
  Clone ID: 701040683H1
atttaagtgaagtatacctatttgatttgcctcattagatcgggttggctacgaattttcttcgaaacccttctcttttctcaattgggtttccatctttgattggatttcattgccatggctccaaaggatcccaagcaagttgctgctgcttctggtggtgggggtggcttttttgcttctattgcttccagtttgtccaattttggcagtgccatgtccaaatccgttaatggtttggtgggctacgaggggctgg

SEQ ID NO: 45801 - DNA, 260 bp, Glycine max
  Clone ID: 701040684H1
ctgaaacgggcgtttgcctttgcgtttgcgtttgcgtttgcattgatgttgctgttgctgttgctgctgttcctatctgttgctctgaaatctgaattcaagaaataaaaaataaaataaaatagcataacatggcccaggattctgagaagagattccattccatcatggacaagctcttccatcctcccaaacccccttcagcctccagttcatctggagtgcagttaccagggagtagtaagaaacgtccttaccag

SEQ ID NO: 45802 - DNA, 254 bp, Glycine max
  Clone ID: 701040685H1
ccccttgtttggggaccataatttcgccatccatagagatggcaaatcagttcacctttcacttgatgaaagaacaggttctggatttgtgtctcatgacctttaccttcacgggtatttcagtgcctcgatcaagctgcctgctgattacactgctggagttgtggttgcattttatatgtcaaatggtgaaatgttccagaacaaccatgatgagatagactttgagtttttggggaacattagaggcaaag

SEQ ID NO: 45803 - DNA, 257 bp, Glycine max
  Clone ID: 701040686H1
ctttgattttgcatcctttggagtgagctctgatactcttggattagctgttcactttcagacttccaaattgcaaaggatgatgaagaagaatcagagcaagcaagttaactcgttgaccacgacacgtttgtcaccattggcgaaacccttcacgctcaaccgttctaccctccaaccctgctcaagttcccctttttcagggtacccttttcttgaatcgccaaaagaatgtgactttgatgggtttggggagg

SEQ ID NO: 45804 - DNA, 258 bp, Glycine max
  Clone ID: 701040687H1
gtcaggttcttatgatgaagaaagaacttgaaaaggatccagcacttgcccaggagaactgggataggttccttccaaaattcaagaacaaaaatgttaagcaaaagaaggttaacactaaacagaagaaaccatacactcctttccctccacctcaacagcccagtaagattgatatacaattagaaactggagaatactttttaagtaacaaaaggaaatcagcaaagatatggcaagagaagcaagagaagcagg

SEQ ID NO: 45805 - DNA, 70 bp, Glycine max
  Clone ID: 701040688H1
ttcagatgcacggccgccctttttttttttttttccaaaatttccagccataattttgggctttctatcc

SEQ ID NO: 45806 - DNA, 252 bp, Glycine max
  Clone ID: 701040689H1
gcacactccaaagcttatttgttgctttgtgcttaatggaagggccttgagcttttctttctctctttctttgctctcttttcttttaggtttccactctctctcacacacacactctgcaataatctctcttctcttcttcagtctctcaactactgcctaaccaaaccttccatttccgtatgcagtttcttaaatttggagtctgatgtctccgccactgctggttactgaagaagacgaaggacagag

SEQ ID NO: 45807 - DNA, 252 bp, Glycine max
  Clone ID: 701040690H1
gtgaaacactagctagggtattgggagctctcgttgtttcggagttagggaccttacgcagccatggccactgctacgaatgccgccgccgccccaccacgccagctctcccagaaggaagctgacatccagatgatgttggccgccgacgtccacctcggcaccaagaactgcgacttccacatggaacgttacatcttcaagcgccgcaacgacgggatttacaatattcaccttgggaagacgtgggag

SEQ ID NO: 45808 - DNA, 146 bp, Glycine max
  unsure (1)..(146): unsure at all n locations
  Clone ID: 701040691H1
gtttccgttctagattgcaaccttccttcgtactccgtgtttacgtcgttcgtgtgtggaaagtgggaaaagataacaccccaatttcgaagccccattgctctttccttctcccctaactccgaattgcctgncatcacacacac

SEQ ID NO: 45809 - DNA, 253 bp, Glycine max
  Clone ID: 701040692H1
gagaactgaagaagggtttgaatccaccatcactcacaaatctggtatttgtgtcgccttacatgactacagctgtcaaaactggcattgtcgttggcatcatatcacttgcggaaggaatagcagtaggaagaagctttgcaatgtacaaaaattacaatattgatggcaacaaagagatgatagctattgggaccatgaacgtagttggttctttcacctcttgctacctcacaacaggaccattttcgcg

SEQ ID NO: 45810 - DNA, 253 bp, Glycine max
  Clone ID: 701040693H1
ggagttcttgagagaaaacggcgacaacgaaaaccgttccgtctcgcggagtgacttccctcccaacttcatcttcggagttgccacttctgcatatcagatagaaggtgcttgtaaggagggtggtagaggtcctagcatatgggatgcctttacacacacggaaggaaaaattcttgacaaaagcaatggtgatgttgcagttaatcattatcatcggtacatggacgatattgatcttatagccaagttg

SEQ ID NO: 45811 - DNA, 158 bp, Glycine max
  Clone ID: 701040694H1
caaagacacagagtgcgttcgttgacgacaaacacacacaaacacacaacaaaagctcgccggaaaatctttctccggcgacctggaattccgacgaaggtagttgcggctcacttcgtcccgaaactgcaggcccttcaaagtatcaaactcttggt

SEQ ID NO: 45812 - DNA, 252 bp, Glycine max
  Clone ID: 701040695H1
aacacaataaactccttcctcatttctcatttctcattcaacaccatggcaagaacaaccaagtccattttcttggccttcttactactatgctctttctcactgggggtagtggtagtagcccaagaggaggcaatagcaaaatccgaaagtgaagcattaggggaaccagagaaaagagaaacacttgaaatcatcattggtggaggtggttcacctgctccttctccctctccccctacatattgccca

SEQ ID NO: 45813 - DNA, 256 bp, Glycine max
  Clone ID: 701040696H1
ccattttcaagctctcaacgccatctccagctgcttccttatcagaagcgcttcgccccagagattctcgcttcctctccttcaatccttcttccaacgctattaattacaaaattaacctctccgcttccctccgatccattcactccctccctcttaaaacctccttgcggatcaaatgctcccaaacagatgggaatggaagtcctgcaaagaggacagtgcttcatgatctttatgagaaagaagggcagag

SEQ ID NO: 45814 - DNA, 200 bp, Glycine max
  Clone ID: 701040701H1
cgacaccccaaccaacctcactctctctttctctctgttttctggtaattcatcaattgattcaaaatgcagaggctcaaactgcaactagtgctattcctctcaatctcaacttgtcacactgttttctccttcactgatgggttgttgccaaatgggaacttcgagcagggcccaaagccatcacaattgaaggggtc

SEQ ID NO: 45815 - DNA, 205 bp, Glycine max
  Clone ID: 701040702H1
ctcgagctcaaaaatctcatgccataagtttggtactactaaccttttagctgcttttgcttacaagctcctacatcctctctccaggttgggaattagtgcctttggtgatcatcatgttccttcttagaaggcaaacccagaataaccaggagaatgattcctcatatcaagatacaaaggtggctgaactcaagacaggtct

SEQ ID NO: 45816 - DNA, 198 bp, Glycine max
  Clone ID: 701040703H1
ctttctccaccgagagagaaatggaagcagcatcatggccgacaataattctactactgatcattatgatatgggcatggaagatgctgaactggttatggctgacgccaaagaggcttgaaaggcttctgagagaacaaggccttcaaggcaactcatacacgctttttgttggggacttgaaggagtttggcaaga

SEQ ID NO: 45817 - DNA, 199 bp, Glycine max
  Clone ID: 701040704H1
tctcctcagtttctccaaacccaaactttcacgacagggacctgtacagatttagttaaggtttttgcatcatcactgtgtgaagataatatagatatggaaatctcccatgacatcaagatcaaggatgacaagctaggtgatgtaaaggaagagaagattaaggcagaagcggaactgaagcataaatcagttgaga

SEQ ID NO: 45818 - DNA, 196 bp, Glycine max
  Clone ID: 701040705H1
tttgtattagaatcgagaaaagcgttaatctccgatggcttcgtcgagggacaaggaacccgcgccgccacatcatcacccacctcttctgagcagcctcgtcgtccgcccctcccacaccgaggccgtcgcagccggtggtggtcgcgtcgccgacttcgagcctggcgaactccaccgtgatccccctcctcct

SEQ ID NO: 45819 - DNA, 195 bp, Glycine max
  Clone ID: 701040706H1
tccatgctttcttaattctcacccccctcactccttcaaacaacacccttttttatttctttctcctctgtttctctctctctgctgtgcattctggtggcatcacagagagagacacagttgagtgagccaccaccttctccaattcatctactttctctccaattcttcaaaagggttgtctccaattcttca

SEQ ID NO: 45820 - DNA, 193 bp, Glycine max
  Clone ID: 701040707H1
caggtctgcaaatggttcagaacaaaatattaaaaggaatgaggaaaatgattatgatcctgtgcttagtgagcttaaagctatgacttctaatgggaatgatgcagacaggcttgcaatacggattccagaagctaagggttctgggccttctggcagtaatggtcaaatggatgctacatcagggggggtt

SEQ ID NO: 45821 - DNA, 194 bp, Glycine max
  Clone ID: 701040709H1
gaaaaaccctaattacaagaagttgcaaaactaagtggaataagagctgaaaaaccctaataacaatgggaggaaaatgtccgcacaggaacgtgaagaagagaagatattctcacaagaccgcgcggcgaaccaaatttgagctgaaaggggacgacatggtttatgcgcactcaacaaacccgatcaagaga

SEQ ID NO: 45822 - DNA, 191 bp, Glycine max
  Clone ID: 701040711H1
ggacgtgacaatggcagcatgtggttctgggattggaagagtggtcataatttccagcaatcccaaacaattgtacagcctggttccctggatagtgaagctggtatttatgcttgtacctatgatcttactggctcgaggcttataacctgcgaggctgacaagacgataaaaatgtggaaagaagacga

SEQ ID NO: 45823 - DNA, 191 bp, Glycine max
  Clone ID: 701040712H1
cctcgagctctctcaagctctgagcgatttctccgcctgtagtagcgatatctcccgcgagctccagaggctcgccaccgtttcctcctcccaacctcctcctgctgctcctcacgtcgacggccaaccccaacctgagcacgagccctgcctagggtttctccagagggagagcttctccaccgagatca

SEQ ID NO: 45824 - DNA, 193 bp, Glycine max
  Clone ID: 701040714H1
gcgaagacccctttttctggttattaacagagtcataaaaaaccaaagttttctattctctgtagctcacatgatgggctaagaatatctgactttggggtggaaagtatggttggcaaggagagtttgagaactgaggtcttgaacttgagctttgagaagcttatgatggttgaatgtggtggaaatagtg

SEQ ID NO: 45825 - DNA, 256 bp, Glycine max
  Clone ID: 701040680H1
ggaggtggaactgggtctggaatgggtaccttgcttatctcaaagatcagagaagagtatccggataggatgatgttgactttctcagtgttcccgtccccgaaggtctctgacactgtggttgaaccctacaatgccactctctctgttcatcaactagttgagaatgcggatgaatgcatggtcctcgataatgaggcactctacgatatctgtttccgaacactcaagctcacaaatccaagttttggtgatc

SEQ ID NO: 45826 - DNA, 193 bp, Glycine max
  Clone ID: 701040715H1
gaagaatgactaggtgtgaccataagaagaattttggaaacgaaacctcgtaaaggcttctcactaacaaacaatggcggctgaggctgagcttccggagtacttaaagtgtccgatttccctggaaattatgtccgaccccgtcatcctctcttccggccacaccttcgaccgctcctccatccagcgctgg

SEQ ID NO: 45827 - DNA, 83 bp, Glycine max
  Clone ID: 701040716H1
gtgctgttaggatgcagtgtgctttgatgatgctttgatgaatatgcagtgtgcttttttaagtctattattttcttttattc

SEQ ID NO: 45828 - DNA, 197 bp, Glycine max
  Clone ID: 701040717H1
aattagccaaacacaccacagcaccaaactagttggctcaattctctttgaatggctttggaggctttgaatttaccaacagcagccaccactcccttccgtggttaccaagaagaggaggaggaggttgaccttcacctacgcgagccttgggcccagagaaaacgctccaaacgacctcgttttgagtcggagga

SEQ ID NO: 45829 - DNA, 268 bp, Glycine max
  Clone ID: 701040650H1
ttcactttggaaaaacatggtcgcatagatgttttgttcagcaacgcgggaataataggttccttatctgggatccttgaccttgatctgaatgagtttgacaacacaattgccacaaatgttcgcggtgtagccgccacgattaagcacacggcacgtgccatggttgctaaaagcacccgtggatccatcatatgcaccacaagtgtggctgctatgattggtggaactggacctcatggctataccacatcaaaacatgctcttc

SEQ ID NO: 45830 - DNA, 265 bp, Glycine max
  Clone ID: 701040652H1
ctcaagcatgaacctgcttttagggctgcaatcataatgttccagagagaatttgccatgagactggttgctcagcctggtgataaactatattgtcgtctcacagtcaacactcaactacatgctcgagtcttccacctcctcaaagttggaagaaacaacttcaggccccctcccaaggtggattcctctgtggtgcgaattgagcccaggaaaccccgtattgaagttaagcaaaaggagtgggatgggtttttgcggattt

SEQ ID NO: 45831 - DNA, 259 bp, Glycine max
  Clone ID: 701040654H1
aaatattgtacacataaatctagctccaattcctaatcacctggttaatttcttcacatagagctatcaagatccaacgttaacatgaagaatgttttagtaaggtcagctgcgcgagctctgcttggcggcggtgggcggagtactaccgccagctctcaacggcggcgatcgtggaacagagacaccagcacggtggcggcgcgtttggaagcttccacttgcggaggatgtccactcttccagaggtaaaggatca

SEQ ID NO: 45832 - DNA, 259 bp, Glycine max
  Clone ID: 701040655H1
agaagagaagcgtggtgcttcagaagggcaagccaataaataccttgatgatgtatctaatctgacatcagaacttgaggcaattcaagcacgagcctcaaccctcgaaactactctgcaagcggctaatgaaagaggaaaggaattagaagattctttgaatgcagtgacagaagacaagaaaaatttagaagatgcttctatcagtttgaatgagaagcttgctgagaacgaaaacccattggaaattttgagggat

SEQ ID NO: 45833 - DNA, 263 bp, Glycine max
  Clone ID: 701040656H1
aaaagagaaagaaggaaggcgaagccacaaagaaagacaacaatagtttcagaagcagaaagaggttttccgttccgaaacgatgtcctccatggccatcaccaccagagacagagatcgagagcttctcatccccgtcgccgacacccccgccggcgatgccgccgtctccccttcccccaagccatcgtcgtcggcgtcgtccccgcatcattccggacgcgagactttttacaaagttgttagaagctgggcatcaaaaa

SEQ ID NO: 45834 - DNA, 258 bp, Glycine max
  Clone ID: 701040658H1
aaattcctgaatattggatcggaggccaaattaagaaagaccactgaaattttaaatgaatttgttttcaagctaatcaacactagaattcttcaaatgcagatttcaaagggagattctggtagcaaacgaggagatattctgtcaaggtttctgcaagtgaaggaatatgatccaacatacttacgagatataattctaaactttgttattgcggggaaagacacgacggctgccacactttcttggttcatgtac

SEQ ID NO: 45835 - DNA, 258 bp, Glycine max
  Clone ID: 701040659H1
cttcaacaaggaatctctggtggaagcgttgttagggaagaagcttcccaaggaatttgggcacatcaagggtttgaaagatatgattcatgttcagctttctgcgattcctggagcggaggatggggcaaagtttcagtgccccattgcagggcttgaatttaacggaaagtataggtttttcgcgctgaggaattgtgggcatgttttgagtgccaaggctctgagggaggttaagtcctcttcgtgtttggtttg

SEQ ID NO: 45836 - DNA, 258 bp, Glycine max
  Clone ID: 701040660H1
gaacaacggaagttgaatcctccattttcgacccgcgcgacgatggaacctctgaccactggatccaacggaactcttcccttgtccgtttaacgggaaagcacccgtttaactcggagccacccctccctcgcctcatgcaccacggcttcatcaccccggtccccctccactacgtccgcaaccacgggccagtcccccgggcccgctgggaggactggaccgtggaagtcacgggcctggtcaccaggcacacat

SEQ ID NO: 45837 - DNA, 256 bp, Glycine max
  Clone ID: 701040661H1
cgagaacaaaaaaaaaaaaaaaatccgggattcgctcttctcttggaaaagtgaaacccagaagtacgaccgaaagagaagagcgttttaaaagtgagaaaagatggggttgtcgttcacgaagctgttcagcaggttttttgcacagaaggaaatgaggattctgatggtaggccccaatgacgctggtaagacaaccatcttgtaaaagctcaagcttggagaaatcgtcaccattatccccaccatgggtttt

SEQ ID NO: 45838 - DNA, 260 bp, Glycine max
  Clone ID: 701040662H1
gaggaagcaagcaacattagcagctgaagcaaaagctcaatcccttgcgttaatggtggattgccagatttaattcgattttggaaacaacttatcgatcccccaatccgctgtgaacagatcgagggcgtggcctgtttgatttgaactgaatttcggattgaaggatctcattttcttggagcattaaagcagaaatttctagcgctatggggtttccagcagcagcggtggccgaatgaccaaacacctttcttaac

SEQ ID NO: 45839 - DNA, 257 bp, Glycine max
  Clone ID: 701040663H1
actcgagccgaatcggctcgagcgaggagtcaacaccttttctccacaaggccgtttgtttcacggttgagtatgcaatcgaacccatcaagctgggatcaactgcgattgggttgaagaccaaagaaggagttgtccttgcagttgaaaagcgcatcacatcgccgctcctggagcctagtagtgttgagaaaattatggaaattgatgagcacatcggttgtgcaatgagtgggttgattgcagatgctcgaaca

SEQ ID NO: 45840 - DNA, 259 bp, Glycine max
  Clone ID: 701040664H1
attctctctctctatatatatatggtaaaaagtagttagttccaggatcaactcccataagtagatgaagcatttgatgattcattcctgaagtccgtgaaacaacagctttcatggttccattggtggctggtgatggaaccaaaactcaggcacttgctatttgccacacaaatacttctggaatgaatcatcaaatgcttcatcaacttatgggagttgatcctggaactaaccctgtttgccatttccttggaag

SEQ ID NO: 45841 - DNA, 269 bp, Glycine max
  Clone ID: 701040665H1
tctctctctctctctcttttctctgtgtgtgtgcgtggattggtgaatttgagattgaagaagatgatgcaggctggacccggcggcatggcccaacaagcgaaccagcaatacgcacagcaacagcaacaacaacaacaacaagcctacatgatgatgccgccgcagcctcagccccctcagatgtgggccccatcggcccagcctccgtcccaatcggtagctcctccgcaacccaccagcgccgatgaggtccgtaccctctggat

SEQ ID NO: 45842 - DNA, 266 bp, Glycine max
  Clone ID: 701040666H1
ttcactttggaaaaacatggtcgcatagatgttttgttcagcaacgcgggaataataggttccttatctgggatccttgaccttgatctgaatgagtttgacaacacaattgccacaaatgttcgcggtgtagccgccacgattaagcacacggcacgtgccatggttgctaaaagcacccgtggatccatcatatgcaccacaagtgtggctgctatgattggtggaactggacctcatggctataccacatcaaaacatgctct

SEQ ID NO: 45843 - DNA, 263 bp, Glycine max
  Clone ID: 701040668H1
ctcaagcatgaacctgcttttagggctgcaatcataatgttccagagagaatttgccatgagactggttgctcagcctggtgataaactatattgtcgtctcacagtcaacactcaactacatgctcgagtcttccacctcctcaaagttggaagaaacaacttcaggccccctcccaaggtggattcctctgtggtgcgaattgagcccaggaaaccccgtattgaagttaagcaaaaggagtgggatgggtttttgcggat

SEQ ID NO: 45844 - DNA, 260 bp, Glycine max
  Clone ID: 701040669H1
gcccggtggaaccaaacgaagaagacgttccgttttccctctgcttttccaagttttcatcgactcaaccatgctattcttacataactagggttaggagttagggcgttcttatcgttttcgctccgttaattacaacaacggccaacatggttgttctttcgctttcacctcccagcctctctaccgctttcctcgcaaagaaactgtctccccaagaacacgcggtgaagctagcgacctttcgcaacaattcattt

SEQ ID NO: 45845 - DNA, 259 bp, Glycine max; identical to SEQ ID NO: 45831
  Clone ID: 701040670H1

SEQ ID NO: 45846 - DNA, 256 bp, Glycine max
  Clone ID: 701040671H1
agaagagaagcgtggtgcttcagaagggcaagccaataaataccttgatgatgtatctaatctgacatcagaacttgagacaattcaagcacgagcctcaaccctcgaaactactctgcaagcggctaatgaaagaggaaaggaattagaagattctttgaatgcagtgacagaagaaaagaaaaatttagaagatgcttctatcagtttgaatgagaagcttgctgagaaagacaactattggaaattttgaggg

SEQ ID NO: 45847 - DNA, 255 bp, Glycine max
  Clone ID: 701040673H1
ctcttcctcaccgattgctagaatggaatttcgatgctcagtcatctcttttaccattctcttctctcttgctcttgcaggagagagccatgtccatgcatcgctacctgaggaagattattgggaagctgtttggccaaacactcccattcccactgcactgcgagagcttctaaagcctctccctgcaggtgttgaaatcgatgacctccctaagcaaattgatgatacacagtacccagaaacattcttcta

SEQ ID NO: 45848 - DNA, 248 bp, Glycine max
  Clone ID: 701040674H1
cactcaagagactgatagatatcagcatgggggttataactcctttgacagagcagctaacaaagccattacccaatgccatggttctagtaaaccttaaggaaatatctaccggagcttataagcttttgccacaaggaacacgcttggttgtgtctgtccgaggtgatgagccttatgaagaactggacattcttaagggtgttgatgctactatgcttctcccatgacttcccttatacagaaga

SEQ ID NO: 45849 - DNA, 253 bp, Glycine max
  Clone ID: 701040675H1
gaaatgtcaaagatagaattgagatcaatgtacagtctgttatgtcaagatgacatgccaatggttagaagatctgctgcttcaaatcttgggaagtatgctgctactgttgaatatgcccatttgaaggcagacactatgtcaatttttgaggatcttactaaggatgatcaagactctgttagattgttggctgtggagggttgtgctgctcttgggaaactgctggagccacaagattgcatcacacata

SEQ ID NO: 45850 - DNA, 256 bp, Glycine max
  Clone ID: 701040676H1
caactactaacacatacactactctctctctctctcttattgtatggccgccaattccagtagccgagggatcaccgccttagggaagcgagtcgccaaccggatctggacttccaacgcacctcctctcacttcaaggaggggagcatacagtagcggctcagtgtacgacaagaaccctgatgatgagatccagtctgggcaggtcccagacgatgtgatccaggcggcaacacaatccggcaaatactgggcc

SEQ ID NO: 45851 - DNA, 254 bp, Glycine max
  Clone ID: 701040677H1
gcctaggcaacaatgtgaggtctatgccttctgtggtggatttgggagctgcactgagaatgccatgccatattgtaattgtatgaatggttatgagccaaagtcacaatctgattggaatcttacggattactcaggagggtgtgtgaagaagaccaagtttcaatgtgagaatccaaattcctctgacaaggaaaaggacaggttccttccaattctcaacatgaagttgcccaatcattcgcaatccatag

SEQ ID NO: 45852 - DNA, 250 bp, Glycine max
  Clone ID: 701040678H1
cggctcgagggataagatgtactacaggtacatgggatcactcactgcacctccttgcactgaagacatcatttggaccgctgataagaaggtaagaactgtttcaagggggcaagtgaagttgctcaaggatacggtacttaaatattatgccaaatggaatgcaaggccgctgcagcccctaaatcaacgagcgatacaactttacgtcccaaagacaaagaatatacccgtgtattagtttttcttg

SEQ ID NO: 45853 - DNA, 271 bp, Glycine max
  Clone ID: 701040649H1
tctctctctctctctcttttctctgtgtgtgtgcgtggattggtgaatttgagattgaagaagatgatgcaggctggacccggcggcatggcccaacaagcgaaccagcaatacgcacagcaacagcaacaacaacaacaacaagcctacatgatgatgccgccgcagcctcagccccctcagatgtgggccccatcggcccagcctccgtcccaatcggtagctcctccgcaacccaccagcgccgatgaggtccgtaccctctggatcg

SEQ ID NO: 45854 - DNA, 265 bp, Glycine max
  Clone ID: 701040623H1
gttgagttgacatcggcgagcaataacaagaagaatgatgatgctaatccgatcaaaatgcaaacttgtgaaaatgtgtggtgtttgcgtttgtgggtctctcgaaatgtgcatgtactcgacggaaagcgtggtggcgagtctcgaaaatcgcgtgtttaaggttggggatccagtgattccagtgagtcctattctgaagcagtgggtggaagaaggcagagaagtcaccaaacttcagctcgaaaatctcgtttaccgcctc

SEQ ID NO: 45855 - DNA, 268 bp, Glycine max
  Clone ID: 701040624H1
gaaaaaagtggaattgcttgcatctcgcaaaggccacacacaccgcaaatacaataacactccatcttccaaaacaaagacttcgcgtccaagcaatttctgagtgataacaaaacaaaacaaatattatcaaaaggggcaaactttgaaaccaaaatcagattttattttttatttttttggtgaatctgaatagatcagaaggtgatgtcgtgttcgtcgtcatctgggtcggaggaagacgatgagggattcgactcttaccgga

SEQ ID NO: 45856 - DNA, 265 bp, Glycine max
  Clone ID: 701040625H1
gtgacccctaaactcatggcattggacatttcctttaacaacttttctggcagcattccaccagcttttcagaaacttagaagactcacttggttgtatctccaaaacaattctatatctggagctattcctgacttcaaccttccaagtctcaagcatttgaacttgagcaataataacttgaatggctcaattccaaattccataaagacatttccttacacttcttttgtaggaaattctctcttatgtggtccacctctca

SEQ ID NO: 45857 - DNA, 269 bp, Glycine max
  Clone ID: 701040626H1
ccctcgagccgaatcggctcgagcataaacagaccccgttgatgttacgctgtgatgcatggaacagactggttgtgttgagaaccttattcatgccggagcgaatatattgatgtttgattctatacgtcgaagaacttgcttgcactacgctgcttattatgggcatatagactgccttaaggccattctttctgctgctcattccacacctgttgctgatacttggggatttgcaagatttgtcaacataagagcatggaaacggt

SEQ ID NO: 45858 - DNA, 266 bp, Glycine max
  Clone ID: 701040627H1
ttcagcttcaaatcaaatccaattgaaatcaaaaataaaaaggaaaaaagaaaaagtaaagacctctcaacacatggctgcttcaatcccatttacaggtatcaactcctcaagggtgcttcccattcctagagaaccacaccacccattttcccatttgctctcaaacatgtcaaagtttgcatctttgagaaccccttcttcttcttctgcttcttcttcttcttcatctgtgtcttgctctctcaccaaagacccttactctg

SEQ ID NO: 45859 - DNA, 257 bp, Glycine max
  Clone ID: 701040628H1
tcattgctaccctgttggtggataacaaaacttcagcaacccctttgcatctgatctaagaatcccaacttcaagtacccatttttagtcatttcatgatctaggtgatagatcgtgaaaatgacaaggatgacccatgattttggggatactatgcagaaagatgcagtgccggtggtgtcggccgatgtaatatttgcttctcttcggtttcctaattacaaaatcggagttaataatcagatcatggagacaaa

SEQ ID NO: 45860 - DNA, 258 bp, Glycine max
  Clone ID: 701040629H1
taatcaaccacaccaagagaaacaacaaacaagggaaaaatactacatcatacatgtctccaattccaaagcagtttataggtgatctcataagcaagccactttcacttgatcttgaaacttgagagaggaccaaacatatagaatttcttcaatggatcttattctgatggtggattgttgcacttatttggctaattagcttgaaaacttagcacagctaaatcatgaaacaacactttgatcttgaagtggtgg

SEQ ID NO: 45861 - DNA, 264 bp, Glycine max
  Clone ID: 701040630H1
cggctcgagaacggctactgcggcgtcgaactcaacgacctctaccgtcatgtgcacctctacctcaacgccgcgaaccacgcccccgccgccgcgtgccgccgattaactctctcctgctcgccgtcgtcgaaccgtatctccttcgccgttgcgccgaaccacaccgtccacgacgccttccgcggccaccgcgtcgggtggacgcaccacgtggagactgcgcaggactcgctcgaggagaggcgcagcttcacgctccgt

SEQ ID NO: 45862 - DNA, 262 bp, Glycine max
  Clone ID: 701040631H1
gtgccttctctgggaaggatcctaccaaggttgataggagtggtgcctacattgtgaggcaagctgcaaagagcattgttgcaaatggacttgctaggagggcaattgtgcaagtatcctatgccattggtgtgcctgagcccttgtctgtgtttgttgacacttatggcactgggaagatccctgacaaggaaatcctcagcattgtgaaggagagttttgacttcaggcctggcatgatctccatcaagcttgatctcaa

SEQ ID NO: 45863 - DNA, 266 bp, Glycine max
  Clone ID: 701040632H1
tgattcataaggagattgagaggcaaaggagacaagaaatggctaccttctatgcctctcttagatcccttctccctcttgagttcatcaagggaaagcgttcaatatctgaccacatgaacgaggcagtgaattacataaagcacatgcagaaacatatcaaagagcttggtgccaagagagatgaactgaagaaactctccaatcattccaataatatggaaaataaccatgagggcttgcatacatcttgcaacttcactgtc

SEQ ID NO: 45864 - DNA, 273 bp, Glycine max
  unsure (1)..(273): unsure at all n locations
  Clone ID: 701040634H1
cgncccgatactttctcctccctctgtccccttttttctttccccgtcctcaacccacccccaccctttccttcttcctccacccacctccacccccctccgcccgccgctcccctctccgtgcgccccttccctccgcgcgccgctcctcggagccttattgcagcaaatagggagaggaaatgggccttagaggaaataggaacaaatatgaaacacaactggctcaaagaaatttcaaaagcaatgatactcagaatcacatacaggaac

SEQ ID NO: 45865 - DNA, 269 bp, Glycine max
  Clone ID: 701040635H1
ggttttgatccaatgccttctgaaattcagaggttaagatgcaaatgtaatttccatgctttgaagttcgcgcctacaattcaacaaattggctcgctattgatccaaaggattagaaaatatggtgctcgacgcagcatgttagacactcaattgctggggaagttcatccgcaacaatgaatatcatgaagctaaaaggggctcagcaaaatatcttgctttgcacctgaggtttgaaatagatatggtggcctattccttatgtga

SEQ ID NO: 45866 - DNA, 266 bp, Glycine max
  Clone ID: 701040636H1
gtcaaccgcaaaccatctccacttcttatctccggtctccgacgaactctccttggaatttgtactgcagaggtgctgccttttacaccaccagattttgcagattttagtttttaaggttatgctttttgggttctgcgactaatgttgacgatgatcatcactgcgctcatcactgccatacttgcgggactttgcattggcccaatcaacggcaggcggcggaggaagagggccgtggcgttcttccatccgtacaccaacga

SEQ ID NO: 45867 - DNA, 265 bp, Glycine max
  Clone ID: 701040637H1
ctttttctctgttgaggttgtcattgggagcactcaacctaaaccattcaagttgtgaaagcacatcacaagaaaattcgcaagcgatggatccgaagctaaaagaggtttctcagctcttcgatcgctttaagtgctcctttatcaggaacgactttgatacctgttccaatctcctttctcagctaaaggtgttacttacaggtttcagaagccttccaccgttgtttgcagatacacctaatgcagttcatgaattaacaat

SEQ ID NO: 45868 - DNA, 76 bp, Glycine max
  Clone ID: 701040639H1
atctcatttctctctttctctctttctctctctttgggagaaaacccactcttcttttctctatcttgcacacaac

SEQ ID NO: 45869 - DNA, 265 bp, Glycine max
  Clone ID: 701040640H1
cggccagctcctgaagggccgcatcaccgtcaatctcatctggtacggcaccttcaccccgatccaacggtccataatcgtggacttcataaactcgttaagcagcgcgccaaacgcgcctctcccctcgaccgccacgtggtggaaaaccacggagaagtacaaggtgggaggaggatcccctgcgctcgtcgtagggatgcagttcctacacccggcttacacgctagggaaaaatctcaaaggaagagatctcctcgcactc

SEQ ID NO: 45870 - DNA, 260 bp, Glycine max
  Clone ID: 701040641H1
attacaattactactttctctctctttgtaacttgtaagcatggagtcctcaaagatctatgcttacctcttcctttgcatgctcttcctctcctccgccactcccattctcggttgtggctactgtggcaaaccccccaaaaagcacaagcctggtaaaacaccaaagacacccacagtacccgttgttaagccaccagtcacaatccctcccattgttaatccaccagtcacaatcctcccattgttaatccacagtg

SEQ ID NO: 45871 - DNA, 262 bp, Glycine max
  Clone ID: 701040642H1
cgcagagaaaatgtcgaccgacctgcaattgaagtcgagttgtagcggatgcggatcaacgacggatctctacggaagcaattgcaagcacatgactctgtgcttgggctgcggcaaaaccatggcggccaaacgcgccaaatgcgttgattgtggcgccaccctcactcgtttcattcgagaatataatgttcgtgcaagttcccccaatgataagaattacttcattggaaggttcataaacggtttgcctgatttttcg

SEQ ID NO: 45872 - DNA, 259 bp, Glycine max
  Clone ID: 701040643H1
caacagcatcggcggcgacagtcactctccgacaacaacacttccgcggcgaaaaatgtctctggtggcgaacgaggatttccagcacattctgcgtgtgctgaacaccaacgtggatgggaagcagaagataatgttcgctatgacctccatcaagggtattggaaggagattcgccaacatcgcttgcaagaaggccgatgttgacatgaacaaaagggctggtgagttgagtgctgcagagttggatagtgtgatg

SEQ ID NO: 45873 - DNA, 260 bp, Glycine max
  Clone ID: 701040644H1
gagacacaaagaagaatcatggaggtgaacaaccaaatcgtggagaggagcaagagggttaaagggagagtggttttgatgaagaagggtgtgttggacttccacgacatcaaagccaacgttctcgatcgagttcacgagttattaggcaagggtgtctctcttcagcttattagtgctactactcctgatccagcaaaggggttattgagagggaaggtggcaaacttggagaggtgggtttcgacgattacctcttt

SEQ ID NO: 45874 - DNA, 252 bp, Glycine max
  Clone ID: 701040645H1
tgaagtttgtttattctgagaaggaagagagaatagaacgccatggatgagatattgaacaaggtggggtcttactggttctccaagaaggccagcaaggactttaactctgtcggcgatgatatcaacgtaaacaacacaatccttaacaccctttttttatctatttcttttttttttggtcgattcatttttatttttattttacttttatttggtaaagttccctttttttttttggcctttccggtt

SEQ ID NO: 45875 - DNA, 258 bp, Glycine max
  Clone ID: 701040646H1
tgcatagcttggttaggttttgtgtttgggcatcatcttggttggagttggaagttcatggaattagaaatgttgaaattcttctcatgattgagatgggaaaatgcgcatatctgttgatgttttatttagaaataataattgttcatcaatgtttgagatctaaggtggccggcatacttcttttttaaaatagaatgagtcagtttggaagtgtttatggagtaagaattggtggacttcttctgttgtttgggg

SEQ ID NO: 45876 - DNA, 261 bp, Glycine max
  Clone ID: 701040647H1
ctcttggtttctctgactaaactgaaaaaacctttgtacttattctctctcagtttcacataaactgacaccataattctttacttcaactgaaaaaattaagaatttatttcctccaaagtccaaacactgtcacagaaactgacttgttaaccattgttagttacattctgtttcttgccactttataagtcatcatcaccctccactggttttcattaacaaaccttcttcaaagtcccaccacttggttttcataac

SEQ ID NO: 45877 - DNA, 263 bp, Glycine max
  Clone ID: 701040648H1
tttctcttctctcgtcccgcaagtattcctccaatctccgtcgatcaccaccaccatgtcgtggctcctccgatccaccaagtctaagttcctctcttcctcttcctcttcttctctttctagaaccttcccctctctccctcgccctcagattggagccatctctcccctccccgatctcttccaccgcaacaccgccaacatgcctttcgcgaaggaaaacgcttccggtggaaacttgaccggtcttcccaaagttcccg

SEQ ID NO: 45878 - DNA, 265 bp, Glycine max
  Clone ID: 701040622H1
ctctctttctttttcaaaaccctcgctctcaccgtcgcgccggaatcttccccggcaatgtcggcgccggcggaggctccttccttcactgcctctcctccgtcagagactactccctcacctaactccactgccctctctcctccgcctccctccaccatcaatgccaccgtttctcctccgccgccggagggccatcaccctccgaccagtaccgttaacagcgggttgtcgacgggtacagtgagcggaatagttatagggg

SEQ ID NO: 45879 - DNA, 254 bp, Glycine max
  Clone ID: 701040591H1
ctttttacttcccctatggctcgtcactccttgctcttagccctcctcctcttcgccgccgtcaccatcgccgcgatggcggtggccgcgtccgacgccgacgacatcctgatccgtcacgtggtgccagatgttggcgaaccagagaggaggacaacctgctgaacgccgagcaccacttcgcgagcttcaaggccaagttcgccatcacctacgccaccaaggaggagcacgatcatcgcttcggcgtcttc

SEQ ID NO: 45880 - DNA, 265 bp, Glycine max
  Clone ID: 701040592H1
aagaaaatgaaagtccttgttttctttgttgctatagttctagcagcatggcattgccatggctcagaccatgaccatgaccatggccacacctaccaaattttccctctgagaatgaaaactggccatggtggccactacattccggaggtatcatgccaaagttggaggcttggtgtggaagcacacaacgtcattgactggaaaaccgttcctcaagattgcgagggatatattgggaactacatgcttggcgaacaatata

SEQ ID NO: 45881 - DNA, 258 bp, Glycine max
  Clone ID: 701040593H1
gaaacctaacaacgccatagcgtttcctaacccatcgtgcgaggtccctcgacctccgcacaaccccaactccaaggggctgtgcctgtcgccgtcgtcttccacgctcatgtcggaacacgacatccacgcgccgccgttcctgctccagcgcccgccgctcatgcagtcggcctcgccactcttcaagcagcgatcgtagtcgccggacgccttccgcgatgaggcgtggctccggcgcaaggggaactgcaacaa

SEQ ID NO: 45882 - DNA, 264 bp, Glycine max
  Clone ID: 701040594H1
attaaatacaataaatacaatacacttttgtaattatgtgatgtgcgtgtgtgtgtaaagcacttagctatattatagccatcatccaactcaattttggaacaaagaaaaaaaggtgaaggatgaggatagatgattttagcacatcaaatggtgagtggtgtgaccccacgggaagaaaagaaaaaaagagggggagaaaaaatttcaaagaggttatggaatttggaagatgatgaggaatgacgggggtaaggaatgagg

SEQ ID NO: 45883 - DNA, 263 bp, Glycine max
  Clone ID: 701040595H1
cgcatgcggttttttgagtgtaatcggtcttccatatatggctccttgagaagaatgagtagcagatgaccccttatttgcttcttttacaattacaaaagctcatctccgttttcgtcatcttccccaaaccctcgccgcaaaggccaaatactcccacacccaaattcctcaacttcaacacaccacacaataataacggaatcccttcttccgctttgatcccactcctatgcccaaaacggttagcgctaacaacagag

SEQ ID NO: 45884 - DNA, 276 bp, Glycine max
  Clone ID: 701040602H1
aaatctttgtttaattttttgaaggaggttgaagaaagcaaaaggttgttgttttgttttaagtttctttgaaatggttttcatgtctgagatattattgttccctgaaaaaaaaattgaggaaggagagtgggagaaggagagataagaagaagaggagaagaatacctacccagcaagcaggattagagaaaaaaaaaaaagattaacaaactgttgatttgatttattttgatctgcttctgctgggtggttggcaatgtctgcacctatgat

SEQ ID NO: 45885 - DNA, 273 bp, Glycine max
  Clone ID: 701040603H1
tagggtttatacaattttcgatggcttcttcagatgttgagtaccgttgctttgtcggtgggctcgcttgggccactgacgaccaagctctcgagagagccttctctcagtacggcgaaatcgttgaaacgaaggtctgtttgttgcaggcatcacatctgatctcacacgattcggattcggaattttctcgatccctttctgatctgtgatctctgatctgtttgcgttacttgatcttatgatacttgtgttactatatgattctcttat

SEQ ID NO: 45886 - DNA, 265 bp, Glycine max
  Clone ID: 701040604H1
gaagggcttttattttattttttacttagtagtacttctattaagtcttgcttccggattgcgttgtctctgtcatgatctggaaatacctctacgagagcatgagtaatttttgcttaactaataagttgtataatattgtgaagtaagcttgtttcttgctctcaaaaaaaaaaaaaaaaaaaaaaaaaaaaaaaaaaaaaaaaagaaaaaaaaaaaaagaagagacaaaagaaaaaaaagataatgagtaatgggggggggg

SEQ ID NO: 45887 - DNA, 223 bp, Glycine max
  Clone ID: 701040605H1
ccttactagaggggccaattcctcacatgtggggtatattaaggtgcctaataagtaaaatattaaaaccttgatattgcggttttatacagttttacttcaattaattcctaatactagtttaagttgaaataaagttatggtatgattctgtcctccgtgaagagaaggacatggatgtacaataaagaagtttgtaataaagttttgattggtttggctt

SEQ ID NO: 45888 - DNA, 266 bp, Glycine max
  Clone ID: 701040609H1
gcattggttggtagttgtctcaaaaatctcttcttgccctttggccataatcaaaagccaagacactgttcatacagctgctcaattatcaagccaaccttgctcggttccacttcagaatttcagtttattcttatctaggtagactccttataagtgcgcagaagttcaagtgtagagaatgagtcagcctaagattaaacgccgagttggtaaatacgaggtggggaggaccttggtgaaggtacatttgcaaaggtgaaatt

SEQ ID NO: 45889 - DNA, 269 bp, Glycine max
  Clone ID: 701040610H1
gaagatggggtcagaggtgtctaaacagatggagcgaagaaagacaatccagacggagaagaagagtctgtccgatctgaaaagcagcggagaagactaccctggctccgactaccgtccccaagacagaaaaaactggatgtcccatctcgacactcagaaactccgcatcaaccaaatcgtctggcccggcatccacgactccgcaaccaacaaaattggcatccctctcatcactcgccccttcgcccagtgccaatccctctcca

SEQ ID NO: 45890 - DNA, 268 bp, Glycine max
  Clone ID: 701040611H1
ccgcacttcaccgcccctcgtttcttcacactctgccgtgctctttcggcgcaggtcaagagattcgcaatagaaagtgagaaaaaaaaatgagtcgaggaagtgcaactgctgcgaagggcaagaagaagggtgcgacattcaccattgattgcgcgaaccggtggaggacaagatcatggacattgcgtctctcgagaagttccttcaagagaggattaaggttggtggcaaggccggtgctctcggcgactccatcaccgtcgta

SEQ ID NO: 45891 - DNA, 262 bp, Glycine max
  Clone ID: 701040612H1
attcaatatgagtggcttaccttcactcagtgagaagttagaaaaattccttactctactgagatctgaagatggcaaactagaatcccagatagtcaatgtcctgcaagatattgtagaaattatcatacaggatgttatgtttgatggccatttgttgctgcaaacacctcagcaaacacctcacgaatatcatgtagagagagggcagaagtttgtcaacattgacacttcttttacacataatacatcggtgatggaa

SEQ ID NO: 45892 - DNA, 264 bp, Glycine max
  Clone ID: 701040613H1
gatttgttgcatgaagcagaatctgaagttgctactcttaaagagaaggtggaattattagaaatgacaattgggagacagagagcagatgttgaggattcacaacgccaactttgtaaggctaaggaagaaagtcttgaaaagtcaaaggaagttgaggctctgacatctgaacttgagagggttaaggaagagaaagcacaggctctgaacgatgaaaagcttgctgcttctagtgtgcaggccttattagaagagaaaaac

SEQ ID NO: 45893 - DNA, 263 bp, Glycine max
  Clone ID: 701040614H1
ctgcttttggtggcatagtttcctgggagggagaaggggcaccttttggggaatctgaccagagcatttctcatcagattgttgacagggaagcacaaggacatcggttcctctcaagagaatacgttcaaccacagtgggtatatgactgtgtgaatgcacgaattattttgccaactgacaattatttggtgggaaggactcctccaccacatttgtcaccttttattaactacgatgaagaaggagcatacattcctgat

SEQ ID NO: 45894 - DNA, 263 bp, Glycine max
  Clone ID: 701040615H1
ttttgcttttccttctctctctgtgtctgtctctttcaagttcaaacctcaaaccctagccgtagccttttcaatctttcatgctccttctcggtgagtcactttgcatatgttacggtttttggggtctttcaattctccttcacgccgcgctttctgggcttctggggctatttcaggtttggtgttataatcattaaagagattcaaggcaaccaattgatttggtggagaactatgactgaagagaaatctggaggatg

SEQ ID NO: 45895 - DNA, 265 bp, Glycine max
  Clone ID: 701040616H1
acttgaaaacacaattcatttccttgtttccttcccaatcaacacatagaaccagagtgcaaagcttttgcagtcagcaagagaaccagaaaaaatcccacaccatggatttgctcctagaactgaaaaccgcactggaaccgttccgcgaaacactattgttcacaatcccattgactctattgctgctgggcatagtgtcccgaatccgcagaaaaacggcgccgtatccaccgggcccaaaaggcctccccctaataggcaa

SEQ ID NO: 45896 - DNA, 277 bp, Glycine max
  Clone ID: 701040617H1
aagaaaacgcgatggttgacgtggactttggaacctcgggctcgccgaagcgccacaaccacaacggcttcatcgtaacaatctcggcgatcttggcgctgttaaaaaagcgcaaagcagcagtgaaggcgagcaaagaggatgaattgaagaagtcgtcgcggccgaagaagcttctcagcaacataagcagcaaagcgcttttcggtcacaagaagaataataagaagcagctgcgaacgatggaagagacacaacaagcacaagggtggggaaa

SEQ ID NO: 45897 - DNA, 269 bp, Glycine max
  Clone ID: 701040618H1
aaaggatcggtacattctcggcgagcaattgggttggggacagtttggtgtcataaggacatgttctgacaaattgacaggagaggttttggcctgcaaatcaattgctaaagataggttggttacttcggatgatttgaagagtgtcaaacttgagatagagataatggctaggctatccgggcaccccaatgttgtggatctcaaggcggtttatgaagaggaaggttttgttcacctggtgatggagctttgtgctggaggggagc

SEQ ID NO: 45898 - DNA, 272 bp, Glycine max
  Clone ID: 701040619H1
ctttcaaatcaactctagagattcaaccaagaaatatagaagctagggttttgttacatttgtgttagcacgcaaaactttgcaaatatggagagcagcttaggagacatgttggttaaggttgtggtgttcattctagttcaagccttggtttaccttatcctctccaattcatcaaacgtgttcaacaagaacatgaagaaatctaacagcttcaggccggcacgttcggtgagcattcgccggatgctcgctttgatctctgattttcc

SEQ ID NO: 45899 - DNA, 284 bp, Glycine max
  Clone ID: 701040620H1
ctcgagccgaatcggctcgaggttgagaccaagacacactcgttcatatatctctctgctcttctcttctcttctacctctcaagtttttgaagtataaagatggcagagacattcctattcacctcggagtcagtgaacgagggacaccctgataagctctgcgaccaaatctccgatgctgtcctcgacgcttgcctcgaacaggacccagacagcaaggttgcctgcgaaacatgcaccaagaccaacttggtcatggtcttcggagagatcaccaccaag

SEQ ID NO: 45900 - DNA, 259 bp, Glycine max
  Clone ID: 701040621H1
gaacgttccagaccacatacagagatttctctagtgatcttcgttcttctgtggagatcttgttttttcatctcacttttcttctaattaaggaacaagctttccgcagttgaaaaccctagctagctagcttccaccaatttgaatcaccaatggctcgctctttctctaacgtcaaggttctctctgctcttgtggccgacggattctccaacactctcaccaggtaccacaatcgtttctcatctcaatttttatc

SEQ ID NO: 45901 - DNA, 267 bp, Glycine max
  Clone ID: 701040590H1
tctctaaccactttgcttcagctatggagtttcgttgccttccattggttttctctctcaatctgatcctgatgacagctcatgctgccatacctccagaagtttactgggaaaggatgcttccaaataccccaatgcccaaagcaatcatagactttctaaaccttgatcaacttcctctttggtatggtgctaaggaaacccaatctacagatcaaatattcctgtatgatgctaagaaaacccaatcaacagatcaagttcctc

SEQ ID NO: 45902 - DNA, 269 bp, Glycine max
  Clone ID: 701040563H1
agaaactgggaagagaaggtggtggtcttgttgccattctgatctaaagcttgtgtctttctgcttcgtttgcatcttctgctgcgtaaagttgattcttttctgattcttccgtagatttcatctctgaaactagttctagtactttatctacagatctctatattctaggtgaacgtttgcttttgatccggcttgggagttttgatagacttgattttgaatctttaagagccatatgctcacagtggtcggatatagtacatcag

SEQ ID NO: 45903 - DNA, 268 bp, Glycine max
  Clone ID: 701040564H1
gtcactgtggatggtagcatgtcaaactcatttagaggaaatgaccaggtttcaaaaaaccagattgtgagaaagagaaagcagcctggatcctcatcaggtcctgacaatagttcaggaacggcaaatacaacaggtccatcaccaagttcagcaccctcaactccgtcgactcatacgcctggagatgtgatatcaatgcctgcactgccgcatagtggtagttcttcaaagcctctaatgatgtttagcacagatggtactggaa

SEQ ID NO: 45904 - DNA, 270 bp, Glycine max
  Clone ID: 701040565H1
cttaattcccagtttgctagaacacacatctcttctatgcaagggggaggacctactcctacgctggtcaaggccgaggttccgtggtctgctagaaggggaagtctatctgaaaaggatcgcgtcataaaaactgtgaaaggaatactgaataagttgactcctgaaaaatttgatatcctgaagggtcagttaatcgattctggcattacatcagctgacatcttaaaggatgtcatttcacttatttttgataaggctgttctagaa

SEQ ID NO: 45905 - DNA, 270 bp, Glycine max
  Clone ID: 701040566H1
attttcaattgttgcccctaatgtgtcagaaagggtgttgggtcctgcaactggcagcaacccatttggacctgatatttataggggggcagttttgtcatcttctcccgcagtgccatatcaatctgcaccatttcagtatcctgtcttccctttcaattccagctttcctcttccatcagcatcattttctggtggatcaactccttatgtagatacaacttcaggagggaggctttgcttccctgtagtaaattcacagcttatagg

SEQ ID NO: 45906 - DNA, 268 bp, Glycine max
  Clone ID: 701040567H1
gttcatttctacacatccctagctctgtcgttccgtcgttgacgatggcgtttcgggtgcgaaccctgacctccgctctctctttcttctctctctcttgtccatcgcttccgccaatgtcttcttcgaagagcgtttcgatgacgggtgggaaaatcgatgggttaaatcagattggaaaaaagatgagaacgtggctggggagtggaaccacacctctggtcaatggaatggagacgctaatgacaaaggtattcaaaccagtgag

SEQ ID NO: 45907 - DNA, 267 bp, Glycine max
  Clone ID: 701040568H1
ctcgtctgtctttttttctctttctctctctagattttctttcttcttcttctttatgagccctaactcggggccccatagtcgtcgctgctagctagccatgtcgctgaggaaggtcttccgctcccgcaagttctccaaatcgttcaaagaggtgctgccggcggagggcgccgccgtcgagggcggggtcgccggcaccgtcgaggaggcggcgaatgggaataataatgggtggtctagcatgctgccggagatcctcggcga

SEQ ID NO: 45908 - DNA, 262 bp, Glycine max
  Clone ID: 701040569H1
tcgagcgttgaacgtggacatattttatgacccaacaaatctgccattagacgacaaattattctcccctgtccatgcacatttcccaacagatttttattatcaagctaacaatcaatcagaacttcagtatggtacaaatgagaatatttcagaattttttgactcggttgttaattgggatgcgttctctcatgatactagcagtctagatctgagctcatccttccttattaataatacggacaatggatcaggcagt

SEQ ID NO: 45909 - DNA, 277 bp, Glycine max
  Clone ID: 701040570H1
ctttcactttctcaaccacccaacacaacacaaattccctttcttcttcttcttcttcttctaaatagatagaaggaatttagattaattaaaacaacctttcattcattctgttgtgttgggaaatatgatgttcgactttgccaggatttggacccgaaacacgttaataggtctcggcttgggtcagtttctttctcttctcatcacttccaccggcttcacttcctctgaattggctaaaaaaggaattaatgctccaacttcacagtcgttt

SEQ ID NO: 45910 - DNA, 258 bp, Glycine max
  Clone ID: 701040571H1
ctctcatcagattcgggtcgggttagcgttatcggataacttcgcccataaattctctgtttacggggcgaaaatgacagtattcttagccacgaggctcgtgtttcggagatccccgccgcttctctggcggcgcacttttctcgggcggcggtagaggccgaaaaggacactgttgccgtgccgtcgcttccgttgttcgattactctccgcctccgtatgcggggcccaccgctgacgagattctggcaaagcgc

SEQ ID NO: 45911 - DNA, 267 bp, Glycine max
  Clone ID: 701040572H1
cttcactcttcactcttcactcccaaccctagccaaacgcaaaccattcattcattcagttcagtaactcacctcaccatggccgcatccattacattgtccaggctcgtctcttccaccctcaccactgcctctttcttcccacccataaccctgccttccaaactctcctctctccgactccccacccgccgccaccccaagccactcagattctcctcctccaccatcaccgccaccatctccgtcggcgacaagctcccggag

SEQ ID NO: 45912 - DNA, 268 bp, Glycine max
  Clone ID: 701040573H1
gatcaatcggcgttcaaaaagtttctctgactcttggcagcgcgaagcttggaggagcaccgtttgtcatggcggttccaccatcggaaactgattccgttgagaaaagaacattcctttcacaattttactctcactatctcggaaaccgaatccacgctctctatccctacttctccacaatattcttgtacaccttcgttctcagcttcagatcaacgcttcgtcgggaatgtctccctcttccgctaccttcctcttcactcga

SEQ ID NO: 45913 - DNA, 268 bp, Glycine max
  Clone ID: 701040574H1
cttagctttgattctatgttctctgtgatgatctgtatcgcgtattactctcatacacgaacttgaacaatgacagaatgcatagggcaatggatcagcaatggcttcaacagaatcactgaagcccgttcatgaccgtaatgttggaaagcggaacgcttccggtaagcctgggagaagtagtgcatcaaagaaggataagaaggccaagaaagacgccatcaagcctataagaccatccattgctttctatgtgcaccttgacgag

SEQ ID NO: 45914 - DNA, 265 bp, Glycine max
  Clone ID: 701040575H1
ctctctgtgtatttccctacctctcccttcaagatgcagatcttcgtcaagaccctcaccggcaagaccatcacccttgaggtggaaagctctgacaccatcgacaacgtcaaggccaagatccaggacaaggaaggaatccccccggaccagcaacgtctcattttcgccggaaagcaacttgaggacggccgtacccttgctgactacaacattcagaaggagagtactcttcacctcgtcctccgtctccgtggtggcatgc

SEQ ID NO: 45915 - DNA, 267 bp, Glycine max
  Clone ID: 701040577H1
tgcatatggatgatatgatgtgtcttgcatggcgatacaatacgccaacaattgacaaatacggaagacattcgtcgcatacggaaaaaagctccttgcactcgtcatgagattttaatgattcaaagacatttttggaggatgaaattttccatgaaccaatatttatggatttgtctactgatttgactattctgcgaaatgagacatttgatctgactggaatcaaggttattgagtatggtttagatagttcttctgtagaaa

SEQ ID NO: 45916 - DNA, 269 bp, Glycine max
  Clone ID: 701040580H1
gttgagaagaaagaccccaccggagccaaggtcacaaaggctgccgccaagaagaagtgaatgcattttggcaattttgctagcacatgtgatcatcaacgtggtttcaaaaaaacttgttcctttacagtagtttatctttgcagagtcttaggtgtttgttttaccagttatattttgaagtgtccgccgatttcatgtagccgtagccttcaaaactgggttcttgatcggcggtaacattttcgttgctgtttgtttttgatgag

SEQ ID NO: 45917 - DNA, 270 bp, Glycine max
  Clone ID: 701040581H1
actcgagccgaatcggctcgaggcctaaagtacctgaattgtctaaacccgagttgcctaaagacacctgagttgcctaaggtacgtgaattgcctaagcccgagttttctaaagtccccgaattacctaaggttcatgaattgcctaagcccgaaatacctaaaatacttgagtttcccaaggttcctcaatttcctaaagcattttcaaccagcaatccttgagtttgaattatgccttatgttgtcctgttctcaggtcgttactgg

SEQ ID NO: 45918 - DNA, 268 bp, Glycine max
  Clone ID: 701040582H1
cgagatcgtgaatgaagagattgacagcgcgcgcgagaatttggagtggaagctgacgatggagaacggattcgctcgcatggacgacgaggttaatcgcaggagccagagcaaccagaccttcacctgcaggtgcgagctccagactccccactgcgacgccgtcggatccaccgccgtcgtcgccatcgtcacgccggacaaactcgtcgtttccaactgcggcgactcccgcgccgtcctctgccggaaaggcgtagcaatccct

SEQ ID NO: 45919 - DNA, 264 bp, Glycine max
  Clone ID: 701040583H1
caagaatggcacttcgttgcttggtgatgtccctttctgttctcttcactcttggtcttgcgagagaaagccatgccagagacgaagatttttggcatgctgtttggccaaacactcccattccaagttcattgcgagatcttctaaagcctggccctgcaagtgttgaaatcgatgatcaccctatgcaaactgaagaaacacagtacccgaaaaccttcttctataaagaagaccttcatccaggcaaaacaatgaaagtac

SEQ ID NO: 45920 - DNA, 267 bp, Glycine max
  Clone ID: 701040584H1
agaagattttaaaggagggaaggatagtcagagagtttgttggtttcagcaaccagaagcagcttggaagatgaaacgcatttaagaatccatatgaaaatgacagggccggactcacactaccattcatgcttcgctctcacttccaaacaaacgaaaaacattactattaccacttaggagtttacttcttcatcgctcacatcacaattcactaggaagctgtaagaaaaaggatcttcagtgtttcgagacctctgaagaaga

SEQ ID NO: 45921 - DNA, 263 bp, Glycine max
  Clone ID: 701040585H1
ccgaaatgggagagttgaaaatgtctttggggtttttgtagttgttatgagggtgaagctaaaattatgagatgtcttcctctgtcaccaatggcgatgattctctcactggccacatcatatctacaactattggaggcaaaaatggggaacccaaacagactattagttacatggctgaacgggttgtaggaactggatcatttggaattgttttccaggcaaaatgtttggaaactggggaagcagtggccattaaaaag

SEQ ID NO: 45922 - DNA, 263 bp, Glycine max
  Clone ID: 701040586H1
cttgcctattgccttttcctatttcgtccatctctgggggcttccatgcttcaattacagtggcatctgctgcaaaggggcctgttgttccacctgaaaacccattgcggattaagggggagcttggttggaaagggtcagccgctaccagtgcatttcggccagctgaacctaggaaaaatgctgagacagcatccactactaatgatattgcttctgttgacggcacttctatcaaacaacgtcgccctcccttagatttt

SEQ ID NO: 45923 - DNA, 262 bp, Glycine max
  Clone ID: 701040587H1
gagatccactgctgcagaatccaatttgtgacactaaatctaagttactatgactgcgcagacccaagaggagcttcttgcgcaacacctcgaacagcaaaagatccatgatgatgaacctgtcgtcgaggatgatgatgacgaggaagtggatgatgatgatgacgatgaggatgatgaccatgacgaaggactagaaggtgatgcatctggtaggtcgaagcagaccagaagtgaaaagaagagtcgcaacgcaatgctt

SEQ ID NO: 45924 - DNA, 267 bp, Glycine max
  Clone ID: 701040588H1
aaagaacataagataacaaacagaaagcgcttataaatggctttccacgaccatctaccgcacgaaatcacgttccagccgtttaccgaggagcagcagttaggtcagagcagggacactgcagcggctgctcccgctctccggcggggcgccgacgtggctgaacaacagcaccgcggcgacgctccgccagcagaatttcctccacctgcagccggaatccgccgcaacgacgcagcaaaacgacgacgttcgcggcggcggcgg

SEQ ID NO: 45925 - DNA, 270 bp, Glycine max
  Clone ID: 701040562H1
ggaagtgagccagcagaggaaggactacgtagaccctccgccagcccccctcatcgacttggccgagattaagctctggtccttctacagagccctcatcgccgagtttatcgccacactcctcttcctctacgtcaccgtcgccaccgtcattggccacaaaaaacagaccggaccatgtgacggcgttggccttctcggcatcgcatgggccttcggtggcatgatctttgtcctcgtctactgcaccgccggcatttctggtggaca

SEQ ID NO: 45926 - DNA, 272 bp, Glycine max
  Clone ID: 701040534H1
cttctccattgcctccttcgtcttaccatccaggttataggctgaaaagggaaggggggagagagagtgtttgcggcaatggaggaaccgagcaaactgaagcgtgccatgattgattccttggctggggcaatttctggtggaatatcacgcactgttacatcgccccttgatgttattaagattcgattccaggtccagctagagcccacatcttcatgggcattactacgcaaggatttggcttcagctacggctgcagcatcaaaata

SEQ ID NO: 45927 - DNA, 272 bp, Glycine max
  Clone ID: 701040535H1
aaacgctcggcgcaccttagcatataggctggcaggagctctgtcttcgtcaaccgcaagcgcgtctcgctgtcgcttcgcattggcgttgcaccacgccaaacaaaccgtacccattcctcacccggcgagtttcgcggttcggactcaatcttcgggttcgggttactcgcccctgaacgacccctccccgaactggagcaaccgtcccccgaaggagaccattcttctcgatggctgcgactacgagcactggctcatcgtcatggagt

SEQ ID NO: 45928 - DNA, 270 bp, Glycine max
  Clone ID: 701040537H1
caggaaaagaagctgtgtgcagttattcaattaccatcacagacattgctactatctgtttctgacaaagccttccgcttgattgggatgctttttcctggggatatggtcgtatttaagccgcaattgtcgagtcagcagcagcaacagcaccagcagatgcaaaaccaacagcaacatcttccgcagttgcaacaacagcagcagctacctcacatgcagcaacaacaacttcctcagctgcagcagcagcagcagcttcctcagctg

SEQ ID NO: 45929 - DNA, 264 bp, Glycine max
  Clone ID: 701040538H1
gcagcagcagcagcaacaggcgcggctttcacagcagcagtagccactgtggttcgagctccacctaaagatttcagactcgtcaagcaagaatgggccgctataagaatccaaactgctttccgcgccctcttggcaagaagggctttgagggcattgaagggagtggtgaggattcaagctcttgttcgggggagacaggtgaggaagcaggctgcggtgacattgaggtgcatgcaggccttggttcgtgttcaggcccga

SEQ ID NO: 45930 - DNA, 260 bp, Glycine max
  Clone ID: 701040539H1
gcctgtatctcaagaagcttccaattatgatgaggtttttatgcagcagagcttgctctttgatgatagtctgaaggatttgaagaatctgagagcacaattatattcagcagctgaatattttgaactctcatactccaatgatgaccaaaaacaaatagtggtagaaacattgaaggattatgccatcaaagctcttgtaaatacagtggaccatttaggttccgtgacctcacaagtaaatgcattgttggatgaga

SEQ ID NO: 45931 - DNA, 262 bp, Glycine max
  Clone ID: 701040540H1
gattcagccattctaataaatgagatgggggtcaatggagattgttatgatggtagaaacaaggaagttaacccagttcttggcgaaagctcagaatgggaaattcaatgggaggatcttgatattggtgagcgtattggtattggttcttatggtgaagtttatcgtgctgattgcaatggcactgaagttgctgtaaagaagtttctggaccaagatttctctggtgatgcgctagtcagttcaaatctgaagttgagat

SEQ ID NO: 45932 - DNA, 269 bp, Glycine max
  Clone ID: 701040541H1
ccaagatattcctcaacgtaatccaatattcctatctaatagctaccaagctattattctgtcataagaaaaagaaacacacaaaagagaaacaagttgttagccacagcataagtcgatgcttactagtcttagttaggcctcagcgtcagttcatgaaaacttttgcttttataggaattttgctcagggaggattcttgttgtattgttgctgatagcctagaggtggaagttttagtctttggttggaactagttgttggctttg

SEQ ID NO: 45933 - DNA, 269 bp, Glycine max
  Clone ID: 701040542H1
cttctatgagacatatgggtttgtcattcaacatactcagtggcattgtctgcaagttggcaatgcacagagaccaaactatttgccaatggaggtttgcaagatagtggagggtcaaaggtactcgaaaaggcttaatgagaggcaaatcactaatttgctgagagttacatgccagcgtccttctgagagggagcgtgatatcatgcagacagtacaccacaacgcataccacgaagatccttatgctaaagaatttggaatcaaga

SEQ ID NO: 45934 - DNA, 266 bp, Glycine max
  Clone ID: 701040543H1
attctcacactacttactctctttctctctctaaagggttatcctttgctctcttccaacttccaagaaatgacgattatatcacgcagaggcatctgtaacatgccaagactagatgcagcaaaagtatatgctgctttgctagagaaaggccaaaatcgtgtcatagatgcttcacttacacttattcgagaaagagcaaagcttaagggagaacttgtgcgtgctttgggacgtgctaaagcaacttcaactttcttggagtt

SEQ ID NO: 45935 - DNA, 268 bp, Glycine max
  Clone ID: 701040544H1
cctcgctctatttctcagtctctgtgtttgcggctgaggattccgaacgagtgaccttcttcgtttctcgtaaagtttaagtaatcatgggtaaggaaaaggttcacatcaacattgtcgtcattggacatgtcgactctgggaagtcaactaccactggtcacttgatctacaagcttggaggtattgacaagcgtgtgattgagaggttcgagaaggaggctgccgagatgaacaagaggtcattcaagtatgcctgggtgctcga

SEQ ID NO: 45936 - DNA, 269 bp, Glycine max
  Clone ID: 701040545H1
tcaaaagtcataaacccaatttccatttctacaaaccctatctctcttcttacctaatatatacaaatatctcaccaattaagttttccaaccttcctcaaggatatatctctatacaaacactttgggagcaaagtatagctatgagattgtagattactatataatcataaagaaccatttcaagtttgaattcattcattttattcttttctcaattcatcaacaatgacccttatgaaaaccctatggaaatcaatcttccccgg

SEQ ID NO: 45937 - DNA, 269 bp, Glycine max
  Clone ID: 701040546H1
ttcttcctctgcgcaggaattaggaatattcgacaggtagagtttcttcaatggctcctaaagttgataagaagaatgatccaaaggcccaggccttgaagactgctaaggcagttaagtcaggtgctacctttaagaagaaggtaaagaagatccgaacttctgtcactttccacaggccgaagaccttgaagaaggataggaaccccaagtaccctcgcattagcgccccgccgaggaacaagcttgatcattatcagatcctgaaa

SEQ ID NO: 45938 - DNA, 272 bp, Glycine max
  Clone ID: 701040547H1
cgctactctagactctagtagtagcagagtagcatcatcgtcatcatcaaaccttggtgaatcaaaaagaaaattagaaggaaaagatgttgttggggaagagacctcgtcctccaattatgaagagaacaacaagcatgtcggaaataaccttcgatctgaacacgtccttggacgatgatccgaacaactccgtgaagggaccaggaggagatgggcctcctgttgggctcaacggtttagatcagaacagggtttgggccatggtttca

SEQ ID NO: 45939 - DNA, 267 bp, Glycine max
  Clone ID: 701040548H1
ggaaggttgcttgtattggtgcctggcatcctgcaagagtttcattcactgttgccagggctggtcagaatggataccaccaccgaacagagttgaacaagaaggtttacaagcttggcaaagctggagatgaatctcactctgctcttactgagtttgataggaccgagaaagacattaccccaataggtggtttccctcactatggtgttgttaaggatgattatatcatggtcaagggatgctgcgttggtcccaagaaaaggg

SEQ ID NO: 45940 - DNA, 272 bp, Glycine max
  Clone ID: 701040549H1
gtactttcttgcgaaacagaagggcgaaggggcaaacacaacttttttgtttttttgtagagcgagagagaaaaaaatgttggggatcttcagcagttccgtggtgtcgccgccggaggagctggtggctgccggcagcagaacgccgtcgccgaagacgacggcggggaagctgctgaaccggttcgtggagaacaaggcgtcggcggtgtcgctgcaggtgggagaacacgtgcagttggcttacacgcaccacaacgagtcaccgtggc

SEQ ID NO: 45941 - DNA, 269 bp, Glycine max
  Clone ID: 701040550H1
gcttctgtcagcagaaaccgtagcactataattgttccggctggaagctccagggatgaaggatgggcagcattcaggaacattttggcagagatcaatgaagcctcaaggcttttcattctgcccaatcaggtttccttcttttgaaacagacatttttcttcctgcttagccacaagaatagtcaaagttgttgcttttttttattcatcttatttgcttgtttgcattccgcaatagcaaaattctgaatcctcagagcatcttgt

SEQ ID NO: 45942 - DNA, 265 bp, Glycine max
  Clone ID: 701040551H1
cagaggtgtactctaaggaattaaaaggtgctatatctgccttggcctcacttcaaggccatctattaatagcatctggtccaaaaattactctgcacaagtggaatggcactgagttgaatggtattgcattttttgacgcaccgccattacatgttgtgagcttaaacattgtaaagaacttcatccttattggcgatatccataaaagcatatactttcttagttggaaagagcagggtgctcaattgagcttattagccaa

SEQ ID NO: 45943 - DNA, 271 bp, Glycine max
  Clone ID: 701040552H1
gacacacctgtcggcaaccccaacactaagcaagagaaaggaaaaacacttcactccaattccaaacctgttgctgaaaccccaaaaaaacttagcaacattctatgtttctgttcagaggaaaaaagaaaaaaaacatagcgttgttgtgttgagttgaaaccgattcagctcaagactcaggtcaatccaaatacacatttagaagtttcaattcaatttttcaactcaatgatggtccaagagcgttcacttcccaaatcagtgaacc

SEQ ID NO: 45944 - DNA, 265 bp, Glycine max
  Clone ID: 701040553H1
tggaagtctcagcatatcgtccgttcctgagaaagattttcatctcccatcaccagcagtagagattctcccttccaagacagttcacactgaaaaagataatggggagaatatagatcattttaagggtttagttagtgttgccgatattgttggattcagtggttcagagacaatatccttaaaacctgatggttatctgaaatcctggactagttccattgatcttgttagtgttcttaagcatgagattcgtgatggacaa

SEQ ID NO: 45945 - DNA, 264 bp, Glycine max
  Clone ID: 701040555H1
atgagaatggtgaaagacagtaagaatgagagattaactttgcttcttgaagaaacaaataaactactggtaaatttaggagcagctgttcaacgtcaaaaggacaacaaatattcaaatggtattgaacccttggaagattctgaagctgatttactggagtcagatgcttctaagaatggagtttctaaggaatcacctcttgatgaagatatagatttgatagattctgatcataatggtgattctagtgatttacttgaa

SEQ ID NO: 45946 - DNA, 278 bp, Glycine max
  Clone ID: 701040558H1
ttattagattgcccactagacctttctgctctcatggccttctctcctgtaccaactgctctggactgcttgccagttgaagaaagctacaacactgaggccaatgctttttttgattcaaggtttgggtctgggaaaaggcagaaaattgaaaatctccttgatgctaaaagcttactttttgctgaaccttggtacaagactgttaataacttgcacctgtggaatgcctctttcattgatgttgtattaatatccagtccaatgggtattatggg

SEQ ID NO: 45947 - DNA, 264 bp, Glycine max
  Clone ID: 701040559H1
gatacagagagcactgttgatgatgatatcttggaagatgatgtggttcgcagcttgagaacaagcccaatccattcttcaagggatcgcacctctattgatgactttgagattataaaacctatcagtcgtggggcatttggaagggttttcttggctaaaaagagaacaactggtgatctttttgcaataaaggttctcaagaaggcagatatgatccgtaagaatgctgtggaaagtatattagcagaacgtgatatctta

SEQ ID NO: 45948 - DNA, 265 bp, Glycine max
  Clone ID: 701040561H1
gttgatttgtgcttatagaggtacttcagattttgggggtccaagttttcctgttaatgagataaagccagtcgtacaccccccgtcctttgttcaacccaaatctactgctcagcctggtagtatggttccacctgttattgatctaactggacttgaagtttcagataatggccagaaaatgattactgaccttatgactaactatgacacaaatgttcgaggcaacaagaagacaagttcctgtaatcacttagctgcagaa

SEQ ID NO: 45949 - DNA, 269 bp, Glycine max
  Clone ID: 701040506H1
cttctttctttcgatcagggtttcccctcgtctccgggctcgttaccgttctcgaataatcgatctacgataatgactcgcggtagccagagggatcgtgatcgcgaaagggctcaggctagaactggtgctaaaggcaagcagaaagatgatggattgacccctgaacagcgcagggaaagagatgcaaaggcgctgcaggagaaggccgcaaagaaagcggcacagggtgcaggagggaataatgcagctggaagcaaaaaataggc

SEQ ID NO: 45950 - DNA, 255 bp, Glycine max
  Clone ID: 701040508H1
atttttcattatttacttctcccagaactaacttggttttgtctcctgtggacagagaatgccatgataagtgttacagatttcaaagtctgcgcgccgggtatcagatcttagactcagagataatccactgcaagagatatggcaaggctcactagcagtcccagatttgtgcttctgtaacttgcactccttgattgtggacggctgacaatttttatcagatgcagtactacctttcagtttacttcgttt

SEQ ID NO: 45951 - DNA, 82 bp, Glycine max
  Clone ID: 701040509H1
cgtgtcgtcgcgttgttggacggtgcctccttcccgatcctcttcgacaacgacaaggtcgagaagctcaacgttctcgacg

SEQ ID NO: 45952 - DNA, 272 bp, Glycine max
  Clone ID: 701040510H1
gccgttcccatccccttcccttccctctccgcaaccccactcgctcacctccgctgcttcctcacgctctccccacgcgccttcaagatcgttcttttcaactccgaccaccacccagacgccgccggcaccgccggaaactgggactgcggctctttctctctctactctagggttgttggtgttcgtcttgacaccatggaggagttttgtcggattcttgccggaaaacgttggagcttttacaaaaccaagaaaaacccttcttccga

SEQ ID NO: 45953 - DNA, 270 bp, Glycine max
  Clone ID: 701040511H1
attctcacactacttactctctttctctctctaaagggtatcccttgctctcttccaacttccaagatgtgacgattatatcatgcagctgcatctgtaacatgacaagactagatgcagctaaagtatcagatgctttgctagagagaggccaaaatcgtgtcatagatgcttcacttacacttattcgagaaagagcaaagcttaagggagaacttgtgcgtgctttgggaggtgctaaagcaacttcaactttcttggagttccttt

SEQ ID NO: 45954 - DNA, 271 bp, Glycine max
  unsure (1)..(271): unsure at all n locations
  Clone ID: 701040512H1
tctaaagaccgagtccgactcggagggcgaagaaggcaaactcagtaacctttccttccttcactacacgcgtgccaganctcagtgtctgagacgcacgcaacgtgcattttcccatacgaaggacaccatcacgccgttttcgcgtccccgtcgtttcggatccatcgtcatcgtttttgtcttcttcttccattagtttagttgagaatcaatcccaagacaccgagctggagcctccgcccgccaccgccgctgcctccaacggtca

SEQ ID NO: 45955 - DNA, 272 bp, Glycine max
  Clone ID: 701040513H1
gtttgtttcacccaatttcaaaatcagttttttatcctttccctcctcaattactagaatattaattactgttcaaagtctggaggtcttccactgtcaattccgttttttcagcgtttatttgggatcgttcttacttttcgactgtaacggatttattggatcatctcccacgcccttttcaattattttttggggaatttcatttcgttttatttgtctcgcctgtgctttgaggcaaaagggttgtgttcacgagtgaacggtgttga

SEQ ID NO: 45956 - DNA, 270 bp, Glycine max
  Clone ID: 701040514H1
gatggcacgcttgtcactgctcattttcgcgttctgcgccgtcgccgtcgccgtcgcgggctcctccttcgatgatgccaaccctatccgtttagcgtcggacttggagtcgcacgtgctggacgtgatcggacagagccgccacgctctctccttcgcccgcttcgctcgccgccacggcaagcgctaccgttccgtcgacgagatccgcaaccgcttccggatcttctctgataatcttaaactcatcagatccaccaacaggaggtc

SEQ ID NO: 45957 - DNA, 144 bp, Glycine max
  Clone ID: 701040516H1
cttggctgcaactgtatataaggcaatgtattttcactttgaccgcactgatttggttgtccttgatgaagcatgtctgttgaaagctcacaaacaaggccttgcaatgacttatactaatgttacaaggccttgtttgtgagc

SEQ ID NO: 45958 - DNA, 269 bp, Glycine max
  Clone ID: 701040517H1
cttctgaaagatctcattgttcagtgtatgcttagactgaaagaaccttcagtcctattgagatgtcggaaagatgacctgcacttggtagagcatgtgctggattcatctgcacaggactatgctgagaaagcaaatgttgatcacccagagatcattgttgacaaccaagtttatcttccacctggacccagtcatcacaattctcatgatctctactgctctggtggggaggtgttggcttctcgtgatggaaagattgtgtgcga

SEQ ID NO: 45959 - DNA, 274 bp, Glycine max
  Clone ID: 701040518H1
cttagccacacgtactcttccacaatgtcttcctcaaagctcttcaccacttttcttttctcactaaacttagctctccttctccaaacatcttttggagccgaccctctcttccatttctgttcaaattctgagaacttcacagccaacagtccctatgaatcaaacttgaaaacactcatcaactcactcatctacaagaccccttcaactggttttggtgttggctctgacggccaataccaaaaccaaaaggcatatgcgcttgcccttt

SEQ ID NO: 45960 - DNA, 79 bp, Glycine max
  Clone ID: 701040519H1
gtactcgttcaattaaaaacaataatgaagaattttgcctacttgagccaaaaacaacatcgtttttgtagttttttcc

SEQ ID NO: 45961 - DNA, 270 bp, Glycine max
  Clone ID: 701040520H1
tttcgggagaaaaagcaatccactcagagagctagaagaattcaacgatgcctcgctatgatgataaatacggcaatacccgcctctatgtggggcacttatcttcgaggactcgttcccgggatctggagcgtgccttcagcagatatggaagagttcggggtgtggatatgaagaatgatttcgcctttgttgattttagtgatcctcgagatgctgatgatgcaagatataacttggatggtcgggatgttgatggaagtcgtatta

SEQ ID NO: 45962 - DNA, 269 bp, Glycine max
  Clone ID: 701040521H1
gagggagagtgttgacgctccatcaagatgggtatttctagggattccatgcacaagaggcgtgccactggtggcaagaagaaggcatggagaaagaagagaaagtatgagcttgggcgtcaggccgcaaacaccaagttatcaagcaacaaaactatccggaggattcgtgttcgaggtggcaatgttaaatcgagggcattgaggttggataccggcaattactcatggggtagtgaagcagttactcgcaagactcgtattctaga

SEQ ID NO: 45963 - DNA, 267 bp, Glycine max
  Clone ID: 701040522H1
atccagacgcgttggcaaaggcattcgtggagcactactacagcaccttcgacaccaacaggaacggcttagcgaatctctaccaggagggttccatgctcactttcgaagggcagaagatccaaggcgcttccaacatcgttgccaagctcacctccctcccttttcagcagtgccaccactcaatctccaccgtcgactgccagccctccggcgtcaacgccggcatgctcgtcttcgtcagcggaaaccttcagctcgccggcg

SEQ ID NO: 45964 - DNA, 266 bp, Glycine max
  Clone ID: 701040523H1
ttgtagttattctctttcttcttttttagccacccctctcttgaaaaatctagatctcgttcttccttgatctacgttacgcttttagtgaccggatctgtatggatctgaaccagatctacacgccgatggtggttttggcctggtacaataaatcttccatcggagttttgctctgtatagatactgtagataatcgatgagaagaacgcagatccagccgcttccgcttgttcgatcactacagacgcttgtatcggattatt

SEQ ID NO: 45965 - DNA, 270 bp, Glycine max
  Clone ID: 701040524H1
cttaaatcagaaatggaagcaatgcgtgattgtgaccctttatctcgctcgtcactggattgttaggaacactaggactgtaaaccgaactgggcatctaactggttacaagctagtacctggctcaaattgtttacctttagctggctcagaggccaagtttttgagaagggcagctttcttgaaacacaacctttgggttactccttatgcacgcgatgaaatgcatcctggaggagagttccctaatcaaaatccacgtgttggaga

SEQ ID NO: 45966 - DNA, 269 bp, Glycine max
  Clone ID: 701040525H1
ttcaaatttcactgctaccaagacttcagcacagactgttgtcaacaagactccatccgtgatccccattacagatactgtgaaggttgatgttcagaaaggcaatagcagcagtagtaataacaaccagaacgcaagttcttctttcaagaatcagccctcacaatctgaccattcctcaggacattgtaattatcagagaggtggtgtttctcagagaattccctagcggggcgaatggtcccatcgtagagtgtaccaaggaagaa

SEQ ID NO: 45967 - DNA, 273 bp, Glycine max
  Clone ID: 701040526H1
actcgagccgaatcggctcgagagcaatttgcgagttgcaatgagacaacgaaaaggctccttactcagcttcttcgagtagatacgagttgagcaaaggcatcaatggcctcgacaaggttattcttcgcgacgcacgtggtagctccgctgaggtgtacttgtacggtgctcacgtgacttcatggaagaatgaccatgccgaggaattgctttttctcagtagtaaggctatctttaagcctccaaagccaattcgtggagggatcccaa

SEQ ID NO: 45968 - DNA, 271 bp, Glycine max
  Clone ID: 701040527H1
cggctcgagaagccatcccatatccttttgttttgttctcttcagtctgtttgcgagtgcgagtgaaaaaaaatgggtgggggaggagctatgaggtcggcggcgaagatagccggaattggcgtgtccaagcgcggcgctccggccttcggcgctccctacggagcagacggtccgcaacgcgtcgcgaccaacggcggtctccggagtgtcgtcgcagtcggcgaaatccgcggaggtggcgccgctgcacacggcagctgcctgggac

SEQ ID NO: 45969 - DNA, 268 bp, Glycine max
  Clone ID: 701040528H1
gctcctctctctctctcttgctctctctagttattcattctctccaccaagccataatgaatagtaataaagtgctatagaaatacctattgaaattgaaagtcgcaataagcaacgatacaacaaacctcaaagcttgtcatatatacttactcttgtttggtggtggtttttgtgttccgatgggaaacggcatagggaagctaaaggtgtgattcaccggaaacggtggagggggtcgtcggaagcaggatatatcctttttaat

SEQ ID NO: 45970 - DNA, 271 bp, Glycine max
  Clone ID: 701040529H1
caggttgagtagttcttcatcatagtcctaaacattaaaccttagcaaaactcaacaatgctagacatcaaacgctacctcgtactcttcttcctatggttcatatcaaccattctgatacgttccatcttcaagaaaccacagcgtctaagactcccaccgggtcctccaatttcaatacccttgctgggacacgcgccatatctccgttcactgctccaccacgcattgtacaagctatcactgcgctatggacccttgatccacgtca

SEQ ID NO: 45971 - DNA, 269 bp, Glycine max
  Clone ID: 701040530H1
gccagctgaagcatcaccggtggtgtcaaagcagttgtctgacaccatttctagttccaaaatgattgatttgaaagaattgtccttggtcagtggaaaagctgcatggatggcttacctggatacctactgtttggatgccgatggtgctctttttgatgctgcattactttctgccgttgcttccttatctcatttgcaaattcctgttgttgccatgaatgatgatcgcaaaatagtactcgtgtctgaacaacatggacaaaagc

SEQ ID NO: 45972 - DNA, 265 bp, Glycine max
  Clone ID: 701040531H1
gcatcatggcctcgagagcagtgctattgttggctatgtgtgtgcttccggccatggttgtcgccattcgcccagcaaagtaccctttttgcgtgaagggtcgcgtctactgtgacccttgccgtgctggttttgagacctcagcaaccacctacattgccggtgctgacattatgttgcaatgcaagagcagggttagcaacgaggttgtgtacaccaagaaggggtacactgactcaactggagcatacacaatgtacgtgga

SEQ ID NO: 45973 - DNA, 274 bp, Glycine max
  Clone ID: 701040505H1
agaaaacgaaaaggagaagatgaaatgggatatgcagatggaggaaatcgaagcgattatggagaaaatttgggacctccacgataagctcagcgacgccattcactccgtctccagatcccactttctcacttccgtcaaaaccctcaaactcaacaactctccaccgacaccttcccaacgccgccgtcgccgctgccgatgaccgctcctcacgtttcgttttcgtcaaggactttagaccgctcgccgtcgccgataacgacaacgatga

SEQ ID NO: 45974 - DNA, 259 bp, Glycine max
  Clone ID: 701040374H1
tgttaatttgtctttctctatctctatcggtcatgggtgcttttgcttttgatgaggaaaactcctccaccgtggctccggcaacactctacaaagctctgacaaaagatgctgacactatcatcccaaagattattggggccatccaaactattgaaatcgttgaaggaaatggaggacccggaaccgtcaagaagataacagctagtgaaggtgaccaaaccagtttcgtgctgcaaaaagtggatgcaattgacga

SEQ ID NO: 45975 - DNA, 260 bp, Glycine max
  Clone ID: 701040375H1
ataacaacaatcctcacatgatgtctactgaaatggttgcatgtattgcaattgaggctatctccatattagagaagatgcattctagaggatatgtgcacggtgatgtaaaacctgagaactttttgctgggaccccctggaactcctgatgaaaagaagttgtttctggttgatcttggattagcaactcggtggcgtgatagttctactggccttcatgttgactatgatcaacgtccagatgtttttaggggcaca

SEQ ID NO: 45976 - DNA, 260 bp, Glycine max
  Clone ID: 701040376H1
cctttttcaacttcgcggtgtgagtgagacggagagtgctaagcaatcgtcttctcttctcggagcttggctttgcttatcgattctctctcctctcgtttctctaattccaaggtttgtaaaagatggcagatgccgaggatattcaaccccttgtttgcgacaatggaactggaatggtcaaggcaggatttgctggtgacgatgctcctagggctgtctttcccagtattgttggccgacctcgacatactggtgtt

SEQ ID NO: 45977 - DNA, 258 bp, Glycine max
  Clone ID: 701040377H1
gatttgttcaccagtttcccaaatgctggccaagtgcttatatgatcatatatttagtagctgtcctcttattttgctgaccattgatattctttatgcctttggaaggttatggtatttataataataatattattattgttgttttggttgtagttgttgttattggttgtggttgttgttgttatatgtctctttaataactttttgttttattattcctaccattaaatatgtagatattgattcaacgatcac

SEQ ID NO: 45978 - DNA, 277 bp, Glycine max
  Clone ID: 701040378H1
cacacttcgagcttccaaggaaggaagaagatgggtggcgtgacctcttcaatggcggcgaactaggcgttcttccctccgtccccggcgtcctacaaggtgctgaaggaggaggcgacggggctgctgctcatggagccgttcccgcaccgcgagaacgtggagattcttcggttcccgaaccgccgcggcacggagatcgtggccatgtacgtgcggcaccccatggccaaatccaccttgctctactcgcacgggaacgccgccgacattggcc

SEQ ID NO: 45979 - DNA, 257 bp, Glycine max
  Clone ID: 701040379H1
agttgatttgcttgtcttgtgttaaatctcttacaggatttgatttttgaagccaactgggatgtaacagacagaaacagcattcttttgggatacccctttgatatctgattctggacacaagctgtaggtgttacttcaactggattctggataaataatatattagatacagcttgaagttatgtctgcgtatggccatcaagtggagcggatgaattctacaaggagtctctcaggtggtggttctgagttgc

SEQ ID NO: 45980 - DNA, 265 bp, Glycine max
  Clone ID: 701040380H1
actcgagccgattcggctcgagaattagttcattctcattgcgcagctccctacctctccttgccagatgcagatcttcgtcacagacgctcaccggaaagaccatcaaccttgaggtggaaagccctgacaccatcgacaacgtcaaggccaagatccaggacaaggaaggaattcccccggatcagcaacgtctcatcttcgccggaaagcagctcgaggacggccgtaccctcgccgactacaacatccagaaggagtcaac

SEQ ID NO: 45981 - DNA, 274 bp, Glycine max
  Clone ID: 701040381H1
gtggtgccttatcgctgtggttatcatcttcttcttcctctttcttagatctcttctttctctacgccgcacgccgaaaccatggccggaaaaggagagggtcctgctatcggaatcgatctcggaaccacctactcttgcgtcggtgtgtggcaacatgaccgcgttgaaatcatcgccaacgaccaagggaacagaaccacgccgtcttacgtcggattcactgacaccgagcgtctcatcggtgatgcggccaagaatcaagtcgccatga

SEQ ID NO: 45982 - DNA, 269 bp, Glycine max
  Clone ID: 701040382H1
gaatattgagtccaattctccttcgctttccctctttatctgaaaggtatggagtgttttgacttctggaagagataatggtgcagtgcctagacggattaaagcatttgtgtgctgctctggtaaattgttgtgatgccgattcgtcaaagtcacctacaggtttagacaatccagaagttcttgcaagagaaacagtgtttagtgtaagtgagattgaagcgctgtatgaattgttcaagaagatcagcagtgcagtgattgatgac

SEQ ID NO: 45983 - DNA, 274 bp, Glycine max
  Clone ID: 701040383H1
gatagattgaaggcaatcaaatcatctttatacaaagattcttcttcatcgtctatgttttcctgcatattcagttttaaggttcaagcatcttcttgaaactcttctcaagctcgacgggaatttctcagcttttctctcgttacctcacccatcaaagtttcctcttctgggtgtttgtttatcggatccggggcattgcaagatttgatcatttcacgaatcatatcattatcaaacactcccattttctgggtacttaattgggatgggt

SEQ ID NO: 45984 - DNA, 272 bp, Glycine max
  Clone ID: 701040384H1
tttcaatttggggaaataaaaatagggggaaacattctagagagagtgtgtagaaaatatggttgtcgatgatatgacgctgtgcatcatcgtcggctatggaggttcctcttcttctcgtttctccgatgcttatcccaaaaggggtttgatggaggggagatatagtggggattgatatgatgaaggtgtttataaggttgttttgttgaaattgtgtttttgggatggcaatattgtacgaaccagcaataaaactcatcgaccagatg

SEQ ID NO: 45985 - DNA, 271 bp, Glycine max
  Clone ID: 701040386H1
attctctctgtctctctctctctctcatccaccagctggtgatattgatgtccatggctccatccataaatactactaagtgaaccacaccatgcagattccaactccaaccttggaataaaaggtgaaaaaaaacagcaactttaacctaagacaagagagtagtatctaggaagtttcaccttccttggagattccaactcacatcaaaatctgaggaagatctcaaccacttcactttccaagaggaggtgaggcatcatggctcaaa

SEQ ID NO: 45986 - DNA, 263 bp, Glycine max
  Clone ID: 701040387H1
aagcccttctaaaacgccttactctgtatcttctttcatcatccaaaaaaaaccattcacacaaagaaaacctttgggtttcccaagatgtcatcatcggaactctcttctttctttctcctgcccctatcagccatactcagtttcgatgctttgctcggagttatgtttctagtggccgtgttcggctactggctggttcccggtggtcttgcttgggctttgtccaaattcaagcctgcgattcccgggccttgcggtta

SEQ ID NO: 45987 - DNA, 267 bp, Glycine max
  Clone ID: 701040388H1
gcattgcacagtgctttgcgtttcttgtttgtacaaagtggcacaatccaactattcatggaggctgtcatattacagaaccgtgttcatcatcaaataccataagatacctagacttgaggacaggaggcttagttgtttacacagatgaagatagacagcaaaatgggttctgcaatctgcaggatatcggcagccatattatgaaaattccattcattggtttccaaatacttctttttatgcatttagagggaacaccatcca

SEQ ID NO: 45988 - DNA, 260 bp, Glycine max
  Clone ID: 701040390H1
agggtccaaacacttgaaaattattaccatcattcatattcatcaacgacccctcttctgtgcccacttccaaatcttctcctctcgctatgggttgcggctcctcccttccagataggggctcaaggcagttgggtcgacccaattcagagaatggtggagggcaggacgccaagaatctgagggtcaagcttgttctcttaggtgattctggtgttggtaaaagctgtattgttctacgatttgttcgtggtcagttt

SEQ ID NO: 45989 - DNA, 260 bp, Glycine max
  Clone ID: 701040391H1
ataaaatcgcaggcgaacgtcacagtcactccctctcctcacacgaaaaaagtatccccccaacccaccccaccccacccccaaccctcaacttagggttcttctgttcttcttcttcttctcctttaaccaaacaacaagaaaaaaaaatcacattccccaaaacacccttctcgctccgcatggcgaaaacgaggccaggcagaaaggacgtggactcgtacaccataagaggaaccagcaagatcgtccgagctgga

SEQ ID NO: 45990 - DNA, 262 bp, Glycine max
  Clone ID: 701040392H1
caggaagaggagagacaaacgaagcagaagcccctttctcacatcacatggcctccttgcccttggggcaccaccaccaccaccacaaaccggcggcggcggctatacatccgtcgcaaccgccgcagtctcagccgcaacccgaagttcctcgccggagctccgatatggagacagataaggatatgtcagctactgtcattgaggggaatgatgctgtcactggccacataatctccaccacaattggaggcaaaaatgg

SEQ ID NO: 45991 - DNA, 260 bp, Glycine max
  unsure (1)..(260): unsure at all n locations
  Clone ID: 701040393H1
agcaaaactacggagaaaaagttcttgttcagtttgaagattttgcaaaccacaatgcttttgagttgcttgcaaaatatggcacaactcatcttgttttcaacgatgatattcaggggactgcatctgttgttcttgctggggttgtggcagccttgaagctcattggaggtactctggctgaccacacattcttgtttcttggtgctggagaggcaggaactggaatagcagaactaatagctcttgagnatgtcaag

SEQ ID NO: 45992 - DNA, 264 bp, Glycine max
  Clone ID: 701040395H1
tctcaccaaattcttattagaacgaaaaaagaaaagaaaagaaaaaagagcgatttttccctcaccaaagaagaaccaaaacaatggcggatcaactcaccgttgaacagatctccgagttcaaggaagccttcagcttgttcgataaggacggcgatggttgcatcacaaccaaggagcttggaactgttatgcgttcattggggcaaaacccaactgaggcagaactccaggacatgatcaatgaagtggatgctgatggga

SEQ ID NO: 45993 - DNA, 268 bp, Glycine max
  Clone ID: 701040396H1
cttaatttcctcactcacaaggaacaccaatgacaaagctattcaatttcctcccattcctcttcctcaacatcttcatccaaacaatttcagcccaagtagcaccggcaccagcgggacccaccaacatcacccaagtgcttgagaaagcaggacaattcacaaccttcatcaaactcctcaaagcctcacaaatagctgatagaatcaattcacagctaaacaactcaaaccaaggcctaaccgtgtttgcacccactgataatgc

SEQ ID NO: 45994 - DNA, 282 bp, Glycine max
  Clone ID: 701040501H1
gtccacccttctcctcagaagccatggtcgtaaatctctctccctctccctctccacctttacattccagttccataatcagattggcaaattcaaagtcacccatttcagaaccatggttgagactcaaaacccacttcccaaaaccactcctttccccaacaagtgtgaacttcacttgcaacaagaatcaatttttgcacggtaaaaacaggaacaggttggatttcaggacttggtctattgctggttttgattatggaaactttgaagggcctcagt

SEQ ID NO: 45995 - DNA, 269 bp, Glycine max
  Clone ID: 701040502H1
ggctcgagcgtggacactgcaaattatctgagaattgcttcggaagcagagctgaagtgcaacaagtgatcaacggagaaggccaaagcccgttactactcttcttcagttgacttaatccgtctctagggcatacgtcagcgcgtgtgcttaatcgagagttgacgaagaagatggagaataatccgaaggagcaagctggacagcaaagcggtcaatttcaacggagaccctcacattcacgacaatggcaacgtattccaccactt

SEQ ID NO: 45996 - DNA, 274 bp, Glycine max
  Clone ID: 701040503H1
cttatctatcttcacctccatcttttaacagttcccctcgaaacttctgaagatgggtggcagtgcattcggacgcttggatgattctttcagtttaacctcaatcaaggcctatattgctgagttccattcaaccttgctctttgtttttgccggtgttggttcagccatagcctatggtaagttgacatcagatgcagcacttgatcctgctgggttactggcagttgctatttgccacggttttgcactctttgttgcagtttctgttggt

SEQ ID NO: 45997 - DNA, 264 bp, Glycine max
  Clone ID: 701040373H1
tagagacacaaggcatctgtgttgggcacacacttctggaccaaggattgaaaaagtggaatacgagtaacccatggacgggttattctcctgttgcagttgcttggactgtgaatgtcaagggagttcttgattatatcagggagctattgatgaaaccctgaagtataggctataggcatttgtactacccatctgacagacaaaagcattggaaagtgatagaaacgatagcttcttatttgcaaaaacatgtataaggtc

SEQ ID NO: 45998 - DNA, 266 bp, Glycine max
  Clone ID: 701040341H1
cgggaaaaaatggtgtcgctgaaactgcagaagcggctggccgcaagcgtgctcaagtgtggcagaggaaaggtgtggcttgaccccaatgaagtcaacgaaatctccatggccaattctcggcaaaacatcaggaagttggttaaggatgggtttatcatcaggaagccaaccaagattcactcacgctcgcgtgctcgtaggatgaaggaggcaaagaagaagggccggcactctggttatggtaagagaaagggtacaaggga

SEQ ID NO: 45999 - DNA, 265 bp, Glycine max
  Clone ID: 701040342H1
ctcattcttcacctgcaactatttggattgctgatttttgttaataccatatttactgatattggcgcatttctttgagaaagttactaattcctagatagaggcaaaaatgttgggaattttcaaggagaagttggttaaagcacccaaagagctgaacagtccagcttcgttgaattcatgcactaagcctaagctaagtcacgaaatccttcaggatttcatgtcctgcaattcctccaatgctttctcaatgtgctttggg

SEQ ID NO: 46000 - DNA, 263 bp, Glycine max
  Clone ID: 701040343H1
cctagctctgtcgttccgtcgttgacgatggcgtttcgggtgcgaaccctgacctccgctctctctttcttctctctctcttgtccatcgcttccgccaatgtcttcttcgaagagcgtttcgatgacgggtgggaaaatcgatgggttaaatcagattggaaaaaagatgagaacgtggctggggagtggaaccacacctctggtcaatggaatggagacgctaatgacaaaggtattcaaaccagtgaggattacagattc

SEQ ID NO: 46001 - DNA, 262 bp, Glycine max
  Clone ID: 701040344H1
gttaattactatgacattagaaagaaatgtgtgggagttctgtgttatgacttctctgtgatggaggatttcttaaacgagaagacagtgagagatgctttaggtgttggggacttggacttcgtttcatgcagtagcacagtgtatagtgctatgatgcaagactggatgagaaatctggaagttggtattcccacacttcttgaggaaggaatcaaggtgcttgtgtatgctggagaagaagatctcatatgcaattggc

SEQ ID NO: 46002 - DNA, 262 bp, Glycine max
  Clone ID: 701040345H1
cagagagggaaacatttgagaagcaacatggttgggttataaagacaatggaaagagagccttcactggttagagatgagtatgcaccggtgatatttgtgcaagacactctctcttacctcgaatctattgatatgatgtccggggaggaggaccgagaaaatattttgacggatagggccactgggaaagctgttctcactagtccttttaggctgttggggtctcatcatcttggtgtggttttaacatttcctgttta

SEQ ID NO: 46003 - DNA, 266 bp, Glycine max
  Clone ID: 701040347H1
ggaacaatggagttgttcttctacgcggtgttcggcggtttgggagcggttgttgcagtgacggagctgagcaagagcaacaaggaccgaatcaacacctcttccgcattcaattccttcaagaacaactacctcatcgtctattccctcatgatggctggagattggctacaaggtccatatgtctactacctttacagtacatatggatatgggtcgggagacataggacaactcttcattgctggttttgggtcttccatgct

SEQ ID NO: 46004 - DNA, 268 bp, Glycine max
  Clone ID: 701040348H1
atctccatctaatagtgttaatttgtctttctctatctctatcggtcatgggtgcttttgcttttgatgaggaaaactcctccaccgtggctccggcaatactctacaaagctctgacaaaagatgctgacactatcatcccaaagattattggggccatccaaactattgaaatcgttgaaggaaatggaggacccggaaccgtcaagaagataacagctagtgaaggtgaccaaacctctttcgtgctgcaaaaagtggatgcaat

SEQ ID NO: 46005 - DNA, 197 bp, Glycine max
  unsure (1)..(197): unsure at all n locations
  Clone ID: 701040350H1
cagaaaccctcaccaatgactgcgtcactgcncgccgtggagccgtcaccggagccctcgtcggagccgtcaccggagcctccagcgtctgatctcgtgtttgacgacttctcctccaacttcaacgccttcctcatcccctccatggactcgctcttcaacaccactgacgagacaaacttcgcctccgatctcga

SEQ ID NO: 46006 - DNA, 279 bp, Glycine max
  Clone ID: 701040352H1
atcaatactcataacttctcttttctttcattctctctcttttattcttatcatcacaatgccttcaattcccgtagagcccctcctggctccgaacccggatcgcttctgcatgttcccaatccaatacccccaaatctgggaaatgtacaagaaagccgaagcctcgttctggacggcggaggatgtggacctctcccaggacctccgccactgggactccctcaccgacggcgagcgtcacttcgtcacccacgtcctcgccttcttcgccgcctc

SEQ ID NO: 46007 - DNA, 264 bp, Glycine max
  Clone ID: 701040354H1
gttgtttcggagttagggaccttacgcagccatggccactgctacgaatgccgccgccgccccaccacgccagctctcccagaaggaagctgacatccagatgatgttggccgccgacgtccacctcggcaccaagaactgcgacttcccaatggaacgttacatcttcaagcgccgcaacgacgggatttacattattaaccttgggaagacgtgggagaagcttcagctagcagctagggttatagttggaattgagaaccc

SEQ ID NO: 46008 - DNA, 272 bp, Glycine max
  Clone ID: 701040355H1
gacttaacaacagcacaaagcgggttactgtctgttcaagctaccatctctctctctctttcttagtgcctccttgccagaagttaaaatggcccaagaaactttcctattcacatctgaatcagtgaacgaggggcaccctgacaaactctgtgaccagatctccgatgctgtgctcgatgcatgcttggagcaggaccctgacagcaaggttgcctgtgaaacctgcaccaagaccaacatggtgatggttttcggagagatcacaacca

SEQ ID NO: 46009 - DNA, 182 bp, Glycine max
  Clone ID: 701040357H1
gctttattgttgacgtattttccattaattggaatggaacattctatagcaagctgccggccattggagactaccagcagattgtaaattttcaggaatcttgttcttgtaaagtacactgttttcgttgttttattatgtctagcggaagcacttggatattgatacacgctgtaacctag

SEQ ID NO: 46010 - DNA, 261 bp, Glycine max
  Clone ID: 701040358H1
caaaattcaggaaaaaaaaaaaaaacatggtggtaaaggtgtatggtccaacctatggatcccccaagagggtcctggtgtgtctgattgagaaggaaattgagtttgaaacagtgcatgttgatctcttcaagggagagattaaggaacctgagttccttaagctgcagccatttggatcccttcctgttattcaagacggtgattatactctctatgaatctcgtgcaataatcagatacttagctgagaagtataaag

SEQ ID NO: 46011 - DNA, 262 bp, Glycine max
  Clone ID: 701040359H1
tgaggttgctgcagcaggtgtctaatgtgtaccaatctatgaagattgaaaccttatcggggatgatccccttctttgatttctctcaagtggaaaaggtttcggtagatgctgttaagcagaagtttgtatcgatgagagttgaccacatgaaaaatgctgtgattttttgcaaaaagagtcttgagtctgatggcttaagggatcacttggccaattttgctgaacaattaaataaagcaagacagatgatttatcctcc

SEQ ID NO: 46012 - DNA, 262 bp, Glycine max
  Clone ID: 701040360H1
caaaataacaataacagttcaaaatcaaaatcaaatctacgtctcatcgaataatttcagatctcgtcgatctgagctcaaaacaatggcgaaaccaaggtactctcgtcttccacctcgcaagtcatcgtcgtcttccacgctgattctgactctgttcctggtcttcaccttcctcgttctcattctcctggctctcggcatcctctccattcctagctcctcgcgtggaaatttgcccaaacctaacgatctcgcatcc

SEQ ID NO: 46013 - DNA, 267 bp, Glycine max
  Clone ID: 701040361H1
cgcggcctcgagtcttttctttttctgtatcgtttttactttccatcacttccattttctcgtcatcatcggaggatgctgctgcttctgctaatggtaaaattcttcataaattattgccttttgcttctacttttgtttcccttatgcttaataatcgaccctcttcaattcttgtcgttagtgtgttcaactatgtagtgtaatatggaggcaaaaacagatcgtgctttgattacggatgaaaaccagattcaatgtttacat

SEQ ID NO: 46014 - DNA, 267 bp, Glycine max
  Clone ID: 701040363H1
gtaatgggccacctgtattttctgctgggcccatgccaggtccccaacgctttccggttagcagtgttccacaacattcagttggcactccaccaacaatgagagctcctcccggccctcctgttcagccccagcccccatatcccaatgtaactcaaggaataatgcagcctccaagttcaccttttggagcacctacttggcagatgcaatctcagcaggtagcaccacctcctccagttcctggtccttcacagggtcctcgga

SEQ ID NO: 46015 - DNA, 277 bp, Glycine max
  Clone ID: 701040366H1
ataaaattctctcttcctttttgggttctcctattccaagcttcaatcttttctctcttctcacagccttcttcactcacaggaggtgaagatgtcgactccggctaggaagagactgatgagggattttaaaagattgcaacaagatcctcctgctggcatcagtggggctccccaagacaataatattatgctttggaatgctgttatctttggcccagatgacaccccttgggatggaggtacgcttaagttgacacttcagtttacagaggat

SEQ ID NO: 46016 - DNA, 277 bp, Glycine max
  Clone ID: 701040367H1
cttttctcccccaaacaccatcctccctccgcctctgccgccaccaccaccgtatccttctcccacaaaccaccgtcagactccaacagcgctgccacccctcgccgcccctccaaaccccccaaagccacaccaataactcctccctcaaaccctctcgctaacaagctatggctcacaagcaaactctcccctcctcctcctcctcccccaccggcaccgccaccaccggaaattgacaccgaaaccaaaaaagagagcggcggtgaaggcgcgg

SEQ ID NO: 46017 - DNA, 275 bp, Glycine max
  Clone ID: 701040369H1
ctccttaatttcctccttctttcaaacttgacaaagccacaactcttctctcatctcatataaatacccttccacgacaccaatttcttcatcctctcattgaaaaacaaaattaatcatcttacttatttattctccgaaaatggttgatttacattggaaatcaaagatgccaagttccgacatgccttccaaaactctaaaactctctctctccgacaacaagtccttaccctctttgcaactacccttccgcaccacagatatctctcacg

SEQ ID NO: 46018 - DNA, 273 bp, Glycine max
  Clone ID: 701040370H1
ttcacactggtctttgcttctcgttactcatttctcacctaactttctattcttctcagtctcagatcagaaccttggccatggcagcgttccagaagatcaacgtcgccaaccccatcgtcgagatggacggagatgaaatgactcagggttatctggaagtcaatcaaggacaagctcattttgcccttcttggagttggacatcaagtattatgacttaggccttccttaccgtgatgagaccgatgataaagttacaattgaaagtgcg

SEQ ID NO: 46019 - DNA, 274 bp, Glycine max
  Clone ID: 701040371H1
ccatcgagccgaatcggctcgagctcggatcacagtgttagggttctaccaattttctccgattgccatcaaacatcacacaccacgccaccaactatacgtcagcattgaaccctaaaatacatgactcagaagcagagaaccagaatcccagattccatggaaacccagtacgaggagagtgagaaagacgagtcttcctcttcttatagttcctcagaagacgaggaggaagagatagagaaggagctggctgatgtaacgtttgaggagt

SEQ ID NO: 46020 - DNA, 269 bp, Glycine max
  Clone ID: 701040372H1
cgtctctcacacacaccactttatatacgcacacgagagtcggaagcactactctcttcgccgcttgctctctctctctcgctctttcagctttgactttggtggaaactaaagactagtcaaaatggtgaagttcacagctgaagagctgcgtcgcattatggactataagcataatatccgtaatatgtctgtcattgctcatgttgatcacggaaaatcaaccctgactgattctcttgtggctgctgctggtattattgctcaag

SEQ ID NO: 46021 - DNA, 274 bp, Glycine max
  Clone ID: 701040340H1
cctggcatcttcaatttggtggctcttatcctgatacatacataataaatagcttttattattgaaattggcttttgttttaagcaccagataaaattaaaaaaaaatagtgttgattttgagccacatgaatgactgggcttataattagaaatttagataatattcaaaggtaataacaggagtagtgtcagttgttaatttgagcatatatatttggccagcagaactgaatgtttcaatcaaatttgtcatacactgttgtttatttttc

SEQ ID NO: 46022 - DNA, 282 bp, Glycine max
  Clone ID: 701040307H1
ctctctctcaccaaagccttcctagaacgacaaacaaaaagaagagcaattttccctcaccaacgaagcagaagcaaacaatggccgatcaacttaccgatgaacagatctccgagttcaaggaagccttcagcttgttcgacaaggacggcgatggttgcatcccaaccaaggagcttggaactgttatgcgttcattggggcaaaacccacatgcggcagacctccagggcttgctcaatgaagtggatgctgatgggaatggtgccatatgacttccct

SEQ ID NO: 46023 - DNA, 277 bp, Glycine max
  Clone ID: 701040308H1
tctggctaaccaaccctgacactccttcttctccgcttcctcttcgatcatcgcttcagaatgccgccgaagttcgacccctcccagatcgtcgacgtcttcgtacgcgtcaccggcggtgaggtcggcgcggcgagttccctcgccccgaagatcggtcccctcggtctctcccccaagaagatcggagaagatatcgccaaggaaaccgccaaggactggaagggcctccgcgtcaccgtcaagctcaccgtgcagaaccgtcaggccaaggtca

SEQ ID NO: 46024 - DNA, 276 bp, Glycine max
  Clone ID: 701040309H1
cttgtagctattagcttataacagagagagagagagagagagagcgagagggagagatcacatttcctgaactataagctatatagcacttccataatcttacaacaatggaggggaccagcagccaaagcacgtttgccttcatccctagcacaattgagacaccaagtccaagcatccctgagatatcatcatcatcttcccctggctctcttgcaagaattgcacaaagttaccctcccggctttcccagaaaggtgttagcggagattatag

SEQ ID NO: 46025 - DNA, 270 bp, Glycine max
  Clone ID: 701040312H1
aaacggtgttagggttagaagtaggattagggttagggttcctctttactttacccgcgtaattctaccttccttccaacaataacaacaataatgttcggctccatcaaccagatcgtctccgccgaagacaccgacggccccgtctccgaccaccacatccattacagttcccacaccatcgaagacgacggcgccgcctccgatcaccacatccattacagttcccacaccatcgaagaagacggcgccgcctccgaccaccacatc

SEQ ID NO: 46026 - DNA, 272 bp, Glycine max
  Clone ID: 701040314H1
cacctttcttccctatcttctacatttaagccgattcatcaaccttttcaacttgagatgccccttttctccactcactttgtttcacattgctgctaaagcaaaattcttttttttttggttcacctcagcatacatacaatagcatatgatgaagaagaacaacctcagttgctgtgtgttgttgcacttcctttgctgttgtctccttttgccagctcttgttctctcccaccacatccatggaaaccctgcaagtaacatttttgaca

SEQ ID NO: 46027 - DNA, 287 bp, Glycine max
  Clone ID: 701040317H1
ctcgagccgctaaagtaagcagcgttgcaacgctgtttcctttctgtttcttttcttctaccttccgacgagatctacaacgttgttgttgtttagatcttgaatagtgtattggtgttcggtgagatggaagaaaggaagcaatcacgttatgtgaagttgactaaagatcagacacctctcgaagacattacccctggcgaactcaaccagccaattcaggttcctcagttggacgttcgcaagtgccctgaatgtagacagccgctacctgaaagctatgctcc

SEQ ID NO: 46028 - DNA, 285 bp, Glycine max
  Clone ID: 701040318H1
gttttcttttcctccaactgtttcctccaacactacacctatcttctctttacttctcttctctccaactcaaacatttatttcttccttctccgacaagttctatatcttccttcctttcattcatctctcgttaatcaatctttacccttccctctttggtttggtatcaaccgtttctttcgtgttttctctagtgctacggaacccaaccaagttagtttgaaggttattgtgattggttgagtatgacttctcagctgaggaatggaagtgggagttcga

SEQ ID NO: 46029 - DNA, 281 bp, Glycine max
  Clone ID: 701040320H1
gtggtcttgttaccatgcctttcatcattgcaaatgaggcacttgcgagggtggcaagtctgggccttttgcccaacatgatactgtatttgatggggacctacaggcttcaccttgcccaagcaacccagatacttctctggtcccatgctaccagcaatttcacacctgtggtgggtgctttcattgctgattcttatctgggtcgattcctcgctgttgggttgggttcggccatcacttttctgggaatgacactgctgtggttaacagctatgatc

SEQ ID NO: 46030 - DNA, 267 bp, Glycine max
  Clone ID: 701040321H1
gctcttagcaccaccaccagcttctgcagtagctttaagctacgaaagattttccttgaccatggggcaatagcatttagtgacggtgttctgtttatgggctttaacatgttcacttcttccatcttactcctttggaattctgagaattgggatgaagaagagacctctagatcgtgatagtactaatgctgctagaaaggctagagatggtctaagatctgtaagaccaatgatgggtgcacatgatcagtttatgggtaagtc

SEQ ID NO: 46031 - DNA, 197 bp, Glycine max
  Clone ID: 701040323H1
aatgaagcctgaggaaattgacatgggagagaatccagggctagtcacatacatgaggactccaatacaagctgtggtttctcctaggctcccctcacatttatacaaacgtgtgcctgctgagatctaatctttcttttctttcccttggtatactctttgttgcattaagaaaaatgccttgtggcactactttt

SEQ ID NO: 46032 - DNA, 274 bp, Glycine max
  Clone ID: 701040324H1
gcaaagttatagatataacatactcaaagggccgtggcaagaaagggttggaggaagccttggataggatatgtgcggaagcaatgctgcaattagtgatggctacactacccttgtgttgtctgatagagccttctcaaggaaacgtgttgctgtgagctccctgctggctgttggtgctgtccatcaacatctagtgaaaacacttgagcgtactagagttgccttagtaatagaatctgctgagccacgtgaagtgcaacatttctgcaca

SEQ ID NO: 46033 - DNA, 271 bp, Glycine max
  Clone ID: 701040325H1
gggcagtgccggcgcgcgctgaagtttgctaggttcatgagcaggttcgggaagagttaccgaagcgaggaagagatgagggagaggtacgagatattctcgcaaaacctcaggttcatccgctcccacaacaagaaccgcttgccctacactctctctgttaatcattttgctgattggacttgggaggagttcaaaagacacagactaggcgctgcccaaaattgctctgccactcttaacggcaaccacaagctcactgatgctgttc

SEQ ID NO: 46034 - DNA, 279 bp, Glycine max
  Clone ID: 701040326H1
ttcggcacgacgactcgagatgcgaaactacagtcagcattcgtaaaagatgagtagcatcggtacaggttacgatctatcggtcaccactttctcccctgatggccgcgttttccagatcgagtatgccgctaaagccgtcgacaacagcgggactgttattgggatcaagtgcaaagatggggttgtgttgggcgttgagaagcttattccgtcgaaaatgatgcttccgggttccaatagaagaatacactccgttcatcgtcactctgggatggc

SEQ ID NO: 46035 - DNA, 263 bp, Glycine max
  Clone ID: 701040327H1
ctcttcttctcttgcggctagggttttagcgcacttcttctagatttaaggaagatgggtaaggaaaaggttcacatcagtattgtggtcattggccatgtcgactctgggaaatccactaccactggtcacctgatttacaagcttggaggcattgacaagcgtgttattgagaggtttgagaaggaagctgctgagatgaacaagaggtctttcaagtatgcctgggtgctggacaaacttaaggctgagcgtgaaagagg

SEQ ID NO: 46036 - DNA, 255 bp, Glycine max
  Clone ID: 701040329H1
gagaaaaaaaaacattggacatagtaaagccatggaagagatcaccaagaacctatcagggacttctcttttggtaccatcagttcaagaattggctaaagaaaagatatctaatgttccacaaagatacattcaacctcaacatgaagaagacattgtgatcctctctgaagaagctaatagtagccttgagattccagttattgacatgcagagcttgctttctgaagaatctgggagctcagaattggataa

SEQ ID NO: 46037 - DNA, 270 bp, Glycine max
  Clone ID: 701040330H1
cggctcgagcttcgagtcaaaggctgatgctggagcatctaagacatttccccagcaagctggcaccatccgcaaaaacggttacattgtcatcaagaacaggccatgcaaggttgtggaggtttcaacttccaaaactggcaagcatggacacgcaaagtgtcactttgttgcaattgacatcttcactgggaaaaagcttgaggatattgtcccatcttcccataactgtgatgttccccatgttaatcgcattgactaccagctcat

SEQ ID NO: 46038 - DNA, 269 bp, Glycine max
  Clone ID: 701040331H1
ctggaagttggaagcgagactgtgatagacaaaagcaaatccatcaagacattcctgatgcagatcttcgagaaatatggaaatactgacattgagggtgttgattcaactaatgcatgctatggaggaactgctgctctgtttaattgtgtcaattgggtggagagcaattcatgggatggacgctatggacttgttgtctgcactgacagtgcagtttatgctgaagggcctgctcgacctactggaggagctgctgctattgccat

SEQ ID NO: 46039 - DNA, 272 bp, Glycine max
  Clone ID: 701040332H1
aaacaggcaactgagtgtggttcaccctatttacaaacttctgtttcctcactaccgtgacaccatgaatattaattcacttgcccggaaagccctggtcaatgcagatggtattatagagaaaacattcttgtggggtaggtactctatggaaatgtccgctgtcatttacaaggactgggttttcactgatcaagcattacctaatgatcttgtaaagagaggagttgctgttaaggacccatctgctccccatggagttcgtcttttga

SEQ ID NO: 46040 - DNA, 284 bp, Glycine max
  Clone ID: 701040333H1
ctctcttttgcgtttcgatgggacccttcagtttctgcacacaccatcatatcttttaaaatcttcacgaatcagcaaaatcccctcacacactctcttcctcccaaagatcttttctctttcgatattttatctctctctcttttcctcatggctgagaacttggacgacggcgagttctggctcccgccgcagttcctcgccgacgacgacgttttgccgacaccctttgaagcaaagttcccatctttgcccgacgacactgttttgttcccctccgagtg

SEQ ID NO: 46041 - DNA, 282 bp, Glycine max
  Clone ID: 701040334H1
gctcaacaccgcctccgctgccgccgccgccgctccctccccgccgccggccaatctcgacgccggatcgcgtggcctcatgattccctctcccagcgagtcacgcaagatcgagttgtactcccccgccttctacgccgcctgcaccgccggtggaatcctcagctgtggcctcactcacatgaccgtcactcctcttgacctagtcaagtgtaatatgcagattgaccctgctaagtacaagagcatctcgtctggttttggagttttgcttaaggagca

SEQ ID NO: 46042 - DNA, 281 bp, Glycine max
  Clone ID: 701040335H1
tccacagacttcttctgataaaaataccacattgggtctatcagtactaaggaactttgatgtttatgctaaaaaagattggtactggattggagctgctgctcttcttggtttcacagttctgtacaacgttctcttcacccttgcgcttatgtaccttaaccctcttggaaagacacaagcaattatttctgaggaagatgcaagtgaaatggagtctggaggagacaccaatgaagaacccagacttgtaaggcccccatcaaacagagaatcaatgc

SEQ ID NO: 46043 - DNA, 275 bp, Glycine max
  Clone ID: 701040338H1
cattaatctccgatccgaaaccgaatggggattctgtacgcgctggttggtcgtggatcggtggtgctggcggagttcagcggcaccaccaccaacgccagcgcaatcgcgcgtcagatccttgaaaaaatccccggcaacaacgacacgcacgtttcttactctcaggatcgctacatcttccatgttaaacgcaccgatggactcaccgttctctgcatggccgacgacaccgccggaaggcgaattccttttgcgtttcttgaggatattca

SEQ ID NO: 46044 - DNA, 280 bp, Glycine max
  Clone ID: 701040306H1
cttattcctctttcctcttcattctcttcccaaataaaactatactcagtcttcagtgatcgtcaacacttaagacccaagtgtaaatgaagaaagtggtggtgaagttgaatttgcacgatgacaaagcaaagcaaaaggccatgaagtcggactctagcctagcaggcatcgattctatctccatggacatgaaggagaagaaactgactgtcgtgggtgaaatagaccctgtcgatgtggtgagcaaattgagaaaaacttggcacccagaaattgt

SEQ ID NO: 46045 - DNA, 296 bp, Glycine max
  Clone ID: 701040256H1
tgcaattccttcttctcccagaatcggtcactaaatccgcaatcatgaagctcgataccaccggtctcgaatcgtttcccacactgcttgcgcctcaaaacgacgtcgttggagaactctccgccgctccatccttcgaccttccgaattccaacgatttcgatgggtttgtgaaagaagctattcagatggtgaagcccgcgaagggtactacgactcttgcttttatatttaaggagggtgttatggtagctgctgattctcgagctagcatgggaggatatatatcatcgcag

SEQ ID NO: 46046 - DNA, 293 bp, Glycine max
  Clone ID: 701040257H1
attccgtgaagaatttcgtgcagtatggcgtaattatagtgagctgtagcttacataaaatttgttggacttggatgtgctgctgctttattgttgaagtattttccattaattggaatggaacattctatagcaagctgccggccattggagactaccagcagattgtaaattttcaggaatcttgtttttgtaaagtacactgttttcgttgttttattatgtctagcggaagcattggaatattgatacacgctgtaacctagacattgtcataattctagttgtcaaaa

SEQ ID NO: 46047 - DNA, 296 bp, Glycine max
  unsure (1)..(296): unsure at all n locations
  Clone ID: 701040259H1
aacgctctctcactcacaaacacacactgaactaaaaaacatcaaaagagacatggctgagcaaaccttcatcatgatcaagcctgatggcgtccaaagaggccttattggcgagatcattagcagatttgagaagaaaggtttctacttgaaaggtttgaaacttgttactgtggaccgtccttttgctgagaagcactatgctgatttgtctgccaagcctttctttagtggtttggtggattacattatctctggccctgttgttgccatgatctggganggcaagaatgttg

SEQ ID NO: 46048 - DNA, 201 bp, Glycine max
  Clone ID: 701040260H1
acagaaactatcaatgaagggggaagtgcagcttcagcctccagcggttatgcacaacgctagtgattcggaccctttgctccataaccaggaggaggaggaggaggatgagtcaccgggaagctctggtgagatcaagaatgaggaagaagacgttgaggctggattactcccctgttgtcgaatttgcctcgaaagcga

SEQ ID NO: 46049 - DNA, 60 bp, Glycine max
  Clone ID: 701040264H1
tgcgcttgcactcgtctaagactactagtcatcacgaccctagacgttgatcagaaactc

SEQ ID NO: 46050 - DNA, 292 bp, Glycine max
  Clone ID: 701040265H1
gcttctcttcctccctggaagaacaagaagagtcaccgctacgacgccgttcgtgcttttttgaggtgccacagtcatgtttgggcgtggtggaccaaggaggagtgacaactccaaatattatgatattctcggggtttccaaaaatgccagtgaagatgaaatcaagaaggcctatagaaaggctgctatgaagaaccatccagataagggaggagatcctgaaaagttcaaggagttaggtcaagcatatgaagttttaagtgatcctgagaagaaagacctgtatgac

SEQ ID NO: 46051 - DNA, 293 bp, Glycine max
  Clone ID: 701040266H1
cggatactgaaagacttgcctcccagactcaagctgaaagtggagcgcgggtttctttacaccatgccgcctattagttggtctgatatatcttactataaggatcagattctacccttgatacaaaagtacaaagttgttcatttaaatagaactgatgctcggttagccaataatggtcaaccgctggagattcagaagctgcgttgccgagttaattttagtggtctgagatttacttctcagatagaggagttgggcagaaaggtgatcaggcttcttaggcaaaaggg

SEQ ID NO: 46052 - DNA, 296 bp, Glycine max
  Clone ID: 701040268H1
cacaaacataatcatcaagcacacacaatctcactactcgaaacagatcgaatagaaatatatatagttagagagagagaatattatacagagagataagtgcaataatggagtgttgtaagagggtatatgagtggttatgcaattcaaaatcatacttgataatattgagcttgcaatttggctccgccggcatgtaccttatcaccatggatgctctcaataagggcatgagtcattatgtgtttgtcgtttaccgcaatgtcatcgccactattgctcttggccctttcgca

SEQ ID NO: 46053 - DNA, 291 bp, Glycine max
  Clone ID: 701040269H1
caagatttgaagggaaggttgactgttcacttccaaggggaggagggtattgatgcaggtgggcttacaagggaatggtatcaattattgtccagagttatttttgataaaggagcactgctttttactacagtgggcaatgaatcaacatttcagcctaaccctaactctgtttatcaaacagagcatttatcttatttcaaatttgttggtagagtggttggcaaagcattatttgatggtcaactctggatgttcattttactcggtcattctacaagcacattcttg

SEQ ID NO: 46054 - DNA, 293 bp, Glycine max
  Clone ID: 701040270H1
aacagtgaagaggtgtgacagagagacaaaagaaaagatgtcagggcctcaatgctgttcaaatccaccaagcttgaaccccggtggaggagttgggcatgtggacaaagtgggtggtgttgattcctatttcactggatctcctcactccaaactcgctgttcttatgctctccgatgtttttggatatgaagcgccaaatttaaggaagcttgctgacaaagttggggctgctgggtattatgtagttgttcctgacctcttggatggcgaaccctttaatcctcagaatt

SEQ ID NO: 46055 - DNA, 289 bp, Glycine max
  Clone ID: 701040271H1
catccatcggcagttagagacagagagagagagaaacaaaaccctaattggtgagtggcgaaaatggcgcagctggcggcggcagcagcagcaacaggagcagcagtaatcgagcaagtgcagtgcttcgggcggaagaagacagcgagagcagtgacctactgcaagcgtggtcgaggcctcatcaagatcaatggctgcccgatcgagctggtggagccggagatcctccgtttcaaggccttcgagccaatcctcctcctcagccgccaccgcttcgccggcgtgg

SEQ ID NO: 46056 - DNA, 294 bp, Glycine max
  Clone ID: 701040272H1
gttggagaaggcgaaaggcaaagaaggagatttcaaaactcgtgaaaaaccagagagagggcttttcatcgttctctctctctttgctcgtttgttcccactgaaaccccagcgccgtttatttcatgccgttgttcttgtctcgcacgcaatcgtgccggcgacactgcaattccggcgccgggaatgggctttgagccgccgccggataacactgtgttgaatttagctaagctagggtttcggttggatttcggattcgcaggtctctctcaactaattaattaaccgatt

SEQ ID NO: 46057 - DNA, 292 bp, Glycine max
  Clone ID: 701040273H1
gaaaacttgggagggttttataggggcatctgttaccaccatcatctctgcatttatgcttgctaacatcatgggtcgctctcagtggctaacgtgtccaaggaaggatttgtcaactggttggcttcactgtgatcctggtccactgtttaagccagaatcttatcccttacctggatgtatttctcactggttttcttggaaagagatatcaatcctaccaattcaatggcattctttatgtctaggcttgtttgcttcaattattgcaccttttggaggcttctttgca

SEQ ID NO: 46058 - DNA, 76 bp, Glycine max
  Clone ID: 701040275H1
catgaattaaaataatgaatatcaatcttaatgagaaatttatattcatgaattaaaatttctcattaagatttac

SEQ ID NO: 46059 - DNA, 290 bp, Glycine max
  unsure (1)..(290): unsure at all n locations
  Clone ID: 701040282H1
cccaaatcaggaaacactttctcatcttccctttcccagtttcacaccctacctcatggaaggctctgtcaacgaacgtcttcattttgggaagattggatatggatgcaatcattacaggagcagatgnaggattcgtgctccctgctgctacgacatctactcatgctgtcactgtcataacgtggccgcgagcttgttgaagaatccctttgatcgccacgagctcgttcgccaagatgttaaacaagttatttgttcagtttgtgacactgagcaacctgttgctc

SEQ ID NO: 46060 - DNA, 290 bp, Glycine max
  Clone ID: 701040289H1
gcattccaatcgctcccaaaatcttttctaatttgttcataactcaataattctcatcatgggctccttgattgttccaggtgaacatgatcacaaactaaagcttgtttctcttccctttgtatcaaccagtcacctcattcccgtagtagacatagctaggctctttgccattcatggtgttgatgtcaccataatcaccaccacagccactgccgccattttccaaagctctatcgatcgcgaccgtgaccgcgggcacgctattagaacccacgttgtcaagttcc

SEQ ID NO: 46061 - DNA, 291 bp, Glycine max
  Clone ID: 701040290H1
caagcaaaaagaaagaatcccaggcgaggagaaagatggaggggaaggagcaggatgtgtcgttgggagcgaacaagttccccgagagacagccaattgggacggcggcgcagagccaagacgacggcaaggactaccaggagccggcgccggcgccgctggttgacccgacggagtttacgtcatggtcgttttacagagcagggatagcagagtttgtggccacttttctgtttctctacatcactgtcttaaccgttatgggagtcgccggggctaagtctaagtgta

SEQ ID NO: 46062 - DNA, 297 bp, Glycine max
  Clone ID: 701040291H1
ctaaactccagtggatccgaagccaccttcagctctgagtgtagaatccaaatcctgaacctcaacaacctccggcatcacgatctgctggatcatcatctgtgcaaccctgtcaccaacttttacttcaaaatcagtgtcttaatggttgaacagtatcacccctacgggacccctgcaatccgcgtcgatcacgcccgctcccacatcgatcgagtgcttccatgataatccagatcgcggtgctgaaaaacaaaacaaaacggggagatttaaagttagcccctcggctgggaa

SEQ ID NO: 46063 - DNA, 292 bp, Glycine max
  Clone ID: 701040301H1
atatattccattctctctgtgtatttccctacctctcccttcaagatgcagatcttcgtcaagaccctcaccggcaagaccatcacccttgaggtggaaagctctgacaccatcgacaacgtcaaggccaagatccaggacaaggaaggaatccccccggaccagcaacgtctcattttcgccggaaagcaacttgaggacggccgtacccttgctgactacaacattcagaaggagagtactcttcacctcgtcctccgtctccgtggtggcatgcagatcttcgttaaga

SEQ ID NO: 46064 - DNA, 276 bp, Glycine max
  Clone ID: 701040302H1
tcgaagcaatgttgagagctctgaagaggaggaggatagtgaaagttcagattctgagattgattctgagatggagagaattattgctgaaaggactagggaagagaattagtgggaagagaggttcttctagaaagaagggggatttggatgatgatggatccgacaaacattctggcaagaggagaaagagaggtaggtcaaagaagaggagtgctaagagggaagttagtgattcggatgattcaggtgaagaaagaaggaggaggaagagaa

SEQ ID NO: 46065 - DNA, 284 bp, Glycine max
  Clone ID: 701040303H1
tgaccacaacatctctctgctaatcactcacacgcaaaagagagagagaatcgaaacaccccgtaagcagcacggcacaatcgcaacgcaagagattaataatcaatttgcatcgatcgatcgatcgttggttaggtttttgttttgggggaatatgggcgagttaactcatgcggaggtgtactcgcctcggactcagcaagtgtggagggcactgttgagttggttggccttcttctttcagatcttcttccagattataagagccttaggtcactaccctc

SEQ ID NO: 46066 - DNA, 285 bp, Glycine max
  Clone ID: 701040304H1
ggtgcattgtgcatacaacagcttgtggatgggcaatttcatccacccagattgggatcatgttccaatctactcatccttgtgctgccttccatgctgcctcaagagccatatctggtggccccatttacatcagtgacacagttgggaaccacaactttgagctgcttaagaccttggccttgccagatgggtccatcctcagatgtgagcactatgcactcccaaccagggactgtctctttgctgaccctctccaggatggcaaaacaatgctcaagatat

SEQ ID NO: 46067 - DNA, 284 bp, Glycine max
  Clone ID: 701040305H1
gttttcattgttgtggttgttgtagaagaagaagaagctgaagaagaatggagtccacagaatcttcatacgtgtcttctcccgagggtccgaggaagcacgctgcatcgcctcctccgaaatcgccttcgctagattctgaggagaagccaacatacattaggtttctagtatcaaactctgcggctggttcagttattggaaagggcggttcaactatcactgattttcagtcacaatctggagcacgaatccagttgtcacgtaatcatgaattctttcct

SEQ ID NO: 46068 - DNA, 295 bp, Glycine max
  Clone ID: 701040255H1
cttgaatgctgatccagcattgtgctcagggatagaacatgcttcattagcttcaattttaatagaaaattcgcccctgcttccatttttggcacaacatgcattcctctttcgaacattttctttaaaggaattctcaatctttagctacattaagcgcaaatgagattccctaatcccacgtgaatccaatgatgtcaaaagagcatcaaaggcctcttcagaatcaataagcctccacttgccatcatgatattcaacaaagatcctgcctgaaccaggatcattgctagaa

SEQ ID NO: 46069 - DNA, 275 bp, Glycine max
  Clone ID: 701040220H1
tctctctctctctctctcggtgtgtctctatctcattcccgttgtagcagccacttcgcgacacgatgcataggcaatccctgggttctccctctcccaagctccccaagctagagacgctcgtcaccgacgaagacgatgctcccaaacctcaccgtctcagcctctccccggcggcttcaacggcggacaagttcgtccacctcattcctgtcctcactctcctctgcttcttcgtcctctacctcttctcccacactccctctccatcagac

SEQ ID NO: 46070 - DNA, 297 bp, Glycine max
  Clone ID: 701040222H1
ctttgacggtttctagagagagaaagtgatggccggagttaatccaaacggcgtcgcgattttgcggcggttccgacgcatggcggacagttcattcagtacaacatatttggcaacctcttcgaggttacgacgaagtaccgtcctccgatcatgcctatcggacgcggcgcgtacggaatcgtttgctcactgttgaataccgagacgaacgagctggtggctgtgaagaagatagcgaacgctttcgacaatcacatggacgctaagcgtacgcttcgtgagattaagcttctt

SEQ ID NO: 46071 - DNA, 300 bp, Glycine max
  Clone ID: 701040224H1
atcgagccgctcgagccgctcgagccaattcggctcgagtttcagctgtctgctgttagacctgtacccccctagccactgaactggaaaagtccaacttcaaggatgagtaagcttcagagtgatgctctaagagaagctatctcaggaatcatggctgattccaaggaaaagaacaggaaatttgtggagaccattgaactccaaattgggttgaaaaattatgatccccagaaggacaagcgtttcagtggctctgttaagttgcctcatattcctcgccccaagatgaagatttgt

SEQ ID NO: 46072 - DNA, 299 bp, Glycine max
  Clone ID: 701040225H1
ggcaaaataagaatgatgagttgcaaagaaaatgaggaggatgacacttacctctcagctttgacactatgtttcagccgaatttttccggcaatcttgaacgctgctgttgatctgaatttgtttgatatcatagacaaggcagagagttcaactttgtcagcctctgagattgcttctttgcttccaaatccacaccctcaattggctaataggcttgaacgcatattgccggtgttggcaagttactctcttctcaattgctccattcgcaccactgaagatggtgtgagagagag

SEQ ID NO: 46073 - DNA, 300 bp, Glycine max
  Clone ID: 701040226H1
aattgatttaatctttcctcatcatgaaaatgagattgcacagagctgggctgcagaccatgatagccatgtcagttattggatgcataatgggcatgtcactaataacaatgaaaagatgtcaaaatccttaggcaactttttcactattcgccagatcactgagcgttaccattcacttgctttgaggcactttttgatcagtgcccattacagatctccactaaattactcaatttcacagctggagaactcatcagatgctatttactatatatttcagactcttcaagattgtaa

SEQ ID NO: 46074 - DNA, 142 bp, Glycine max
  Clone ID: 701040228H1
gcctgataacccataaccgaccgcaccaccgttttcctttgctttgcgttctacaatgtcgaaaacctcagagattattacatgcaaagctgcaatttgctggggaataggaaaacctgtgactgtggaagagttacaagta

SEQ ID NO: 46075 - DNA, 294 bp, Glycine max
  Clone ID: 701040233H1
aacacctccattatcagtcctttttcaggcgtggtttttacctaaccctacaattcgccgatccttccagttggggttcttcgctttcagcgaagagcggtgtatatagaaaccctattccccctatgcaccaggggaattgaatatagaaataagacaaaggcaaaaaaacaccaggttgaaaaagttgtatgttaaataggtaattctgttgtttttcgtgtttctggactcaggagctgagctgtttccagggcaaagcatgtacagtatgaactctaaatgcagtgctgg

SEQ ID NO: 46076 - DNA, 310 bp, Glycine max
  Clone ID: 701040234H1
caacacaggcgcagagcgtgatccattgacgaagatggtgcagcgtctcacctaccgcaagaggcacagctatgccaccaaatccaaccaacacagggtcgtcaaaacccctggtgggaagctcgtttatcagaccaccaagaagagggccagctggcccaagtgccccgtcactggcaagaggattcaggggattccacacttgaggcctgcagagtacaagagatcaaggttacccagaaaccgtaggactgtcaaccgtgcatatggcggagttttgtctcgacatgctgtcagggagaggattatc

SEQ ID NO: 46077 - DNA, 291 bp, Glycine max
  Clone ID: 701040235H1
gtgctgcaatggcttcaagtcaggaagaggtgactcttttgggagtaattggaagcccatttgcttgcagggtgaagattgcccttaagttgaagggagttgaatacaaatatgtggaagaaaatttggccaacaagagtgatttgcttctcaaatccaatccagttcacaagaaagttccagtttttattcacaatgagaagcccatagcagagtctcttgtgattgttgagtacattgatgagacatggaagaacaaccccatcttgccttctgatccttaccaaagag

SEQ ID NO: 46078 - DNA, 289 bp, Glycine max
  Clone ID: 701040236H1
ccagaggaggctaaacaacaagaggaggaggaagctccggcggttgattatgccatcacggatttcaatgcaggtgctattgctgctgatggccagtggcctggtacaattgatcaatcatggagtgatgcagttcctcaacctattccagcagtacctggtgtcaactggggggcacctgcagaagcacctgctgctgcaggaggagattggggggaagctgttccaccaccacaacaaatccctgtacctccctctggaattgatactgtccaccatctggctggga

SEQ ID NO: 46079 - DNA, 298 bp, Glycine max
  Clone ID: 701040237H1
aaaatgcccactttttttcttccaacgctcctcctccttctcatagccttcgccacctctgtctccggccgccgtgacctcgtcggagactttctccggctgccctccgaaactgataacgacgacaacttcaagggcacccggtgggccgtcctcctcgccggttccaatggttactggaattacagacatcaggctgatgtttgtcacgcctatcaaatattgaggaaaggtggtctgaaagaagaaaatattattgtttttatgtatgatgacattgcattcaatggggaaaacc

SEQ ID NO: 46080 - DNA, 296 bp, Glycine max
  Clone ID: 701040238H1
tccctcctggggttctgctttgagaatggcaaacttcttctcgtttatgatttcttatcaagaggaagccttgaagagaaccttcatgaataggtaataagaaaaattcacttgtgtttggttggtccgagagatataaggtagcagtaggtgttgctgaggctttagattatctgcattctaaagatgatcaacctgtgatccatcgggatgtgaagtcatcaaatgtattattatctgagaattttgaaccccagctctctgattttggactggcaaaatgggcatcaaccttg

SEQ ID NO: 46081 - DNA, 298 bp, Glycine max
  Clone ID: 701040239H1
ctttgattcagcttccaaacgcgccattcccatttctctctctctgcttcttcttcagatacctaacctaatctcccaaacaaacaaaccaactcaaccttatcaatatcgtttaaataaattttgatcgcgcacgcgctttgagatagatcatgctgcgtttgtgctacggccctctggattgctgcttcggacgccgtggtggccgcgccgccgacggacttctctggcacaccgacttgaagccccacgcctccggcgacttctccatcgccgtcgcccaggcgaattacagtct

SEQ ID NO: 46082 - DNA, 292 bp, Glycine max
  Clone ID: 701040240H1
gaaagggttggattataaacttcaagtagggattggacacttttatcatatattctacgagggatgtttagcaaattttgaaattggagaggaaggagaagaagcatccaagctttaccctgaagtgaattacacacgcatggacgagtacctaaaaatttatgtgtaaaaggaactcattcagtaggagttcagtgattcaaacaggaacacggtttttagctacaataaccttaatttaaggagatgattttgtgcttataattcgatggggaaactggatttttcggat

SEQ ID NO: 46083 - DNA, 247 bp, Glycine max
  Clone ID: 701040241H1
attcaatgccaacatctgtccttgcaggtgctgttgctaatttaagaggttgtggaagggatgcagctgctgtactgttttgggttcatatttttgctatattctcaatggcaggatggattattctatatctaaacatactcttctgagactgtatatagcaatttgatccaattcattttgatgctagattagtggagaaacaccaatattttatacaaagagcctttatatgatgatcacgatc

SEQ ID NO: 46084 - DNA, 295 bp, Glycine max
  Clone ID: 701040242H1
cagacactcagtttctgcctcttatttttgctttcctcactttctctctctactttttctctttatttctagtcttctctgtctatcatagatcttgaactatcctggcaagaactcagagcactaacatcttgcagccacaaaaatgggcttctttctgttaccaaaagcaactccttgcattttgttcttggctctgctgtcttgtacttgctttacttctacagatgcttatgatccactcgacccaaatgggaatatcacaatcaaatgggatattataagttggacccca

SEQ ID NO: 46085 - DNA, 295 bp, Glycine max
  Clone ID: 701040243H1
gtggaaggtcttctcttgtcttgctcgcgatcggagactttgaaaccctcccttccttctcctttcacctattcatcccaagcattcgacaatgtctccgttctcgaagctcttgtttctgatactgatggtgttcgtctcatccgcgatcgcctccgacgacgaaagagtgagcgaattggtgtccctgcaatcgagatccaaatcgggcctaatccggctgaacgaccaatccctggcccgcttcctcaccgccgtgaaaacccctcgcccttactccatcctcctcttcttc

SEQ ID NO: 46086 - DNA, 128 bp, Glycine max
  Clone ID: 701040244H1
ctctacttgagacatagtaataattgaggccatgtcaaaaatgtctagccccaatggtccagagatagaagagaagagagttacaaaggaagataaattcaaatctgctagaactgcaatgggtgagg

SEQ ID NO: 46087 - DNA, 295 bp, Glycine max
  Clone ID: 701040249H1
gttgtttacaatgaaggctactctgaagggaaagtacgatgtcgacaaaaacggcgctgcctttgccaacatcgccgtcaacgccggcgacgtcaagttccgtccctccgtaacggaagccactttcattaacggtcccagcttcaccggcttggcgctcgccgtcgagaaacccggttccttcatcgtcgactacaacgttcccaaaaaggactttcggtttcagtttatgaacacggttagggttggggagaggccgttgaatttgccctacgcgcacagcaggggcgacaac

SEQ ID NO: 46088 - DNA, 295 bp, Glycine max
  Clone ID: 701040250H1
ataagctttacttaattagcaaatccaaatatggcactttcttcttcatcatcttcaacatccatatttgctttagctttgttcactcttttgcttataggaagttcttcagctcaactctctgagaacttctatgatagtaaatgtcccaaggttttctatgccgtaaaatccgttcttcaatctgctttggctaaagaacctcgccagggagcatctatcgttcgcctcttctttcatgactgctttgtcaatggttgtgatggatcagtactacttgatggcccttcctcag

SEQ ID NO: 46089 - DNA, 295 bp, Glycine max
  Clone ID: 701040253H1
ggtttgtttgaggtcttgtatgtggctgcagatatccaaaccttaaattcggtcctcgaatctttctgatcattggttgttcttttattctttcaaatacattccaaaatctcttggaaattgcgagattcactgcttatcctagcagcagattttgggttctgacccaattattcattttccccaactgggtcttgtggattttttgttggggttttaaatttcgtgttgctgggtttgaaagttatttcctttcttccccgtctggattcaactcccaagtatttgctctaat

SEQ ID NO: 46090 - DNA, 297 bp, Glycine max
  Clone ID: 701040218H1
ggaaaatttggatttggattttgctctaaatcacattctttgcttcttttttcttactttcttgttccttcttcagcttggatttttggcgtaacgaggaaggggttattgttgagaaaccctagcctaaacctaaaccatggcgcataggttgctgagagaccacgaggccgacggctgggagcgctcagatttccccatcatctgcgaatcctgcctcggcgacagccctacgttcgaatgacaaaagcagagtatgacaaggagtgcaagatttgtacacggccattcactgtt

SEQ ID NO: 46091 - DNA, 253 bp, Glycine max
  Clone ID: 701040173H1
ctacttcaccactccaaacccaccacaccaccattattcatatctcattctctaacctttcactctgccttactcactctctactttgctcatcatcgtagatgaaccaacacttctagtctctcttactttataaccatgtaaaaatgagtcacctaatgaaaaattagtagcttcttgttgtgctttttattttgtttgtgttgagataaatttgtttgtttgtttggtattgtaatgtgccttatgaatt

SEQ ID NO: 46092 - DNA, 258 bp, Glycine max
  Clone ID: 701040174H1
actcgagtcgaatcggctcgaggaaaagcacggaagaaagtgagaagcactccaagttttgttgctgagtgatgagtcttgaaacatgaagcagaatgatcggcgaagggagtgtttgtctaattcgaattcagaaagttgttctttctcattgatgggaagagaaacccctcagaatttgttaccttccaaacacgacttccccagacttgtccttgtggttggactcgcatcgctagttgcttggacctgcaactt

SEQ ID NO: 46093 - DNA, 253 bp, Glycine max
  Clone ID: 701040175H1
ggcttctgaagcttatcctaacgtggaatacaccaccgtcgatgaatatttgaatcagtttgtctgatttttgagtaattgatgcaatttttgttgctctgcaaagtgctcaataaaacctatgccttttcttttttgcgaaattggttgcttttgtcctatgtttcggaaaccatccacattaatgtaatcttttttttttttttaccttaataatactctaatcttgggtcggaagcactgtttaaatttt

SEQ ID NO: 46094 - DNA, 252 bp, Glycine max
  Clone ID: 701040176H1
attccgtccaaggctaaatactggcgagagaccgatagcgaacaagtaccgcgacggaaagatgaaaaggacattgtggtggcatgcacactcaggagttttacgtgccacggttcatggtgcttttatcattcaccctcgttcgggtctgtttccttttcctaaaccctacaagcaagtaccaataatattaggtgattggtatgacggtaatgttgtggatatttatcagcaagtactgcttctcgggga

SEQ ID NO: 46095 - DNA, 254 bp, Glycine max
  Clone ID: 701040177H1
ctcattaattgcaagaatggcacttcgttgcttggtgatgtccctttctgttctcttcactcttggtcttgcgagagaaagccatgccagagacgaagatttttggcatgctgtttggccaaacactcccattccaagttcattgcgagatcttctaaagcctggccctgcaagtgttgaaatcgatgatcaccctatgcaaattgaagaaacacagtacccgaaaaccttcttctataaagaagaccttcatc

SEQ ID NO: 46096 - DNA, 252 bp, Glycine max
  Clone ID: 701040178H1
caatttcatctccaaattgcaccccattttattgttgaatttcaagctctaccctcccttccctccactttcctccctcttcttcttttgcttctgtttgagaggtgaagatggaattgtaataaagctcggaatttaattggggaattgtgggagaagacaaaggaggaaatcatacacaatgccggagttcccctcgagctcgaagttggaaaaggtgccaaatagcgagagaaagagtggttctttggt

SEQ ID NO: 46097 - DNA, 255 bp, Glycine max
  Clone ID: 701040179H1
cgtattgttataaccctagctcggaagaactaccatctctcgtccattgtctgcgtctcactcatcctcaactcttcctctcttttcttccaaacccgaatctggattctcctctctcccgatttcaattctcacggtcttcaccgatcgccagatctctaagcaccgctcttgttttcatcgattaaataacaaacaaaaattggctcaattttattttaacatcctaaccaaaaacaaacttttcacccgatt

SEQ ID NO: 46098 - DNA, 258 bp, Glycine max
  Clone ID: 701040183H1
ggagcatacgtggtggtgacagattatggcgagggagacagaacagacttcataatgagtccacgtgcctactcaagattgggaagtaacgcagatgcatctgcagaactattcaaatacggtgtagtggatgtagaatacagaagggtcccctgtagatacggtggctataacctcttggttaaggttcatgaacagagcagaaaccctcactacttagccattgtcattctctatcttggtggaacctacgacgta

SEQ ID NO: 46099 - DNA, 255 bp, Glycine max
  Clone ID: 701040184H1
gaaaatcgtactatagattctgttgcataggcgttgtctgtggcggttgtcatacaaacgtggtcggggtggaggaagaaactaaaacatgatattaactaaggaatttcactcttcgtctctctcatagtacttcttctggtgccaagaagacggcagtttgcctgcactcgctcagttcttagagcatgaattcagcatccccgcagtttgtttcctcaagaaggatgagtgtgtacgatccgatccaccaga

SEQ ID NO: 46100 - DNA, 254 bp, Glycine max
  Clone ID: 701040186H1
cggctcgagatcaaaaccagagtggttctagtaatccggtgctgctagaggatgggaactagtgaatggcatatcgagcgaagatctagcttcggcactgaatcccccttagcaagagatgcaggaaatgtgcctgacactgggtcactctctattgttgtgcttggcgcttctggggatcttgctaagaagaagacatttcctgcacttttccatctataccggcagggattcttaccagcagatgaagttca

SEQ ID NO: 46101 - DNA, 257 bp, Glycine max
  Clone ID: 701040187H1
cctatctctcctttcaagatgcagatcttcgtcaagaccctcaccggaaagaccatcacccttgaggtggaaagctctgacaccatcgacaacgtcaaggccaagatccaggacaaggaaggaattcccccggatcagcaacgtctcatcttcgccggaaagcagctcgaggacggccgtaccctcgccgactacaacatccagaaggagtcaacccttcaccttgtccttcgtctccgtggtggcatgcagatctt

SEQ ID NO: 46102 - DNA, 259 bp, Glycine max
  Clone ID: 701040189H1
ttagggtcaattcatttgggcactgtctctgttccaaaaccctaatcggtcttccagaaaatggctgattctccccttgcaaggaattcaaggtccccttccccgtggaaagctcagtcgagatctaggtctaggtcaagatctaggtcgaggtctaggcctagacaaaggccaagatcccgttctagaagtcatggcaggtcaagatcaccaattcatggaaggtcaaggtcacccattcatggaaggtccgagcctt

SEQ ID NO: 46103 - DNA, 253 bp, Glycine max
  Clone ID: 701040190H1
cggctcgaggttctcctaggcgagaccactatatctaaagaaaagagtgcagattaatgtgagtgcaattttgagtggaaaccaagatggccaatttttcaagtcactacggaatgttggtgtctctcttgcttacgtggatccaaatccaagccaaggtgttttgctaccaatacaaagttggagatctagatgcttgggggataccctcctcagaaaatccacaagtctacacaaaatggtccaaatatca

SEQ ID NO: 46104 - DNA, 249 bp, Glycine max
  Clone ID: 701040191H1
gaaaagatccttactgttagagagtttctcacacttctaaattattacactgcctagtttgctggatccagattgagaagtgtgacaaactctctaacagtaaggatccagcaaagctgcgcagtgtaataatttagagtttcttttacttgcaaattgttctgataaattgtcatttcccggattttagtaaaaactttcattgggacagtttagttcactgtttgtgtcaactgtacaggcatttag

SEQ ID NO: 46105 - DNA, 252 bp, Glycine max
  Clone ID: 701040192H1
cttcatttctgtcttctctcacactcactctctcctccttccccttttctgctttctctcacgctccccgaccaccaccatctactccctccgccgcgaaccccaccccactcccactctctcctccctccgatgcgatcccccacactctccttcctccccttcgttctcatcaacaacatgcagagacagatttggtgctcagcaacccaaatctgtcttcttcttcgtttgtttaattttgatttcatt

SEQ ID NO: 46106 - DNA, 253 bp, Glycine max
  Clone ID: 701040193H1
tggcactactgttgaaggaatttgtggctggcaaactgaagagatctggactagattgtatcctgatgagccctacaatgctgatttggttaatcttctcccagaggatatctctaaaaggatttctaagcttgaaaaatacatctagtatgatttgatttcagctgctaagaggcagagtccattcttttaccaggtatcaagaacgcacatgacaaatgatctctttatcaaggaagctgtggccagatac

SEQ ID NO: 46107 - DNA, 250 bp, Glycine max
  Clone ID: 701040194H1
cctttgttcactcttcttctcttgcggctagggttttagcgcagcttcttctagatttaaggaagatgggtaaggaaaaggttcacatcagtattgtggtcattggccatgtcgactctgggaaatccactaccactggtcacctgatttacaagcttggaggcattgacaagcgtgttattgagaggtttgagaaggaagctgctgagatgaacaagaggtctttcaagtatgcctgggtgctggacaa

SEQ ID NO: 46108 - DNA, 255 bp, Glycine max
  Clone ID: 701040195H1
cttcttaatttcctcactcacaaggaaccccaatgacaaagctattcgatttcctccctttcctcttcctcaacatcttcatccaaacaatttcagcccaagtagcaccggcaccagcgggacccaccaacatcacccaagtgcttgagaaagcaggacaattcacaaccttcatcaaactcctcaaagcctcacaaatagctgatagaatcaattcacagctaaacaactcaaaccaaggcctaaccgtgtttg

SEQ ID NO: 46109 - DNA, 300 bp, Glycine max
  Clone ID: 701040205H1
gtcgggtgtactttcttgcgaaaccgagagagcgaaggggcaaacacaattttttttatcttcttttttattttttgtagagagagagagagagaaaatgttggggatcttcagcagttcagtggtgtcgccgccggaggagctggtggccgctggcagcagaacgccgtcgccgaagacgacggcggggaagctgctgaaccggttcgtggagagcaaggcgtcggcggtgtcgctgcaggtgggggaacacgtgcagttggcttacacacaccacaacgaatcaccgtggcatcccag

SEQ ID NO: 46110 - DNA, 299 bp, Glycine max
  Clone ID: 701040206H1
ctaaagtctaagcaaagaaaaaaatgatccttccctcttcttcacttttattcactctcacaatcctcttgtgttctttcctttcttttgtttgtgccaaccgtctcatccaacaaacatgcaagaattgctcaaaaaatgaccccaacataagctacaaattttgcgttacatcattccaatcagaccataggagccactacgccaaaaacctccaagaactaggactaatctccatcaagataacaaggcacaacgtgacggatactaatgctcatatcaatgagcttttgaagaaa

SEQ ID NO: 46111 - DNA, 297 bp, Glycine max
  Clone ID: 701040207H1
gtcagttcctcggccccaaacgcccctcctcctccccccccacgtccccttcctcctgcacctcctcctcccccctcgccgtcggcaccgacgacgactccgacgccggcgtcacccaccactccccgacgcaagtcctcaaaaacttcaacgagattcgcctcctccggatcgagctccccagcggcgagctaggcatcgaagacggcgtgctcctcaaatggcgcgccgatttcggatcaactctcgacaattgcgtcatcctcggcgcctcctccgtcttccaccccaaagaca

SEQ ID NO: 46112 - DNA, 301 bp, Glycine max
  Clone ID: 701040210H1
gggcaatgcggtaaccagatcggagcgaagttctgggaggtgatatgcgacgagcacggcatcgaccacaccggaaagtacagcggcgactccgagctccaattggagcgcatcaatgtttattacaatgaagccagcggcggaaggtacgttccacgcgccgtcctcatcgatctggagcccggcaccatggactccgtcagatccggcccctacggccagatcttccgccccgacaacttcgtctttggccagtccggcgccggcaacaactgggccaaaggtcactacaccgaaggcg

SEQ ID NO: 46113 - DNA, 92 bp, Glycine max
  Clone ID: 701040213H1
ctcccctttgccgctgttgttgttgctgcaccaccgaacaacttcccctgtaaatcgcgtttcgtttgtgcaaggtttaaaaagatggctga

SEQ ID NO: 46114 - DNA, 294 bp, Glycine max
  Clone ID: 701040217H1
tccgaatcggagagattttagtgtttccggttcgaattggggtcttgctaggaattttagcactagtttttgtgtcatcattggtagttttaggcctagggttgtgtccttgataccgcatgtagcgtcggattttaggaatcactctacatcagttgattctaatgctaatgacacgagctttgagaagattttcattcaaagcagcttgaatgtcaagccattgataattgaaagaattgagactgatcaaagtaaattggaggaagtcgctgaagaaagatgtgacgagtc

SEQ ID NO: 46115 - DNA, 259 bp, Glycine max
  Clone ID: 701040172H1
atctaatagtgttaatttgtctttctctatctctatcggtcatgggtgcttttgcctactgatgaggaaaactcctccaccgtggctccggcaacactctacaaagctctgacaaaagatgctgacactatcatcccaaagattattggggccatccaaactattgaaatcgttgaaggaaatggaggacccggaaccgtcaagaagataacagctagtgaaggtgaccaaaccagtttcgtgctgcaaaaagtggatg

SEQ ID NO: 46116 - DNA, 260 bp, Glycine max
  Clone ID: 701040141H1
attttaatggtgtctgaattctgaaacacaatttttattatgccattcagattgcgttagctaatgattcttttgttctgtttcattgtttgcttgttccttaaagatctcaaagggtccacaatcgcacaatttgtgaactgctcacgggataaaatggaatgcccttcaagttggatatccacaaacacatagatcttgtattctttgtagtatatttaataggacattgagttatccactcacccaccacaacacat

SEQ ID NO: 46117 - DNA, 261 bp, Glycine max
  Clone ID: 701040142H1
gaatgagaatccagattacagggaagagtgagaggaaccacagtggtgatgctttttatcttttgttccaagtgtctgaacagtagttagttaaaatgtatttgaaattgtgccaaaatgtagaagaaattattttaaatcatttcttcgtttggatagaaagattataagtgaatcttctagctctcgacagtttttaatttctattgatccgggagcataatcttgcacgagtactcaaccatgaaatatcgattgatt

SEQ ID NO: 46118 - DNA, 259 bp, Glycine max
  Clone ID: 701040143H1
gctatggcggcgatgcagaggccactcaagagaaccattgcaatcgccaagctacgcgcgtgcttttcctctctccgacccgccgccgccgccgacatcgtcgcgtctcctccgccgcagctcccgccgttcgatcaccagccgcacccttacaacggtcccttcgccgatgaagtcctcgccaagcgcaaaacgttcctcggtccttccgtcttccactactataagacacctctgaatatcgtggaagggaagatgc

SEQ ID NO: 46119 - DNA, 252 bp, Glycine max
  Clone ID: 701040144H1
gaacgtgtgagtctctagcgttcctattttggctccacttcccatcggatttgctgtgttcttggtccacttggctaccattcccatcacaggaactggcattaacccagctaggagtctcggagctgccatcatctacaacagagaccatgcatgggatgaccaatggattttctgggttggacctttcattggagctgcccttgctgctgtgtatcaccagatagtcatccgagccatccctttcaagac

SEQ ID NO: 46120 - DNA, 259 bp, Glycine max
  Clone ID: 701040146H1
ctaatttctctctctttgtaacttgtaagcatggagtcctcaaagatctatgcttaacttcttcctttgcatgctcttcctctcctccgcaactcccattctcggttgtggctactggggaaaacccccaaaagggcaaacctcgggtaacaccaaagacacccacagtacccgttgttaagccaccagtcacaatccctcccattgttaatccaccagtcacaatccctcccattgttaatccaccagtgacagttcc

SEQ ID NO: 46121 - DNA, 258 bp, Glycine max
  Clone ID: 701040147H1
gcagaaagtacagccgggaatgaatcaaccaattccacaatttgtgatgaagtctgccagattaaatcatctcttctagagggaattttagtgggtatagttttgctaataattttgatatcgggcctttgctgcatgatgggaattgacaccccaacaagatttgagacgccacaagagtaatgatccatttgctgaagctaataaatgttgtgatgctctcggtctactggattaaaatattactgctatattatt

SEQ ID NO: 46122 - DNA, 261 bp, Glycine max
  unsure (1)..(261): unsure at all n locations
  Clone ID: 701040149H1
gtttgtagtaatcatcaactcactcagttgccgttgtntgtcgtgatccatcacaacactttgtcactgaaattcagaaaaatggcatcagcaatgtttcgtaggaacatcatcacccactactccaagtttgcttcttctttgtcttcgttgcctcgccattcctcaatctacaaccctctctctatgtctgtttcttcatttcatagcgaaagtgttggtggtggtggtgggttcccatcttccatgcgtggagctgtg

SEQ ID NO: 46123 - DNA, 259 bp, Glycine max
  Clone ID: 701040151H1
cattgcatctcagaggccaattctttcgccgcttcttctctctttccaacgcttccccctgtggtgttctcgtgatgctggtaacaatatggttgttgacgctttgaatgaggatttgagaatcaacggagcagttgaaccgttgcctgaggactttgatgcaacagctgtaatcatagatcccgtgcctttggcagttgtagacaatggcattgtcaaggaggaggcgcagatcattaaaggaaaagagactagagaa

SEQ ID NO: 46124 - DNA, 260 bp, Glycine max
  Clone ID: 701040152H1
tgcaacaccagcatccatggcaagtaggaggtgtctgcgagcgttaacgcaaaacacgacaccgtttctcttccgaaacgcatcctctctccgctcactcaccgtgcctccgtttcccaacgccaacgcttcttcccccgttttcaccgtacgcgcctctgtcttcgcgcaatggccccacctccgctatttctcttccgagaaaaaagacgaccacagcgacgaagacgatgatggcgatgaggattacgatgatgaag

SEQ ID NO: 46125 - DNA, 259 bp, Glycine max
  Clone ID: 701040153H1
acactcttctatattcctagtactttgaagagatattgaaataaacaacaatggccaattccatgagctttttcctgcttctttcttttctagcttttgctcccttgtgcctctgtcactataaccaagagggttacctctaccctcagttttatgactattcatgcccacaagctcaacatattgtcaagtctgtccttgctaagtatgttgcagagcaacctcgattggcggcttcgattctcaggcttcatttcca

SEQ ID NO: 46126 - DNA, 259 bp, Glycine max
  Clone ID: 701040154H1
tggaaatattgccttctactttggtccttttcattttgaggaagcttcctcccaagcgtggtatcactcaatatcacccaattcgctgaaaagattagcatatggagaaaatttagtcaggatttcctgagtgcatgctcctctgctttctttgatgtttctctcccctccgcaaggataatttctagaggacagagaagtcggtctttcttctgttgagtgacaaagctaatatcattgtcttaaagttctcataagg

SEQ ID NO: 46127 - DNA, 260 bp, Glycine max
  Clone ID: 701040155H1
gctttacagtgtttctcttccttcttcttcttcttcttcttcttcttcgttgaatcgcgattgttctgtgcgagagaaagaagagagagatcgaaaatggcgttggctttcgacgagttcggaaggccgttcataatcctgaaggagcaggagcagaagagcagactccgaggattggacgctcagaaagccaacatctccgccggcaaagccgtggctcgcatcctccgaacctccctcggccccaaaggcatggacaa

SEQ ID NO: 46128 - DNA, 258 bp, Glycine max
  Clone ID: 701040157H1
ctcaatgtcattgtaaccatgctttcattgaaccaccttattttctatataaacagttttcagttttcaatttttcatcctatcctgtctgaattttctctcttaatatatataacttacatatgaaggtagagtgatatcatgaagaagcaagtctgagtacaagtttcataaaaagaggagttacctttgtatcactagttcaaagttcaccttctcagaagctacatagatacactgatggagaagcttgtaagg

SEQ ID NO: 46129 - DNA, 259 bp, Glycine max
  Clone ID: 701040158H1
ccctcgtggccacacgagctttaccactactagggcggcaaaaccactgttcttagcttctgcatgtgaagtgaattcttccaatgcttccttttctccacggtgagcatgaataacaacaattgctggttcttgtaattattattattgcaattccattttgtgacttccctgttgcttgttaattagtgtgacccagatggtgttttgagtatttgtttggagattcattcagtattttgagagatttgtatgataa

SEQ ID NO: 46130 - DNA, 257 bp, Glycine max
  Clone ID: 701040159H1
cacatttccaaacccctaaaccctattctctcctcaatgggaagcaaccaagccgccatttccttcctcaccaacgtcgcccccgcggccttcggccttggcgcggcggccaccgccctctcctcctccctctacaccgtggacggcgggcagcgcgccgtcctcttcgaccggttccgcggtctcctggactccaccgtcggcgaggggacccacttcctggtcccatgggtccagaaaccctacatcttcgacat

SEQ ID NO: 46131 - DNA, 255 bp, Glycine max
  Clone ID: 701040160H1
cttccacaaggtatggggacttttttgatggaaaaactgccagcttgtgtgtgcgtcgtgctgtttattatgatcctgagacaggaaaggaagatccttccaagaatggcatttgtagcaattttttgtgtaactcaaagccaggagacaaaattcagatcacaggcccttcggggaagataatgcttttgcccgaggatgacccaaatgctacccatataatgattgccacaggcactggtgttgctccattca

SEQ ID NO: 46132 - DNA, 256 bp, Glycine max
  Clone ID: 701040161H1
atgggttcttcttctattacaacatcgcccgcaaccatgaccatggctgcgatcgtgctcctgttcacggtctttgccgtttcctccgccctagacatgtcgataatctcgtacgacagcgcccacgcggacaaggccgccccgtttcgcaccgaggaggagctgatgtccatgtacgagcagtggctcgtgaagcacgggaaggtgtacaacgcgctcggcgagaaggagaagcgcttccagatcttcaaggaca

SEQ ID NO: 46133 - DNA, 258 bp, Glycine max
  Clone ID: 701040162H1
gattaatctgaacaagttgcgtgtccctgctgtcactgctctctgagcaaaaccagaagtacacatcaatccaaccctgccaaaatcaatccccagataccattccccttcccataacaaagacaacccaatcattgtttgttcacatccgaatccacaaaatactgttataattattctgattcacgaaacacaggaaaacccgaatctctctctttgttcctctcggggtcacgaaaatgggcacagagacctcat

SEQ ID NO: 46134 - DNA, 256 bp, Glycine max
  Clone ID: 701040163H1
ctttgagctcttgcctccccctggccagtcacagattgacactagtgagaaaggagggcaatttagcttgcacatactcaagcattccaccattgtggcaaagccaaggtcattttagactccaccacatgatcatgatcatatgatcaatccccttaattttttcttttttcttttcccttttctttactctgtattgtatcaatgcttgaaaatggggttgttccaaaaatgtcatatatatttggcctgctaa

SEQ ID NO: 46135 - DNA, 259 bp, Glycine max
  Clone ID: 701040166H1
ctctcattctctttccctcttcaactcaaccacacacttcttagatcaaaagctatctttgttgctttgagtttgaaccttgaatctatcaatcaatcaaagtgggtggtgactcatggaagtgaaaggactaagggcaagcaactccaccaccaccaccaccacaatccaaagtgaggatgagatggaccttcgaagaggtccttggaccgtcgatgaggaccttgctctcatcaattacattgccaatcacggtgaa

SEQ ID NO: 46136 - DNA, 258 bp, Glycine max
  Clone ID: 701040167H1
gttttagcgcacttcttctagatttaaggaagatgggtaaggaaaaggttcacatcagtattgtggttattggccatgttgactctgggaagtccactaccactggccacctgatctacaagcttggaggcattgacaagcgtgttattgagagatttgagaaggaagctgctgagatgaacaagaggtctttcaagtatgcctgggtgcttgataagcttaaggctgagcgtgaaagaggaatcacaattgatattg

SEQ ID NO: 46137 - DNA, 255 bp, Glycine max
  Clone ID: 701040168H1
tagaaaccatggatcagaaggatttttatggtcgaacaatcggcgtggaaattgcaagactgggttgggatgattttggtgcatccccaagggcctcaggacccccaaagaagtgggatttgccagagcaaggggaagtggtagattgctggtactgatcaaaattcatgattgagtaaagctgtagaagagaaaatgatggaacaacagatatcaagttatacaagaatggccatactataggattgatggaac

SEQ ID NO: 46138 - DNA, 259 bp, Glycine max
  Clone ID: 701040169H1
caagattcaggtactgcgtttcggaagcagacacagatggctcgtacgaagcaaaccgctcgtaagtccacaggaggaaaggctcctaggaagcagcttgcaaccaaggctgcacgtaagtctgcaccaactactggtggtgtgaagaagccccaccgttatcgtcctcggtaccgttgctcttcgtgaaattaggaaataccagaagagtaccgagcttttgatccggaagctccccttccagaggctggttcgtgaa

SEQ ID NO: 46139 - DNA, 257 bp, Glycine max
  Clone ID: 701040170H1
ccgaagctttgttggcggcaaggcaaatctgcattgcgatggcgcctccgaagctcttcgtctttgcgctttctgtaaccctaattttcgccatcgttggggccgaagccgatatttccatcgaaggaagcactccagagcctgatacctccgccatcaggatccaattagatcaactcaattccaagatccaaattctcgagtctcaaatcagcgaaaagttggaagaagtgaagaagaaggacgaaattatagca

SEQ ID NO: 46140 - DNA, 263 bp, Glycine max
  Clone ID: 701040140H1
ctcgtagccgcgctttggattcactcactcacgagtctcacgcttttcacgatgggcttcattctcggagtggtggtcggaataattgtgggcctggccatcatagtgggcttcgtccgcggcgagaactcccgggccgcccaacgctcccagctcgccaccaccgttgccgccttcgctcggatgaccgtcgaagattccagaaagatcttgccgcctcagttctacccttcctgggtcgttttctcttccagccagaagtt

SEQ ID NO: 46141 - DNA, 261 bp, Glycine max
  Clone ID: 701040110H1
tgcggcttcaaccttgtagttattctctttcttcttttttagccatccctctcttgaaaaatctagatctcgttcttccttgatctacgttacgcttttagtgaccggatctgtatggatctgaaccagatctacacgccgatggtggttttggcctggtacaataaatcttccatcggagttttgctctgtataggttcgatccatcgttattagcgtcttgatattgttatattcatttgtcatataggactttcatag

SEQ ID NO: 46142 - DNA, 261 bp, Glycine max
  Clone ID: 701040111H1
cgaagtttcacatcagccttatccagtttagggtttcggttccttaccctacctttgacgtatcgaaaccttaaatttgggattaggtctgagcaatctggttggtagaacctttggtcttagagagtcaagttttatgtctggattagacgatcaaattcctactgccttcgatccttttgctgatgcaaatgctgatgactcgggtgctgggtcaaaggagtatgtgcatattcgcgttcagcagcgaaatggtaggaa

SEQ ID NO: 46143 - DNA, 260 bp, Glycine max
  Clone ID: 701040112H1
ctgctgttcctgcgcgtgaacaagcctcaggtaagccaaagccatcgttaagcataacaatgttatccccaacggacacttccgtaagcactggcagaactatgtgaagacctggttcaatcagccagcacggaagacaagaagacggttggctcgtcagaagaaagctgtgaagattttccccagacctacagctggacctcttagacccattgtacatggtcaaactttgaaatacaacatgaaagtgagagctggaa

SEQ ID NO: 46144 - DNA, 263 bp, Glycine max
  Clone ID: 701040114H1
gtacttagcgatctccgtgaatacatagtaacacaataaaccacctccgcgcgagccaaacctacccagtgaaccctaccgcaccgaaacaaaaccctcgcaaaccctaaccctaatctcataggaacatggacggcgacgacgagacctcgggtccgatgatcgacgaaatctacgccaacggcggtggcgtcggcgacgacggagacaagcggagcgccgcgcaatcatgagcggcgaccagctcgacatcgaggcgtacg

SEQ ID NO: 46145 - DNA, 261 bp, Glycine max
  Clone ID: 701040115H1
ctcacgcgaacagaaacacgaactaagaatccatggcgacaccaacgacgacgaagagaaaaccggtgttcgtgaaggtggatcagctaaaacctggcaccaacggccacacgctgacggtgaaggtggtcagctccaagccggtgaagacggtgaccactcgcggcggtcgatcgtcggtgctcgcggcgcgcccgtcgcgcatcgccgagtgcctcgtcggagacgaaaccggaaccataatcttcacagcacgcaacg

SEQ ID NO: 46146 - DNA, 254 bp, Glycine max
  Clone ID: 701040116H1
tcttgcttcttgcttctattacttgcttctttcttcaccatgtcacttgctgggaaaatcaccactgaaattggggttcatgcaaccgctgcaaagtggttcaacctctttgcaacacaacttcatcatgttcaaaaccttactgatagagtacatggaaccaagctgcatcaaggtgaagactggcatcacaacgagacagtcaaacactggacttataccatagatggtaaggctacaacatgtctggagag

SEQ ID NO: 46147 - DNA, 263 bp, Glycine max
  Clone ID: 701040118H1
cttttgtctctgaatactctctactcaatacattgcgctctagtctcgtctcaaatattaattttaggttcttcgttacgcgttgtgttgcgttgtgcgtgagaaagtgcgcgtggtgacaaagcatggcttctcagctcctgagacgaaccttcggaagtcgtttccttgcaaaccctaaggccttctcctccgctgcttccactccgatccgcgccactctcttccccggctgacgcatcggccccgagatcgccgattcc

SEQ ID NO: 46148 - DNA, 263 bp, Glycine max
  Clone ID: 701040119H1
gcttcagatggtggtgttggagctgattaggaaggtttgtaggagcaataagggggagaacgggaagtacattaagatcattatatcccttttgaatgctccttccactgctgttatttatcaatgtgctagcacccttgtgtcactctcttctgcacccactgccattagggctgctgctagtacttactgtcagcttttactttctcagagtgataacaatgttaaactcattgtgcttgatcgtttgaatgagctcaaga

SEQ ID NO: 46149 - DNA, 261 bp, Glycine max
  Clone ID: 701040120H1
agaactttgtgggacaatgctactttggaattccttgaaatgtagagtgaaggagcttggctagtatttcattgatgaaattatattttgcccagagcttttaatcacaaggagtgtaagggaaataaaatataataaaaattcagaaaagtacaagtcaaacccctctaattcatcagggtgaacatgtagtcgttcccttccctcctatttgaattacaaattgtccgcttaatattgttctttcaattttgctagtta

SEQ ID NO: 46150 - DNA, 260 bp, Glycine max
  Clone ID: 701040121H1
gaaatctcagtcgaagcaagcaatgggcaacgttcagtcacctcccaacaatgatcctcgatatgtttcagcaaccagagcttttactcaaaaggaacttgaagacttgaggtctctgttcatcaatctggcaaatcaatcccagagcaacgggaaatacatctctccctccgtttttcagtcatattttggacttcatggccctcttggggagaggatgtttgatttagttactcaggagcgcaaggatcagaggctaa

SEQ ID NO: 46151 - DNA, 262 bp, Glycine max
  Clone ID: 701040123H1
ctaacactcattaattgcaagaatggcacttcgttgcttggtgatgtccctttctgttctcttcactcttggtcttgcgagagaaagccatgccagagacgaagatttttggcatgctgtttggccaaacactcccattccaagttcattgcgagatcttctaaagcctggccctgcaagtgttgaaatcgatgatcaccctatgcaaattgaagaaacacagtacccgaaaaccttcttctataaagaagaccttcatcca

SEQ ID NO: 46152 - DNA, 260 bp, Glycine max
  Clone ID: 701040124H1
gtttgttagaaaaaggctacgaacttgtatctggtggaactgacaaccatttagtgttggtgaacttaagaaacaaggtaaatgatgtgatccttttctctgaaaatttcttggttatatttgtctcataaagaaactcagatagtgccatattgtgtttacatgtcaaatagacctgttcagagcagcctttctatgcttggtttaaatcatacattgagtacttggtgagaatggaaaatcagctattagtatggata

SEQ ID NO: 46153 - DNA, 260 bp, Glycine max
  Clone ID: 701040125H1
gttccccttcgcgtctctctccaaacaaaacagaactgaactcgctgactgaaactcgcaaaaattagggttttgcagtgatggcactgtccaaccgcgtccgatcgggaatctctctcttcaccaaatccacgttcctcactttcgagcgatccactctccaacgatcccttgttgccccttccatttgcttcgcctccagaaattacgccaacgtgccggggcaaaaggaaaacaaagttaaggtccctctggctttg

SEQ ID NO: 46154 - DNA, 263 bp, Glycine max
  Clone ID: 701040126H1
agaatatcaaattggtctcttgtcttcctcctcatctctacactactccacatagagcccagcctctcaagcccaagcccaagcccaagcccaagcccgttcataaaatcctcctgcagcagcacccagtacccagccctctgcgtctcatccctctccgtctacgcctccagcatccaacaggaccctcaccaactggttcagacagcactctccctctccctgaaccgcacccaagccaccaaaaccttcgtggctaactg

SEQ ID NO: 46155 - DNA, 262 bp, Glycine max
  Clone ID: 701040127H1
cactgcgagagcttctaaagcctctccctgcaggtgttgaaatcgatgaactcccctaagcaaattgatgatacacagtacccaaaaccattcttctataaagaagaccttcatccaggcaaaacaatgaaagtacaattcaccaagcgtccctatgcacaaccttatggtgtatatacatggttaacggatattaaagacacctctaaagaaggatatagttttgaagagatatgcatcaagaaagaagcgtttgagggag

SEQ ID NO: 46156 - DNA, 260 bp, Glycine max
  Clone ID: 701040128H1
gaaaaaaatggagaactatcagtacccggcgtcgtaccctgactccggcgagtcctccccgggctcgcgcgagatcgacttcgagaacccgccgccgtgggacgagcagcagaaccaaaactacaaggccaagttcatgtgcagctacggcggcaagatccagccccgcacccacgacaatcagctctcctacgtcggcggcgacaccaagatcctcgccgtcgaccgctccgttaagttctccgccttcctctccaagc

SEQ ID NO: 46157 - DNA, 260 bp, Glycine max
  Clone ID: 701040130H1
caaactcactctttctaagttttttctatctctttctctctctctctgtctgccatggttctctccaaaaccacctccgaatccgacgtctctgtccactcaaccttcgcttctcgatatgtcagaacttcgcttcccaggtttaagatgccggaggagtcgataccaaaggaggcagcgtatcaaataataaacgatgagttgatgttggatgggaacccaaggttgaacttggcatcatttgtgacaacctggatgga

SEQ ID NO: 46158 - DNA, 160 bp, Glycine max
  Clone ID: 701040131H1
ataggctttccataaaccaaatgttacttttaaatgcccaaagcttatcaagcctcttttcttgaatggggattggcactctttattgaggttttgacatgagaaattttatatcttctgatttgatttgatggatattttctgcaaaaaaaaaaacaag

SEQ ID NO: 46159 - DNA, 265 bp, Glycine max
  Clone ID: 701040133H1
gcggggaagagttagtttcttctctcttcgatggaaggcggggaagaggttctcccttcggccaccgccacctccgccgccaccggcaatcccaccgcttcgcctcctccgctcgctgatcttgtcggtgctcccgatctcgctgctgcctcggacgacgtcgttacgcaacctgaaattcacgcgctgatttcagacgaagagcacgatcacgagcatgaacatgacgatgacctcgagcacgagcacgagcagcatgagcatg

SEQ ID NO: 46160 - DNA, 262 bp, Glycine max
  Clone ID: 701040136H1
cttctactctccccctctttctcattttccggtgacatggagtccaagtggggtggcgcccccgccagcatcatggcggcgaatttcgacgacttcaagtggatcgcctccatgttcgatcccggaaacgacgacgtcaagcccttctccgacgcagctttccaaaaccaggatgcagtaactgcattttcaacttgtggtggagtaacagatgatacccttgttcgttcccaaaacctcactcccattcaatccaccattt

SEQ ID NO: 46161 - DNA, 257 bp, Glycine max
  Clone ID: 701040137H1
caagggtttctctgtctgcttcttcactttctctcgtttcaatcgaaaccaaaacaaaatcatgggcagaaaattcttcgttggtggcaactggaaatgcaatgggaccactgaggaggtaaagaagattgttactactttgaatgaggctaaagtccctggagaagatgtcgtagaagttgttgtgagccctccttttgtgttccttcctgttgtaaaaagtttgctgcgccctgatttccatgtttcggcacaaa

SEQ ID NO: 46162 - DNA, 262 bp, Glycine max
  Clone ID: 701040138H1
gcgagagaaagccatgccagagacgaagatttttggcatgctgtttggccaaacactcccattccaagttcattgcgagatcttctaaagcctggccctgcaagtgttgaaatcgatgatcaccctatgcaaattgaagaaacacagtacccgaaaaccttcttctataaagaagaccttcatccaggcaaaacaatgaaagtacaattcagcaagcctccctttcaacaaccatggggtgttggtacatggttaaaggaaa

SEQ ID NO: 46163 - DNA, 259 bp, Glycine max
  Clone ID: 701040139H1
aaacctgagaagatgaaggccactagagatgtgcttagtgaatatgggaacatgtcaagtgcttgtgttcttttcatcttggatgagatgaggaggaaatctgctgaaaatggacttaaaaccacaggtgaaggacttgaatggggtgtgttgttcggttttggacctggacttaccattgaaactgttgttctgcgcagtgtggccatctgagatgcctaatatattatttcattattgtgtaccacttttcaaactt

SEQ ID NO: 46164 - DNA, 265 bp, Glycine max
  Clone ID: 701040109H1
cttctaatcacactaatggctgtcaccttctcagatcttcacaccgtagagggcatcaaatccctcgatcaattcctttctgggaaaacctatatctctggggatcaattgacaaaggatgatatcaaagtgtatgcagctgttgtggaaaagccaggagactcttttcctaatgctgctaagtggtacgatgccgtctcttctcaacttgctccaagcttccctgggcacgctcaaggggtaagattcagtggcgctgctgctc

SEQ ID NO: 46165 - DNA, 260 bp, Glycine max
  Clone ID: 701040070H1
cagtgagctcattatatgttcctgttttctatttattgaaagcagagagaaacagcaaaatattatcttaaaaaaaattgtgttattgctgatgatgcattatagtctttaactgccatgttgagagattgattttttactgaactctgtattgtagttgcctcgtttagctgtacataaacatgttcctgtgtctttcataaaccattttgtaaattaagtctaatgtttatcaatagtgtgttaatgtttgaactttg

SEQ ID NO: 46166 - DNA, 292 bp, Glycine max
  Clone ID: 701040073H1
gtaacgcgttgcgttgtcggaaaatcaccctcacctggggttttagtataccaatttgaaggtttttacatgagtgcagtggaaacttctgcttgaatcatggaaatttaagagcactgtggaagtctctaggcgatggccggttcagaacctgttagggcagagggagagactatggctgtggatgctgccccaaggaagccccggattctacttgctgcgagtgggagtgttgctgctgtcaaatttgcaaatctttgtcactgtttctctgaatgggcagatgtaagag

SEQ ID NO: 46167 - DNA, 295 bp, Glycine max
  Clone ID: 701040074H1
tgtgggagtcatcaagaacgtggagaagaaggatcctactggagccaaggtcaccaaggctgcccagaagacgaagtgaatcgtgcggtttggttcatcaggggatgacgattcttatggatacaataaaagtcggcttcttgcccatgtgatcttcgtttctaggtagcttgtttttcggacatagtttgaagtctccaccatcatctcgcaacttttgttcccagaattgggttcttgatcgacggtggcaagactccttttatcattctgttttaatgtgttgtgtttgtga

SEQ ID NO: 46168 - DNA, 284 bp, Glycine max
  Clone ID: 701040075H1
aaatttcttatcttgaaattttgcgcagtttcagatttagaattgttgatcagaaaaggttgagggtgaaaacaagagactcagtgaaaagcaagtatggggatggactactatgggattttggaggttgacaggaatgcctcagatgaagagttgaagagagcctacagaaagcttgcaatgaaatggcaccctgacaagaacccaaccaataagaaagaggctgagattcaattcaaacagatatctgaatcctacgaggttcttagtgatccccagaagag

SEQ ID NO: 46169 - DNA, 277 bp, Glycine max
  Clone ID: 701040076H1
ctcgcatcagaatcacaggttcagtttctgtggattgttgtaaaaaatttcctttaggttgaaacttggagtgccggctcaggatattatgatgaatggaaatggtactcagactgagtattggggcgaaagttcgggttcaacttcccatagcagtcagcaggatgtggaggatgacaggatgattgctcttgtgctgtcagaagagtatgccaaattagatggagcagttggtcggcgccttaccaacttggaacctgttcctcatgtaccccgg

SEQ ID NO: 46170 - DNA, 281 bp, Glycine max
  Clone ID: 701040079H1
cactgttgcagaatccagtttgtgacaccaaatccaaatcactattcactatgactactcagacccaagacgagcttcttgctcaacatctcgaacagcaaaagatccatgatgatgaacctgtcgtcgaggatgataatgatgaggaagaggatgatgatgatgatgaggatgacgaggatgatgaccatgccgacggactagaaggtgatgcatctggtaggtccaagcagaccagaagtgaaaagaagagtcgcaaggcaatgcttaaacttggaatg

SEQ ID NO: 46171 - DNA, 117 bp, Glycine max
  Clone ID: 701040081H1
gcctcataaaagcaaagatcaaacaaaccaaggacgagaacacgatgttgcttgaacttgcacttggtatattggttttggctctgtttctgcacttgcgtcccacacccactgcaa

SEQ ID NO: 46172 - DNA, 298 bp, Glycine max
  Clone ID: 701040082H1
ctacaatctatgccccatgatgcacataccatgggtgtgcttgttaatgccatgagtgctctttctgtttttcatcctgatgcaaatcccgctctcagaggtcttgatatttatgactcaaagcaaataagagacaaacagataacacgggttattggaaagataacaacaattgctgctgcagtttatcttagaatggcaggaaggccacccgtgcttccatccaacctcctttctctacacagagaacttcctatacatgctagattcttttggcaatcggtcatataaacccaat

SEQ ID NO: 46173 - DNA, 292 bp, Glycine max
  Clone ID: 701040083H1
gaaatccactgaaggtttccagtcacttccttatgttgtcgcactgttcagtgcaatgctttggatttactatgctttcgtgaaaagggaaactgccctccttctcattaccattaacacatttggaattgttgtggagtcaatttacctttctatcttcctaatttatgccccaaggaagccaaggcttacaaccatcaagcttcttctcttactgaatgtgtttggattcggggccatgcttctatcaactctctacctgtcaaagggagcaaagcgtcttgctatcata

SEQ ID NO: 46174 - DNA, 291 bp, Glycine max
  Clone ID: 701040084H1
gaaattcaaaagcaaagcaagaatcatgaattccaatatttgcacattggaaacaaaatacgggtatcttcgcacaacaggaagcaaagcggggatgacacttacctctcagctttgacactatgcttcagccgaattttccctgcaatcttgaacgctgctgttgatctgaatttgtttgatatcatagccaaggcagagagttcatctttgtcagcctcggaaattgcttctttgctgcttccaaatccacaccctcaattggccaataagcttgaacgcatattgcct

SEQ ID NO: 46175 - DNA, 56 bp, Glycine max
  Clone ID: 701040085H1
caaagccagtttgtgtgtccaaatagaatctcagtggtaaccacacgagtcttgcc

SEQ ID NO: 46176 - DNA, 268 bp, Glycine max
  Clone ID: 701040086H1
gcaagtgtagctggcaatgcatatgagctaggcttggctactcgtctccctcgtcctcagaatcctgtcaagtatgctgagagctgcaagtattctcctgtctacagaaactataggtgaattatggggcaagtcacttgactttggctgtaataaacacatgtcttggtggcatgtgtgagttgttttatgtaacttatgcataagtgagtggttttatgctatttattatgaaatcaccaaaactgcaggtgaagtatgctttttg

SEQ ID NO: 46177 - DNA, 291 bp, Glycine max
  Clone ID: 701040089H1
atctgtcactttttcactgctatcgtgggtgctaagtggtgggttcagcaatttcgggaagtctttgccatttttaaattgagcttccttatctcacaggaaacccaacattcaaagccagaaagtgcacaaagaaaacccttggagatacaccaacagtcacatgcaatgttagtaatgtttataaagttgtgaaggctaagaacggaagcatgccacttgccttagcaatgctttaaccatttgttgtactcgtgggatgcgtgcttgtctgggattatttgtcgccat

SEQ ID NO: 46178 - DNA, 293 bp, Glycine max
  Clone ID: 701040090H1
cggggttgtctctcttcatgaaacaaacagaacagagcactctgcttctctttctctccacttacccaccaatgcccacgccccggtttccaaaccttacgattgcccccaaagagcctggcacagtgaaatacaccaacccatcagaggaactctcattcaagaaattttcagggttgtcaacgagatacatgggtcttctactaagaagaacaaagagtaccaagagaagctacccgttgttgtgctcagggcagaggatattatttactctaaagccaattccgaggctg

SEQ ID NO: 46179 - DNA, 255 bp, Glycine max
  Clone ID: 701040091H1
ctttagcaaagcttgatcctgaatatggactctatacgagtgtgcgtgcaactcttatctatgctttaatgggaacttcaagagacatagcaattggacccgtggccgtggtatcgcttcttttgtcatcaatgattcagaaattaatagaccctgccattgatccaaatgggtatagaaagcttgttttcactaccactttctttgctggcatatttcaagctgcttttggactcttcaggttggggttccttg

SEQ ID NO: 46180 - DNA, 248 bp, Glycine max
  Clone ID: 701040092H1
ttctttatcttttgatttgggctttcggtttcacgtaacataacgcaccgtttgcagaaaagccaagctatgtcttcagtttctctttgtcgctagtaacagaatattacaaagtaacggctttctgagtggagcgcttgatttcgtttggtgggtcaacttcaagtttcgattttgttcatttttctctcgtcgattgagaaggctcagttgcagagacagtgggggtgggacggttatggcttttt

SEQ ID NO: 46181 - DNA, 287 bp, Glycine max
  Clone ID: 701040093H1
attttgtaagacatcagatctcctcacgaatgctggtgcccaaagccaaaacgcacccacaaagcagataacgccgtcgtatgcaaccctcaaatgaagtgcaagacacatacctcagaccttagcagcaccgtcggcgtctgcgcctcctgtctaagggaacgcctcatatccctcgccgccgcccaggcccaagcccaagcccatcacccgcaggcccaattaacgcgagtcatctcacgcgcctccgacgattattccagaaactcagacccgaaccttcccca

SEQ ID NO: 46182 - DNA, 289 bp, Glycine max
  unsure (1)..(289): unsure at all n locations
  Clone ID: 701040095H1
canataaacatatattgagaatggagggttgtgtgaagaagttgctatgccttgttgggtttgtggtgcttgtcagtactattggtggggtggagagtgctggtgaatgtgggaaatctacaacccctgataatgaggcttataagcttgcaccatgtgcctcagcagcacaagatgagaatgctagtgtttctcagagttgctgtgctcaggtgaagaaaattgggcagaaccctagttgcctctgtgcagttcttctctctaacacagccgaaatggctggcgtcaa

SEQ ID NO: 46183 - DNA, 73 bp, Glycine max
  unsure (1)..(73): unsure at all n locations
  Clone ID: 701040096H1
ctttgatttcggttccgaagggacaaccaacgaccagcctctcttctgactcnattctcgaaccttccacaca

SEQ ID NO: 46184 - DNA, 270 bp, Glycine max
  Clone ID: 701040101H1
cctcgagtcgaatcggctcgagctcttcttccattctctaacgctactcagcatcaacacagtgtcacatccattaacgtgctctggtgtttagttaggaaacaccggtggtaaaattgtacgaagcagaaagaacatggctccgtctagcaaggctgagaaaaaggctgccgtggatgcagctgcatggatgttcaatgttgttacatctgttggaatcatcattgtaaacaaagctttgatggcctcttatggcttcagttttgccac

SEQ ID NO: 46185 - DNA, 218 bp, Glycine max
  Clone ID: 701040103H1
ggatcatggggcttcaccaagtttagccgttctgattatctcaagttccctggtcgtcagaagattattgttagcaggaaatggaggcttcacaagtttagccgttctgattatctcaagttcaagtcagagaatagaattgtgcccgatggtgtgaatgctaagcttcttggttgccatggaccattggccaaccgtgaacccggaagggccttttt

SEQ ID NO: 46186 - DNA, 265 bp, Glycine max
  Clone ID: 701040104H1
tgcactgactcacacccacaatagtcgggggcagcttcaaagtacctccacattgtttcctatccttactgttctcttctcttctcatcatttttattttttccaatcaaaccaaacaatacataagcaccgctcttttctctccgaaatccccatctcccttcacttctgagctctggacgagatcccagatctcaccatctttcacgcactcttccatctgattcaccctttcgtttaacgcaaactcataacttgaaggtta

SEQ ID NO: 46187 - DNA, 231 bp, Glycine max
  Clone ID: 701040107H1
ctcgagccgcgaaagccttgttttttctgcgatcattttccattgggtggaagaaattctcaacctttagtcgaaagagcaaggatctgagtgagtgagcgatcatgtgtggtggtgcgattatctccgacttcattccagcgggtcccgccggcggggcgcacgcgtgaccgccgacatcctgtggccgaatttgaggaagcggttctcgaagtcgctgctggacgatga

SEQ ID NO: 46188 - DNA, 296 bp, Glycine max
  Clone ID: 701040067H1
cttagccgaggtcacgaggagcagtcagtagtttcacaatttccaaatggctaggggattgacgaagcatctcaagaggctcaatgctcctaagcattggatgcttgacaaactgggtggtgcatttgcgcccaaaccctcatctggaccacacaaatctagggactgccttcccctcatactcatcctacgaaaccggctaaagtatgctctgacttaccgtgaagtcatcggtattctgatgcagagacatgttcttgttgatggacaagtcaggcctgacaagacttaccctg

SEQ ID NO: 46189 - DNA, 300 bp, Glycine max
  Clone ID: 701040020H1
ctagaatggaatttcgatgctcagtcatctcttttaccattctcttctctcttgctcttgcaggagagagccatgtccatgcatcgctacctgaggaagattattgggaagctgtttggccaaacactcccattcccactgcactgcgagagcttctaaagcctctccctgcaggtgttgaaatcgatgaactccctaagcaaattgatgatacacagtacccaaaaacattcttctataaagaagaccttcatccaggcaaaacaatgaacgtacaattcaccaagcgtccctatgcac

SEQ ID NO: 46190 - DNA, 285 bp, Glycine max
  Clone ID: 701040021H1
atgttgttgtatttgttggtgttaatggtgttggaaaatctactaatctagctaaggttgcttactggcttttgcagcacaaggtcagtgttatgatggctgcttgtgacacatttcgatcaggggctgttgagcagctgcggacccatgctcgaagacttcagatccctatatttgagaagggctatgagaaagatcctgccgttgtggcaaaagaagcaagtcaagaagcttcacgcaatggttcggatgtggttctcgttgatacagctggtcgtatgcagg

SEQ ID NO: 46191 - DNA, 300 bp, Glycine max
  Clone ID: 701040025H1
ctcgagccgctagtatccgatcctctgtcctctcgaagctttcatcgttcaacatattctcaccatctcagtcatgggcctgctatcttgtcttaggtctaccgacctgagaacaagtgccagaggaagcgctggcacgacaagactcctggatacgaacaattttcaacgaaacttgatttcgtctggtggcaatgaatcgtattatgggtattttaacaggagatcatacacttcactttatatgggaactggaactgtgggtgggattacaagtgctagaatcagggtgccaaatgt

SEQ ID NO: 46192 - DNA, 303 bp, Glycine max
  Clone ID: 701040026H1
tgttgggtttagaatcttcaatcttgtttgggatagagatgtatatagcttccatggtaaggtctttcaaggaatacttgaaattgcttgaagctgatattcaccatgccaataccctggcgtcagacttaccaaaggaataagtacggttgcgagtcttcagatgagaatgtcatatagtccagcagcacacctgtttctctttttggtgcaatggacagactgcaatcttgccggagcccttggactgttaagaatcctaatatacaaggtgtatgcggatgggacaactaccatgtctac

SEQ ID NO: 46193 - DNA, 248 bp, Glycine max
  Clone ID: 701040028H1
gtttgaaaagaagccggtgctgtctccttgttctccatcgtaagatataactaattatctttatatcttcatcaagatgcgccgagggagaaccgccgccgccgctgccgccgttgtggatcccacgccggaccaggccaaggagacgacgcggttccgtggcgtgaggcagcggccgtgggggcgattcgcggcggagattcgagatccgtggacgaagcagcgcgtttggctggggaccttcgatt

SEQ ID NO: 46194 - DNA, 275 bp, Glycine max
  Clone ID: 701040029H1
gcgttgcgtagaacagagcaaaagaaagtaccaatttcttgagagagaaaacccgaagaagagttctgcgttccagcttcgacgccttccccgtcgacgacgaccacttcgccgccccctccgccgctgacaccttctccggctacggcgacttctctactttcccctccgacgatgtccccgtcgaccacgccgccaccgcggcgtcgccggagatcttcggattcagcgatcccgatccaggctactccccgtctcccgtcgagcaagtgcac

SEQ ID NO: 46195 - DNA, 278 bp, Glycine max
  Clone ID: 701040030H1
cctcagtttggtggattttgcgtgcaacatgaattcatcttccatattgcacgcaaacatggaagatgaattcatgttttctccagcaacaagctcagtttctgagtccagtgttgtttagtgatgtacttggaattcagttcctcgttatgacttagtgtaatcttttcttaggtctccttattattattttttttttcaacagaacaaaaaaaaaaaaaaaaagggggggctacagcttatggactttgaaacccgggaatttatttcggtgaggg

SEQ ID NO: 46196 - DNA, 299 bp, Glycine max
  Clone ID: 701040031H1
caggcctgagcacagtcgggatgagaaagtgaaggttcttgaatcagtgctccctattaatgatgatgaggttgttcttggacaatatgacggctataaagatgacccaaccgtacctgatgagtctaacaccccaacatttgcaactgttgttctgcgaatacacaatgaaagatgggaaggtgttcctttcatactaaaagcagggaaggcactaaattctagaaaggcagagataagggttcaattcaaggatgtccctggtgatattttcaagtgtaaaaagcaggggagaaatg

SEQ ID NO: 46197 - DNA, 298 bp, Glycine max
  Clone ID: 701040036H1
cccttttctatttgagcatcatcatgtccaccgcagcgcagccctcggccaagaaaacggcgtcgtccaagaagcccctctcccatcctaccttcgccgtgatgatagcggaggcgatagcgagtctgaaggagagaaccggttcgagccaatacgcgataaccaaattcatcgaaggcaagcacaaggagttgcctccaacctacaagaagcttgttctcgttcatctcaagaagtctgttgctgctggcaagctcgttaaggtcaaacactctttcaagctcgcaccgactaagtc

SEQ ID NO: 46198 - DNA, 303 bp, Glycine max
  Clone ID: 701040039H1
tttggaaggaagagagaaagagtttctggttttcctttcaacgatgagaagtttgatcattttgttcgtccgtcgcttccgtggctggcagcttccgaccgaaaggtcatcaacggtccgaacgtcgccaacggatgccgcggcaaggagtccaccttcgacctcgccactcagggctgctgcggttctcgtgtttacaacctctcctctggcgagcaatgctgcggtgacagcctcttcaaccccgtcaacaacatttgctgcggtgtcggatccagcgcccgactcgcctctggtttgggc

SEQ ID NO: 46199 - DNA, 292 bp, Glycine max
  Clone ID: 701040042H1
gtgtgagacaagcagaaatcgcggcggctacggcgatttctcagctatgctgtttttccgccgtccattcggagttcgtcttccggcgccgctcgtctctgttcccttcaccgcgcaccaagtcatcgcgtgtctagagtctggagaggcatgactcggatactgctgggtctgatatctgaaatacactaagttatgcagttgatgtgtcaaagctacatgttgaagaaaagaagaactcatattcatcaaaagatggccatgatgctgaaaacatatggtttggagaggc

SEQ ID NO: 46200 - DNA, 248 bp, Glycine max
  Clone ID: 701040050H1
caacctcatatgagtcatgaagatcgtagcttagaggttgcttctatttatttggtggccatttttcaagtgttgttcttactaagttcaaggaagcgacaaatcaaaaagattcaagacaaggaagcaagattagaaatgttgatatcaattcaggctgcttttagagctttcttatttgtttctttgtagattaatatggttgattgtgtatgatttcattcaaattattgtgaaattcttttaat

SEQ ID NO: 46201 - DNA, 299 bp, Glycine max
  Clone ID: 701040051H1
attcaatgccgttatactcaagagattgttcatgagcaaggttaacaagcccccattgtctttgtcaaggttgattaagtataccaaggggaaggaagataagattgctgtggtggtgggcaatataaccgatgatattcgtgtttatgaagttccagccttaaaggtcacagcactcaggtttacagagactgctcgggcaagaattgagaaggcaggtggtgaatgcttgacgtttgatcagttggctctcagggctcctctgggacagaacacggtccttcttagaggcccaaaga

SEQ ID NO: 46202 - DNA, 283 bp, Glycine max
  Clone ID: 701040054H1
cgaggatccattggagggcaagtctggtgccagcagccgctgtaattccagctccaatagcgtatatttaagttgttgcagttaaaaagctcgtagttggaccttgggttgggtcgatcggtccgcctccggtgtccaccggtcggctcgtcccttctgccggcgatgcgctcctgtccttaactggccgggtcgtgcctccggtgctgttactttgaagaaattagagtgctcaaagcaagcctacgctctgtatcattagcatgggataacaccacaggat

SEQ ID NO: 46203 - DNA, 298 bp, Glycine max
  Clone ID: 701040057H1
cttttctctctcgttttttctcaaaaagttgcaagagttaaagcaaaaaccaaagtgagagagaaaatgatgaagccatcgatactcagatctcttcacactgccgccacccgaggcgcctcccaacactcccgccgcggctacgcctccgagccggtgccggagcgcaaggtggccgttctaggtgccgccggcgggatcgggcaacccctctcccttctcatgaagctcaaccccctcgtttccagcctctccctctacgatatcgccggaactcccggtgtcgccgccgatgtca

SEQ ID NO: 46204 - DNA, 292 bp, Glycine max
  Clone ID: 701040058H1
gcagaagaggccgtaacttgtttgttgggaacttgacctatccaagagacgaatatcaaccaaacccatttattatcaattttaaggaatataaggactccccttcttccccgatgcgcctatggctttgtgagcaaccctaatccaccccaacccaaccctattgaattgaattgggggaagaagaacatagaaagaagaagaaaaatctgcacaattgttgtaattgaacgatgtctgctgcggtgtgcggaagcaagagatctttgttcgaagagcttcccccttcccc

SEQ ID NO: 46205 - DNA, 270 bp, Glycine max
  Clone ID: 701040059H1
ctcactttcatttctacatccctggctctgttccgtcgatgacgatggcgtttagggtgcgaaaccctgacctccgctttctcattcttctctctctcttgtccatcacttccgccaaggtcttcttcgaggagcgtttcgatgacggatggggaaatcgttgggttaaatcagattggaaaacagatgagaacctggctggggagtggaaccacacctctggccaatggaatggagacgctaacgacaaaggtattcaaaccatggagg

SEQ ID NO: 46206 - DNA, 277 bp, Glycine max
  Clone ID: 701040062H1
aacagaacaaagggaaggctacaccaactatcaacagcacatgctttggatgcataagtagttgaaggaagctgctcgcgttcggggcaaaaagaataatgcatctgctgaaaaattacgaagttatgagtccattactatgattttgtagatgagtttattaaggtttcctagggatccataaagattatgattttctcatgctcgcgttcgggccatgattgtcataaacctcaatgaggtttaatgtacttattacttatcgctatcaacacta

SEQ ID NO: 46207 - DNA, 300 bp, Glycine max
  Clone ID: 701040065H1
cttttctcttctctgtctcaggggtgccctgagatcacattgaacaatggtgaaggctgtggccgttcttggcagcagtgagggtgtcactggaactattcacttcgttcaggagggaagtggtccaaccaccgtaactggatctcttgctggtcttaagcctggtctccatggtttccatgtccatgccttgggggacactaccaatggttgcctctcaactggatcacatttcaatcctaataacaaggagcatggtgcccctgaggatgagaatcgtcatgctggtgatcttgggaa

SEQ ID NO: 46208 - DNA, 273 bp, Glycine max
  Clone ID: 701040066H1
agcgaagaggcgcacgtcagcagtaactcgtggaattgctagcaatggcgaggatcaaggtttacgagctgaggcagaagacgaaggctgatctgttgaatcagctgaaggacctcaaggccgagcttgccttgcttcgtgttgctaaggtcaccggcggtgcacctaacaagctctctaagatcaaggtggtgaggttgaacattgcccaggttttgacggtgatttctcagaagcagaaggccgcgttgacggatgcctacaggaagaagt

SEQ ID NO: 46209 - DNA, 302 bp, Glycine max
  Clone ID: 701040019H1
caaaaagagagagtggaaaagatggcgcggttgatcacagtggtgtggtgcgcggtggcggtgctattatgcgccgcggccggtgcgtcgtgggtggaggaggcggcgaacccgatacgaatggtgtctggcgtggaggcggaggtggttcgggtgatcggggagtgccggcgtgcgtcgaagtttgctaggttcgtgagcaggttcgggaagagttaccaaagcgaggaagagatgaaggagaggtacgagatattctcgcagaatctcaggttcatccgctcccacaacaagaagcgttt

SEQ ID NO: 46210 - DNA, 124 bp, Glycine max
  Clone ID: 701039980H1
cttaaacctttctctcttgtaaactttattgattgattctgagaatagaactaagagggtatagacatggctagcgcaattgcagcttcttttttggttctgcttctggctttccccactgtat

SEQ ID NO: 46211 - DNA, 284 bp, Glycine max
  Clone ID: 701039981H1
ctcaccatgactttcaagcgcaggaatggaggtcgcaacaaacacggccgcggccacgtcaagttcattcgatgctccaactgcggcaaatgctgccctaaggacaaggctatcaagaggtttctggtgaggaacattgttgaacaggctgcagtcagagatgtgcaggaggcttgtgtctacgaacaatacacgcttccgaagctgtatgtgaagatgcagtattgtgtttcctgtgctatccactctcatgttgtgagggttcgatcccgcactgataggag

SEQ ID NO: 46212 - DNA, 257 bp, Glycine max
  Clone ID: 701039982H1
ctcgacctagaggctctgatgatggatattcaagcgattcggtgctaaaacacgcatccagtgatttcaagaaaatggggcaaagaatatttatattcattgttggtggagcgaccagatctgagcttaggatatgccacaagcttactggcaagctgaagagggaagttatactaggctcgtcaagtattgatgatcctgcacaatatatcacgaaattgaagatgctgacagcacaggaactttcattggatgat

SEQ ID NO: 46213 - DNA, 284 bp, Glycine max
  Clone ID: 701039983H1
ccgctactctcatctcttcacttcccttctatcactcttctcacttctgagatacttgtacgaaaagaaagcagcacttacttctgaaaaattcttttgcatcagttagcatgggagatgaaaagccatttgacttcctacgcattttatttgagggcgttattgcaggaggtacagctggagttgttgttgaaacagctttatacccaatcgacacaataaaaacacgtctgcaggctgctcgcggaggagaaaaactaatattgaagggcctttattccgga

SEQ ID NO: 46214 - DNA, 282 bp, Glycine max
  Clone ID: 701039984H1
caaaagttcacccccaagcactaaattcctctaccacttgcaagcaagagacgtttaccctatggatgaaatctctggtactgaacggaaagggatgcaccgtgtttgattcaaatggccaaattgcataccgagttgataactacaactgcaggcatagagatgaagttcatctcatggatcaaaatggcgatattttgttcactatgctgaaaaagcaatataagttgtccaggttttgggagggttatagatttccagttccaggaacaaggaatgacc

SEQ ID NO: 46215 - DNA, 280 bp, Glycine max
  Clone ID: 701039985H1
gcagttaagaagaaacggggtaggccgaggaaatatgggcctgatgggtcagtcactatcgcagtgtcaccaatgccaatttcgtcgtcggctccgccttctaatgacttttcctccgggaagcgggggaaaatgcgggggatggactataagccatcaaaaaaagttggtttggattatctaggtgacttgaatgcatgctctgatggtacaaattttatgccgcatatcatcactgtcaatgctggcgaggacatcacgatgaaggtgatatcctttt

SEQ ID NO: 46216 - DNA, 281 bp, Glycine max
  Clone ID: 701039988H1
aggcaacgaaggcaagctgctgttgcagctggagacgtggctcagccaaatcaccacaatgagcttggtgtacccgcagctcccatctagttatagcccaaatttgtaccttaggggaacaacacttgtatagcggtggaaataagtgcatttgtagataggtaggaacactcctttcgcaccagttcatttaacctccaaaaaaaaacaccacaaaacaacaaaagaagcatcagaacgagtggagataggtcgggcgcccccccccccccgtttttttt

SEQ ID NO: 46217 - DNA, 97 bp, Glycine max
  Clone ID: 701039991H1
gttgatttagtaccagatttctgtgcctaagtaagagagagaggggctggtagttgttggcaccagatccctcagcagtcacaaccattcattcctt

SEQ ID NO: 46218 - DNA, 260 bp, Glycine max
  Clone ID: 701039992H1
cttacgaaggattatacctgagattatggagaccctattaatccgcataactcgtgattcaattaataggactccaactgaatcgacggaagtttcacagcaaaagcattacaaggaagaacattctcagggagtggtgcatccaagaaatggtagtcatggttctgggcctgctcaacatgcttatccatattatatttcaggagttgttaatcacgttatgatgccatcatcagcacaactgtatcaaaagaatatcc

SEQ ID NO: 46219 - DNA, 271 bp, Glycine max
  Clone ID: 701039995H1
atgagtcgtagatctgtacctgcctatgcattgatttggaaaagtccaagcttcaaagtatgaactaagacttcaatagtggatgctcttagagaagcgatctcagtaatcatgactgattccaaggaaaagaacaggaattttgtggagaccattgaactccaaattgggctgtaaaactatgatccccagaaggacaagcgatttagtggctctgttaagttgcctcacattccgcgcaccaagatgaagagcagtatgcttggtgatg

SEQ ID NO: 46220 - DNA, 276 bp, Glycine max
  Clone ID: 701039996H1
ctcaccgattgctagaatggaatttcgatgctcagtcatctcttttaccattctcttctctcttgctcttgcaggagagagccatgtccatgcatcgctacctgaggaagattattgggaagctgtttggccaaacactcccattcccactgcactgcgagaccttctaaagcctctccctgcaggtgttgaaatcgatgaactccctaagcaaattgatgatacacagtacccaaaaacattcttctataaagaagaccttcatccaggcaaaac

SEQ ID NO: 46221 - DNA, 310 bp, Glycine max
  Clone ID: 701040001H1
ttgcaacaccgcgatatgaacgatgcaaaatagtttcagatacgtcgcgttgattgattgatatgaagtggttgactttctggaactgcatatctatcctcgtgttgtcttttgctttcttcttcttctattgtcacacatacacatctactccttccctcatggctgagcaatcttccaagtccatttacgatttcacagtcaaggacatcagtggaaatgatgtgagtctgaataattacagcgggaaggttctactgattgtgaatgtcgcctcacaatgtggtttgacacagacaaattacaaaga

SEQ ID NO: 46222 - DNA, 301 bp, Glycine max
  Clone ID: 701040007H1
tgggaattcttaactgtgaggcagaatatttcaatgccaacccatacgactatttacatttagccttaaggtggactagttcctattggcttgacacatgaaggtggctgcacggaaagagtgccacaagattttactatgagctaccttcatcccatgagaagaggaggccctgatctgcaaaattggccctcaccatttaatatgccaaatagcactatggagataaacaagaatgacctactcaaatactggcctgatctgagaactgttaattttattgcgtgcaattcattatgga

SEQ ID NO: 46223 - DNA, 302 bp, Glycine max
  Clone ID: 701040010H1
cgagattactctcctcgatggaaaatcattattagcttgtattgttcgcactattccagctggtggccgaattcgaattagttcaacgctccctaataggctgggcaagacgcttgcacctcgacattggcacgactacaaaaggaagtatgggaagctggatgattttgtggctagccattctgaattattcttgattgagggtgactatattcagctccgtgaaggtgcacagaaaatcgttgctgcaactgcagcagttgccaaagttgctgctgctgctgctgctgcatcaactcctt

SEQ ID NO: 46224 - DNA, 291 bp, Glycine max
  Clone ID: 701040011H1
ccgatgagagggccggcccagtagatccagtggaattgctgggcttatctacgaggttgtcttcatcagccacacccacgagcagcttcccagcactgactactagaggggacaaatgaaataataaaaaaaaaaaatgtgtattattgaatttctccggaatcttcttctgtgtatggttttccttcctttgtgttttctttcctgttgaatcggtggccgttgatctttggttggatggttgatgatcctgaagttttcttttaagttaatttaattatcattttgtgc

SEQ ID NO: 46225 - DNA, 281 bp, Glycine max
  Clone ID: 701040013H1
tcggattcggctcggctcgagcgaatcggctcagatcacacataatataattccacaatcactcctatacctatagcaatatgatgggcgacactgagatcaaaccatcagttgaagtagtcatatgtgcttccatgaacaataacaatagcgcaaacaaccacaccctcccaaccgacatcaccaagtcatcacaatcacacttaccaatcttgaccaagctccatgctggttactttttcatatgcctttcctttggtgcacaagtttgctctggaaga

SEQ ID NO: 46226 - DNA, 293 bp, Glycine max
  Clone ID: 701040014H1
ctgcctacaaaaccataaagctgaagctatgctacgcgcccattagccaaaaggaccgcgcgtggagaaagaccgaggacgagctgaaaagggacaagacctgccagcacaagatcgtggccaaaccctacgacgcttccaacaagaccgtgcagaggttcgagtggctggtcgagcgcgacgtgcccaaagccacgtactttgtacgcgcctacgcgttcgactccaacgacgaggaagtggcttacggccagaccaccgacgccaagaagagcaccaacttgttcgagatc

SEQ ID NO: 46227 - DNA, 278 bp, Glycine max
  Clone ID: 701040015H1
caaaaacgaacagtgtgattcttcttgccgtagatctattccattttgccattcatccatggccgacgaattcaaattcgccgacaaagtccctccttccttcgatcacgtggctacattaattttggattgccatttcaagagcatcatattcaaactggttgtggtattatgtctatcatagtctatgacgatcctgacaaactagctctgatcacttatccagatttggctctaaattatatatcatggtttcaaggactatttatgtccagaag

SEQ ID NO: 46228 - DNA, 303 bp, Glycine max
  Clone ID: 701040016H1
gcgttggggtgattcctgtaatccatcatatggtgcattatctgattatcagttcatgcggccacgtgcacgggacaagaagcttgttgaagaatgggcagttcccttgaaaagcattgaagatatatatgagaggcttagactgtattgtcttggaaagttgagaagcaatccttggtcagaactagatggtcttcagccagagacaaagataataaatgagctgctggaaaagattaacacaaagggcttcctcaccatcaatagcccgccagctgtcaatggggaaaagtcagattctcc

SEQ ID NO: 46229 - DNA, 304 bp, Glycine max
  Clone ID: 701040017H1
tattctctcactctcttactctttcactctacttctctctcatattgcggctacggtttaggtttttctttcaccgtctccgttccttcaatcttcttattctctttcatctctgatggagacgttgcgggtttagttctaaggggtggttctggccttgggtttttggaacgtacggtgtcgttttggggttgggaaaacaaattctgagagatggcaaccacgaacccttttgatttgttgggtgacgacgctgaggacccttctcagctcatcgacgccgagcaactcaaggcggcggctg

SEQ ID NO: 46230 - DNA, 273 bp, Glycine max
  Clone ID: 701040018H1
ctattaagtttcatcaatgttgtgtccatatttttctagtttctcctaaaaaaaaatacatcaaaagaggctgatttcttcaagcaacaaactctgtaccaaatcatctacagctagtttagctcaaataattttcaattcggaaagaaaaaaaaagtcctttccaaaatttcattgtcatccatcatcaagaagatacaaatcatcacaggcaaagtgctgttattactagaattgcattacacaggcttaagggcagctatgaagatgtac

SEQ ID NO: 46231 - DNA, 276 bp, Glycine max
  Clone ID: 701039979H1
gctacccgctgagtttaagcatatcaataagcggaggaaaagaaactaacaaggattcccttagtaacggcgacatcaacacccgccagaccatcaccgtcctcgtcctcaacaacgccgccttctccgccgtcgccgcgaaacaccccctctccgtcgtcaagaacctcctcagcctccatatcctcctcgactacttcgacaacacaaagctccaccagatcaccaacgggaccactctttccaccactctctaccaaagcacaggtaatgcca

SEQ ID NO: 46232 - DNA, 279 bp, Glycine max
  unsure (1)..(279): unsure at all n locations
  Clone ID: 701039935H1
cacaatgattatccgtatcccattcctcccttgcctatccttcgtttactttttctttgctgggcattttcaattctcagtgcatgtctgntgcctttgagactggtttagataaattaattgcttactttcaatttttctacagacaattctgactaggaagaatactataactggaattgaatatagaaatgaccccaccatttttggttgggaatcgattaatgaacctcggtgcctaactgatccttctggtgatactctccaagattggataga

SEQ ID NO: 46233 - DNA, 284 bp, Glycine max
  Clone ID: 701039936H1
ggaattttcgtcattcttactttaccttccttcctcaccttctaattctaaaacaagttccaaactttcaaatctcaccgtcccaaaaattcttttttggttacccatttgactttagcctctgcaacagagtctcagatctctgcattccaattcccatggctggtcgctatgacagtaaccccttcgatgaggaagaagttaaccctttctctaatcctggaagtgttcccgctgccactaattcaaggcttccacctcttaagccagaacctgttgattat

SEQ ID NO: 46234 - DNA, 290 bp, Glycine max
  Clone ID: 701039939H1
catcgcagagagagagagatccatcgatcaattaatttacaatggccgatcaggctcacgacgaacagatctctgagctcaaggacagctttagcctcttcgacaaggacggcgatggttgtattaccaccaaggaacttcggactgtgatgcggtcgcttgggcagaacccaactgaggctgagctgcaggacatgataaatgaggttgatgctgatgggaatggtaccattgatttcccagaattcctcaatctcatggcgcgcaagacgaaagacactgattcagag

SEQ ID NO: 46235 - DNA, 295 bp, Glycine max
  Clone ID: 701039940H1
acttcctctaattgacacccagctaaaccatggcttcccacttcctcaaatccctccttctcctcttccacctatgccctcaccatctcaggagaatacacaggcttcgtgggaacactagacccaaagtccagtaggcatatcaccagcaagaacaaccctgaagccactgtcagggttctactgtgcacgaagtcttcagcggagaaaaccccacatcggttagaatcattccctcactccccaaatacaacgcaaccacaaccttcggctccgttggaatctttgacacccc

SEQ ID NO: 46236 - DNA, 284 bp, Glycine max
  Clone ID: 701039942H1
ccctaacgcgtgcatagcagagtcagagacagagacgcagccatagggcggagacctgcgaggtgttataggcaaattaagaacaagccataccccaagtcacgtttctgccgtggtgttcctgatcccaagatcaggatttatgatgttggtatgaagaagaagggtgttgatgagtttcctttctgtgtccatctggttagttgggagaaggaaaatgtttcaagtgaggccctggaagctgctcgcattgcttgcaacaagtacatggccaaatttgctgg

SEQ ID NO: 46237 - DNA, 278 bp, Glycine max
  Clone ID: 701039946H1
cagaatcaaagcattttgtgttgataaattcagtaaagttgtggaatggactcaaccactatccaccattccatgcactgtcagagatggcaattcccactgttgctcactggtcagagaagtacaaccatgtgatcaaggccatgactcaaaagggttacagtttcgttgggtatctacctttgattcccattgaagagatagccaaggcattcaagcagggagaggctaacttgaaaggagataatgcagcctctgaggaacagagatcagaatca

SEQ ID NO: 46238 - DNA, 283 bp, Glycine max
  Clone ID: 701039948H1
gcaaaaaagcggagaactttaagaagaatttacacgagaaagggattcttcctgcagagaccattcaagatcgactgaagaatttgattgcctcgtcccctgtgatgctgttcatgaagggtatcccagatgcaccaagatgtggttttagttccagagttgctgatgcccttcgacaagagggcttgaattttgggtcctttgatatattgactgatgaggaagtgagacagggattgaaggtatactcaaattggccaacctatcctcaactctactacaa

SEQ ID NO: 46239 - DNA, 198 bp, Glycine max
  Clone ID: 701039955H1
gtgccattgttgcaggcagctctcccccaaggaattgtcccatttgtcttttcgaaggactatgatgtacatcctgatattctcagcacagctgttatttttgggatgctgattgctttgcccataactctagtgtactacatcttgttggggttgtgaatgaaagaaatgatggatgatacagaagattcacgtgtg

SEQ ID NO: 46240 - DNA, 280 bp, Glycine max
  Clone ID: 701039957H1
gtttggttttgtagtaagtgaggtgaggtgccaaaatggtgaagataactcttggtactttcgatgactcttttggtgttgcctctcttaaggcttatttggcagagttccatgcaactctgattttcgtgttcgctggtgttggttcagccatcgcttacaacgagcttacaaaagatgcagccttggatccaacggggctggtggcagtagctgtggcccatgcatttgcactgtttgtaggtgtctccgtcgcagccaacatctcgggtggccattt

SEQ ID NO: 46241 - DNA, 281 bp, Glycine max
  Clone ID: 701039958H1
gtttcttcggctgcgtgctgatgctcttgtactctcacagtcacacaacagcaatggaagcaatcacagagggagtgaacaacatcaacatctctgattcttacaagaagaatcgcattcaggtctccaacaccaaaaagcctctcttcttctacgtcaatctcgccaagaggtatatgcaacagcataatgaggttgagctctcagcactaggaatggctattgctacagtggttactgttgctgaaatcttgaaaaacaatgagcttgccattgaaaag

SEQ ID NO: 46242 - DNA, 278 bp, Glycine max
  Clone ID: 701039961H1
attagacgaaaatgaccctgatggaatagacaatgatgacgaatctgatgaagaaggtggtgcagatgaactcgaatccaaaatgaagaaccttgtagttgatgattgactaagcagttgcagtcttctttcatgttctgctgcgcaagtaactctcgtgacagtagagggtttttagaccattttattcgtagtagtttatgtaactattaagacgcatcaatttgacagcagtcaattattgaggggacataaaatgtctgcaatatttatcgaaa

SEQ ID NO: 46243 - DNA, 273 bp, Glycine max
  Clone ID: 701039963H1
gtttttatcttcccttttctctttctccggcgacgatctcagattccggccactcctctcgccggcgagcccttactcttccctcctccgtcgagccctctccgattcgaatcgttcccagcctcgcaccaccatgaatcccgaatacgattatttcttcaagcttttgctgattggagattctggtgtaggcaagtcatgtcttctcctgaggtttgctgatgattcataccttgacagctatatcagtaccattggagtggactttaaaat

SEQ ID NO: 46244 - DNA, 166 bp, Glycine max
  Clone ID: 701039965H1
cattgttattcttatttccaactttgctggtagatcatgctcttgcaataagcagcagaatttcttacgctagcaacagcagagttaatgtatgtgtagtcttgtttttttggattgatgtactttttcattgttatgctcaatttaatgcatttttcctctcaaa

SEQ ID NO: 46245 - DNA, 290 bp, Glycine max
  Clone ID: 701039967H1
atttcctctctctcagtttccaagaatcttaagctatgggaaagtcttacccaaccgtgagcgctgattaccagaaggccgttgagaaggcgaagaagaagctcagaggcttcatcgctgagaagagatgcgctcctctaatgctccgtttggcatggcactctgctggaacttacgacgtgagctcgaagaccggtggtcccttcggaaccataaagcacccctccgaactcgctcacggcgctaacaacggtcttgacatcgctgttaggcttttggagccactcaaa

SEQ ID NO: 46246 - DNA, 285 bp, Glycine max
  Clone ID: 701039970H1
gcaaaaagaaagaatcccaggcgaggagaaagatggaggggaaggagcaggatgtgtcgttgggagcgaacaagtttcccgagagacagccaattgggacggcggcgcagagccaagacgacggcaaggactaccaggagccggcgccggcgccgctggttgacccgacggagtttacgtcatggtcgttttacagagcagggatagcagagtttgtggccacttttctgtttctctacatcactgtcttaaccgttatgggagtcgccggggctaagtctaagt

SEQ ID NO: 46247 - DNA, 274 bp, Glycine max
  Clone ID: 701039971H1
agctatgcttccactgatcggttaaatattcaagctacaagcccagagcgagatttaactggatcagactaccaattacattcaaatggatcaagcactgtcagtagccgtagtgcagggcacactaaacagagtcagccagattcaacaaatagaaatgggagcagaactaaggacagtgaatcacgtaatgaaactgaatgggctgaacaagatgcacctggtgtatatatcacactcacctcccttccgggtagtataatagatcttaaga

SEQ ID NO: 46248 - DNA, 281 bp, Glycine max
  Clone ID: 701039972H1
attgaaatgatgtcatcaactatgttctaaattcaccaacccaacgtcttgtaagctccgcccctggacaaaatcaaggtcccatttatgcaagctttgattcacattcctgttcgtttttccttcgcaccttttcttcttcttcgctccgtgccatgtcttcctctctcgctcttccttccactcccttcttcgccaatggaacaagaatcttcgctctcaagcactctctccctcgctctagggtttccatgagcgtctccgctggatctcaggcttcc

SEQ ID NO: 46249 - DNA, 280 bp, Glycine max
  Clone ID: 701039973H1
gcaagcaaaaagaaagaatcccaggcgaggagaaagatggaggggaaggagcaggatgtgtcgttgggagcgaacaagttccccgagagacagccaattgggacggcggcgcagagccaagacgacggcaaggactaccaggagccggcgccggcgccgctggttgacccgacggagtttacgtcatggtcgttttacagagcagggatagcagagtttgtggccacttttctgtttctctacatcactgtcttaaccgttatgggagtcgccggggcta

SEQ ID NO: 46250 - DNA, 270 bp, Glycine max
  Clone ID: 701039974H1
cccatgttgtgggtttgaactcttacagaagttttgaagcaggggtgcaacctgcaacaaccacaggggaggttcaaacagttaaacagggttatctgttaaaacgatcatcaagctcacgtggagattggaaacggaggttctttgtacttgataaccaagggaatttatattattacagagtgaagggtgtcaaacccatgggctctcagtcatataattatactcgctcgtctgaaccaaaacagtggcatgtttggtagattccgt

SEQ ID NO: 46251 - DNA, 276 bp, Glycine max
  Clone ID: 701039975H1
tcccccaacaccgttaatttggacgtgagaacccccgtgaagttcgacaacatgtattacatcaacctcttgaaccgccaaggagtgttcacttctgaccaggacatcgcgggcagccccaaaaccaaggaaatcgtgaaccagttcgcttcagaccagaaactgttttttaagaaattttccgatgcttttgtgaaggtgagccagctagatgtgataacggatcgtattgggaaaggggagattcgtgataagtgctttgttgcaaataagaga

SEQ ID NO: 46252 - DNA, 288 bp, Glycine max
  Clone ID: 701039977H1
cttaaacctttctttcttgtaaactttattgattgattctgagaatagaactaagagggtatagacatggctagcgcaattgcagcttcttttttggttctgcttctggctttccccactgtatttggagctgaccatgaagttggtgacactagtggatgggccctcggagttaattacaacacctgggcctctgggaaaactttcacagttggtgacactttggtgttcaagtatgactccactcatcaagttgatgaggttgatgagagtggatacaacagctgc

SEQ ID NO: 46253 - DNA, 273 bp, Glycine max
  Clone ID: 701039978H1
gaagatggagatgtatcagatctggagcaggagaatagcgttgggagcgttcgcgtttgttactgttttcctatcggcctcagcagacgacgtcgttgtgctctctgaagataacttcgagaaggaagttggtcaggacagaggagctctcgttgagttctatgctccttggtgtggacactgcaaaaagcttgctccagaatatgaaaagcttggtagcagcttcaagaaagccaaatctgttttaatcggcaaggttgactgtgatgagca

SEQ ID NO: 46254 - DNA, 284 bp, Glycine max
  Clone ID: 701039934H1
agacagagtagtacagattactaccaatggctaccaaggtttacattgtttattattctacgtatggacatgttgagaagctagctagagagatagaaaaaggggctgcttctgtggagggagtagaagcaaaactgtggcaggtacctgaaacattgcctgaagaagtccttgctaagttgggagcacctccaaagagtgatgttccaattattactcccaatgagcttcctgaggctgatggctttttgtttggttttcccacaagatttggatctatggcc

SEQ ID NO: 46255 - DNA, 269 bp, Glycine max
  Clone ID: 701039888H1
gctttcctttccagttcatacttcatcctattattactttccctctttgcattccaaatggccactgttgaggttgcacagcaaacaccaacaactgtgacagagaatgaaacaacgactgacgtaaccaagttgaggaaactaccccagaacagccagccaccgaggttactgccccagaaacagtcaacgaagaagcaaaagaggaagcagcagttgcgactaatgaggcaactcacgttacagaggacgggaaggctgagaaaaca

SEQ ID NO: 46256 - DNA, 263 bp, Glycine max
  Clone ID: 701039893H1
ctctcaccaccccaccatccagatccagatcaaatggcagccatggctatgttgcgtttatcaccactctctggtcaaaaccatgcactttctttcccatcatcaccatcaccaccacctaagcttcagaacgtcctctgtatctcaccaatttgcctcatttgccccaaaggttgaaactttccttcgccggcgggacggcggagatggggtgggacgtggtggcggtggcggtggcggaggtgaaagctggggtgatgaag

SEQ ID NO: 46257 - DNA, 268 bp, Glycine max
  Clone ID: 701039894H1
ctttcattttccctcactttctcgctcgccaaacgcccctctctctcctccaatggccgaccagctcaccgacgaccagatcgccgagttcaaggaggccttcagcctcttcgacaaggacggcgatggtttattactactaaggaacttgggactgtgatgcggtcactagggcaaaacccaactgaggcagaactgcaggatatgattaatgaggttgatgctgatggcaatggaaccatcgacttcccagagttcctcaacctga

SEQ ID NO: 46258 - DNA, 299 bp, Glycine max
  Clone ID: 701039901H1
ttgcgtttccctttcattttccctcactttctcgctcgccaaacgcccctctctctcctccaatggccgaccagctcaccgacgaccagatcgccgagttcaaggaggccttcagcctcttcgacaaggacggcgatggttgtattactaactaaggaacttgggactgtgatgcggtcactagggcaaaacccaactgaggcagaactgcaggatatgattaatgaggttgatgctgatggcaatggaaccatcgacttcccagagttcctcaacctgatggctcgcaagatgaaaga

SEQ ID NO: 46259 - DNA, 293 bp, Glycine max
  Clone ID: 701039904H1
aagaaaaacgacatgacgctattgaaggttgccacatctaatctgaaccaatgtgcgatggacttcgattgcaccgccaagcaagtcacagagtccatagcgaaggccaaataagccggcgctgccattaggctcggacccgaactcgagattcctggttatggctgcgaagaccacttcttagagctcgacacagttaaccattacatgggagtgcctgaaagatttactgcttggagattggactgatggcattgtgtgtagctttggcatgcccgttatcaaaggctccg

SEQ ID NO: 46260 - DNA, 286 bp, Glycine max
  Clone ID: 701039909H1
gtctctctctcacctcaacaaactcctctgcatgcccccgctcaactcttcaccccctatttcgccaccacgcagcagcgtcggactttggaccaaacctgtcggaaggccgaggctactggtgcgtgtccgagcggtcacgagcgacgacgagtgggggccggagaaggaggaggcgtacggcggcggcgtagcggtggaggagaaaccgacgaatcgggagacggagacggagaagctgaagaaggccttggtggattcgttttatggcaccgatcgtggactg

SEQ ID NO: 46261 - DNA, 290 bp, Glycine max
  Clone ID: 701039910H1
gctgcatccatccattcatccatcgtcgtcgtcaaaccaaaccaaatcctatatctcgcattctcattcactctgcccccaattccaaatccccattccctaaccctaaccctaaaaccgaatcttctcatgaaacctcccacgccacactcctccgtatcagaatcaggttcgattccctaaccctccacaaatcgctttcttctctttgcagtttctccatggagggctctgcagaggatttcggagcccccgagtcatgggaggtcgctgatttggacgagtccatg

SEQ ID NO: 46262 - DNA, 285 bp, Glycine max
  Clone ID: 701039911H1
cttgtattgtacgtggtacaatggtaatacttttcttaagcgacacacaggatacacattcttgttattagaactgatgtatttacttgtaaaagatgaagcagggtaaacaattcctttggctttaactatcatggaaatgagccattaggagtgggatagttgagtttgggtggtttgcttgaggtcataaaatcaaacctcagctttgccattgtacacgcacaaaaaaaaaggtactatattgaaatagaaagtgtgtatgttgtattgtattatgctgga

SEQ ID NO: 46263 - DNA, 285 bp, Glycine max
  Clone ID: 701039912H1
atgaatttgagaaaaaacttcttgctgatgttattccgccaaccgatattggcgtcacatttgatgatattggagctttagaaaatgtgaaggacaccttgaaggaattggttatgcttcctcttcagaggcctgacttcttttgcaaaggacagctgaccaagccttgcaagggaatattgctttttgggccccctggcacaggaaaaacaatgcttgcaaaggctgtagcaactgaagctggagcaaatctgcataacatttcaatgtccagcattacttcaa

SEQ ID NO: 46264 - DNA, 286 bp, Glycine max
  Clone ID: 701039913H1
aacaaaaaaaaatctttccttattgttttccgtgtttcctttgtttcatagcttctggggtttggttttcagacccacaatacaaagttcacaagtgtgtgtaaagattgaagaagaaaatgaccgtagagaagaaaatgaatgattccggcgacgagtttcccgtcggaatgcgtgttctcgccgtcgacgatgatcccacttgcttattggttctggaaactctcctccgaagatgtcaatatcatgcaaccacgactaatcaagcaataaaggcgttggcgct

SEQ ID NO: 46265 - DNA, 283 bp, Glycine max
  Clone ID: 701039914H1
caaaatatgctcgcttgcccccagcttgggcatatcgaccaggtgtatgcatgcattcttgctcttcatgaggctcccatttaggtctaaaggattacaaaaatgaaaacataaaaactaggaattaagagcaaaaaaatagtagcgtgtttctttgtttattatttttccatatgtttccaatatactgtccccgagtattatttaacacgtacaatgtaacatttggtcgaagggtttgtttgcgggttgattgtcattgtagtgtgaaaatttgtttgtg

SEQ ID NO: 46266 - DNA, 282 bp, Glycine max
  Clone ID: 701039915H1
atgaatcgcagctgaaacgcttcatcaccggattctcgctctcaactcagataccaactcggagtttcggactcatcgcctccgattcaaaaccctaactcggacctcaaactcaatcgatttcatacaacatggctctcgtgctgatatggaggactatggatttgagtactcagatgaggagcaagaggaacaggatgttgatattgagaatcaatattacaattcaccaggtttggtcgaaagtgctccagaaggtgcacttgctggttttgctgaggt

SEQ ID NO: 46267 - DNA, 294 bp, Glycine max
  Clone ID: 701039917H1
gaaaaggttcgttcagagacaaaaccccaacgatccaaacggtcattgagcatttcatggtgcgagtcactgagttgaatcggataggaatctgagtttgtgatcgtttgacacggtcatgggtgctgcgggctccaagctcgagaaggctctcggagaccaattccccgaaggagaacgttactttggcctcgagaatttcggcaacacttgttactgcaacagcgtcttgcaggcactatacttctgtgttccgtttcgcgaacaattactagagtattatggaaataacaa

SEQ ID NO: 46268 - DNA, 207 bp, Glycine max
  Clone ID: 701039918H1
acgttttctgagtttcataggaggaaaaaatgacagaagaacaaaccaaaacacgtgactcagaatcagtgacaccaccagctggtgctggtccttcacaggctcctccagctgctgaggctgaacatgttcatgaggctccaaaggatgtggctgaggagaaatctgtaattccagtgccttcttctgatgacaacctgatgggtc

SEQ ID NO: 46269 - DNA, 292 bp, Glycine max
  Clone ID: 701039919H1
cagcaaaggagtgatttggagtttggagcgactgaactaatcattaatttgcactcgctgtttcagcttcatcacccttctttcgcatcatttatatctcttgagaaatggcacaagaaacctttctattcacatctgaatctgtaaacgagggtcaccccgacaagctgtgcgaccagatctctgatgcagtacttgatgcgtgccttgatcaggaccctgacagcaaggttgcctgtgagacatgcaccaagaccaacatggtcatggtcttcggagagatcacaaccaa

SEQ ID NO: 46270 - DNA, 290 bp, Glycine max
  Clone ID: 701039920H1
ctcggttcgaagttgtaagcgttcaacgataaggagccgtcgtcggaactcggaagtgggtttgcgtcgttgtgaggtttaacgagacgatgagggcgctgtttctgttcttcgttctcttctctttcagctatgccaccgaacaaatctttcctgctcatatcggtagcattttcggtggtggcggtggtggccgctctcgcgaacccaaatacaagatcgaatttcatcccgaagattccccttttcaccctgatgatgatcaggaatctatagtcatgccggataaa

SEQ ID NO: 46271 - DNA, 303 bp, Glycine max
  unsure (1)..(303): unsure at all n locations
  Clone ID: 701039921H1
cggaatcggctcgaatcgagcgattcggctcagagnagaatacacagggacaatcacatagatttgtattcttatccaaatggaggatcttacatagattgcatgacaggaatgagactctatattacagagttcttattgataacatcaaagagtttgctccaataatctatactcctacagttgggttagtgtgtgaaaattattccgggttatttagacgcccgcgtggaatgtattttagtgcgaaagataaaggagagatgatgtcaatgatctataactggccatctgatcaggtag

SEQ ID NO: 46272 - DNA, 289 bp, Glycine max
  Clone ID: 701039923H1
acgtgttctcctacacgttgccattgttcaggcagctcttccccaaggaattgtcccatttgtccttgctaaggaatataatgtacatcctgatattctcagcacagctgttatttttgggatgctgattgctttgcccataactctagtgtactacatcttgttggggttgtgaatgaaagacatgatggatgatacagaagattcacgtgtggcatccatgcaaagcttggttgaggttgttgagaatgagagaaaaaaaaggtcataaagcaacaatagaaaagaa

SEQ ID NO: 46273 - DNA, 289 bp, Glycine max
  Clone ID: 701039925H1
agacactactaaagaaggatatagttttgaagagctatgcatcaagaaagaagccattgagggagaagagaagttttgtgcaaaatccttgggaacagtaattggttttgccatttcaaagctgggaaagaacattcaagtactttcaagttcctttgtcaataagcaagaccaatacactgtggaaggagtgcagaatcttggagacaaagcagtgatgtgtcataggctaaatttcagaactgcagtattttactgccatgaagtccgtgaaacaacagctttcatg

SEQ ID NO: 46274 - DNA, 286 bp, Glycine max
  Clone ID: 701039926H1
attattttgattttcattacatcacgtaacaataataatacagacaagcacgcacgcacgcacccacaggcacaagtctctccaactcaacttcttccactctcactaatggccctcaccaatgctttcctcgctccttccttcgccgtccacggtgttggtagggtttccgatccgcgctccattcctctcttctctcttccctccgacgccttcttccgctccccaacctccctctccagggacaagaactttctaaaagcttctgcttatgatttgaatgcag

SEQ ID NO: 46275 - DNA, 283 bp, Glycine max
  Clone ID: 701039927H1
caaaaaccatcgatgatgtttctctgagtctgaggattcacgcgttactgttactgttactcaactcttattcccttccttgattccaattctccgcacttcatttcatttgaattctgaaaaattaggattagggttttctttctttcagtgaaaaaagaagaagaagaaaaaagtggttttggagaaatggttgagcaatcggtgctggtgctcgaaaagcaagggccaaatccagtgttatcagaaggaatccacgattgggtgtttgagtgccatgggc

SEQ ID NO: 46276 - DNA, 271 bp, Glycine max
  Clone ID: 701039886H1
cctcgagccgattcggctcgaggagaaagtagcagatcctccatggcactccaccaaggaacgtgccaacttcgtctacgtcgccaagctcgccgaacaagccgaacgctatgaagaaatggtggaagcaatgagaatgtggcgaactaaacgtggacttgacggtagaggagcggaaccttctgtcggttgggtacaagaacgtggtgggtgctcgtagggcttcgtggaggattctttcctcgattgaacagaaagaagaagctaaagg

SEQ ID NO: 46277 - DNA, 280 bp, Glycine max
  Clone ID: 701039835H1
ttcaaacattcactccagttctctctctctctcttgtttgtctcttctggaacagaatggcggtggtacttaaagacatgtgtttcttcaacaacaaggacattctggttataaagcctcagaagaaatcaccactgttgtaaggatgtcggtgttgatcttctcaatggtgtgtggtgttttcatttgttccgtgtgtctaaagcagataagcactcatgcacggactatgcttatggagttgcaaattgagaagccttctcggagtagtagtagtaga

SEQ ID NO: 46278 - DNA, 277 bp, Glycine max
  Clone ID: 701039836H1
gtttctacttgcttggcttggacaacacatcccctacctttgcatcagccatccagaactctgtcccagccattacatttctcatggcagtcatactcaggatcgaccaagtgcggctgatccgaaaggatgggatatcgaggtggcgggatcgatattctgtgtggctggggcaacggtgattacactatacaagggtccaacaatatatagccccactccacctctacacagtgagagacccatcatagttgactttggaacactctcactggga

SEQ ID NO: 46279 - DNA, 277 bp, Glycine max
  Clone ID: 701039838H1
cgcattttccctcttctttctctctcacgttttccgcttcagttttctcgggaaaatcatggtgaaaggtccaggcctctactctgacattggcaagagagctcgcgatcttctgttcaaggattatcagaatgaccacagttcaccatcaccacttacacttccaccggagtggaaatcccttcaactggagtcaggaaaggtgagatcatatttggccgatgtcagcactaaggtgaagaacaagaacatcacaactgatgtcaaagtggacact

SEQ ID NO: 46280 - DNA, 86 bp, Glycine max
  Clone ID: 701039840H1
cacgaccccatctacgctctaaactccgatccctaacttaagctaaccagacatcttcctcgcctctgccaggcacatcgtcctac

SEQ ID NO: 46281 - DNA, 86 bp, Glycine max
  Clone ID: 701039842H1
cagatgaggaggtggacgccgtgtacatccctcttccgacgggtttgcacgtgacatgggcggtgaaggccgcggagaggcggaag

SEQ ID NO: 46282 - DNA, 263 bp, Glycine max
  Clone ID: 701039847H1
cggctcgaggaggatagtgatctttgtcttcgccaacaacatcgtccacttgaacaaaaaatcaaaaagaccctgaaatatctgaacttaaaagccgcactttttatttgttgtgtgtgagattttgatttgagggaaaatatcttgaatctgcggcgaggctggcggactatcgcggattgtgtcatctgctgcgaagccaacaggccaaagagagcgctacccagatcgcccaaccgtgtggcgactcctcgaagtgcgaa

SEQ ID NO: 46283 - DNA, 280 bp, Glycine max
  Clone ID: 701039851H1
gattcttcagctaccatcttatctgcgccaaaaaggaagagggaaaaagaaattgaaacatgggttggattccctgttctggaagttcaaacagtaagaagaagttgaagaagaaattggagaagatggaagcgcagaacgcctacgttgatccgatcaaagccaccccagggaaattgaagaggaattcatccatgaattccaaagagtcctccaaaaatggaaaccctgagcacattgctgcacagacattctcattccgtgaattggcaactgcaac

SEQ ID NO: 46284 - DNA, 278 bp, Glycine max
  Clone ID: 701039852H1
cagaaatgtcccaagtgagccagttggtcacatgcatacaacatcacaccaacagcgtgcatttgacaacgatcagaagtctgagcattcaagggggggatcaaaaccagctgatggtctgctgattgacgaccatgaaaggtgttacaaacttctcagacacatctgacagatattcaagcaaaatctcatagtggttctgctagaagttgcactaaagttcacaagaaggggattgcgctcggtaggtcagtggacctcacaaaattcagtgatta

SEQ ID NO: 46285 - DNA, 270 bp, Glycine max
  Clone ID: 701039858H1
gtgggttttgcgaagatactgtttcaactctattggctaaattgaaagatggtgatcataagctacagataattgggacatcactgaaggggtgcaattcagtggagaagtatgctaagtgcaagagaatggtttcgagtatggacccttggtttttgacaatgcagagaaattcctggagagcacagatatatgcactgccatatatgccatgcaaatcttcaacagtggctgggcagcaaacctttctttcagattcttatggaaaca

SEQ ID NO: 46286 - DNA, 273 bp, Glycine max
  Clone ID: 701039859H1
ggagagagaagagcggaagagaaaatgacgcccaggttcaagaagaacaggaagaagagaggtcacgtcagcgccggacacggccgtatcggaaagcaacgcaagcatcccggaggtcgcggtaacgccggtggcatcatcaccaccgtatcctcttcgacaagtaccatcctggtttcttcgggaaggtaggcatgcgctacttccacaaacttcgcaacaacttctacaatccgatcatcaacatcgacaagctgtggtccctcctccccc

SEQ ID NO: 46287 - DNA, 77 bp, Glycine max
  Clone ID: 701039863H1
aagaagcttgttctcgttcttctcatgaagtctgttgctgctggcaagctcgttaaggtcaaaaactctttcaagct

SEQ ID NO: 46288 - DNA, 244 bp, Glycine max
  Clone ID: 701039865H1
ctgaattgcactggtggtgattcttcaacggagccttacttggttacacatcaccaacttcttgctcatgcagctgctgttcgtgtgtacaagaccaagtaccaggcatctcaaaatggtgtgataggcataaccttgtagctaattggtttttgccgctcagagataccaaatctgatcaaaaggctacagacagagcatctgacttcatgtatgggtggtttatggatccattaacatctgg

SEQ ID NO: 46289 - DNA, 269 bp, Glycine max
  Clone ID: 701039866H1
tctcactctctcaggagtatataatctgagcgatgtcagatctcgaggctcccttgcgccctaagaggaagaaggtttgggtggactattttgttcagtttcgatggatccttgttatttttgtgcgtccttcccatcccttcaccatttatttccttacataccttggggctgtaagatctgagtggaagtcctataagacgcgtcagaaggaacatgatgagaatgtgaagaaggttatcaaacgtctcacacagaggaatccatca

SEQ ID NO: 46290 - DNA, 275 bp, Glycine max
  Clone ID: 701039867H1
ctctttctctctctagaattctcagatttgcggggcgagatgatgcagcagccaggacccggcatggcacctcccaccatgggccagcagccgccgcaacagtaccagcagcctccgccgcagcagcagcaaccctagtcatgatgccgccgcaggcccaggccccgcagaccatgtgggccccctccgcccagcctccgcctcagcagcagcccgacagcgccgacgaggtccgaaccctctggatcggggatctgcagtactggatggacgag

SEQ ID NO: 46291 - DNA, 260 bp, Glycine max
  Clone ID: 701039868H1
cctgattcattaatttgatagcagttaaacggccccgcgttccgtccctcctctctctctgtgtggttaacagaaagaacaacgctgagatccaatcacaatcattcattttcattcataccgtcgcaacacgatcactatttctgcgacgatggtggcacattcgagttcttggggcagggcactcgtggccatctcgccctataccttctctgccatcggcatcgccgtcgctatcggcgtctccgttctcggcgccg

SEQ ID NO: 46292 - DNA, 121 bp, Glycine max
  Clone ID: 701039869H1
tctccctcatcatctaaccctgctttaactttagcataaggctcagggtcaaacggtggccatatgagtagggggaaaaaaaaattgtacacagaaatacagaatcttatactatcgcaat

SEQ ID NO: 46293 - DNA, 265 bp, Glycine max
  Clone ID: 701039870H1
tcattgctaccctgttggtggataacaaaacttcagcaacccctttgcatctgatctaagaatcccaacttcaagtacccatttttcgtcatttcatgatctaggtgatagatcgtgaaaatgacaaggatgaccatgattttggggatactatgcagacagatgcagtgccggtggtgtcggccgatgtaatatttgcttctcttcggtttcctaattaccaaatcggagttaataatcagatcatggagacaaaggatgatcc

SEQ ID NO: 46294 - DNA, 272 bp, Glycine max
  Clone ID: 701039871H1
tgcagatcaagagtggttcctgttcctccacttagtttctccatagtatccaaaatagttcttcttggggtgataggaagttcatctcaggtactgggttatgcaggcattagctacagttctccagcacttgctcatcaattggcaatctggtacctgctttcaccttcatccttgccgtaatttgcaggatggaaaagttagctgccaaaagtagaagtagtcacgctaaggtgattggcagcataatatcaatagcaggtgcatttgta

SEQ ID NO: 46295 - DNA, 273 bp, Glycine max
  Clone ID: 701039872H1
ctttctcgtctccgtccgtgcaacctgggaagcaatggcttggagaggaaatcttttgaaaaacataaaagaacttaggtttttgatgtgccagtcatcccctgcacgctcagccacaagggcttttgtggaaagaattataaggaactaaagacattgaacccaaaattgcccatattaatccgtgagtgcagtggagttgaaccccaattatgggcaagatcatgatttgggtgttgagaaaggcatcacattggaaggcttgtccgaggc

SEQ ID NO: 46296 - DNA, 266 bp, Glycine max
  Clone ID: 701039873H1
cttggggtcttgtttagtttgttccaatccaacgttggttgtgtgtgtttgtgttgggaggattgggattgggattggaatcagcgaccccatgcgacctcagagaacgtcgatccacgccgtcacgacatggtgaggcgacacccccaaaggtgaaggcttttctcgccgtcgtttccggcatggcggccctcgtcctccttcgcttcatcgtccacgatcacgacaacctcttcgtcgctgccgaggctgtccactccctcgga

SEQ ID NO: 46297 - DNA, 268 bp, Glycine max
  Clone ID: 701039874H1
gtgaaacaaaccaaccacccacctatggcggcctctgttgtagtgtctacctctctgtctgtgtgtttcaactatggctatcatcgtcgtccatccatttccgctctctcttgttattcgaattccatcaccaaacaaacctaaaactcagttcgcaatgtttctccaactcgaattcggtagccccgatttattgccgcaagtttgttgctcgcacttcaattggagaaaacgagagcgagagcgagaaggagttagggttcgtggg

SEQ ID NO: 46298 - DNA, 268 bp, Glycine max
  Clone ID: 701039875H1
tggcctatgacacgaaacatcttcgtgtcccagagatacaatggcttggagcttttccttctgattctgagagatattttgttccgaatcagtgtcaccttccattgactgctgaagacaaaagaaaagttgagccatgctacttagatgctaccttgaaagggaggtaccacaatggaggttggagctacagttgattctgcaaagaggagtaaagtttgagattgaagccttatctgtgcacgcactttcattcttgtcagagtct

SEQ ID NO: 46299 - DNA, 198 bp, Glycine max
  Clone ID: 701039876H1
ggaaaaggatatccatgcaggtggttttggagttatgaagtctaatctaatccttaaaattgtaagcattggttagtctagtcccgaccttaaaaatctccactttaatttctgactttgtaaaacatcgttccaatggtccttttcgatgtaaaattatagagttaaatgaagtggaaaaaaaaattacattttggg

SEQ ID NO: 46300 - DNA, 264 bp, Glycine max
  Clone ID: 701039878H1
cggaacgtggaactgcggaaaccggaatatctcacttctcagatcagatcaatccgacgtcgttgcagttataatggctccattcagcggcgatgagacggcaccgtttttcggcttccttggagccgcagctgcctcgtcttctcctgtatgggagctgcctatggcacagcgaagagtggcgtgggcgtggcttcgatgggtgtgatgagaccggagctggtgatgaagtctattgtccctgttgttatggctggagttttg

SEQ ID NO: 46301 - DNA, 277 bp, Glycine max
  Clone ID: 701039834H1
ggtgatctatgcaatctcaggaatctcaatatgacaagctgtgcaaggtgtgaattgccgtactcagtaaccaatcttgagaatttaaaagtggtggtatgtgatgaagagacagctgcttcatgggaagcatttgaagctagcttccaaatctgaagttagaggttcctcgagttgaggttaacttaaactggcttcattcaattagctcttaagacatgtcctgcttcatggaaagcatttgaagctatgctttcccaatctcagtttgaggtcc

SEQ ID NO: 46302 - DNA, 86 bp, Glycine max
  Clone ID: 701039880H1
ctaaaagagaaaaatgcatgccatcatcatcaaccattcctggtcctgatcctaaatagggttagggtttatgcaatcgaactcca

SEQ ID NO: 46303 - DNA, 74 bp, Glycine max
  Clone ID: 701039882H1
ccccttaccacagttaacatagcaaagagtatgaactgacttggggataccccataaaattggaagtaaacttt

SEQ ID NO: 46304 - DNA, 267 bp, Glycine max
  Clone ID: 701039885H1
caaagatattgggaaaggaaggtgcactttttgttccatcaggcactatggccaaccttatatcagtgcttgtgcattgtgacataaggggaagtgaagttattctgggagacaattcccacatacacatttagagaatggcggcattgcaacccttggaggggtgcatccaagaacagttagaaacaatgaagatggaaccatggacattcatttgattgaggctgccatcagagatccaaagggggagctagtatatccaaccac

SEQ ID NO: 46305 - DNA, 264 bp, Glycine max
  Clone ID: 701039792H1
ctcaggcaataccctcttctccatctaccgctatcataatgggtcttcgaaatgctatcagggaaatagtgaggagaacaaggagctggtgtttagtgtgcagaggaccctcaaaacaattactagagttgagttagaggtacttttcgaggctgagaggtccaatgatgaatgttgtgatttgaaagtgaagggttcccctttcaagagatcatgttgcatatataaacatgttgatttggtggcacagagtagcctgatgta

SEQ ID NO: 46306 - DNA, 263 bp, Glycine max
  Clone ID: 701039794H1
ttttgtttaaacatttacaggaaaaacttcttctcactgagtcaaagctaaaggagtcacaatatcaattgacaccttggcgttcagatatgaaccatgctaatgttgccacacaatcacaacctcactcgattggtgcacctttgacaacttcaaataaaaatggccttgaactggtacctcagcatatgtactctcaagtaaagcctcaggtctctgttgatgctcaggcaggcactgaaccggatctattgggtcgccac

SEQ ID NO: 46307 - DNA, 262 bp, Glycine max
  Clone ID: 701039795H1
ctttctcccttctccccatttgctcattctcctccccattctgctcagacaccgcacagcgaacaaatccaccattcattttcctttttcgcaacagcgcaatggctcgaagatccctcccgctcctgaagcacctcctctcgcggcggatcccggcccgatccgtgacgtacatgcaccggccgggcgatgggtcgccgcggccggtgacactgatcccgggcgacgggatcgggccgatggtgactggcgcggtggagca

SEQ ID NO: 46308 - DNA, 262 bp, Glycine max
  Clone ID: 701039796H1
cttggctgttacaatcagtgatgaaaaacttaaggaaatgtttgccgactatggtacaataacttcttgcacggttatgcgagacccgactggaatcagcagaggatcaggatttgttgcatgttcaactcctgaggaagcaactcgagctcttggtgagatgaatggtaaaatgtttgctggaaaacctctgtatgttgcccttgcacagagaaaagaagagagaagagcaaggttacaggcacaattttcacagatgagg

SEQ ID NO: 46309 - DNA, 289 bp, Glycine max
  Clone ID: 701039804H1
gaaaattgccaagttaagcggtggtgtgataatatctaaactgttaaactatccagtcagaggccttgtctttgagggcggtcatacactagaggatttagcaaatgctgtttcagaagcctgcatctgccttcagcacaacaacatacctacaatgtacttatttcagattgtggaaggcaaatatttctcttaccacagtgctatgcagagaaacaagcccttggagaagtgagtcctgagcttctggagacccaagtgaatcctgctgtgtgggaaattagtgggc

SEQ ID NO: 46310 - DNA, 290 bp, Glycine max
  Clone ID: 701039805H1
ctctagtttctctgcatcgccttcgtcgatcgaagtggagcttccatttcatagccggcggtgaagatagatagttagcagacttggctgaccctgagcaggaggaataagaataagatgcctccttatgattgtatgtttctgtttaagcccatataaggaaggaagctgtcatggatttagttgtgagggtgggaaagcatgtgtgcagaagaaatggggttgtcactgatatcaagagtctcggaaaagttcagttgggctatggtgtgaaaaagctagatggcaga

SEQ ID NO: 46311 - DNA, 290 bp, Glycine max
  Clone ID: 701039806H1
caagaatgtctgcaatggacagctctagcaggaatgctggggatatgcttgatcgtctcaccctcacctataacagaactcgtcaagcatcaatcaccactgaattgatagagattatctctggagcttcagcactggaaggttaattacggagagcaatctgtgtaatatattcaacagtggcgcgatattaagataatatcgttggattcttttgaaatttgttggtgtcatttttttaatcttacttgacttctgtaataagtgttccaaggtcaaacccattgtgg

SEQ ID NO: 46312 - DNA, 288 bp, Glycine max
  Clone ID: 701039807H1
ccttctttctttttctgtgagcctttctttcaggttcttaacttgatcagtgtgcagtgtccatatcataagggtagttgcaaattgcaatggctaagcatgatgttgagggtggttccttctctgcaaaggactaccatgatcctcctcagcaccgttgattgatgctgaggcactcacacagtggtccttctacagggctttgattgctgagttcattgccacaatgctcttcctttacatcacagtgctcactgtgattggttacaagagccagagtgatgtaaa

SEQ ID NO: 46313 - DNA, 282 bp, Glycine max
  Clone ID: 701039811H1
ctttcgcggtggcttcctcttatttttttctttctctctctctttctcactcttatatcctttccgagttccgactctgttaatcattctccgttaagattctttcttctttcctctttccactcttggtcttatcttcttcacaatccacaaccactccttgttataaatcagatccaaacatggccgaagaacaccgatgccaagctcccgaaggtcacagactctgctccaacaactgcggcttcttcggtagccccgccacaatgaatctctgttcca

SEQ ID NO: 46314 - DNA, 284 bp, Glycine max
  Clone ID: 701039812H1
gagaaatgctcgtgaaaagagaaagctgggatcagatataactgcagaacagtctccatcaaagcgatttagagatgttggaaatccaaagaaagcacctgaggagaataactatcatgtgcagaacatttctcaggtgacaaaagtgaaggggtcaattggaagaatactaaaattgatgataatcccagtgagcaacagtttagccacgaaaagaacaggggatactctgaccagtgcaccgcatttttatcaaatcttcatcctacggcaaactatgaaca

SEQ ID NO: 46315 - DNA, 286 bp, Glycine max
  Clone ID: 701039813H1
tcgccgtctgtcgccgtgaagcgatcggcggcggccaagctgaggctgttggcgaagaaccgagccgacaaccgcgctctgatcggcgagtccagcgcggtggctgctctggttccgctgctccggtgcagcgatccgtggacgcaaaacacgcggtgacggcgttgctgaacctgtctcttctggaagagaacaaggcgcttataacgaatgccggtgcggtgaaggcgctgatttacgtgctgaaaacaggcacagagacttcaaagcagaacgcggcgtgcgc

SEQ ID NO: 46316 - DNA, 286 bp, Glycine max
  Clone ID: 701039814H1
caaaaagctacatatcaaggacaataggatgggatcaatacccacacgggcgttggggtgattcctgtaatccatcatatggtgcattatctgattatcagttcatgcggccacgtgcacgggacaagaagcttgttgaagaatgggcgttcccttgaaaagcattgaagatatatatgagaggtttagactgtattgtcttggaaagttgagaagcaatccttggtcagaactagatggtcttcagccagagacaaagataataaatgagctgctggaaaagatt

SEQ ID NO: 46317 - DNA, 95 bp, Glycine max
  Clone ID: 701039815H1
aagaaaagcttaggcaagtttgggattgtggcagcaccctatatgattcctacgagctcaactccttcaaacgccaattaaacacggcaatagcg

SEQ ID NO: 46318 - DNA, 134 bp, Glycine max
  Clone ID: 701039817H1
caacgctgttgacagaggaagagaactaagatcagattttaagatgatagcaagagctttgacaaggaaaggaaatgccttggtgaaattggcgaagtgctcaaaggattatgagcctgccattgagacatacc

SEQ ID NO: 46319 - DNA, 286 bp, Glycine max
  Clone ID: 701039818H1
ataggaggttgagtagttcttcatcatagtcttaaacattaaaccttagcaaaactcaacaatgctagacatcaaaggctacctcgtactcttcttcctatggttcatatcaaccattctgatacgttccatcttcaagaaaccacacgtctaagactcccaccgggtcctccaatttcaatacccttgctgggacacgcgccatatctccgttcactgctccaccaagcattgtacaagctatcactgcgctatggacccttgatccacgtcatgatcggttcga

SEQ ID NO: 46320 - DNA, 285 bp, Glycine max
  Clone ID: 701039819H1
cggctcgaggcaaaagagcgtcgtagtcgcaaccctaatcagaagaagcgcagttacaagcgagtgacagccaccagccatgggtcgtatgcacagccgcggtaagggtatatcctcttctgctttgccctacaaaaggacacctccagctggctcaagatctcttcgcaagatgtcgaagaaaatatctgcaagtttgcgaagaaaggtttgaccccgtctcagattggtgtcattctcagagattctcacggtattgctcaggtcaatagcgtcactggcagc

SEQ ID NO: 46321 - DNA, 284 bp, Glycine max
  Clone ID: 701039820H1
cggctcgagctcgagccgattcggctcgagatccctagctctgtcgttccgtcgtcgacgatgaccttacgggtgcgaaccctgacctccgctctctctttcttctctctctcttgtccatcgcttccgccaatgtcttcttcgagagcgtttcgatgacgggtgggaaaatcgatgggttaactcagattggacaacagatgagaacgtggctggggagtggaaccacacctctggtcaatggaatggagacgctaatgacaacggtattcaaaccagtgagg

SEQ ID NO: 46322 - DNA, 284 bp, Glycine max
  Clone ID: 701039821H1
ctataggctaaggactttaggttgggatttgggaattagggttgttcgcgtggcgaagatgattgaggtggttttgaacgatcgattggggaagaaggtgcgcgtgaagtgcaacaccgatgataccatcggcgacctgaagaacttgtggcggctcagactggcacaagagccgacaagatccgcatccagaagtggtacaccatctacaaggatcacatcactctcaaggattacgagatccatgacggcatgggtctcgaactctactacaactaaacaca

SEQ ID NO: 46323 - DNA, 279 bp, Glycine max
  Clone ID: 701039827H1
attaatcaaacatggctagggttagtgctttgtttcactctttgctcttgatttcttcccttgtattggcttctcaaatccatgtttcctctgggaaactagtccctggactatcatggaattactatttgttgacatgtccaagcttgagaggattataaggaagcatcttgaggatgtcttcgagaaggacagtggagtagctcctggcatacttcgactcttcttccatgactgctttcctaatggatgcgatgcgtctatattgttgaatggaga

SEQ ID NO: 46324 - DNA, 126 bp, Glycine max
  Clone ID: 701039829H1
gtcctttgtctccttcaacctcatttcaattctctctcccattcttttcttcaccttctcctcctcctcttcttcatttccttttctttctctgcactccatctttcttggcaaaacccacccttt

SEQ ID NO: 46325 - DNA, 280 bp, Glycine max
  Clone ID: 701039830H1
acaagacagcatcagatgctgtctttttaggcttcttcgaagcttaaaacgtatgtggttttatcttctcttggaactccacactacgatcccactgcagctgtatgcgcttctaatttctgaactaattatcctgaaggccattagtgacattgtctatgtaaataaattagttctctttcgctcttctggttacggttgcttcaagactgcagcataacttaaaaactcgtatcatacacaaactaatggttgtttaagtgaaaccatcctatttcat

SEQ ID NO: 46326 - DNA, 281 bp, Glycine max
  Clone ID: 701039833H1
tctggctcccgtggttggtactgtggaaacattccttgggaggccatggaaggagtactcaaggactgtttatatgcagtctttcatggatagtttgatagctccggctggttggcatgaatggactgggaatttttcactgacaccttgtactacgcagagtatgataacacaggtcctggttcaaacactgccaaccgagtcaactggcctggctatcatgttattgatgctactgatgcagctaattttactgtctctaacttcttggttgggaatga

SEQ ID NO: 46327 - DNA, 264 bp, Glycine max
  Clone ID: 701039791H1
tggatcactcaatcctaatattttatattccaattaaaatagtgagagtactagaaggtagtggagttcgcatagggaatcatggaaacagaagtggttgaagatattgtgattgtgggagctggaattgctggccttacaacatccttaggacttcacaagttgggtatcagaagtttggtgttagaatcttcagacactttgagggtcactgggtttgctttgtcaatatgggaaaatgcttggcaggcattggatactgtt

SEQ ID NO: 46328 - DNA, 287 bp, Glycine max
  Clone ID: 701039736H1
gttaggttggtggcggtgagttggagctttgaccagtttgagcacacgagaattcagtgcggatgtcaatggcaaaaaaacctgtgaaatactctctggttgacgcgtttactgagtcagtgttcaaaggaaaccctgcagcagtgtgtttcttagaagagaagagggacaaaaagtggttgcaaggagtagctgcagagttcaatctatctgtgacatgttacttaactcgcatcagcgagtcccatggaacaacctcttatcctcgttttgatctcagatggttc

SEQ ID NO: 46329 - DNA, 289 bp, Glycine max
  Clone ID: 701039738H1
tcggctcgacatattcattctctttgcgcattcctactctcctttcaagatgcagatctcgtcaagaccctcaccggaaagaccatcacccttgaggtggaaagctctgacaccatcgacaacgtcaaggccaagatccaggacaaggaaggaattcccccggatcagcaacgtctcatcttcgccggaaagcagctcgaggacggccgtaccctcgccgactacaacatccagaaggagtcaacccttcaccttgtccttcgtctccgtggtggcatgcagatcttcg

SEQ ID NO: 46330 - DNA, 282 bp, Glycine max
  Clone ID: 701039739H1
gttctcttctacatcttccagtttatccgcgtcgttttgctctttactgtcatcgttttgataagggccaggatggtcttttctcaaaccgtttttgcaggacagggagaagaaggtgttgatgattgtcatcccgcttcaggttctcgccaatttggcttccgttgtgatcggggaaacaggtcctttcatctaagactgggttacttggaatcaggttttcttgcttgtggatattatctgctgctgtgccattattttccctattgtgtggtccataag

SEQ ID NO: 46331 - DNA, 280 bp, Glycine max
  Clone ID: 701039741H1
gaaaaaccaagtaatactagccaaaatatgtctcccaaatacatgtcccttttcctcctagtaatactagggatggcttttctggccactacttcccttgctgatcgtcgttttctttcggtggaagatggtcatgatcaccatcaccaccacccaccaaaaaaacactggcctccaaccacacaaaatgaaccttcaaacgtagaaaacaaggagaacactgaggtggaggatggtcatgatcatcaccatcactacccacctaaaaaacactggcctc

SEQ ID NO: 46332 - DNA, 274 bp, Glycine max
  Clone ID: 701039742H1
gttcgattttgtagtaagtgaggtgccaatatggtgaagatagctcttggtactttggctgacccttttaagggtgcctctcttaaggcttatttcgcagagttccacgcaactctgatttccgtgttcgctggtgttggatcagccatcgcttacaacgagcttacaaaagatgcagccttggatccaacggggctggtggcagtagctgtggcacatgcatttgcactgtttgtaggtgtctccgtcgccgccaacatctcaggtggccatt

SEQ ID NO: 46333 - DNA, 274 bp, Glycine max
  Clone ID: 701039743H1
catacattgcaagattttgcaatttttgttacacatgctctttagagtttccttcatttttcctccttccttttttaggtggtgtacctgcttattatgggctcatcttttcttgttttagcacttagtttgtgttccttgtcttgtctctcactcttggctgtgtttagcaagagtaaatacctagactttgttgcacttgaaatcagagagtgtgccaaattgtgtgtcttaaaattccacctaaagctttagtgttcgcatggcggctaat

SEQ ID NO: 46334 - DNA, 277 bp, Glycine max
  Clone ID: 701039745H1
gcaagaccagcgagttctgcgcccccttaacctccttcgactggcacgatatcgaccccaaccggatcgcgacctccagcatcgacaccacctgcaccatctgggacatcgaacgcaccctcgtcgaaacccaactcatcgcgcacgacaaagaggtctacgacatcgcatggggagaggtcagagtcttcgcctccgtctccgccgacggctccgttagaatcttcgacctacgcgacaaggagcactccaccatcatctacgagagcccccaccc

SEQ ID NO: 46335 - DNA, 92 bp, Glycine max
  Clone ID: 701039747H1
cagatccgaagagtgaaggttcgttgaatcccatggcgagagtcaagcacacgccagcttctcggcagatccgctaaaaagcaagcgccacg

SEQ ID NO: 46336 - DNA, 64 bp, Glycine max
  Clone ID: 701039751H1
cgaccataggcctatacaacattgatcgtgctgcatgtggacgtatagctgatgtcagtgccaa

SEQ ID NO: 46337 - DNA, 283 bp, Glycine max
  Clone ID: 701039752H1
cttcataagggaggatgatgatgatcatgatcatgatcatgatcatgtggatggccgtggatccacaaaacagtgccagcaacatcactgaaattgtgaccaccccagaaggggaaaacttaggagaatcgctgagtctaggcctcaaaggagacatcaacatgccagcagaagaacaaaactcatcatcaaggcctctccacagcaacaacaacacagtattctcatgcaacttctgcatgagaaagttttacagctcacaagccttagggggtcaccagaa

SEQ ID NO: 46338 - DNA, 268 bp, Glycine max
  Clone ID: 701039758H1
aagacaataatattttcctgttgaattcaggctccccccttcgttctctttcggccaacactctaccgatcctctcttcagtcttcatttctcttttatactcttcatatcttcctttctctttctctgtgtagcttctttcgttctctttttcactctctccctctgcctttgaatttctgtattttgcaacatggccagcgacgaagcatggagaacctctgaagagcagaacgagtcaaacataatcggcactagcatatcgccc

SEQ ID NO: 46339 - DNA, 283 bp, Glycine max
  Clone ID: 701039766H1
catgtggggattctcgctatcgacatctacttccctcccacctgtattcagcaggaattgctggaaggtcatgatgggtgccattaaagggaaatatactattggacttggtcaagattgcatggcgttttgtacagaagtagaagatgtcatctcgatgagtttgacagtagtttcttcccttcttgaaaagtatgcgattgatcctaaacaaattggtcgtctggaagtaggcagtgagactgtgattgacaaaagcaaatccatcaaaactttcatcatg

SEQ ID NO: 46340 - DNA, 280 bp, Glycine max
  Clone ID: 701039768H1
cggtttcgttattcgcccgacacattttttctccgatcccctattcctctccattctccgttgtgtcgattttcgttactcaaaagggaaattgatttgatagatagacagatagatcgtttctatgggttaaagtgaaatccgaatccgaatctgaatctgaatctgatccaatcattttcatgttagggcgtgcgatctccaatcaagcgcggttgtgtttaggtttcattttgttgggcgtgtgagtcgtagggggtttcgaagagcatagaataat

SEQ ID NO: 46341 - DNA, 126 bp, Glycine max
  Clone ID: 701039771H1
gaaatcaaagacattgaatctcacacaacatgggtccaagctcgaagaaagctctagcttagatcaggtgtgacgaggcacatgaagggcttcagcctctgcaactcaaccctaaaagtaaatggg

SEQ ID NO: 46342 - DNA, 269 bp, Glycine max
  Clone ID: 701039773H1
cgcagcgaaaccaagacaaaagtggcatccttgttgttcgcttcaaattcaatgttctacagaaggtaaatttgccgatggtggtgatgggcgtgaaatggctgcaaaacgccagcgcactgttgatccaggatcttcattctatggtgcttccacgggttccaattttatgtacaatccatctccttacggatatgtcagccaacctcctcctcctccaccttttcctgttgttcgactgcgtggccttccttttgattgtactgaaa

SEQ ID NO: 46343 - DNA, 268 bp, Glycine max
  Clone ID: 701039774H1
catggttattgccgtcacatctctctaattccaacactaatgatgcgtatttagaccattgggttcaagtttttgttcactaataaagtcaattttcttgtctatttccacttgttcttcagcacactcacaaccacaacccaaccaacccacctgaactactgaacaacaacctcttcttcttctctctctctctttagcataatcattcatcaccacacaagagaaaaaacaaaaagaacaaagaacaaataaaccttttttttta

SEQ ID NO: 46344 - DNA, 265 bp, Glycine max
  Clone ID: 701039776H1
ttctcagtctctgtgtttgcggctgaggattccgaacgagtgaccttcttcgtttctcgccaagtttaaagtaatcatgggtaaggaaaaggttcacatcaacattgtcgtcattggacatgtcgactctgggaagtcaactaccactggtcacttgatctacaagcttggaggtattgacaagcgtgtgattgagaggttcgagaaggaggctgccgagatgaacaagaggtcattcaagtatgcctgggtgctcgacaagctc

SEQ ID NO: 46345 - DNA, 266 bp, Glycine max
  Clone ID: 701039778H1
gtcttcataaacgcctttcttctccgtttccgtttcctcgttcgaattcgcttcttgatctgcgaaaatgagagagtgcatctcgatccacattggtcaggctgctatccaggtcggaaatgcttgctgggagctctactgcctcgagcacggcatcgggcccgatgggcaaatgccaagtgacaagacagttggcggtggtgatgatgctttcaatactttcttcagcgagactggtgctggaaagcacgtgccacgtgcagtgt

SEQ ID NO: 46346 - DNA, 266 bp, Glycine max
  Clone ID: 701039779H1
ccaacgtgttatctgacaagactttggaacatcacgctcctcacttttcaaaggtttcagttgtgacatcctccaagtgacaagagtggcacattcattcctttagtggtcctttggttatatattaaattctgggctgtgagtatattagaacaaatgtccttccgcagtatagttcgtgcagtaagggctggatttggaagcctatcaaggaggagttttgacgtaaggcttcctggccataacaggggcaagtcacgtagttt

SEQ ID NO: 46347 - DNA, 279 bp, Glycine max
  Clone ID: 701039782H1
tgcaaatacccgattgatcaatcgaatttttttgtgattcaatttcgctcttttttctcggcgcgagacatcatggctttgggaacggtgactcgacggttcgggaataaactcttgccggcgttatctccttctcccaggcttctacattctcacgccaccagtttcgggttcaaacaagtaaacgtcgaagaaaaggctcgcatggttggtgacgtattcacgagcgttgcttcaagctacgatctcatgaatgacctaatgagtgctggtttgcat

SEQ ID NO: 46348 - DNA, 273 bp, Glycine max
  Clone ID: 701039784H1
cttggaacccttctacgtgttctccattccctctctcactcctccatctacgtttcttcaatccattcccttctttctctctttctttatcttctcattttcctcattacactctttttattctctcaacttttctcttattaaccatagttcacatattatatcatcacatatcatagtgatatattatatcatatcacaatttgtggcatacttgctgtgcttggttgctctgattcatctcaagccaaaagggttcgcgtccttgagctt

SEQ ID NO: 46349 - DNA, 275 bp, Glycine max
  Clone ID: 701039785H1
ctctggatcagtacatatctagaatgaaaactgggcagaaggatatcctttacataactggaaaccagcaaagaacaactggaaaactctcccttccttgagcggcttaagaagaaaaattttgaggttattttcttcacggatccagttgatgagtacttgatgcaatacctgatggattatgaagacaagaagttccaaaatgtgtccaaggagggtttgaaacttgggaaagattcaaaagacaaggaactgaaggaatcttttaaggatct

SEQ ID NO: 46350 - DNA, 271 bp, Glycine max
  Clone ID: 701039786H1
cttccacggagatcatcatcttcacttcaattcagtttactcatcgtctgatttcatccaaagtttaccaacatgagcttcttgaggccttctgcgttgtacaactttctgatcagttatcctgcgctgcgatggctgccatgtcagagttggggcttccttcgatggcccggccttgatgggttcttcaggcttttcgtggttgtgcttctgtggtctacactatccgagcttcgcttcataccctcatcttctatgtaccccacccttc

SEQ ID NO: 46351 - DNA, 270 bp, Glycine max
  Clone ID: 701039787H1
caagactaacaatacactgaccattgttgacagtggtattggcatgaccaaagctgatttgggtgaacaacttgggtacaattgctagatctggtaccaaggaattcatggaagccttggctgctggtgctgatgttagtatgattggacagtttggtgtggggttctactctgcatatcttgttgctgagaaggtcattgttacaaccaaacacaatgatgatgaacagtatgcttgggagtctcaagctggaggttctttcactgtca

SEQ ID NO: 46352 - DNA, 107 bp, Glycine max
  Clone ID: 701039735H1
cgaccaagcaattcaggagcttgtacacgacaacaccaacaaagtccaagaatccctccataagcaatgatgctcagtaccaacaccctctttcccaccttctctct

SEQ ID NO: 46353 - DNA, 264 bp, Glycine max
  Clone ID: 701039790H1
cgccgtctaggtttttctctcaaaatttcgaaaccccaattttctctcaattcgaatctgcggattcatcgtaacctaaattattagatagttatattatctctctgcgtttctttcagcaattttctattttctcctctcatggcttcagattccaaaaaggatttccctgctgatgacaaagctggaacagaagagagtaaaacatccaaagatgagacttcatctaaagattctccagcagaacaaagagccacagtactt

SEQ ID NO: 46354 - DNA, 107 bp, Glycine max
  Clone ID: 701039687H1
aatttcgtgttttctctcttcttcttgttacaagagagagattcaaggatctggtgccccttcttccttccccttgtgttgtgttgttgggaccaattctttaatca

SEQ ID NO: 46355 - DNA, 144 bp, Glycine max
  Clone ID: 701039688H1
gatcttgccaaggttcagagggctgtgtgcatgatctccaattccaccagtgttgttgaggtcttctctcgcatcgaccacaaatttgacctcatgtatgccaagagggcttttgttcattggtatgttggtgagggtatggaa

SEQ ID NO: 46356 - DNA, 155 bp, Glycine max
  Clone ID: 701039689H1
ataagttctcagttatcagcccttcctattgtgttcctaactctcttaacctacaaattaacacagagaaaggtgttacttacaacgtaaagggtaaccgtgtattttacataaaagatactttgttcatttcacggtcgtcgcgtgttatgtga

SEQ ID NO: 46357 - DNA, 144 bp, Glycine max
  Clone ID: 701039690H1
gttcccgatgtttccagggacattggatgctaccaggaggctatggtgcgtcagagttctggggtccgcagttttaaagagatggtggaatactttaatgaaagggcaaatgtatcagggaagtttcctattgggagttttaat

SEQ ID NO: 46358 - DNA, 201 bp, Glycine max
  Clone ID: 701039691H1
ctcgagccgctgaaatcgagagggagacgaaaagttttagatcgagagagatgggaaaggagactagcaaagatacggttccggtgacgcagtggctgaatcgaatggtctcagaaccttactacctcttccatttcttaaccttcttctcctatttcgtcgttcgcagctccgcaacccaaatcttagcgcctcatctca

SEQ ID NO: 46359 - DNA, 93 bp, Glycine max
  Clone ID: 701039692H1
ctgattccaaaaaaaaaaagaaaatctaactggttatggcaacgctaggatatggtttcgctgaagcatacgtaacgaggaagctctacaagg

SEQ ID NO: 46360 - DNA, 143 bp, Glycine max
  Clone ID: 701039693H1
aaaaggggaagtcccagtgaatggttcattttctttatttacccccatcagttatcaaaacaatcctgacttgatacaaccaaaaaacactccatctcctgtttctccaacaccaccagcagcttcttcaggtaacagtaata

SEQ ID NO: 46361 - DNA, 142 bp, Glycine max
  Clone ID: 701039694H1
aagcagctgaatatttgagtgaactcactttaaacagtggaaaagagttcagggccaaggttgacgagaaagatacttccggaggaaaagtgaaagggcagggaactgggacagtccttgctgtaactcttgttgccgtgga

SEQ ID NO: 46362 - DNA, 291 bp, Glycine max
  Clone ID: 701039704H1
cgtcttttgaatttctcccatggcctaatcctctcaacactcttcatccactactctctagctgatgttggcactgctgcccaatatggccctccctttttgccgaccacatgtttcggcagagacgcatcgcagtttccgtcaagtaacatgtttgctgcggccggggagggtatatgggacaatggtgccgcgtgtgggaggcagtatcaggtgcgctgcatcagcgctgcggcacccaggacttgtgttcctggccagacgcttcagatcaagattgttgatcgagcg

SEQ ID NO: 46363 - DNA, 291 bp, Glycine max
  Clone ID: 701039705H1
aaaaataagacattgtttggtttggttacttgctcgaatttcctcgaatcgcttaatttggtatttgattagttaaaccgcaacgcggaatctcttttctcgaactggctaactctcaggcaagtggttcggacgctgattccagcaacaagcggctggtgctcgcactgtatgacgccctaaactccggcgactccgacgccgtcgtcaagatcgtcgccgccgacctcgagtggtggttccatggtccgccctcacaccagtttttgatgcgcatgctcaccggcgact

SEQ ID NO: 46364 - DNA, 101 bp, Glycine max
  Clone ID: 701039706H1
tctttgttctctctcttgcaaaacctaattttcatttcttccctcacatttcaaaaatgggtgagttctgcgacatccagggtggccaatgcggcaaccag

SEQ ID NO: 46365 - DNA, 284 bp, Glycine max
  Clone ID: 701039708H1
caggggcaatgaccaaaatggactggtttgagctggattttcccaaggctgaagtcgttgtccttaaatttcacatccagtgattactttttacctcccttcatcaataaaatgccaaatttgagggcattgataataataaactacagcacctcatatgcccgccttcaaaatgtttcagtttttaggaatttgaccaacttgagaagtctctggcttgaaaaggtttccatccctcagttatcaggcagtgtcttgcaaaacttgggcaaattatttgtagt

SEQ ID NO: 46366 - DNA, 290 bp, Glycine max
  Clone ID: 701039710H1
cggctcgagcagctattgaatttcacttcacttcacttgcatgccaaatgaaaacaacctcttcccagaatcctgtcggtatttaactccctcgatttcacaacaccaataacaatgagagtttcaacagagacagagccggagactaaaaagataaaacgcattcgccgcggcggggactcgagcaagcaccctttgtaccgcggcgtgcggatgcggaactgggggaagtgggtgtcggaaatccgcgagccgaggaagaaatcgcggatatggctaggcacattccc

SEQ ID NO: 46367 - DNA, 281 bp, Glycine max
  Clone ID: 701039711H1
cggtgatgcagatgctgagggacagaaattttctggttggtgacttcgagatcaacattgtcaaagcacgagtccaagtccaagtacggcgaacacatgaagcgcgaggacctcgtcatcaacaaatccaagaaggacaactccggcgaccagatctacgttttcttccccgacgaacccaaggtcggcgtcaagaccatgaagacctacaccaaccgcatgaactccgaaaacgtctacagagccatcctcgtcacccagaccaacctacacccccttcg

SEQ ID NO: 46368 - DNA, 280 bp, Glycine max
  Clone ID: 701039712H1
caaaggcccctttgagaagttaattcgagggtcaaagttaagaacattggatggtcgtgaatacgtaagggcaggtatcagagaactgtgtggcacatatgcaatctgttgggacttacagtgatgaggaggaaaaagctattgaggaatttagaaatgctttcaaggatcaaaatttcccaccaggctccactgttttctacaaacaatcacccactggaacattggggcttagtttctcgaaagatgagacaataccagaacatgagcatgcagtgat

SEQ ID NO: 46369 - DNA, 278 bp, Glycine max
  Clone ID: 701039714H1
ccgtcccattctcgaattggcgtgtgcctcttgctatccctcaaaggtcttttgaagcagcagaatggacttctttactagagacataaatgaggactctatgcttagatgtccattcttgaggaacatcaatgagcctactaacttctcattcttttcacctttggctttaccaatgccttttcgtggagctaaaggtccaatttttgaagatggtcccaattttgatttggcatttaggctttcccacgggagtgatggtgtagtacccttatctg

SEQ ID NO: 46370 - DNA, 280 bp, Glycine max
  Clone ID: 701039715H1
aggaggttgagtagttcttcatcatagtcttaaacattaaaccttagcaaaactcaacaatgctagacatcaaaggctacctcgtactcttcttcctatggttcatatcaaccattctgatatcttccatcttcaagaaaccacagcgtctaagactcccaccgggtcctccaatttcaatacccttgctgggacacgcgccatatctccgttcactgctccaccaagcattgtacacgctatcactgcgctatggacccttgatccacgtcatgatcgg

SEQ ID NO: 46371 - DNA, 85 bp, Glycine max
  unsure (1)..(85): unsure at all n locations
  Clone ID: 701039716H1
gaacaatctcttaaccctctctcaaactccttcagaatccccctttcccggntcccaacttcatttcaactcaatatgaagaaaa

SEQ ID NO: 46372 - DNA, 285 bp, Glycine max
  Clone ID: 701039717H1
taaacataatggtagtagcacaactatttctccattagctggtaagctgtttgttcgttattggggctggtggtgctgggaaggcacttgcttatggtgcaaaagcaaaaggagctagggttgtgattgcaaaccgtacctatgaccatgccagaaaacttgcttatgcaattggaggagatgctttagcccttgctgatttagataattaccatccggaggatggtatgattcttgcaaacacaacatcaattggactgcaacctaaagttgatgagacgcctg

SEQ ID NO: 46373 - DNA, 294 bp, Glycine max
  Clone ID: 701039719H1
caactcatctgcttcccctagcaaccttcttcttacttctctccgcttcttatctccaaatttgctggggcggaagcacaaccgttgactagtctcaaacttaactctcatattcttcaggagtctactgctaaagagattaatgaaaatcccgaggcaggatgggaggctgctataaatcctcgtttctccaattatacagttgaacaatttaagcgccttcttggagtcaaaccaatgcctaagaaggaacttagaagtacacctgctatatctcacccaaagacgttgaaa

SEQ ID NO: 46374 - DNA, 290 bp, Glycine max
  Clone ID: 701039720H1
tcattctgtgcctccaacttgtcattcaattccaccctgaagattgtgcttcaggtggttcaaagaagatgggctcactagaaagatcaaagaagaaagtccttctatggaagacggccatgctccatttttctctatgttttgtgatgggggttttcacaggcttggctccaacaggtaaatcttctctcttttccaccacagttagtgtcccaaatagaacagaatttgcaccacaacccagtgaaatgttacacctcacaacaaatgtcactagaagttggatagct

SEQ ID NO: 46375 - DNA, 287 bp, Glycine max
  Clone ID: 701039721H1
cgcggcacttcattgaacactaagaggctggatgatgatactgagagtctagctcatgagaaggtggcaactgaacttaagaaggctataatgcaagctaggatggacaaaaagcttactcagtctcagcttgctcaactgatcaatgagaagcctcaagtgatccaggagtatgagtcagggaaggccattccaaaccagcagataattagcaagttggaaagagctcttggagctaaactgcgtggcaaggactaagttgtaactaatgtcatggttgtgcatgt

SEQ ID NO: 46376 - DNA, 92 bp, Glycine max
  Clone ID: 701039722H1
ctgcgatccaaacagaacaggctcctcgttgactggggtaacaactcagactcttgaagtggagtggttctggtcggaacagtatgcagttc

SEQ ID NO: 46377 - DNA, 276 bp, Glycine max
  Clone ID: 701039726H1
ctagtctcatgtattctttttctcagagggatgacatagaagtgcctgatgagcccctctatcgcaaatttccttagagtaactggtcttgatagaccctacagggaggagctactctccaaaatggaagctgatggcgataaggtcactaatgacataatttttgctccaggaaagaagaaatatagattctgtaagcatatatcaaagcaacggttacaaggtttgacagatgatctgatgaagaaaggaaagcacttcattctgataagaaat

SEQ ID NO: 46378 - DNA, 278 bp, Glycine max
  Clone ID: 701039728H1
caggcgttctatatattattgcattgacaatgaggcctgctcttgctttgcttcctcttctatttgcctcctcgttagctgccactacagaatcaagaaaagatacaggggaatattggaaaatgatcatgaaagatcaggaaatgccagaaggacttcaaggtcttgtttcatttcaatctgaaaataaccctaagactcaagagcagcttggtaaaggttccaaaaaccactgtgaagagtctctagttacaaatacacaagttaatagtgacttc

SEQ ID NO: 46379 - DNA, 125 bp, Glycine max
  Clone ID: 701039686H1
gcgtaggggaatggttcctccctcagttgcttccttcctcttgtgtccacgcagttccccctttcattgtccattcaataattcaaacaccagttaatggctacccttctattccaccacaattc

SEQ ID NO: 46380 - DNA, 279 bp, Glycine max
  Clone ID: 701039729H1
aattaaaccagcaaaatcttatcttagcaatagctaaccctatcacaacaatactctattaggcaaaaacaccaaatgggagaggaaaaagagcagcctaagaatgaaaccgagaagaagcccgaggaggccgccgcagcccccaagaaagacgacggacccatccctgtcgtttacaagctcgccttgcattgcgagggatgcgtcaagaagattcaacgcacatgtcgccacttccaaggtgtggaaaccgttaaggcagatctatcgtcgaacaaa

SEQ ID NO: 46381 - DNA, 92 bp, Glycine max
  Clone ID: 701039730H1
cggaaattgtgagggacatgaaggagacactggcctacattgctctggattatgagcaggacttggaaactgccaagaccagttcagctgtt

SEQ ID NO: 46382 - DNA, 275 bp, Glycine max
  Clone ID: 701039731H1
cttgaattcacatttcaacaaccatagccatggctttctccttctccaaagcacttgtccttgcctgctccttctgcttatttgcgtctttggcttttggacgcgatttctccattgtgggctattcatcggaggacttaaagtccatggataagctcattgaactctttgaatcatggatgtcaaaacatggcaagatttaccaaagcattgaggagaagcttcttaggttcgagattttcaaggataacctaaagcacattgatgagagacac

SEQ ID NO: 46383 - DNA, 278 bp, Glycine max
  Clone ID: 701039643H1
cttctcttcttcttcttcttctacccttcaatattaatattccgagcaaaaaccaccaacaacaacatcaccaccaacaagaagaacaagattggcgttatgggtctcttcctttctaggaatttggcttgcaaattcatatacccttttcttttctccaagaaggtttccaaggatttgtttcccaagcagttggagaacatgatgtctctgatctctcctcgtactggcaggcatttgcagcgctatgacaatggctgtcgccaagttgtgggatg

SEQ ID NO: 46384 - DNA, 249 bp, Glycine max
  Clone ID: 701039644H1
aaaatatttagagagagagagggtttcatcaagtaaacactgaaactaatttttcacaaatatcgcggcaatgtcaaattatgatcttccaccaccggatactcattcggaaacatcggttccccaatggacaccacctttgccaacatatccaccaccaacgtcttatttttcatcaacatttgatgattcagattcatcttcatccacatccacctttggcatcatcgtaggagtcttggttggtgt

SEQ ID NO: 46385 - DNA, 254 bp, Glycine max
  Clone ID: 701039645H1
cgaaacgcacatttcactattcattctcgtttccctttcggtaatttccaattactagttactaatttctccatgctttcttcatcttacgcttaatccttatggtttcgtttaattgttgttctaattgctgcttgttgcagactgtgattgtttgttaactgaacttttcgagcaaaatgtctggacgtggaaaggggggcaagggtttgggaaagggaggagcgaaacgacaccgtaaggtttgcgccgat

SEQ ID NO: 46386 - DNA, 147 bp, Glycine max
  Clone ID: 701039646H1
aatttctcattctcccatttcctctcagaaccctcgatcactcccacgcgctcctatatcctctccttcaccgtcgctctctccaacgatcacaacaacatcgtcatcccatggcaaacgccgcatctggtatggcagtccatgatg

SEQ ID NO: 46387 - DNA, 121 bp, Glycine max
  Clone ID: 701039648H1
gtgatctgcagctacgatgggtaagggaacggggagtttcggtaagaggaggaacaagacccacaccctctgtgtgaggtgtggccgccgcagcttccacctccagaagagtcgttgctct

SEQ ID NO: 46388 - DNA, 268 bp, Glycine max
  Clone ID: 701039649H1
gcctttctagctagttttctgtcacacccatcaaaacatcatcatgtccatgcttagtttcctgttcattctcatgcttttaccctcatttgaagccattccttcagatgaagaagtgtgtattaatccctcagaagtccatacccaagacatgcaagccttgattgcacaagcctgcatggacattgaaaaccataactcatgcctcacaaacatccacaacgagctcaccaaaataggccctcctagttccagttcagtggttagt

SEQ ID NO: 46389 - DNA, 147 bp, Glycine max
  Clone ID: 701039650H1
cgtcatagttcaaacagtatgtgcactattctcaatacatagactcatttaagctaagcctttgccttttgtcttgatggcatacaacatagcaagttctcttatactaatattttcgatctgattccttgtaacagcaacagccat

SEQ ID NO: 46390 - DNA, 147 bp, Glycine max
  Clone ID: 701039651H1
cagagagatggcggcggagataccgagctgtggaacaaagtcgtcactgtacgttatggtgatcataggtttggtctgcttcgcgggactaatggctggtctcactctcggactcatgtcattgggactcgtcgagctcgaagttct

SEQ ID NO: 46391 - DNA, 147 bp, Glycine max
  Clone ID: 701039652H1
cagagttggaaaaagcttgccctggcgtagtttcttgcgctgatattcttacccttgcagctgaagtatcttctgttctggctcatggtccttatttgacatttcccttgggaaggagggatagtttaacagcaaatagaacccttg

SEQ ID NO: 46392 - DNA, 148 bp, Glycine max
  unsure (1)..(148): unsure at all n locations
  Clone ID: 701039653H1
agacaaatgaagtctttccatctcacagtgacagctttgtgctgtgtagtcgttgtgcttggacgtgttccactctccctagatgcacaactagatccctccttttacagagacacttgtcncagggttcactccattgttcgtgaag

SEQ ID NO: 46393 - DNA, 231 bp, Glycine max
  Clone ID: 701039654H1
ggaaagtctgaataccagaatgtcatggtcttccagtcatcaacatatgccaaggctcttgttttagatggagtaattcagctaacagaaagggatgaatgtgcctaccaagaaatgatcactcatcttcctctctgctctattccaaaccccaaaaaggttttggttatcggtggaggtgatggaggggtcatacgagaagtagcacaccattcttcagttgaaaagata

SEQ ID NO: 46394 - DNA, 146 bp, Glycine max
  Clone ID: 701039657H1
atcgtcttctagggtaaccacagcgccactcgtacaagtgcggccattcccaacgcttctcttcctttctaaggggagtctgaatcccgtgagttttcaatatgacgtcgttcttgaagcctgagaatgctctgaaaagggcggaa

SEQ ID NO: 46395 - DNA, 140 bp, Glycine max
  Clone ID: 701039658H1
gtttgcataataagaggaatgattgtgttgttcttatccttgttgaataatatatatatctccccttctctctgggacaatattgtaattctgacagggtgaagacaacttaatgggagtgtgggacggttctgattaac

SEQ ID NO: 46396 - DNA, 145 bp, Glycine max
  Clone ID: 701039659H1
cgttgctaaacattgccttgcagatgtggaacaaattttgatgggccagggtgccactaataatctgaagcaggtatgttcaattcgttcttcaaatctcactgaggcatcttgcccagtaaaaaatgtgaatgattttcatgac

SEQ ID NO: 46397 - DNA, 143 bp, Glycine max
  Clone ID: 701039660H1
aagaaggcgtcttcataaacgcctttcttctccgtgtccgtttcctcgttagaattcgctttctgatctgcgaaaatgagagagtgcatctcgatccacattggtcaggctggtatccaggtcggaaatgcttgctgggagct

SEQ ID NO: 46398 - DNA, 255 bp, Glycine max
  Clone ID: 701039661H1
ctatggacttgccattcctaaatgcctatcttgattcgttaggtttgccaaattttaggaagggatgccactttgccgcagcagctgcaactatacttccagccactgcatcatccctctgccccttctcctttggggttcaggtgtctcagttcctccgattcaaagctcgggcccttgaattgatcgctaaaggcaggaaatttgataagtacgtccctgatgaaaatgttcttgagaagggattgtacatgt

SEQ ID NO: 46399 - DNA, 222 bp, Glycine max
  Clone ID: 701039662H1
ctgaaacatggagccaatgctggacttgtaaatgcattgaaacttcttcagccgatcaaagacaaatattctggtgtgacatatgcagacttatttcagttggctggtgctacagctgtggaggaagctggaggcccaaaaatccctatgaaatatggaagagtggatgtatctggacctgaacaatgccctgaagaagggagacttccagatgctggtccc

SEQ ID NO: 46400 - DNA, 146 bp, Glycine max
  Clone ID: 701039668H1
ctctattcttggggataccatagactacatgaaagagcttttggaaaggattggtaagttgcaagaggaagagggtacaagtcagataaatcttttgggcatttcaagggaacaactcaagcctaatgaagcaatatttgatgttg

SEQ ID NO: 46401 - DNA, 138 bp, Glycine max
  unsure (1)..(138): unsure at all n locations
  Clone ID: 701039669H1
ctaaaaccataaattacaaaatccccctccattctctctctanaaacatcatgtcctccaccgcgtctcncgtcctcaccatctccaagccccaaacaaccgcgggaaccaccggtgcaggcggcggcgccatcgagg

SEQ ID NO: 46402 - DNA, 144 bp, Glycine max
  Clone ID: 701039673H1
gcgtgtgtttgtgaattgttgttgagatctgaatcaaaatcagaaacgataatggctacaccggaccacctcttcaacctccgcaacaacttctacctcggcgcttaccaagccgccatcaacagcagcgacgttgccaacctc

SEQ ID NO: 46403 - DNA, 111 bp, Glycine max
  Clone ID: 701039674H1
tggctcgtcactccttgctcttagccctcctcctcttcgccgaagtggacaccgccgcgatggcggtggctgcgtccgacgccgacgacatcctgatccgtcaggtggtgc

SEQ ID NO: 46404 - DNA, 249 bp, Glycine max
  Clone ID: 701039675H1
cacccttttccaaacccgagaaatctgattcgttcattgccattgccagggttggaaagacctcgttgatgaatcaatacgtgcacaagaagtttagtcagcaatataaggctaccattggggctgattctgtcaccaaagagcttcagattgatgacagacttgtcactctacaaatatgggacactgctgggcaagagagattccagagtctcggggttgcattttacagaggtgccgattgctgtg

SEQ ID NO: 46405 - DNA, 215 bp, Glycine max
  Clone ID: 701039676H1
cacacccccacatggatgcatacagaaagtgtgaaaatgaaagtcatggagtgggaagatgcatctgcagcttgcagatccacaaagaagtataaatgtttgattattatttagagggctctatctagttaaaattaaatagttattgtgcttttgttttattagacagttgtaaggcactgtgttctacatgtgtttgcagttgtctgcatgca

SEQ ID NO: 46406 - DNA, 153 bp, Glycine max
  Clone ID: 701039677H1
gaggagtaacaagacaagtatgtcagaatcaaacgcaattggaaatggtttggctggtgcaggtggtggaattattgctcaaatcataacttatcctcttcaaacggtaaacacgcgccagcaaactgagagaacactcaagaggaacaagca

SEQ ID NO: 46407 - DNA, 222 bp, Glycine max
  Clone ID: 701039678H1
atttcactgtttgcacctcaaacatcttagaagtcccaattgagtctcaattccacaaccattgatgcatagttcaatttcacaatctgatatttttatcactgattaccttgtaccccatgaagttccatttcaatttcaatttcaagatatgagcaagaatgacaacaacatgccaatgaaccataccgataataaccttcaaatgcctcaaatcacatc

SEQ ID NO: 46408 - DNA, 150 bp, Glycine max
  Clone ID: 701039641H1
ttagcacaggtcttttgcgaaataccatatgtgtttttccaaactgtttattactcactcatagtgtatgcaatggtgagctttgaatggaaagtggagaagttcttttggttcttctttgtcagcttcttctctttcttgtacttcaca

SEQ ID NO: 46409 - DNA, 240 bp, Glycine max
  Clone ID: 701039679H1
gcgataagcaatagaattcagagagagagagaaagagagtctcttgctctgtatctttgatttgatcattccaatcttcaatttttctatatatccatcaatccgctgagtgcaaagttctaatctttcgcctattgggttctactcctttctctcttcgtttccgatcgatccaattttcttcccatggctacgatcggacacaacaatctcaatgccaaattggttcttctcggggac

SEQ ID NO: 46410 - DNA, 144 bp, Glycine max
  Clone ID: 701039680H1
aattaagcaacacacacttcaatttatcagcatggcctccgttcagtgccacaaaacctgcaaagtgagctgccaacaggaaaaccagcacgcctcgtttgggcagaaagtttctgacttgttcaaagggcatcaacataatga

SEQ ID NO: 46411 - DNA, 111 bp, Glycine max
  Clone ID: 701039681H1
cttgctgaccctgcacaagccaaggctcctgttcaggctcattttggagagctggacaattttgttggcttttcagatgttacagcggccaaggcattggaagagaagctg

SEQ ID NO: 46412 - DNA, 260 bp, Glycine max
  Clone ID: 701039682H1
tttcattgatttctccctcttcgctctctctcagtgaccagagacagatgatgatggagatggcgaacgaaacgctgtcgttgcggcactcgcggcgttggtgctactcgcggcgagtgtggcggtggatgctcaggagaactcggacgtcaagacgctggtgaagtacaagcacgggaagaagtactgcgacaaaggatgggaatgtaagggctggtcaatttactgttgtaacctcaccattaccgattatttccaga

SEQ ID NO: 46413 - DNA, 144 bp, Glycine max
  Clone ID: 701039683H1
tcataaatgaaggttttattatcaatgtaattgtttcgagtaaaaagggtatatgcttcgttacattaccctgaaccagtattgttcgttcctttttgtttttactcctgtgtgatatagttctccattattcaaactgtgaag

SEQ ID NO: 46414 - DNA, 144 bp, Glycine max
  Clone ID: 701039685H1
atgctttcctacactatggtgagctccacctacaatatccctgtaatccctgatccatcagtgccttatcaaaagggtacctgccctatagatgcacttaagttgggtgtgtgtgccaatgtgttgaacttggtcaatgttaaa

SEQ ID NO: 46415 - DNA, 127 bp, Glycine max
  Clone ID: 701039602H1
gagagatggaaaaatgaagctgatagaatcgacgtgcttcgtgagaacgacggacgtggtgcagcagcgagatctataagatcattgaagcgaaaaaataaaagctgttatgcaaatgaatctaaag

SEQ ID NO: 46416 - DNA, 259 bp, Glycine max
  Clone ID: 701039603H1
gtggaagtggggagaaagatgagcgaggggatgagctccatgagtttcaagctcaaggagttcttccagcctgggcccaatcaggccgacaagcttgtggaggacgctacttccgaggccctggacgagcccgaatgggccctcaatctcgatctctgcgacctcgtcaacaccgacaagctcaactgcgtcgaactcgtccgcggaatcaagaagcggatcattctcaagagccctagggttcagtacctcgcccttg

SEQ ID NO: 46417 - DNA, 168 bp, Glycine max
  Clone ID: 701039604H1
gttcggctcgagggccaggcaagccccactcaaccaccacacctctcctcgttcacgctacccctttctgctcttcttctacctttcaagttttaaaagtataaagatggcagagacattcctatttacctcagagtcggtgaacgagggacaccctgacaagctctg

SEQ ID NO: 46418 - DNA, 156 bp, Glycine max
  Clone ID: 701039606H1
aaccaacttcacctttccttccttccttccttcttccgatttcgaagatggctgaagcagaggatgccgtacgacgccgtaatgcggtcgccgagtatcgaaagaaacttctccagcacaaggaattggaatccagagtccgatccgtcagggaga

SEQ ID NO: 46419 - DNA, 159 bp, Glycine max
  Clone ID: 701039608H1
cctcgagccgaatcggctcgaggtgcccaaccgtgattgcccatcacatgctcagttcctagcatacatatgttcacgctgatgatggtactccgttactcatcaagaacgcaatctgtgtctttgaacaatatggcagcatcatgtggcgtcacaccg

SEQ ID NO: 46420 - DNA, 155 bp, Glycine max
  Clone ID: 701039609H1
catttgaagattaaagaataatgggttgttacagagttcagcttgtggcaataatctcgttcatgcttttgctttcaaatacccacggttggggagatgatgggcatgccattgtttgtaagatagctcaggctcgcctcagcactgcagctgca

SEQ ID NO: 46421 - DNA, 155 bp, Glycine max
  Clone ID: 701039610H1
aaacaaagcagcacccatttggatcctctcttctcttctttgatctccgttaccctttttgttttctcaacagagagagagagagagaatctttcgaagttcgtttgcgtgtgttgtgtggtcagtcaccgatggcagcaccacctgcgagggca

SEQ ID NO: 46422 - DNA, 258 bp, Glycine max
  Clone ID: 701039611H1
gggcactccgaggcaacttcacactccttttaatctttcatcctatctttgtattgttgaaccctccattctctgcaacattcttcgattcaattgctcttgtgaaattcctcctttattagcggctaaaccctaaatcagaactttggtgtggtgtgttgacttaattgagtgtagaaatagaataatggtgaaagcatatacacaggaacacgtctacaagcacccttgggaacgtgtaacttgtgcatcttggcg

SEQ ID NO: 46423 - DNA, 223 bp, Glycine max
  Clone ID: 701039612H1
tagtaattaacctcactcaaactcgggatcacagaaaccaacaacagttcttgcactgaggtttcacgatgttgctggaacttgcacttggtttgtttgtgttagctttgtttctgcacttgcgtcccacaccaagtgcaaaaccaaaagcacttcgccacctcccaaaccctccaagcccaaagcctcgtcttcccttaatgggcaaccttaacctctaaaa

SEQ ID NO: 46424 - DNA, 247 bp, Glycine max
  Clone ID: 701039613H1
gttttccgcacaactctttcacctcttgttttccccaatccttttcgcctttgtctgcgaatggcgtcgttcgatcaggcacctcccggcgatgtcaaatccggtgacaaaatcttcaggaccaagtgcgctcagtgccacaccgtcgaaaaaggtgccggtcacaagcaaggacccaatctgaatggtttgtttggaaggcaatctggcacaactcccggatattcctactcttcagctaacaaga

SEQ ID NO: 46425 - DNA, 286 bp, Glycine max
  Clone ID: 701039615H1
acaaaatgtatcgcgttcttcaccgcgctttctgcaccgccaccgagcccgccaccaacgccaccgtcaccgtttccatcaagtccatttcggaggatctgtacaaggaagtgaagctaaagaatgtggtggagaagttcaagaaagcctcggacatcgaccgcttccgcaaaaaaaccggcatctacgaagacaccgtccgccgcctcgccggcgcccgacgcttccggtggatccgcgacatcctcgagcaccagaagcagtactccgacatctccaacgaggg

SEQ ID NO: 46426 - DNA, 187 bp, Glycine max
  unsure (1)..(187): unsure at all n locations
  Clone ID: 701039616H1
gtgatctgcagctacgatgggtaagggaacggggcgtttcggtaagaggaggaacaagacccacaccctctgtgtgaggtgtggccgccgcagcttccacctccagaagagtcgttgctctgcgtgcgcttaccccgctgcgcgcaccaggaaatataactggagcgtgaaggccattnagagaaac

SEQ ID NO: 46427 - DNA, 155 bp, Glycine max
  Clone ID: 701039617H1
ggggtttcatctccttcagtggctgcaagctcagactcgtctcccaatgaggaaaccaaagagaaaaatgtggatgtcaaagatggtgagactgattcctcgttccctaaacctcttgtgactgttaacatcgagccggagccgaatgtggtgca

SEQ ID NO: 46428 - DNA, 181 bp, Glycine max
  Clone ID: 701039618H1
ctctttcccactctttcaaatgcatcatcatcgttctgctaacaacgcttccgctgctgctgccggcggactggcgctgatcccagacttcgccgccaccaccattacatccttcataaggacagggctccggacatctccaactttttggctgatgcttctcccagttcccccgctcagc

SEQ ID NO: 46429 - DNA, 284 bp, Glycine max
  Clone ID: 701039619H1
ctcgagccgctaaacaatgagcaaacagcaacagagttttgccgcgacggcggcggcgaaacggggtccttctccaccgagtagcgaccagattaaaaaaaaacgacgggaaactccgacaaccatactgtccctggaccccgacatcgtcaccaccatcttcgctttcctcgacatgttcgatctcgttcgctgctccctcgtttgtaaactctggaatgccatcgttgagtcccggtcgctgcgagaattctgtgagaggaagatgcacagtcttttgctga

SEQ ID NO: 46430 - DNA, 111 bp, Glycine max
  Clone ID: 701039620H1
aaacgatccaaactcttttttcatttgcagcatcaaaatgagtggtagcaacgatggtagcggcagctggagctctaggtttttgaaggtggctagtgcagctgccgctac

SEQ ID NO: 46431 - DNA, 262 bp, Glycine max
  Clone ID: 701039621H1
cctctcttcttcccttgctctgtgtcgccgtaacacaaaaaagggacgagagagaaagaaccacccatccaacagcttttgttcttaacaagacaaagcttcgcgtgtgtttgggtttcttctcatccttccagcttggaaggattgaagtttctgtctttttctgatctccgtgtgcgtggtttggttttgttgttgaagatgttggtagctaatagctttgatctatggcgaaaggacgcttttttctctggggcggaaa

SEQ ID NO: 46432 - DNA, 154 bp, Glycine max
  Clone ID: 701039623H1
caacaaccatggggtgttggtacatggttaaaggaaattaaagacactactaaagaaggatatagttttgaagagctatgcatcaagaaagaagccattgagggagaagagaagttttgtgcaaaatccttgggaacagtaattggttttgcca

SEQ ID NO: 46433 - DNA, 207 bp, Glycine max
  Clone ID: 701039625H1
ctctcacccagatcttgtagcaatggcgagcgctcccactccacgcgaagagttcgtgtacatggcgaactggcggacaggccgagcgctacgaggagatggtggagttcatggagaaggtctccgcctccgccgagagcgaggagctgaccgtggaggagcgtaacctcctctccgtcgcctacaagaacgtgatcggcgctcgcc

SEQ ID NO: 46434 - DNA, 151 bp, Glycine max
  Clone ID: 701039626H1
ctgcaatgtaatgtcttgctattgctatatcttttctttctcatagatagatttagatctataaactcccttcgttgctgaacgcggttaaggttatgatttatgaatgcgatctaattaaggcacaatgacaaggagacaagcaagttcc

SEQ ID NO: 46435 - DNA, 118 bp, Glycine max
  Clone ID: 701039627H1
cctcgagccgaatcggctcgagttccttctaaaaattgctttaacactggataaaacatttgccagccagtgtgctaaggagctacgaagaagaaaagaagttgaagaacaattggca

SEQ ID NO: 46436 - DNA, 215 bp, Glycine max
  Clone ID: 701039628H1
aatgggcctaggacgtaaagcaaaccaggtgtacatcattgactatggccttgcaaaaaaatatagggatcttcagactcataggcacataccatacagggaaaacaagaaccttacaggcacagcccggtatgcaagtgtcaacacccatcttggaattgaacaaagcagaagggatgatctggaatctcttggttatgtgctcatgtacttct

SEQ ID NO: 46437 - DNA, 119 bp, Glycine max
  Clone ID: 701039629H1
cagcttgctgcaagcttccccggcaatgctcaaggggtgagattcagtggcaaagcttctgctccagcggaggctgatccctgcgaaaccggatgcttctgctgctgaagatgatgatg

SEQ ID NO: 46438 - DNA, 153 bp, Glycine max
  Clone ID: 701039630H1
gccttgctttcttcttcacttcaaacttgccaatctcgaagatggcaatagaattggcatctcccaattgggttccatccgcagccgcatgtttggcagccttggccgccctcctcctcttcctcctccgcggtctccgccgccgtaaataca

SEQ ID NO: 46439 - DNA, 289 bp, Glycine max
  Clone ID: 701039601H1
ctatggacttgccattcctaaatgcctatcttgattcgttaggtttgccaaattttaggaagggatgcaactttgccgcagcagctgcaactatacttccagccactgcatcatccctctgccccttctcctttggggttcaggtgtctcagttcctccgattcaaagctcgggcccttgaattgatcgctaaaggcaggaaatttgataagtacgtccctgatgaaaatgtttttgagaagggattgtacatgtttgatattggccagaatgatcttgctggagcatt

SEQ ID NO: 46440 - DNA, 245 bp, Glycine max
  Clone ID: 701039631H1
cacaaactcgctgcttattttgatttgaactttgaagttttgttattttgtgcaatggcagccaagagcaaaatcctagtccttggaggaacaggatacattggaaaattcatagttaaggcaagcgcagaagcaggacaccccacttttgtcttagttagagagagcaccctttctcatcctgaaaaatctaaacttattgagagcttcaagacctccggagttactcttctttatggtgatct

SEQ ID NO: 46441 - DNA, 154 bp, Glycine max
  Clone ID: 701039633H1
caaaagttagggtgtgtgttcgtgaaaaggaaatggcgcgattcagcgagagattgacattgataagttgattgagggtgagattcaatgagaagtttaaactgatgagttgactgagggtgagattcaaacttcattcgtgattccgaagaag

SEQ ID NO: 46442 - DNA, 281 bp, Glycine max
  Clone ID: 701039635H1
ttatgaagtcatacaaattgtcagagctgagtgatgctgagcttcgcagcctcatcgctcgccctcgcattgatttctcttcggttttcgctctggtcaaccctatcgttgaccacgttcgcgaaacacgcgatgctgctgtcaaagaatacacattgagattcgacaaagctgaattggataacatcgttgaacttgtctccgaccttcctgatccacaactcgatgcgcatgttaaggaagcttttgatgtcgcctacaacaatatatatgcctttcat

SEQ ID NO: 46443 - DNA, 151 bp, Glycine max
  Clone ID: 701039636H1
atccatgtttcctctgggaaactagtccctggactatcatggaattactatttgttgacatgtcccaagcttgagaggattataaggacgcatcttgaggatgtcttcgagaaggacagtggagtagctcctggcatacttcgactcttct

SEQ ID NO: 46444 - DNA, 151 bp, Glycine max
  Clone ID: 701039637H1
ggcagtaaggtgagtcaaaatcaatcatgaagccatggtaaatgtgaagtaacccccatgattttagacacatcatggtgacactggttttgaggtagccaccatgattttaaaagatattcaaacatgattttaaaagatattcaaacat

SEQ ID NO: 46445 - DNA, 150 bp, Glycine max
  Clone ID: 701039638H1
caccaccctttttcctcattctcttcctcactaaaacatcactctttttttcatttcaccaaacaaaacagtaacaccacacagccatgacagacagggtgtacccatcggccaagcccgccgcggttaacggcgccgccgccaacccat

SEQ ID NO: 46446 - DNA, 267 bp, Glycine max
  Clone ID: 701039566H1
tttctacgtctgattccaaaacaacccttcttttgctcttccacgtcttcaccttttcgatctcttctgcaacccaattccacgccccttctttcctccctccatttttgatccattgtttctcacacgggcactaccttgggttctgtgcctgattctacttccacgtgctgggggaagtgcaaaattttgttctttagctccaactagaagtgggttttcgctgtggcttctataatctcaacatcgctgctaccataataggtt

SEQ ID NO: 46447 - DNA, 288 bp, Glycine max
  Clone ID: 701039567H1
accgaataaggattttctggttttgttgttggtgggtttcagcgttccgcttcaacttcaaattctcagtgaaaccaattcagttcagtccaaatcccaaatccgaagtgagatttgcgatggagaggcttcagcgaatgttcgcaggtgcaggtggagctctagggcaccctcccccagattccccaactctcgattcctccgagcaggtctacatctcctcactcgctctcctcaagatgctgaagcacggaagggctggggttcgcatggaagtgatgggtttga

SEQ ID NO: 46448 - DNA, 287 bp, Glycine max
  Clone ID: 701039568H1
caacaacatagtcactgccaccaccatgaattcacaacactcatcacgtgacatttccttaatacaaaaccagttacatgatttacatccttccacagtgagcatggtaaccacggacacgtgtcacacatcaaacgtgcttcaagggtttgggaatttttccatggccagtgacttggcctgtgtgaatcagcagcaacaaatagatgggtcaatgcgggttttttatggattggaaaccatggacgtggcaacaaatggtagcacaaacactagtacttcaacag

SEQ ID NO: 46449 - DNA, 284 bp, Glycine max
  unsure (1)..(284): unsure at all n locations
  Clone ID: 701039569H1
gcttccctgcattgccaagaagattccacattggtttctgccacattcttcaacacagctacgaatacacncaatctggtcatcctccattaagatggctgcagaagactacacttttgggccttacaagatacaccacactgaagtgttctactccaccaatctctcttacgccatggttaacctgcgtcctcttcttcctggtcatgtgctcatctgtccaaagcgtgaagttaagcgtttcggtgatctcactgctgatgagacttctgatttatggctca

SEQ ID NO: 46450 - DNA, 273 bp, Glycine max
  Clone ID: 701039570H1
gaaatactcttgtgaccaaccaaggtctcttatttctacacataggaggaggagagaagaattgtttctatttcaaagattcagcaaattaaggagcagaaaaaagtcacatattttgttgttgaattcatcaatatggctaagggaatcagaaacctaagttcgtggatggaggttgccccggcaccaataattttcccaacaaagccttctaattcgcctgctttggagaccatcacagaagaagttgctgaggatgatgaagcttccatg

SEQ ID NO: 46451 - DNA, 277 bp, Glycine max
  unsure (1)..(277): unsure at all n locations
  Clone ID: 701039571H1
tcgagcataccactttcctttccccattaattaagcacttagtaacagtctaattccacccgcaacaacatgcctnattttgtttgtttgttttatccaccctcactctcactctcactctcactcacacacagccacatagggacgaaacgatacgatccatggcgatgatgatgcacactgcgcaccctcacctcactaattaacactaatcgttacttaaatcagttaaaacgaggcatcagaataagtgcaagtgccagatctcgatctcgat

SEQ ID NO: 46452 - DNA, 281 bp, Glycine max
  Clone ID: 701039572H1
ccatattcaaacaaacatgatagcctttctactctttctactaactagtcttggtctagtaatcaatgcatcaacctttagtgcttgttcgaattgtggagactttgtagtcccatacccactcagcactaacgaggactgtggagacaataggtacaaagtctactgcaacgatggaaatttagagttcttgtcagcaacagggacttactataagatccttagaattgacccaagtgctaacaagcttgtcattagcccacctcctatactgcaaaaca

SEQ ID NO: 46453 - DNA, 278 bp, Glycine max
  Clone ID: 701039573H1
ccgattccttcgtgcgtgcgattcttctgatattccaaggcgacgcaccgacaccggacccatctccggcgacatctcaccgatctccggcgaatccccggtccccactttcttccctcgaaatgaatcccgagtatgattatctgttcaagctccttcttattggagactctggtgttggtaaatcatgccttcttctgagatttgctgatgattcgtacatcgagagctacataagcaccattggagttgattttaaaatacgtactgttgagcag

SEQ ID NO: 46454 - DNA, 276 bp, Glycine max
  Clone ID: 701039574H1
gaagaagaagatggctttaggtgttcctgctcttccgttgacatacgtggctcacgttctggcagttgttgccagcgtcttggtcgtggtctgggtcgtcaatttcaggggtggcttggcttgggattctgataacaagtccctcatcttcaacattcatccagttcttattgttattggcttactagttcatgggggtgaagctattataagttacaaagcttttcccctaaagaaggaagtgaagaaattgataccccttgttttccatgccac

SEQ ID NO: 46455 - DNA, 270 bp, Glycine max
  Clone ID: 701039575H1
gttccatacatagcaagaaaaacacactcacacacagtgcttgtttagactagtgatcttccatggctgtgaaggatagaatcctggtcttgggacccacaggagccattggaaggcacatagtttgggcaagtttaaaggcagggaatcccacttttatattggttagggacacccctgcctctgttaacaagccaaggcttgtcactgctgctaatcctgagaccagggaagaactcattcagagcttccaaaattctggagttactc

SEQ ID NO: 46456 - DNA, 139 bp, Glycine max
  Clone ID: 701039576H1
ctcggctcttgcatcgatgaagaacgtagcgaaatgcgatacttggtgtgaattgcagaatcccgtgaaccatcgagtctttgaacgcaagttgcgcccgaagccattaggccgagggcacgcctgcctgggtgtcaca

SEQ ID NO: 46457 - DNA, 142 bp, Glycine max
  Clone ID: 701039577H1
ctcagtagtgcgattttcgattctcttctctgcaactatgcctaaccctaaggtcttcttcgacatgaccatcgcgcggtcaacctgccggccgcatcgtgatggagctctatgccgacgtgactcccagcaccgccgagaa

SEQ ID NO: 46458 - DNA, 242 bp, Glycine max
  Clone ID: 701039578H1
cggctcgaggacttttggcagcaagataaatggagtgggagcttccctgtaaagtggtacatcataaaagatgtgtcaaatgcaaattttaggcacattatactagagaacaatgagaacaaacctgttactaatagcagagacacacaagagataatgtatagtaaaggtttggaaatgcttaaaatattcaaaaaccatccgttgaagacatctttgcttgatgactttatatattatga

SEQ ID NO: 46459 - DNA, 152 bp, Glycine max
  Clone ID: 701039579H1
agaatattgaacgaggcagtgagcttcgttgctttctgcgtgctcgaccttgacgattttcttctatgttttgttttcaaagctgtggatttgtgggttgacgcagagttcagaccctgctattgttcctcggcgaaggcaccaataacgag

SEQ ID NO: 46460 - DNA, 287 bp, Glycine max
  Clone ID: 701039581H1
ctttgtttgtggtgttccagatttgccagaaaacaatcccccacaagtcattgaggagccacaggctgctactgctactgctataagtcggagctgtggcagcagcagctcctgctcaactagcaatggtggtgctacttgtaatagtaacagtagtagtagtgtgtttgcgagtttgtttgcttcttcaacagcatctgtgaccctacaatctcaaacaccagcattcagtgacttgattagagccatggggcctccggaacaccctgcggatcaaatctcgggtc

SEQ ID NO: 46461 - DNA, 284 bp, Glycine max
  Clone ID: 701039582H1
ctctgtttctgttccaattcacagagaacaatgcaaatttctcttagcaatttagccttcaagacccctcaactcttcccaatacaccaccccattttccctccaaagccaccactgaaccaccaagtttcaacgcagagccatgtcaacaatgtcctgaaaggttcgtcggggtatttgtccgaaatcagcaaagtgattgatcacgaagaacagtaccgggtagcccggtcgcaggttagccgtaaagttttggacttggaaggttattccatagagggtct

SEQ ID NO: 46462 - DNA, 285 bp, Glycine max
  Clone ID: 701039583H1
gctccatagctgcagcattagggtttttcatctgcttcaatggggaagggaacagggagttttggtaagagaaggaacaagactcacactctctgtgtgaggtgtggccgccgcagcttccatctccagaagagtcgttgcgccgcttgtgctttccccgccgcacgcactaggaaatataactggagcgtcaaggcaatccgcagaaagaccaccggaactggcaggatgaggtacttgacgtaacgtgcctcgccgattcaagagtggcttcagagaaggtac

SEQ ID NO: 46463 - DNA, 273 bp, Glycine max
  Clone ID: 701039584H1
gtgggagaggcagaaagaagagaaaaaaggggaatggcatggttgcagttgcagagaatcgtgaccaagggaggtgctaatttgatctcaccactcccactttcacgattcttctcgaaatcttcttccccctatgttgtgaaagttggaattccagagtttctaaacgggattgggaagggggttgagtcccacgttcctaagcttgaatccgaaatcggtgatttccagcaagttctcctcactcgcagcctcaaactcaagaagcttggc

SEQ ID NO: 46464 - DNA, 280 bp, Glycine max
  Clone ID: 701039585H1
atcaaatcttctttctttttcttccgcagtcccaaccttcctggattctcactcacacatcattgcttggggctctggtgaagatggtcagctaggaatcggaagcaacgaagagaaagaatgggtctgcctcgtcaaatccctccagccccaccgtattcgctccgtcgtcgccggcagcagaaactccctcgccatcgctgacgacggcaaattgttcacttggggttggaaccaaagggccacacttgggcaccctgctgagaccaagtctgagaac

SEQ ID NO: 46465 - DNA, 275 bp, Glycine max
  Clone ID: 701039587H1
ttcaacaacccttcttttgatctgtgcaagtgatcttgaaaggagggaacaacaatggtgaagtctataaactttctcctacttctgtctctactagcctttgctcccttatgtcactgtaaaaagcaaataggaggttacctctaccctcaattctacgacggttcatgccccagagctcaagagattgtccaatccatcgttgccaaggcagtggcaaaagaaccccgcatggctgcttcgttgctcagactacatttccatgattgttttgt

SEQ ID NO: 46466 - DNA, 258 bp, Glycine max
  Clone ID: 701039589H1
tataagagacaaatgggagacacaaaggacatacctacgaacaaacccgcggcaaaatggcctctcatcaaacccaaaaagaatcttcagattagacgcctccgagatttcgatctcttcacggaccagaattttttctcctgcgctgaatcaaaggcattcgttaaaattgctcaagaaattggctttactcatcaggggagtctaggtccaacttatggcgaagattcagagataatgatcgaatgttggtggatg

SEQ ID NO: 46467 - DNA, 259 bp, Glycine max
  Clone ID: 701039590H1
tgatttcttgcttctatatattacttgcttcttttcttgatcatgtcccttgctggtaaaatcagctctgaaattggtgttcaggcaaccgctgcaaagtggttcaacctcttcacaacacaacttcatcacgttcaaaatcttactgatagaattcatggaaccgagctgcatcatggtgaagactggcatcacaatgagtcggtcaagcactggacttataccatagatggcaaggttacaacttgcaaggagagta

SEQ ID NO: 46468 - DNA, 132 bp, Glycine max
  Clone ID: 701039591H1
cttaacgccatcaccacctttggcttcctttaaaaatgtattttttcactgagaaaatgcacagtttgaagatgggcttccctgactacatccaaacattggaagacgaacgccgtaagattcaggtgttct

SEQ ID NO: 46469 - DNA, 234 bp, Glycine max
  Clone ID: 701039592H1
cgaagaagaagatggctttaggtgttcctgctcttccgttgacatacgtggctcacgttctggcagttgttgccagcgtcttggtcgtggtctgggtcgtcaatttcaggggtggcttggcttgggattctgataacaagtccctcatcttcaacattcatccagttcttattgttattggcttactagttcatgggggtgaagctattataagttacaaagcttttcccctaa

SEQ ID NO: 46470 - DNA, 118 bp, Glycine max
  Clone ID: 701039596H1
gtcgagctgagaataccagttgctccagtagccggcactaaacaacatggcggacaaggcagtcaccatccgaaccaggaagtttatgacaaacaggcttctctccagaaagcagttc

SEQ ID NO: 46471 - DNA, 281 bp, Glycine max
  Clone ID: 701039565H1
agtctatcatagtcagaattgagaacaatcgttggtgtggaacgtgacaatggtggcgacgaacgtgaaggcagaaaccatgtctctgatggacaagcgcaggcacttggaggctgagatgaactccatcatcgcccgcctctcgcagccaggcgctcctggcctctccggaaatctcgtcgattccgaggattctcgccattccgatatcgacgtccccgttgttcgagccgaacgacgtcgcctggcagagctgcgcagcgaccacaacgaagtaactg

SEQ ID NO: 46472 - DNA, 295 bp, Glycine max
  Clone ID: 701039534H1
ctccattgtccattctttcattccaagaaatcgagaattcaactgttctcggattggtaccagctggtgcatctttttttcttcaatttgttttttcggaattctttttggttcctagattttatcaggagaagctgaattttccgggaaaatttgcgttgttttctcttccttgcgaccttcgccgccggctgctactgattcgtcaacggcaactcctacgaggtgttttgcctgatttgttgatcctgcggagaaggtgcttggaatagagggaagggaaaagacagaggga

SEQ ID NO: 46473 - DNA, 287 bp, Glycine max
  Clone ID: 701039536H1
atcatttccagcattgactacaaagttgaatctcccatccagcttgcttcccgccattgatatttcttacattcaagagaaatatgcaggtggcaatgcaccgtcttttgtgaagaataataacagcatctcatcaaagcatcaattaataaatgatacattgaagatatgggttccatcaaatccaagaggtgcagaaagattacctcctgagattattgaagctgagacggacttatatttgcgtagattgtggggtcagcccagtgaggatttaacatcaaagc

SEQ ID NO: 46474 - DNA, 234 bp, Glycine max
  Clone ID: 701039538H1
cagaaccaaaccaccaccaccattataatacactccctgcaaaccctagaaacccaataatttgggggaacctcaacccaatcccagaaaccgaaatcggcctcgcaatttaacgaaaccgaggaagagaaatcgtgggcacccttcaaaattcgagatttccccgacaaaatgtcccaactgaagccaatgtcgcatatagacagtgccccttcgacccgagggaagttcaag

SEQ ID NO: 46475 - DNA, 290 bp, Glycine max
  Clone ID: 701039539H1
ccttaagctcccgtagttaaatctgcgagccattagttaaagataaaaaaaccctaaaaagtttaagatgggttccaaaactcgctctttccttgctcttttcctcacgatcaacattccctttcttgcccttgcctctgcctgcgggacatgccctagccctaagccaaggcataataagcactagcctgttaagccaagtcgttcaggtggctcaggtggttcgggtggctcaagaggctctggtggttcaggtggctctggtggttcgggtggttcaggtggctcgg

SEQ ID NO: 46476 - DNA, 141 bp, Glycine max
  Clone ID: 701039540H1
attttatggctctcggctttactttcagcaagtaaattgattttctttccactttatgggaacttaaatttctgtttaaaagggtctttcaataaacttgtttatgtactccctccgtttcataatatttgttgtgtaaaa

SEQ ID NO: 46477 - DNA, 284 bp, Glycine max
  Clone ID: 701039541H1
atcattttatcgcgtccttgagagatgaagtgcggatattgaaagacttgcctcccagactcaagatgaaagtggaacgcggctttctttacaccatgccacctattagttggtctgatatatcttactataaggaccagattctacccttgatacaaaagtacaaagttgttcacttaaatagaactgatgctcggttggccaataatggtcaaccgatagagattcagaagctgcgttgccgggtcaattttagtggtctgagatttacttcccagatagag

SEQ ID NO: 46478 - DNA, 283 bp, Glycine max
  Clone ID: 701039542H1
gtttcctctctacatggcagtgcccagaaaacaaacttagaatagagagaacatcaagcaagaacagtgttagcataactctccaagaagttgctgatatatctatcaatgttgtgcctgtgactaaggaagatagtagaatccataattaccaaattcctgatgatgattgctttgctcacttggaggtgcagttcaaattccatggtttgtctaacaaagttgaaggggttcttggaaagacttatcagcgagattttcagaaccctgcaaatttgggagt

SEQ ID NO: 46479 - DNA, 135 bp, Glycine max
  Clone ID: 701039544H1
ggctcgagggctggaagttctgccagtctaacagaaatctcaaactacagaggactcctccttcaaggctggaaaactttctgttgagcaaaggaaagaaaagatcaatagatacatgaagaaaagaaatgaaag

SEQ ID NO: 46480 - DNA, 229 bp, Glycine max
  Clone ID: 701039545H1
caacggtcatgaacggcggcgctgaggcctccgtcaatcacaggcgcagacaccaagcagcttccgctaacggcgttaagatagcaaacggggccatggcgaacgctcctcgacgctctgctacgacgcctcgttcatgaaatggaccgttgcggatgctgtccacgtggcgacgcatcattgggatgccgtgcttattcgcattagggcttctcttcttcatggccgt

SEQ ID NO: 46481 - DNA, 267 bp, Glycine max
  Clone ID: 701039546H1
cttggaaggggttgttaatgtagacaaaaatggtgctacacatgtgaggatggaagttatgcatcaaacatgtgctcaacaaggggtgaatgaccttcaaatacgggaaaatggagaggcatatgaaagtcaatcgcaagatgacttacccagcagcactagtatacctgattctttgtctattgagaggtcttgtactccacctgcatcaatggaagtttcacagcaaaagcactacggggaagaaatttaacatcggggtgtgat

SEQ ID NO: 46482 - DNA, 278 bp, Glycine max
  Clone ID: 701039547H1
ctcggatgttgttgttgtcgtcgtcgtgttcttaggttttgttctgagacgcagtttttcattcttctaatggcccagtccttcggtcagaccgagatcaactgggacaagctagataaaactagattctatgtcgtaggagctggactctttacaggtgtttcggtggcactttatcccgtttctgttgtgaaaactaggctgcaggttgccacaaaggatgctgtagagagaaatgtgttttctgttgcaaaaggactacttaaaacagacggcat

SEQ ID NO: 46483 - DNA, 146 bp, Glycine max
  Clone ID: 701039548H1
tttgtataatgaggagtgctagcaacacactcctcctaacacacaccctatcattgcttgaaatttattgaaaattacaaaatcatgagagagggacattaaagatgatgtaggacccactatcttttataatttccaagaagaga

SEQ ID NO: 46484 - DNA, 294 bp, Glycine max
  unsure (1)..(294): unsure at all n locations
  Clone ID: 701039549H1
acgaacctcaacaaacacaaataccgtctcccatcattccttacagtttcaaacacttgtacttcttctctcttctccttttgtttctgtgtggatctacacccactaagatgttacccctattctgaaaatggaaaacaatcatagtgcagctggaacacaagatagttctatgatgaagtctgttgatcaaagagtacgttcanaagcgcgtaatgacataatgactcgacgtctgaagaatcgagagagacaacgaagatatagggcacgtaagcgtctagaagccgaaac

SEQ ID NO: 46485 - DNA, 293 bp, Glycine max
  Clone ID: 701039550H1
gaaatgcaatgggaccactgaggaggtaaagaagattgttactactttgaatgaggctaaagtccctggagaagatgtcgtagaagttgttgtgagccctccttttgtgttccttcctgttgtaaaaagtttgctgcgccctgatttccatgtttcggcacaaaactgttgggttcgcaaaggtggtgcttataccggtgaggttagtgctgaaatgcttgttaatttgggaattccttgggttattattggtcactctgaacggaggcagcttttaaatgaatcaaatgagt

SEQ ID NO: 46486 - DNA, 291 bp, Glycine max
  Clone ID: 701039551H1
ccgagctttagacagcgtcgttgaggccatgaaggaggatgagaagagtgttttatctgttcttggtcggagcaatattgctgctttggttcaattgcttacagctacctctcccaggataagggagaaaacagttactgttataagctcgcttgcagaatccggtagctgcgaaaattggctagtttctgaaggagttctgccacctcttataaggcttgttgaatctggcagcacggtggggaaggaaaaggccacaatatcccttcagaggttgtcgatgtcagccga

SEQ ID NO: 46487 - DNA, 287 bp, Glycine max
  Clone ID: 701039552H1
ctaatgttcagcaagggcctcaggttgacaaaagcaatttgaaaaaattctttcctacatcgagcatggaaaaagagaaggggccacccttttgacagggggcaaaagagtgggtaacaagggttactacattgagccaacaattttctctaatgttaaggaggacatgcttatagcacaagatgaaatattcggtcccgtgatagcactgatgaagtttaagacaattgaggaagcaattagaagtgctaccaacagcagatatggcctagtagcaggtgttgtga

SEQ ID NO: 46488 - DNA, 287 bp, Glycine max
  Clone ID: 701039553H1
cggctcgagattcttcctgattgcacaactgttgtttacaacacagcaaaggttggttacggctggctgaaaaagatgactcctgtaaacagtgcatttgcttggcagtcatacaatgaagaacctgcctcatccagtcaagctgattccattgcagcatatgcactttgggagcaggtcaacgtgacccgcgattcttcagattatttgtggtatatgacagatgtcaacgttaatgctaatgaaggatttctaaagaatggacaatctcctcttctaactgtaat

SEQ ID NO: 46489 - DNA, 262 bp, Glycine max
  Clone ID: 701039554H1
cgtctttctcttctgttaatactcttcttccatgatgcaccatccaactgattttctcctccaacccaatttcactcgtggggtatctgcttccctcaacctagttttgctacttatgcttgttgtgtattgggtatggaagaaagtgcaagtggacaatagtgagaatagtgagagaggaggattccataatagctgctctcttgaaatacaaacacagtctggtttgtagcttagttatttgtgtgttcaaccttttgtt

SEQ ID NO: 46490 - DNA, 287 bp, Glycine max
  Clone ID: 701039555H1
ggaagacactggttttctatcagggaagagctcctaggggatgcaagaccgattgggtcatgaatgagtaccgtttacctgacaattgcaaactacctaaggaaatcgtgttatgcaagatatatcgaaaggcaacttcgttgaaagtgctggagcaaagggcagcactagaggaagagagagagatgaagcaaatggttggttcccctgcttctccttcctccacggacaccatgtcctttagcagcccacaggaagagcaaaacatgcccttgccattgttgcaa

SEQ ID NO: 46491 - DNA, 284 bp, Glycine max
  unsure (1)..(284): unsure at all n locations
  Clone ID: 701039556H1
gaacctggttactatgatcccggagagtctnggataagattggagaatgtgcttattgtcaaagagcgtggtacaaatcccaattttggtgatagaggttacttatcttttgaacacattacctgggcaccatatcagaccaagttgattgacctgaaccttctatgtcctgaggagatagattggctgaactcgtatcactccacatgcagagatattctagcgccatatttgaatgaagttgaaaatgcatggctgaaaaaagccactgaacccgtaggtgc

SEQ ID NO: 46492 - DNA, 252 bp, Glycine max
  Clone ID: 701039557H1
gcttgcaatatggacatgaattcctcaggtggtgcctgcggttggctttatgattatggctttgatatccctgttgctggttctgacttcatggcttcagactctggtggtttcagttgggggccccagagttacaacttcaagggtccttcaaatatgagcttggaaatggaatactcactggattcaactgtcatggaaaatggtccttcaaagcggttaaggactgaatcatgtgcatctggctccaag

SEQ ID NO: 46493 - DNA, 118 bp, Glycine max
  Clone ID: 701039559H1
caagtcacttgtagcagctctcgatgcaggcattggactgggtacaccgtgccgtttgtaacaatttattgattactgtaaatccaaggtgtttactgtctgtagtaacgtttatgtt

SEQ ID NO: 46494 - DNA, 132 bp, Glycine max
  Clone ID: 701039561H1
gagaatctgaaatttcatttctctctgtataaatatcctagtccttatcagcttcactatttcgattgaacatcgccgaagaaggtattgacgtcgatgatgaaaatgaaattggtgaaaacattactgctt

SEQ ID NO: 46495 - DNA, 149 bp, Glycine max
  Clone ID: 701039562H1
gcgaaaccaagacaaaagtggcatccttgttgttcgcttcaaattcaatgttctacagaggtaaatttgccgatggtggtgatgggcgtgaaatggctgcaaaacgccagcgcactgttgatccaggatcttcattctatggtgcttcc

SEQ ID NO: 46496 - DNA, 294 bp, Glycine max
  Clone ID: 701039533H1
aaaagctcagagagagagaatggggaaaagacaaatcccagaccctccgaactttaagaaatacggcgttcctttctactccgttgcgtggattctccaacacgttgtcaaatcgcgccaaatcgaaaccgccgatgagtcctcggactccgatcacagcacttcgccggcgaccgaggcggagaaggaacccgcgacggtcgccggtaactacctgctgttcgccggcgggacggagcaggccacagcggtatccccaatgctttggttattgcgcacttcgatgtcgcgtcg

SEQ ID NO: 46497 - DNA, 142 bp, Glycine max
  Clone ID: 701039563H1
ctaatgcctcactcttgttcttcagtctcctcctattatccgccaccgtagccgccgccgaacggatcgacgatgaagacgaccttctgatccgtcaagtggtgccggatgcggaggaccaccacctgctcaacgcggagac

SEQ ID NO: 46498 - DNA, 62 bp, Glycine max
  Clone ID: 701039486H1
ctcagtttgtacatgagagccagtttcagatttgggatacagctaagttctttttttttttt

SEQ ID NO: 46499 - DNA, 266 bp, Glycine max
  Clone ID: 701039487H1
cctcactctctcactctctcaggagtatataatctgagcgatgtcagatctcgaggctcccttgcgccctaagaggaagaaggtttgggtggactattttgttcagtttcgatggatccttgttatttttgtcgtccttcccatctccttcaccatttatttccttacataccttggggatgtaagatccgagtggaagtcctataagacgcgtcagaaggaacatgatgagaatgtgaagaaggttatcaaacgtctcaaacaga

SEQ ID NO: 46500 - DNA, 266 bp, Glycine max
  Clone ID: 701039488H1
cgacaagaagcgccacgtcataaccacgcaaacggagcacaagtgcgtcctcgattcctgccgccacctccagcaggagggtttcgatgtcacttatcttcccgttgagtccgacgggttgattgatttggatgagcttcgggcttcgattaggcctgacaccgggctcgtttcggttatggcggtgaacaatgaaattggagtggttcagcccatggaggaaattgggaggatttgcaaggagtttaatgtgcctttccacactg

SEQ ID NO: 46501 - DNA, 79 bp, Glycine max
  Clone ID: 701039489H1
ggcacttggatgtctcctttttcgcatatgctacttcaaaagtagttttgatggggaatcaaagctccaagtcttaaat

SEQ ID NO: 46502 - DNA, 260 bp, Glycine max
  Clone ID: 701039492H1
tcgcaacacaacaaaaaaagacaacccagagagcgcgtcttaataaacgctcttctctgaaaacccccatttcttttcttctttcttcttctctttcgcttcttcgatcttcgatcttcgtcgctgaaaatgagagagtgcatttcaatccacatcggccaggccgggattcaggttggaaacgcctgctgggagctttactgcctcgaacacggcattcagcctgatgggcagatgccaagtgacaagaccgttggtgg

SEQ ID NO: 46503 - DNA, 259 bp, Glycine max
  Clone ID: 701039493H1
aattgatatgctgtttggttgctcaggaattcgtgatcaggtatatcactgttaaaaaaaatacatgatgcttgttgcctctctttttgtttcgtctttggatttattaggctttgattattcttatgtgaattaacttcataagaacaattttgtccataaaagaagaaagttgtaacagctaacaagttcagtggagaacccaaaagcgtgtatttatgggttagcgtttgcgaatttgattttgggtgaagaattg

SEQ ID NO: 46504 - DNA, 78 bp, Glycine max
  Clone ID: 701039494H1
ctcgagccgctgtctccatctaccacttggctttcacgtttaccttcgcagcgctctttgatctctgaaccctaattt

SEQ ID NO: 46505 - DNA, 262 bp, Glycine max
  Clone ID: 701039495H1
gacgcgagataaaattgggggaagacatgggtatgggggcattgggaaggaatattcataagcaaaatatgttatttcttccctacacctcccataccactgtttttcctctatttctcccccttcccttgctttctgctgcctttccacatctcaaccttccttctcatctcataatcgtaatggtaatgatatccctcttcttttattttttctttcactaaacatataggtttctgcatgctctctctattatgtggga

SEQ ID NO: 46506 - DNA, 301 bp, Glycine max
  Clone ID: 701039502H1
taccaatcatctttagttcttcagtaatttattgtgggattctattctaagattttgagaatgtctagctgtgggtgtggaagcagctgcaactgtggcagcaactgcggttgcaacaagtactcttttgacttgagttacgttgagaagacaaccacagagactctagttttgggtgttgggcctgtgaaggccaattggagggtgctgaaatgggtgttgcatctgagaacggtggctgcaactgtggatcaagctgcacctgtgacccatgcaactgcaagtaaggtcaagatgtata

SEQ ID NO: 46507 - DNA, 307 bp, Glycine max
  Clone ID: 701039503H1
actcgagccgaatcggctcgaggcgctcgagctcttctcctaagcactagcacttaactagacctattaattagcatttgacagagagacaccgagtataaacataccccagtttaagatggcttcaaaaacttgttcctcccttgcccttttcctcacactcaacctcatctttcttctcacttgtttctgcatgcggttatacaccatgccctggtccaaacccaaagccaaggcccaaccccaaccctaaccctaaccctagcccaagtggctcctagccccgtgatgcactcaaactaggtgt

SEQ ID NO: 46508 - DNA, 299 bp, Glycine max
  Clone ID: 701039504H1
gatattcgccataggcagaaaacaatacaagatgaagagcgagttcctttttgttttcctattcttgggaattcttaactgtgaagcacaatatttcaatgctaacccatacgactatttacaactagccttaaggtggcctaattcctattgcttgacacatgaaggtggttgcagggaaatagtaccacaatatttcactattagctaccttcatcccatgagaagaggaggcccggatctgcaaaattgcccctcaccatttaatatgccaaatagcactgttagtatatctcctg

SEQ ID NO: 46509 - DNA, 299 bp, Glycine max
  Clone ID: 701039507H1
actcgagccgattcggctcgagagaaaacacagtgagactactcaacctgtagcacaacccacataaggaagaggctgctcacagagagaccggctaggacccttttggggtggaaggataagaatcaagttgaggatgattcaccaatatttaggaacaaagagatgctagtggtcagttgatgtaggcgcatcaattacaggtaccggcatttgatgttgaatttggtcacacttttgcctcattgtaagaaggataacaaagttgaatcaaaggacactaaaggagtcatcctcaa

SEQ ID NO: 46510 - DNA, 268 bp, Glycine max
  Clone ID: 701039510H1
gcatcgcttcgctccctacccttgggctagggttttacttgtgcgtcttctccgaaagcaagctagggtttgtccgtgtggcagaatgggaaggtatcgaagccggagcaggagctatagcccccggcggcgaacacggagcccaccggcaccgcgcggacggaaccgctatgtcgacgatcgctacggtgacagcaggtcttacagagaccgccgctcacctcttccttccggcttgcttgttcgcaatcttccccttgatgccagg

SEQ ID NO: 46511 - DNA, 154 bp, Glycine max
  Clone ID: 701039512H1
caaacgttcaaatccctacctgggacgcggacggaggaggagcactctccccgtcgatctcttccaatgctgacacgtgctcattattctcctccgaccatttccgaatgttccagttcaaggtgcggaactgtccacgtgtcaggtcccacga

SEQ ID NO: 46512 - DNA, 237 bp, Glycine max
  Clone ID: 701039513H1
gaacagaactgagagaagcaagtgaaaccctcaatcacctaggctaaaatcgtctcgtcttcattccttttttttccggtttatagaattgaaaagatttcattgataattgagcaaacacaatgagtgctccacctcatcatgatgatgacgacgacaacgaagaagttttccttgatgagtctgacatcatccatgaagttgccatggataatgaagatcttcctgacgctgatg

SEQ ID NO: 46513 - DNA, 290 bp, Glycine max
  Clone ID: 701039515H1
actcgagccgaatcggctcgagtgtaactcgttcttcttcttttgactcttctgtgtttgtgcttgttttttctctcacctcgaaaatgtcttgctgcggtggtaactgtggttgcggaagctcctgcaagtgcggcaacggctgcggaggctgcaagatgtacccagacttgagctacactgagtcaaccaccaccgagaccttggtcatgggagtggcacctgttaaggctcaatttgagggtgctgaaatgggtgtgcccgctgagaacgatggctgcaaatccccc

SEQ ID NO: 46514 - DNA, 154 bp, Glycine max
  Clone ID: 701039516H1
cgcacattctcgcatcccatcgccacgagttgaacgcaacgctctaaacacaaaataaaaggtgggcaaaccaatagaaatgtccttctgtgttgtgatcttcgaacaagcgtgagctcaaacacacaacaacacctgcttctggttcagacaa

SEQ ID NO: 46515 - DNA, 298 bp, Glycine max
  Clone ID: 701039518H1
gacacatttggtgccttgtagagcgtgttttggcaggaaggtggtatggcgaaggacgttgaggttgctgagcgtggctccttctctgggaaggactaccaggaccctccaccagcaccactcattgatgctgaggagctcacaaagtggtccttttacagggctctcattgctgaattcattgccactttgctcttcctctacattactgtgctcacagtcatagggtacaagcaccagactgacctcaaggaaaatggtgaaatctgtggtggggttggcattcttggcattgcat

SEQ ID NO: 46516 - DNA, 287 bp, Glycine max
  Clone ID: 701039519H1
tagagaccgtggttacggtggtgatggtggttctcgctactctcgcggtggggaaggcggtggatccgatggaaactggagaaattaggcatatgaccctgtaaattagggtttatgattaagttcaattattttaaggtgttgtctgtgtgtggtttaagtttcggtatctgtgttggtttcgtttcgtgttcctgtggttttcgtttttgacctacaattctagttgtgtttatagtcgatcgaatgaaatgatagtaagaaattatcgcatcaaatttctatgg

SEQ ID NO: 46517 - DNA, 300 bp, Glycine max
  Clone ID: 701039520H1
tgcgcatccaatcccttcactgttgttttcccccaattcccagtcccacatagcttagaacttacgatctacaattttacaaatacaaatacccttctccctcgctcaaaacacaaacaagctcgcttcttgcttctctcatcaacaacatgcagatcttcgtcaagactttgaccggcaagaccatcaccctcgatgtcgagagcagcgacaccatcgacaacgtcaaggccaagatccaggacaaggaaggtatccctcctgaccagcagaggttgatttttgctggtaagcagctgg

SEQ ID NO: 46518 - DNA, 293 bp, Glycine max
  Clone ID: 701039523H1
caggaattgcgtttctgcacgacaaggttaagccacaagttgtgcatcgagatatacgtgctagcaatgttctgctggatgaggagtttggagcacagcttatgggtgttggtctgtccaagtttgtgccatatgaggtaatgcacgagaggactgtgatggcaggtggaacttatggatatcttgccccggagtttgtgtacagaaatgagctcacaacaaagagtgatgtgtatagttttggtgtgctactacttgaaattgtaagtggacgtagacctgcacaggcagtg

SEQ ID NO: 46519 - DNA, 141 bp, Glycine max
  Clone ID: 701039527H1
gcgaagttgaaaaaccaaaacccttggcgagtgaagccctactcactagactacacacttcgcaatggcggttgttgctcaaacccctgacatcgccggcgagcggcagtccggccaatacgttcgcacccaaaacgttgt

SEQ ID NO: 46520 - DNA, 236 bp, Glycine max
  Clone ID: 701039528H1
gcacttcttacggcactcagcattgcttttctgaatgacagctttgcaggtacctttagtgagaaggtaacaagaacagttaggcaattttcaccacatttagctgccaaaatgagacctcctctcacgcctgttattcgtggacgtccatcatccaagagagcaatttatatatgtggccggccgcgttgggtatttgtcttgatatttccttctgcaagtttctttctttggtt

SEQ ID NO: 46521 - DNA, 249 bp, Glycine max
  Clone ID: 701039529H1
ggattatgggacctaattatgtccctggggagaaaaaggatttgtatgttaaaagtgtgcaacgaactgtcatttggatgggaaagaggcaagaaactgtagaggatgtcccctgtggtaatacagtggctatggttggtcttgaccagttcatcacaaagaatgcaacattgacaaatgagaaggaagtcgatgcccaccctatccgagctatgaagttttctgtctcacctgttgttcgtgttgctg

SEQ ID NO: 46522 - DNA, 264 bp, Glycine max
  Clone ID: 701039485H1
aagtgcagttagtgccacacttgcacggactgcacctgtggccattaaggaatatgtatgaaaatgtaattgccatgtgtttggcaatacaaatatccaaataatgtaatcttcgtatgaataaatgtgtgtgctgttatcctacttcaggtctgtgtagtcatgcagtctgaatcatttcaagttcctgtcttagttaatataacagccatggttgtggcattctatggtttattagactaaaataagtgtaaatctccgttc

SEQ ID NO: 46523 - DNA, 197 bp, Glycine max
  Clone ID: 701039530H1
atcttttccaaaacaccaaaaatgcctgcgacaacagagaacaacaaccaaggctcattcctgggtcgaataagcatccgcagaaaccaagtgatgtccatggacggaagccacgaccaagagatggaagacctggagcttttccagaagcacatcggagaccgcttctcggagctcttatcctccacctccgaaga

SEQ ID NO: 46524 - DNA, 140 bp, Glycine max
  Clone ID: 701039532H1
gttacttgccaacaatgcactgctgtctggtgaaattccaaaattcagtcaacatgttgaagttgtatattctgggactggtctgataaataatacttcacctgacaacccaatagccaacaggcccaacactgtctcta

SEQ ID NO: 46525 - DNA, 277 bp, Glycine max
  Clone ID: 701039450H1
gagacagggagacaagacagagtagtacagattactaccaatggctaccaaggtttacattgtttattattctacgtatggacatgttgagaagctagctagagagatagaaaaaggggctgcttctgtggagggagtagaagcaaaactgtggcaggtacctgaaacattgcctgaagaagtccttgctaagttgggagcacctccaaagagtgatgttccaattattactcccaatgagcttcctgaggctgatggctttttgtttggttttccc

SEQ ID NO: 46526 - DNA, 272 bp, Glycine max
  Clone ID: 701039451H1
cacattggtttattttgaaaccctaaagtttgcccccttacacgttttttgtcttcttttttctcccatctttgtttcgagaagcatttgacgaagagaagagacagtgaatcgcggtttcaattcaacccacttcatctcaggtgtttgaagttgagataaaaatgagcggaacagagaaagcaggatcaggaaccaccaaaacccccgccgatttcctcaaatccattcgtgggaggccggttgtcgtcaagctcaattctggtgttgat

SEQ ID NO: 46527 - DNA, 266 bp, Glycine max
  Clone ID: 701039455H1
cggctcgagggagattcatctctgcaggttgttttagaaaagaaaaaatggtgaagatttgctgcattggtgctggatatgtggggggtccaacaatggcagtcattgctctgaagtgcccctccattgaagtggctgttgttgacatctccaaatcccggattgcagcatggaacagtgaccagcttcctatctatgagccaggccttgatggtgtggtgaagcaatgtcgtggcaagaaccttttcttcagcactgatgttgag

SEQ ID NO: 46528 - DNA, 269 bp, Glycine max
  Clone ID: 701039456H1
ggactttgaagcagaagaaacatagagtttacagagagaaagaaaatgttcaaacattaccggtggccccggttagtggttcataaacctttctctaagcttccgactctctctctcttacggggtctttgcagtccgtggaagagcttgttgggttatctcagctttcacctttccaggctctgattcaaagaaaaatctcaacttccttcagcaattcatctctacaatttctggatagtgtcttttttttagcaagaatggctcaa

SEQ ID NO: 46529 - DNA, 265 bp, Glycine max
  Clone ID: 701039458H1
aaggtattcaaaattgggaggttttcgtttgaattgtgatgtccaagccactgctaggcataggggaggaggaaggtcaaagcaatgtcactttgttggtttcttcctcagtcatcatggaaagtgtgtgcctgaatagctcaaaattgaaagagcgcaactacatggggttatctgattgttcatctgtggacagctccgcgccgtccttctcagatgagactatcactaatctgaaccttaaggctactgagctgagactggg

SEQ ID NO: 46530 - DNA, 263 bp, Glycine max
  Clone ID: 701039459H1
attctcactcgtcgtcttcgtctgcgccctaaccaaattcaattcaaactcttctcatcaaaatccaaggctcgttcttgaaaccctaattcgatatcctcctcctcagaagaagaaggatcgatgtgggcagcttcttgcctggcgtcatgctgcgcggcctgcgcatgcgacgcctgcaggaccgtcgtatcgggaatcagccgccgttccgccaggatcgcctactgcggcctcgtcgccttctctctcgtcgtcgcctg

SEQ ID NO: 46531 - DNA, 259 bp, Glycine max
  Clone ID: 701039462H1
gttagttctcctgttgttgttgtagcgctgattgaggtagcgctgattcgatcgcatcagaacattcattcacattcatatcctctctctccgatcccaatggcggatgagagccccaaaccagagaccttcgaactcaacaatggaagcatgcaggtcctcctcaccaatctcggctgcaccatcatctccttatccgtacctggaaaagatggtgtgttatctgtcgttgttcttggccttgaatctgttgaatcct

SEQ ID NO: 46532 - DNA, 260 bp, Glycine max
  Clone ID: 701039463H1
cttgcatcggctggaggaggctaaaaagtatgatcacaggattttgggtgtgaaacaggagcttattcttcatcatgaatggagcccgggaagctggttttttcttccgcaaggcactcggatctacaacaaactcatggacttcattcggaatcagtacagagacaggggctatcaagaggtcatatctcccaatgtatttaacatggaactgtgggtgcaatctggtcatgctgcaaattatagggaggatatgttta

SEQ ID NO: 46533 - DNA, 142 bp, Glycine max
  Clone ID: 701039464H1
gtaattcttcggctcgagctcggaatcagccgagaaatcgcgcttcacctcgcctcactcggcgcgcgactcgtcgtcaactacacctccaactcggcccaagccgagtcagtcgcggcgcagatcaacgccggttccgcca

SEQ ID NO: 46534 - DNA, 277 bp, Glycine max
  Clone ID: 701039465H1
ctcttgaggaactgcacaagagtttggtctcaaacgggaagcatctagcaattgccaatcctcgttggcaagtgatttatacgctaaaggcgaccaactttgtcacaagaattggaggaagggtcttcttgactattggagaagtattgactgcaagctggatttctgaattgctacggattgaaccgagtgttgtacctctgtctttgttaatagaactcgtgtgtggaaataagatcttagcttttcatggctggtttgaattggaatgttgtaa

SEQ ID NO: 46535 - DNA, 263 bp, Glycine max
  Clone ID: 701039466H1
gtttgggaacctagtttggcaaacatttcaagaatcagagtcttttaccactctcaggtttagcattattatctgaaatggcatcggtgtctagtcagcaacagttccgttacacgcagccaccgtcaaaggttcttcatttgagaaatttgccgtgggagtgtacagaggaggaactagttgagcttgggaagccattgggaaattgtgaacacaaagtgcacgttggagcaaatcgtaatcagctttatggtttgcagttt

SEQ ID NO: 46536 - DNA, 274 bp, Glycine max
  Clone ID: 701039467H1
ttttcacttcccaaaatcctcacctttcctcgcagttttgctcgaaaaaaccctttgtttgttctttcatgggctcattctgggagcgccatgagcaaacgcaacactttctttcacaatctcatcaagcccttcaaattcagccccagcaaagagggacaaagcgaagtagaagaaataaagaacctagctgcacaagagcaaaagatcttcccctacgaaacattggttgctgctaccaacaaatttcacattcttgacaagctaggtgagg

SEQ ID NO: 46537 - DNA, 272 bp, Glycine max
  Clone ID: 701039468H1
cggttttccaattcgcagagcaactcaacacaacgaaccaaaccaacaatgtcgcagccgcagcctcagtcgcagccgcaacacgggcaagctgcgctggagcaggtgcagtgcttcggtcgcaagaagacggcggtggccgtgacctactgcaagctcgggcgcggcctcatcaagatcaacggctgccccatcgagctcgtcgagccggagatcgtccgctttaaggccttcgagcccatcctcctgttgggaaacagccgcttcgccgg

SEQ ID NO: 46538 - DNA, 267 bp, Glycine max
  Clone ID: 701039470H1
cgcaaacttcaacttgtaatcaagggagacagaaaatttcaagcacaaaaaatggcggagaagaaagtggtgatcctaggaggtggtgttgccggtgccaaccttgcaaaaactatacaacatcaagccaacgtcacccttattgatccgaaggaatattttgagattccatgggcaagtttgacgggattggttgagccaacttttgctgaaaggatagtaatcaaccatagagagtacttcaaaaagggtaaccttgttgtatcc

SEQ ID NO: 46539 - DNA, 76 bp, Glycine max
  Clone ID: 701039471H1
attcaatcacgccctctcttcccttcccttggcgcaatgaattccaacttcaatttcgatttcgctctcggcatcg

SEQ ID NO: 46540 - DNA, 266 bp, Glycine max
  Clone ID: 701039473H1
ctcaccgattgctagaatggaatttcgatgctcagtcatctcttttaccattctcttctctcttgctcttgcaggagagagccatgtccatgcatcgctacctgaggaagattattgggaagctgtttggccaaacactcccattcccactgcactgcgagagcttctaaagcctctccctgcaggtgttgaaatcgatgaactccctaagcaaattgatgatacacagtacccaaaaacattcttctataaagaagaccttcatc

SEQ ID NO: 46541 - DNA, 262 bp, Glycine max
  Clone ID: 701039474H1
gcactcgcggcgttggtgctactcgcggcgagtgtggcggtggatgctcaggagaactcggacgtgaagacgctggtgaagtacaagcacgggcagaagtactgcgacaaaggatgggaatgtaagggctggtcaatttactgttgtaacctcaccattaccgattatttccagacctaccagttcgagaatctgttctccaagcggaactcgccggtcgcgcacgcggtcggattttgggactaccagtccttcatcgccg

SEQ ID NO: 46542 - DNA, 263 bp, Glycine max
  Clone ID: 701039475H1
ctttcatcattcatcgcctttcaccacgcacgcagatcctttatctcctataatccttccttcgctctctccaaatttcgactctttcgatcagatccgcgacacccaccccaccaaaaccttgcgcaacccatccatgacgcttggctcaggaggatccagtgtcgttgttcctaggaacttcagattgctggaggagcttgaacgtggtgaaaaaggaattggagatggcacagttagctatggaatggatgatggtgatg

SEQ ID NO: 46543 - DNA, 256 bp, Glycine max
  Clone ID: 701039477H1
cgacgggcaatacgacgcgtacgcaggggacatatggagctttggggttagcatactggagttctacatgggaaggttccccttcgcggttgggaggcagggcgattgggccagtctcatgtgcgccatttgtatgtctcagcctcccgaggctcctccttctggttcccctcacttcaaggacttcatcttgcgctgtcttcagcgcgatccctctcgccgctggtctgcttccaggttgctcgaacaccccttc

SEQ ID NO: 46544 - DNA, 260 bp, Glycine max
  Clone ID: 701039478H1
gttttctggcacacaagaaaagtgtgccacatgtggcaaaactgcttatccattagagaaggtaacagtggaagggcaggcctatcacaaatcatgtttcaagtgttcacatggtggatgtcccataacgccatcgaattatgcagcccttgagggcattttgtattgcaagcaccacttctcccagctttttaaggagaaagggagctataatcatcttactaagtctgcatcagtcaaacgggcagccgcagccacag

SEQ ID NO: 46545 - DNA, 258 bp, Glycine max
  Clone ID: 701039479H1
ccggtgactgccgtgctctgctgagaaccgtagaagaacctcaagaccacgctgaactcacctcccactccaacttctccgaatccaccgaaccggttctcaacctcatctgcaccgcttgctccaaaccctgccgatccaaaaccgagagtgatttgcacacgaaaagaaccggccataccgagttcgttgacaagacttccgaggccgttaaaccgattagtttggaggctccgaagtggatgcaactgcttcatc

SEQ ID NO: 46546 - DNA, 259 bp, Glycine max
  Clone ID: 701039480H1
gcttcatcttgagatctgtttgaaggacttgcaggacgatttcatgggtggagctgagattatcaaatctgaccctgttgtgtcattcagggagactgttttggagagatcatgtcgcaccgtgatgagcaaatcacccaacaagcacaaccgtctgtacatggaagcaagaccattggaggaaggtcttgctgaggccattgatgatggcaagattggaccaagggatgaccccaaggttcgttccaagatcttgtct

SEQ ID NO: 46547 - DNA, 275 bp, Glycine max
  Clone ID: 701039482H1
aaacagtaccgaaacctcaaagaaagcacacatcattagaagtgactttacaaagaaattcaaaagcaaagcaagaatcatgaattccaatatttgcaattggaaacaaaatcaggttcttcccacagaggaagcaaagggggatgacacttacctctcagctttgacactatgcttcagccgaattttccctgcaatcttgaacgctgctgttgatctgaatttgtttgatatcatagccaaggcagagagttcatctttgtcagcctcggaaa

SEQ ID NO: 46548 - DNA, 271 bp, Glycine max
  Clone ID: 701039483H1
aaacagtaccgaaacctcaaagaaagcacacatcattagaagtgaatttacaaagaaattcaaaagcaaagcaagaatcatgaattccaatatttgcaattggaaacaaaatcaggttcttcccacagaggaagcaaagggggatgacacttacctctcagctttgacactatgcttcagccgaattttccctgcaatcttgaacgctgctgttgatctgaatttgtttgatatcatagccaaggcagagagttcatctttgtcagcctcg

SEQ ID NO: 46549 - DNA, 261 bp, Glycine max
  Clone ID: 701039448H1
cagagaggtgttggtgccctaatcgtgagaagaaaggacacggaaaagaggaaaatggtgtgcataaggaaggcgacggtgaaggaccttctggcgatgcaggcgtgcaacctgttctgcctccctgagaactaccagatgaagtactacctctatcacatcctctcctggccccagctcctctacgtcgccgaagactacaacggccgcatcgtcggctacgtcctcgccaagatggaggaagaaaccaccgactgccac

SEQ ID NO: 46550 - DNA, 80 bp, Glycine max
  Clone ID: 701039484H1
cactttgaaaagagagagagagagagagagagagagagagagagagagagagagagagagagagagagagagagactctc

SEQ ID NO: 46551 - DNA, 265 bp, Glycine max
  Clone ID: 701039413H1
cttctaaataaggctggtgcagctcttgaaaagtacaagatgacatgcagttgttgcaaatgaacttgcaagtcgaaaggagcaagtagtggttgtcactagtgccgagaaggttaccgttcagcgtgataatagtcagtctgataatgatgttgagaatcccctgattaaacttctttcggagaaacatgccacttacattgagtgattctggtagatgagtctagggaatgactttggcttctcctcgttacagttacagttc

SEQ ID NO: 46552 - DNA, 262 bp, Glycine max
  Clone ID: 701039414H1
cttacaatgtcactcctaatcaaccaactccaaaggatcctacatggctatccgatagtgaccaaatcggtgtcctaggtcatgtagccattgtctacatatacgaagcaaatcccaacagcaacaccattgagagattgaggaactctcttagcaagcttttggtgtactactatccattcgctggcagattcagcttgacaaaaagtggtcgcatagaagtggattgtaacgcaaagggagtgacattgattgaagctaa

SEQ ID NO: 46553 - DNA, 264 bp, Glycine max
  Clone ID: 701039415H1
gcagaatttgtccaaggaggaattcgtacatatactgcgtcgccaaagtactggtttctcaagaggaagctctaaataccgaggagtaacactccacaagtgtggccggtgggaagctcgaatgggacaatttcttggcaaaaaggcttatgacaaggcagctatcaaatgcaacggaagggaagcagtgaccaactttgagccaagtacttatgaaggagagctgaaatctgcagccattaatgaaggaggcagtcagaatct

SEQ ID NO: 46554 - DNA, 138 bp, Glycine max
  Clone ID: 701039418H1
caacagtgctgtgttttttatttgtattttttctcatttgatgcacaaaaaaagcaaactcttaaggagaaagaagcgaaaaaaagtgctccttttcgacacccagatttcagtttcagtgattgtgggacttggaaa

SEQ ID NO: 46555 - DNA, 266 bp, Glycine max
  Clone ID: 701039420H1
gagtaccaatttgcgccccttgtgtgttttgttactgtttgtctctttgtgtcgcctggtcttggcatgtccgcagcaccacccactcctggaccaggtcttcaacagagagaaagagaaggaaaaacacacacacacacacacacacacgttaaactgacattttttattagtgagaagacatggctcaacccagttccaacggggatctgactaataaccagcagggtcaggttcagcaacagcagcagcagtgggcggcggcg

SEQ ID NO: 46556 - DNA, 268 bp, Glycine max
  Clone ID: 701039422H1
ctttgtctctcttccaaaacctaattttcattttttctcttcaaacaaattttcaaaatgcgtgagctccttcacatccagggtggccaatgcggcaaccagatcggcgccaagttctgggaggtggtttgcgcggacacgggatcgaccccactggaaggtacggtggggactcagagcttcagctcgagaggatcaatgtctactacaacgaagccagctgcggccggttcgtgccgcgcgccgttctcatggacctcgaaccggg

SEQ ID NO: 46557 - DNA, 271 bp, Glycine max
  Clone ID: 701039423H1
cggaaacataaagggtttttacagacagaagaaaaccaccgccaccaaaaaatcttccaaaaaatctccgattcccgccgcggcccaatcaccggccctcatatcccacggcggaaaacccgacctagaagatgagtacaaggagagcgaggtggcgctgcggcaattcgacctgaacatggcgtacggaccttgcctcgggatgacgcggctcgcgcggtgggagcgcgctcagaggctcggcttgaaccctccgcaggaaatcgatagg

SEQ ID NO: 46558 - DNA, 271 bp, Glycine max
  Clone ID: 701039424H1
caaattttcaagctctgccctcccgagcagctggtaactcattacaagattggaaccttcaaatttggtgatgttgatgactttctactgaagatagctacagttaggggcaagctcaagaagggtggaatagttgacattaatgctgctgcaagaatcgttcttcatgattggaatgaaggtaaaattatatattataccattcccccaaatagggatcaaggggaacctgcagaggttaagatagtttctgagttttcaaaggagttta

SEQ ID NO: 46559 - DNA, 269 bp, Glycine max
  Clone ID: 701039425H1
tcgaaatttttggattcgtcgattccgggatgcatgggattcatgcactcacaagaaagccgtggctcttggcatcttcgggcttgtatggaatttatcatcagttgttgctcgcatttgggcagtgttcgtactatttgcagccttcagatattatcaacaacattatttggtgagagatgaatggggggaagatgaagcaggatgtgatgaaacatggcaagaccctgttggagttagaccgaaacaaggacctgcaaccaacttta

SEQ ID NO: 46560 - DNA, 268 bp, Glycine max
  Clone ID: 701039426H1
gcaatttgcaaagtgaactctcttctgttagtgacagtgaagaaactctctgttgaagaattcacgcgctcagatttcgatttttctgaatgtggcaccttctcttactcgttgccgtggccggatccaccggtttcgccaccaaacgtttccttactcaccacagaaacaccggtgagggtgaaaacgtcaacctccacgatccaaatgagttagacttttccggttccgaaagcatttctcagacacatcacagtgacggggtctt

SEQ ID NO: 46561 - DNA, 265 bp, Glycine max
  Clone ID: 701039427H1
ctttcttctctctgttttccttcttcctcgcatcaatggagttggacggcgttctcctcggcatgtgcaaccctctcctcgagatctctgccgtcgtcgacgacgctttcttggaaaaatacggtatcaagttgaacgatgcgattctcgccgaggataaacacaaacctatgtatgaagaattggctaacaatcctaatgtggagtacattgctggaggtgctactcagaattcaatcagggttgctcagtggatgcttcaagc

SEQ ID NO: 46562 - DNA, 259 bp, Glycine max
  Clone ID: 701039428H1
aacgctgctaattaattattagtttcacttcaatgactcaaagggatcgtcgcaccctatcattcccggcggttcacccatgcgaaccattatctccgccgacacttgtcacgtctctaatcagtctctcccaatccatatgcagtttccaaccccaatcattccccacccaacgaaggacgtccagggaaacaatacgccaaataagcattgtcttaatgttccttcaagagattcgagtaatccccaactccagtat

SEQ ID NO: 46563 - DNA, 264 bp, Glycine max
  Clone ID: 701039429H1
tcgcactggaagcagttgtaaaggaaggaccacagaggctagcaaggcggggcaaggcatgccgggaatatgctgccaaaatgtttacagcaagaaagatggcattagcatacgagaggttattcctatgtataaaagatcgctcattctgcacctatccttgaagcttaggttagaatagaaactctttaatacaactttctttcttccatttatttttctgttatttcagtatgataaaatcatatttaaatttttaaacaa

SEQ ID NO: 46564 - DNA, 263 bp, Glycine max
  Clone ID: 701039430H1
cgcagtttccattgctaaggaggaagccacaaaattggggacggtcatcgggattgatcttggaacgacctattcatgtgttggtgtttacaagaacggccatgttgaaatcatagccaatgatcaaggtaaccgtatcaccccatcgtgggttgctttcaccgacagtcagagactaattggagacgctgccaataatctggcagctgtcaacccagaaaggaccatcattgatgtcaagagacttattggaagaaagttcg

SEQ ID NO: 46565 - DNA, 265 bp, Glycine max
  Clone ID: 701039431H1
tacaacggcgaagacgaagacaacgacgaggatttagatccttatggtggcttgttggacgacgaacagaagaagattctggagattaaagaacaactggaggagcctgatcagtctgaagattgctttggtggagctgctgcaaagcctcgcggacatggatataacattccaagggttaaaggagactgacatcgggaggcacgtgaatcggttacggaagcatccttcaaacgaccttcggcgattggtgaagttgcttgtc

SEQ ID NO: 46566 - DNA, 264 bp, Glycine max
  Clone ID: 701039432H1
tagcctgatggtggttaattgaattaaacacatctacaccatattctttgcagctgatggattgtggacttgaagagcttattgcactagtggcctaggggggttgagcttgtatagtataacatacacatatatgaaaaggatcagggttgagcctgtgacatttggctttatgtgcaccccaaagctaggagaaagagacttcaaactaggtcgtccccaggcattgataagcaagcaggtgctccttgttcatctctcctt

SEQ ID NO: 46567 - DNA, 183 bp, Glycine max
  Clone ID: 701039434H1
cacgtcaatctccccgtcttaattgacctttcctcaatctttcactcttttgtgtcaggtcgaatatgcaacctcaatttagccagattaacatctctgttacatggaggggaaagacatttgttgtcgagatgaatataggagccaatgtgaaggatctagggcaggaattgcaaaagttaa

SEQ ID NO: 46568 - DNA, 273 bp, Glycine max
  Clone ID: 701039435H1
acaagaggaagcactgtgttcgacttcgtcaaaagcatcatgagccgctacgacagccggtccggcgacctagcttcctatcgtgatcggaggagtgattctgggctaggtgcacctacagggtttggtggttctgtacaacactcttcatcaaacaggagggattatgatgatggtgggtcaccaaagaggaacctcagtttggatggtttacctcattttgagaaaagcttctacattgagtcaccagctgtaagggcaatgacaggtgct

SEQ ID NO: 46569 - DNA, 134 bp, Glycine max
  Clone ID: 701039436H1
ctctgaagcatcaccgtcaccatgaatacgcaaaccacaagcccggtgatcaaagaagaagaataaaaggaggaaggaacaaaggaagtggttcaagaagaagaagaagcgtctcacccttacgcatttcatgt

SEQ ID NO: 46570 - DNA, 268 bp, Glycine max
  Clone ID: 701039437H1
aagatggagaagtatcagatctggagcaggagaatagcgttggcagcgtttgcctttggtctgctgttccaatcggcctcagcagacgacgtcgttgtgctctctgaagataacttcgagaaggaagttggtcaggacagaggagctctcgttgagttctatgctccttggtgtggacactgcaaaaagcttgctccagaatatgaaaagcttggtagcagcttcaagaaagccagatctgttttaattggcaaggttgactgtgatg

SEQ ID NO: 46571 - DNA, 77 bp, Glycine max
  Clone ID: 701039439H1
atcaaatcataggcagtttttaggtcgttaaatctctgagttggacagacagtgatgacctcaaatcatatcatttg

SEQ ID NO: 46572 - DNA, 268 bp, Glycine max
  Clone ID: 701039440H1
gtttcgctctctcagtttcttttccccaaattgtttttcatctaacaatttactttgcagaactctaaccctagccccttcgcctatcttgtaaccttcctttcgatccttcttctcgcagacaatgggtgaaactaaggacgaagcatacgaggaagagcttctcgattacgaggaggaagacgacaaggcccccgactccgccggagctaaagtcaacggcgaagctaccaagaagggctatgttggaattcacagttcgggattt

SEQ ID NO: 46573 - DNA, 266 bp, Glycine max
  Clone ID: 701039442H1
gcttccattgtgctcactcatctcttacaacgaaaccctcttcatcttgttctatctgtgacgagcatcatggcctcaagagcagtgttattgttggctatgtgtgtgcttccggcgatggttgtggccattcgcccagcaaagaaccctttttgcgtgaagggtcgtgtctactgtgacccttgccgtgctggttttgagacctcagctaccacctacattgctggtgctgagattatgttgcaatgcaagagcagggttagcaa

SEQ ID NO: 46574 - DNA, 77 bp, Glycine max
  Clone ID: 701039446H1
gctgtttgtctcttaggaaacacgctctaccggctctaagtcgtacaagaacccatgccctccccagccggtcccaa

SEQ ID NO: 46575 - DNA, 263 bp, Glycine max
  Clone ID: 701039447H1
cttcactcactcactcatgggctgcgtctcctcaaaacacatcaagaaagacctcaagcaagaagaagaagtcactgtcaccaatggcggcggttacgtgaaccacgtggtatccctgacttcctccacctatggagcactaatgctggacaaggagaaggagcaacttcaacttcaacccaccgtcgaagaagaatccaaaacatcccctcctcggattcgcgaagatcccgaagtcatcaacgcttgggaactcatggagg

SEQ ID NO: 46576 - DNA, 260 bp, Glycine max
  Clone ID: 701039412H1
taacaagattaattgagtctacgttcatccgagcttcatatctgatatccattcttcaccgtaccaatgtctaattcttccatggccagcttgacttttgctgttggcattattggcactgtattatcccttttggtgtttgcctctcccatcaagactttttgtagagtggtaaagaagaaatcaacagagaattacaagggagctccatatataacgacgttcttgtgcacaagtttgtggacttcttatggagttct

SEQ ID NO: 46577 - DNA, 233 bp, Glycine max
  Clone ID: 701039375H1
atcactagaagtgttggatgcatttctatttctaactaattattgtgcttattattattgttgagaaagaaaagaatggcaaagttcataacattctttgagttgaacacaggggccaagattccttctgttgggttaggcacttggcaagctgagcctggtgttgtagccaaagctgtcaccacagccattctggttggatacaggcatattgattgtgctcaagcgtataa

SEQ ID NO: 46578 - DNA, 232 bp, Glycine max
  Clone ID: 701039376H1
gatttatttaattttaatgctaaatgtagttttggtcactaaagggtctaaattgatattaattcttcttttttaagggaaattgatattaattattgtatctttaaaaaagtgattttgctcttgtattttgtacttggtcaactcgaaataaagtatataggccagggtctaaatttcttttaattcttgtatcttaaaaaccattattttgataatctatataaactaa

SEQ ID NO: 46579 - DNA, 237 bp, Glycine max
  Clone ID: 701039377H1
gtttttgagtgcggtgcggcgatcctagcactctcttctgcagctttcgccgacagcttcattcaccatggctgagcaaaccgagaaggcttttttgcaacaaccaaaagtgtttctcagctcgaagaaaactgggaagggaaagagacccggaaagggtgggaaccgcttttggaaatccattgggcttggatttaagactcccagggaagccatcgaaggaacctacattgacaa

SEQ ID NO: 46580 - DNA, 238 bp, Glycine max
  Clone ID: 701039378H1
cgacaaatgaagtctttccatctcacagtgacagctttgtgctgtgtagtcgttgtgcttggagtgcttccactctccctagatgcacaactagatccctccttttacagagacacttgtcccagggttcactccattgttcgtgaagtcgtcaggaacgtttcaaagaaagatccccgtatgcttgctcagtctcattagacttcactttcatgactgctttgttcaaggatgtgat

SEQ ID NO: 46581 - DNA, 122 bp, Glycine max
  Clone ID: 701039379H1
cttgtgaacttcagggcgaggcggcacgttggggtgcgagtttcgaacgcgctgataccaccagatggagggaagctcgtggagcttgtggtgacggattttgagagggatttgaagaaggg

SEQ ID NO: 46582 - DNA, 76 bp, Glycine max
  Clone ID: 701039380H1
catctttgttctctctctaacgatttcgccattcaacagcgatctttccgtctcctccatcgtcatcaaagctccc

SEQ ID NO: 46583 - DNA, 236 bp, Glycine max
  Clone ID: 701039383H1
gttctcttcaattttagcaacaacaacttcgacatgggttcttcttggcccgccaccagcgccgatcaaggcgaaaacgacccttcctcgctctggctcagcgatcccgaagttagggattccgttaacactgctgctgctaccccttcggtcatggttcctgcacagactcaggggatttcgatttcaaagacgatgcagttagagagttctattcaaacccctggttcgagtat

SEQ ID NO: 46584 - DNA, 123 bp, Glycine max
  Clone ID: 701039384H1
cgtaaatctatatcaattgtactgttattagtttgatttgctacctagaagaagttagatgtttcttatgcgtcaattcttgcaacaacattgtttgttataaatagcagcttattcttttac

SEQ ID NO: 46585 - DNA, 232 bp, Glycine max
  Clone ID: 701039387H1
gttgagaccaagacacactcgttcatatatctctctgctcttctcttctcttctacctctcaagtttttgaagtataaagatggcagagacattcctattcacctcggagtcagtgaacgagggacaccctgataagctctgcgaccaaatctccgatgctgtcctcgacgcttgcctcgaacaggacccagacagcaaggttgcctgcgaaacatgcaccaagaccaactt

SEQ ID NO: 46586 - DNA, 234 bp, Glycine max
  Clone ID: 701039388H1
ctgggccgtgctagaaggtttgattcaataaacaagttgctagcgcagatggtcaaggatggatgccaagccaatgttgtaacatacaaccgccttattcattgctatggctgtgcaaactacctgaaagaagcactgaatgtgttcaatgaaatgcaggaggtgggatgtgagcctgatcgtgtcacatactgtacactcattgatatccatgctaaagctggatttattgat

SEQ ID NO: 46587 - DNA, 235 bp, Glycine max
  Clone ID: 701039389H1
cgaaattgaggaaagacacaagagaattaggtttgaggaggagactagggataagattgatgaaaaggagagggaaattaagggttacagacagaaggttgagggattggagaaggttgctgctgagaaaaaaacagaattagatgagttggttaaacagaaattgaggttggaggaatcacttagagaatctgaggagaaagtgactggtttggagtccagtattcttcaattg

SEQ ID NO: 46588 - DNA, 234 bp, Glycine max
  Clone ID: 701039390H1
atcaaacatgaaacccttgagactctctgtttctgaccttccaatgttgtcgtgtcactacatccaaaagggcgtgttactaaccgctccgccctcgtctttcgaggatatgatactctcttttaaacactctctttctatcgcgctctctcactttccggctcttgcgggaaggttagagacagattctcatggttatgttaatattgtctgtaacgacgctggcgtggattt

SEQ ID NO: 46589 - DNA, 233 bp, Glycine max
  Clone ID: 701039392H1
caaacagtctctgcagcagtgtggttcaaagaatggttcggatgatagcaggatttgttcttaatttgctaccaaaatgcaattggtgggaattagtgaatggccacactagccaacaccatagtgtgtgtgggtgtgtagaggggtgatagtgttgactgttgaaaaaaccttgtatgagaagaaagaggcatttttagttgacatgctgtagcattttgatggagtttact

SEQ ID NO: 46590 - DNA, 236 bp, Glycine max
  Clone ID: 701039393H1
gcccgattctgatgaaaggtcatgagaggccattgacgttcctgaaatacaacagggacggcgatctcctcttctcctgcgccaaggaccacaaccctaccgtctggtttgccgacaacggcgaacgcttgggcacttatcgcggccacaacggcgccgtttggacctgcgacgtctcaagagattcggctcgactcatcacgggaagtgccgatcagaccgcccagctatgggac

SEQ ID NO: 46591 - DNA, 237 bp, Glycine max
  Clone ID: 701039394H1
cgcaaataagttctcagttatcagcccttcctattgtgttcctaactctcttaacctacaaattaacacagagaaaggtgttacttacaacgtaaagggtaaccgtgtattttacataaaagatactttgttcacatttcacggtcgtcgcgtgttatgtgatgataaaggaagtcccatcgtcactctatacaagaagaatgtgacattgcacgggcaatgcaaagttttcagggg

SEQ ID NO: 46592 - DNA, 256 bp, Glycine max
  Clone ID: 701039395H1
ctctcgagccgaatcggctcgagctctttcctcttggtcttctttgcactctctgatctctctgacttgctctcttgttcgttgtaactaccggcacacgagattgctctcttacttccctatttgttgttcaacatttcaattttgtcatcggtgttctctgaacatggagcagagatttcaatgggtctcaactcaaaagaacctcttgctgtagtgaaggaggagatgcacgtttatggcttcgaagactctg

SEQ ID NO: 46593 - DNA, 235 bp, Glycine max
  Clone ID: 701039396H1
ctaatagtttggttttgtagtaagtgaggtgaggtgccaaaatggtgaagataactcttggtactttcgatgactcttttggtgttgcctctcttaaggcttatttggcagagctccatgcaactctgattttcgtgttcgctggtgttggttcagccatcgcttacaacgagcttacaaaagatgcagccttggatccaacggggctggtggcagtagctgtggcccatgcatt

SEQ ID NO: 46594 - DNA, 278 bp, Glycine max
  Clone ID: 701039402H1
tataaacgctgcaataatattctattttcaaagggaaacccaaaaactgaagcgcgaggaagctaaaagtagcaacgagggatgagagaacaagaggattggaggattacgacagcgctgttaacgttgttgttggtgtttgtttcttcttttccggcgttgagctacggagttgttcctcctcgtactctgctcaataagctgtctcagggcagttatctcaccactcaggagcaatggttcaatcaaaccctcgatcagttctctccctatgatca

SEQ ID NO: 46595 - DNA, 274 bp, Glycine max
  Clone ID: 701039404H1
ggaatctgaatatggaggtggtcagtctgttcctgttggtggcattgcatactatatcactgcaccatccagcttagctgatatggcagccaatcctttccatgctctgttctatcttgtgtttatgctttcagcctgtgccttgttctctaaaacatggattgaagtctctggttcatctgctaaagatgttgccaagcagcttaaggaacaacaaatggtaatgcctggacaccgtgagtcaaacttgcagaaagagctgaaccgatacatt

SEQ ID NO: 46596 - DNA, 272 bp, Glycine max
  Clone ID: 701039405H1
cttgaactcaaggagatggctctgggaagaggcagtgcagtggttctactactttgcttcttgctgcttcactctcagatggctcgtgctgccacctacacagttggagattctgggggttggacctttaacactgttgcctggcccaaaggaaagctctttcgggctggtgacacacttgctttcaattatagccctgggactcacaatgtggtggccgtgaacaaggctggatatgatagctgcaagactccaagaggagccaaagtgta

SEQ ID NO: 46597 - DNA, 270 bp, Glycine max
  Clone ID: 701039406H1
tcatcactttggttagaggtgaaactaaagcagagaaaagggtggtagtggtgatcaacaagctcatgtggttggcttctgtctgtacttcagtgacgtttattgctgcttcttacatagttgtgggtaagaagaatgagtgggctgcaattttggttacattagttggaggggtgataatatctggagttattggcactatgacttactatgtagtgaggtctaagagaagcagatcaatgaggaagaaggagaagcaagctgccagga

SEQ ID NO: 46598 - DNA, 268 bp, Glycine max
  Clone ID: 701039407H1
ttcactcccattaacagcaaccatggtgcagaggctcacttatcgcaagccgcatagttatgctaccaaatccaaccagcaccgggttgttaagacccctggagggaagttggtgtaccagaccatcaagaagagagcaagtggacctaagtgccctgtcactggcaagaggatccaagggattccacacttgagacctgctgaatacaagaggtctagattgcctcggaaccgcagaccgtaaaccggcctacggaggtgttttatc

SEQ ID NO: 46599 - DNA, 178 bp, Glycine max
  Clone ID: 701039408H1
aagatggagaagtatcagatctggagcaggagaatagcgttggcagcgtttgcgtttgctctgctgttccaatcggcctcagcagacgacgtcgttgtgctctctgaagataacttcgagaaggaagttggtcaggacagaggagctctcgttgagttctatgctccttggtgtggac

SEQ ID NO: 46600 - DNA, 272 bp, Glycine max
  Clone ID: 701039409H1
cggctcgaggttcctataattttctttctccattagattaccaatctctgcaactttgcttctcaacatggagtatcgtctcctacccatttttactttactcaatattgcactggtggcaacccatgctgctttaccccctgaagtttactggaagtcggtgcttcctactacgccaatgtcaaaagccatcactgatatcctttactctgattgggtggaagagaaaagcagctcagtgcatgttggaggtggaggcgtgaacgtgcata

SEQ ID NO: 46601 - DNA, 236 bp, Glycine max
  Clone ID: 701039374H1
ctctttcttcctcttcctcagtagtgcgattttcgattctcttctctgcaactatgcctaaccctaaggtcttcttcgacatgaccatcggcggtcaacctgccggccgcatcgtgatggagctctatgccgacgtgactcccagcaccgccgagaacttccgcgcgctctgcaccggcgagaagggcgccgggcggagcggcaagcccctccactacaaaggctcgtccttccac

SEQ ID NO: 46602 - DNA, 269 bp, Glycine max
  Clone ID: 701039410H1
agtgattagggttttggtttggtgtttttcttaagcttgagatcaggaattaatttcagaggttcagagaatggcaacggattcttctaatggtaatgggcatcaccaaacaacaacaaagcaacctcctttgccgtctcccctgcgcttttccaaattttttcagtccaacatgagaatcttggttactggaggagctggattcattgggtctcacttagttgacagattgatggaaaatgaaaaaaatgaggtaattgttgctgaca

SEQ ID NO: 46603 - DNA, 81 bp, Glycine max
  Clone ID: 701039332H1
caaccactacctctccgtcacccacctggccgaagagatcaaccgccgccagaccatcaccgtcctggccctcgacaatgc

SEQ ID NO: 46604 - DNA, 244 bp, Glycine max
  Clone ID: 701039333H1
caggctctgatcgcgtttgccctcttagcttcccttttgctgtgcttgcaagcttcctccgatgtccccttcatcgtcgctcacaaaaaggcctccctcaacagactcaagtccggcgccgaaagggtctccgtcaccatcgacatctacaaccaaggaacctcgacggcctatgatgtaagcttatcagacgatagctggccaagtgatgcttttgatgtaatcagtggtagcacatcaaagt

SEQ ID NO: 46605 - DNA, 239 bp, Glycine max
  Clone ID: 701039334H1
cctcgagcgattcggctcgagcagaaatcaagaaacttgatgactggtgtgggtatagcattagcatgaaaaggatagacgtgccacaaaactatacggaccctatagactctggagtctggactgaaatcgaagtcgaagcaagcaatgggcaacgctcagtcaccttccaacaatgatcctcgatatgtttcagcaaccagagcttttactcaaaaggaacttgaagacttgaggtc

SEQ ID NO: 46606 - DNA, 236 bp, Glycine max
  Clone ID: 701039335H1
caaatgttgatttacgaatttatgcccaatggaacacttagggagagtttgtcagggagatctgagattcatcttgactggcagaggagactccgcattgctcttggttccgccagaggacttgcatacttacatgagcttgccaaccctcccataatccacagagacgtgaagtcgactgctatattgttggatgaaaatttgacagcaaaggttgcagattttggcttgtccaa

SEQ ID NO: 46607 - DNA, 236 bp, Glycine max
  Clone ID: 701039336H1
gcaatatgtattggaaggcatgcgtttggtgatcaatatcgggctactgacactgtaattaaaggagctggaaagctgaagctggtgtttgttccagaaggccaaggtgaggaaactgaattcgaggtttttaacttcactggtgaagggggtgtttcattggctatgtacaatactgatgagtctattcgttcttttgccgaggcttctatggcaactgctttagagaaaaagtg

SEQ ID NO: 46608 - DNA, 237 bp, Glycine max
  Clone ID: 701039337H1
gagggatttatggatgaacaagtttgattgggaccaccctattcacttgcagccaactagtcctacaactgagaagaaagttagtgtggtttgggatgcatacgaggcaacaaaggatgcagatggtgtctgcattctcactgagtgggatgggttcaagactcttgattatcagaaggtgtatgacaacatgagaaaaccagcatttgtttttgatggaaggaacattgtggatgt

SEQ ID NO: 46609 - DNA, 235 bp, Glycine max
  Clone ID: 701039342H1
cttttccattccaacctctttcacacttcagatctgtttcttcatcggttgttcaagtaaatggcctttgtcaccactgctgaagtgtgtgatgcgaacccacagttaattttgagtggggagcttcgtgcccttcagccagtttttcagatttatggccgtcgacaggttttctctggacctatagttaccttgaaggtgtttgaagacaatgttttggttcgtgagttccttg

SEQ ID NO: 46610 - DNA, 248 bp, Glycine max
  Clone ID: 701039343H1
cggcttcggctccctcgagcgaatcggctcgagccaccactcactcactcactcacttccctcacaattcccaatcctcacgttgcctccttcacatgaagctcctctcgcgctccgtgttttcgctctctccctgaatcactcatccttataataaataaattctctctctcgaagaagaaggcgaaagaggttttcattgttcttgttgttgtagacgaagaagaagctcaagaatggagtcgacg

SEQ ID NO: 46611 - DNA, 259 bp, Glycine max
  Clone ID: 701039348H1
tcagaactcggctcgagcgcgctgcggttagaagagattcaatctgaatctgaatggcagctatcagacagccagcctccaaacttcgagaacaggtcgctcgtcaacaacaggctgtgcttaaacagtttgggcctgggggatatggacgttcagataatatggttactgatgaggtagagcttcagcaacatcagaaacttgagaagctttacatatcaacacgtgctggacagcattatcaaagggatattgtccg

SEQ ID NO: 46612 - DNA, 241 bp, Glycine max
  Clone ID: 701039349H1
gaagttgtcttgtctgcgttctcaaacgttgttgcttgctgctgctgcatagttgatcgaaagcatgacaacatcattgtccagcatccttttcaagggaattgcagctcgttctttcaccgcccctctaactaggtcctgttatcatggaatgagatactttgctactgtatcaaatgatcctgacacacatgatgacttcaagccagctaataaacttgagaattccaacatttctttg

SEQ ID NO: 46613 - DNA, 239 bp, Glycine max
  Clone ID: 701039350H1
ctcgagcgctgactcagaaattccacaatcaataaggtgaaattaattgccacttctctgatctcgtgtccttttttctgatataacagatcaagctagctgaagaagctggaaatggttccaaggtcactagtaccaccacctcctccacttcccaaattctcaagaccaaaagcagaagagagtgtcacaaaccgagaaattgccaagttttggaggcaaaagaggatcgtggagga

SEQ ID NO: 46614 - DNA, 238 bp, Glycine max
  Clone ID: 701039351H1
cgcgtcgctgctccgtaccagtttcactgcataaatttgagagaaaactctgcaaacatgttggtttatcaggacctccttacaggtgatgagcttctctcggactccttccgttacaatgaaattgagaatggaatgctgtgggaagttgaggggaagtgggttgttaagggagcagtcgatgttgacattggtgcaaacccttctgctgagggtggagaagatgagggagtcgatg

SEQ ID NO: 46615 - DNA, 235 bp, Glycine max
  Clone ID: 701039352H1
agatgccttcaccccaaaaccagaagcattgaatgaacagaaggcattttcagcatcagcatcaacatgggtggggattctattgtttctcatggtacagacgaaggttcttgtttggaggagaattttcccttgctttcatctcactcctcacctgctctcagggataatttgggcttgcaggatgaagacaacagaatgaaagcggagaatgggttaacttgtagtgaaactg

SEQ ID NO: 46616 - DNA, 235 bp, Glycine max
  Clone ID: 701039353H1
gtgtgtttgcagattgatgacaagcaaccccattacgtggaagcctaagaggagaagacgacgaagaggacaaggttaactgaatcgccgcttctgtgtggcttcgttctttcgttttagttttttcatctttttagctttagagggtaatacattctttaaaaaaatggaggttttggtgggtcccgctttcaccatcgacgttccttcgtctccgccgcgggatggcggttcc

SEQ ID NO: 46617 - DNA, 237 bp, Glycine max
  Clone ID: 701039354H1
cccaaattctcctgcaaactctgaagcagctcgaatgtttagtgagaacaagcgtgagtacaatcgaagagtgagggaaattgtggagcagagttggacagcagattaagttcatccttatatgcatgggaagctttgaaggcatgaatttggttgcagtgatggcaactataagaatgattgtgcaaactcatcacatttatattctctgctgatatgcatgatagcatcatctta

SEQ ID NO: 46618 - DNA, 235 bp, Glycine max
  Clone ID: 701039356H1
cattatttgtctatcttattttgtaatttttagcctagacatcaataaacttttgatgcatgatgatatgagcatttttgattggatgattcaatgcataacatttttgctcttattttatacatgtacggcataattaattacgttttaatacataatttcaggacaaaccttacagcaagtcgaccgaggccaaacccgcaaggctcgtaccattacggtatgataaacacga

SEQ ID NO: 46619 - DNA, 236 bp, Glycine max
  Clone ID: 701039357H1
gaaaatgttgaggaaggcggagtggaggggaacggatctgctgggtgggactagataaagtgaagcaagctgacaagactaagggaagcttggatggtggaaatggaatcggcagctgaaaaccctaattacccggcggtggactacaagcgaccttccatcttgtcatttcctcggaggcccgccctcagagttacatccgagttcgatagtgaaagcgcagtcttcttccataa

SEQ ID NO: 46620 - DNA, 236 bp, Glycine max
  Clone ID: 701039358H1
ggccaggcaagccccactcaaccaccacacctctcctcgttcacgctacccctttctgctcttcttctacctttcaagttttaaaagtataaagatggcagagacattcctatttacctcagagtcggtgaacgagggacaccctgacaagctctgcgaccaaatctccgatgctgtcctcgacgcttgcctcgagcaggacccagacagcaaagttgcctgcgaaacatgcacca

SEQ ID NO: 46621 - DNA, 74 bp, Glycine max
  Clone ID: 701039361H1
cccggtttatgcgttgatgtcattctgatcactttgtctaccacagggttcaatctattgtcattcaatacggg

SEQ ID NO: 46622 - DNA, 146 bp, Glycine max
  Clone ID: 701039363H1
gacggaaccaacggagccatgcacgtcatcttccttggcaagggacccaaccaccgtactccacccaaggcgcgagccttcgagcacggcctcttgccgatcccgcgcctcatcttctccgacccggcgcaaaccctaattccgtt

SEQ ID NO: 46623 - DNA, 240 bp, Glycine max
  Clone ID: 701039365H1
ctttgcgcagttccctacctctcctttcaagatgcatatcttcgtcaagaccctcaccggaaagaccatcacccttgaggtggaaagctctgacaccatcgacaacgtcaaggccaagatccaggacaaggacggaattcccccggatcagcaacgtctcatcttcgccggaaagcagctcgaggacggccgtaccctcgccgactacaacatccagaaggagtcaacccttcaccttgt

SEQ ID NO: 46624 - DNA, 239 bp, Glycine max
  Clone ID: 701039366H1
ctaaaacaagaaagtgttcgttgaatctgttgaaagtggtgacttgatttgatttattcacataaccaatttatcatctctccgatctttcaatggattctgacttctggacctcgcgtcttgctgccgctaaacgccaatacacgcttcagcatcaccatccaaattctcacttagatcggttgggcatcgatgattttgatgtggaagaagaggtgagacctgattttccttgcccg

SEQ ID NO: 46625 - DNA, 236 bp, Glycine max
  Clone ID: 701039367H1
gccacgaaagaatttcttgttttctgctttcgaataaacgaataagaagccttcacaccgcttcgttgtgctgtgcttgcttctcttttattctttctattagtattcgtttcgttttctccgccgtttccgtagctcggcttcagcagcaccagaaccaggtgtctactatctgaattcacatgtgctgttattgtcttccaattgggtgacatctgattgaagagcaatgcaga

SEQ ID NO: 46626 - DNA, 233 bp, Glycine max
  Clone ID: 701039369H1
cactaacccaggttatgttaacgaagaaggaaggttaaggattttgccttaccatgacttcaacaaagcttcccatggctgcaccttgtgtcctccaaatatgtgcaagggtttaatcattgatagaaccaagattcaatttcacaagagggtaacaagaggatgatctatcttggtgatggtagtggtgactattgcccaagcttgaggctaaaagagagagactatatgat

SEQ ID NO: 46627 - DNA, 235 bp, Glycine max
  Clone ID: 701039370H1
cggcctaccacgagcagttgtcggtgccggagatcaccaatgccgtgttcgagcccgccagcatgatggccaagtgtgatccaaggcacggcaagtacatggcttgctgcttgatgtaccgtggtgatgttgtccctaaggatgtcaatgctgctgttgccaccatcaagactaagaggactgttcagtttgttgattggtgtccaactggattcaagtgtggtatcaactacca

SEQ ID NO: 46628 - DNA, 123 bp, Glycine max
  unsure (1)..(123): unsure at all n locations
  Clone ID: 701039331H1
cggctcgagctcgagcgaatcggctcgagggctcgaggtgagtgagtcgattctctgaagtaaactggtttagccantcnaaacagacgggctatgggtcgtggggtcagtgctggtggtggt

SEQ ID NO: 46629 - DNA, 78 bp, Glycine max
  Clone ID: 701039371H1
tagcagcagaagaacgaaactggctggaccttccgcgcgacgttctgtgtacgattttccagaagctgggcgccatcg

SEQ ID NO: 46630 - DNA, 233 bp, Glycine max
  Clone ID: 701039372H1
cggctcgagtccattcacaaccttaaacctttacttcttgtaaactttattgattgattctccgaatagagctaagagggtatagacatggctagcgcaattgcagcttcttttttggttctgcttctggctttccccactgtatttggagctgaccatgaagttggtgacactagtggatgggccctcggagttaattacaacacctgggcctctgggaaaactttcacagt

SEQ ID NO: 46631 - DNA, 234 bp, Glycine max
  Clone ID: 701039373H1
ccatttgcaggcgttcaattatatggtggaccaagagccagtaacttattaaatatttctgacacacactctttccatctggagtatagctcactggcttgtacagttgaaattgtagatgatgtatttgctgccattgaccacatacatcaccatggaagtgctcatactgaatgcattgttgcagaagactctgaagtcgccgaagctttcttaagtcaggttgacagtgct

SEQ ID NO: 46632 - DNA, 268 bp, Glycine max
  Clone ID: 701039290H1
gcaacccacaaaagcagcacaagaacactcatcagatcccagtgatcaattcaatttgcgttcatcactggtaaggcaaacatgaggggcattctttccgtaaggacagccttggttcaacatcatagtgagaaattgtccttggtttcagagtatttagcactcagggtgcttccactgctagtaccccacagccgccaccaccacctcctccgccggagaaaacccattttggcggccttaaggatgaggacaggatatttactaa

SEQ ID NO: 46633 - DNA, 267 bp, Glycine max
  Clone ID: 701039291H1
ctatcaacgaacccactgccgctgccattgcctatggattggacaagaaaggtggcgagaagaacattctagtctttgatcttggtggtgggacctttgatgtcagtatcttgacaattgataacggtgtttttgaattcttgctacaaatggagatactcatcttggaggtgaggattttgatcaaagaataatggagtacttcattaaattgatcaagaaaaagcatggaaaggatattagcaaggacaacagagcacttggaaa

SEQ ID NO: 46634 - DNA, 267 bp, Glycine max
  Clone ID: 701039292H1
ctcctttgtttctatggcttctgcagaagtagagttccgatgctttgttggtgggcttgcttgggccaccgaccacgatgctctcgagaaagccttctctcaatttggcgaaatcgtcgaatcgaaggtcatcaacgtcgtgaaactggaagatccagagggtttggatttgtgaccttcgccacagagcaggcgatgagagacgcaattgcaaggaatgaacggccagaacctcgacggtcgtaatataaccgtgaacgaggctca

SEQ ID NO: 46635 - DNA, 264 bp, Glycine max
  Clone ID: 701039293H1
aaaaaatttctagagcgagaaagtgagaggagagagaaagtagctgatcctccatggcctccaccaaggaacgcgaaaacttcgtctacaccgccaagctcgccgaacaagccgaacgctatgaagaaatggtggaagaatgaagaatgtggcgaactgaacgtggaatacacggtcgaggagcggaaccttctgtcggtagggtacaagaacgtggtgggtgctcgtagggcttcgtggaggattctatcgtcgattgaacag

SEQ ID NO: 46636 - DNA, 266 bp, Glycine max
  Clone ID: 701039294H1
ccacgtcagagtggtgatcttaccattatgtatgatgtgatcagaacttatgattcaaattactgggctgaggttaccgttgcaaaccataacccacttgggaggcttgataactggaggttgagctgggactggataatgatgagtttatatattcaatgaaaggggcttatccttcggttgtggatgcttctgattgtctctttggtaagcaaggaactttctatagggatcttgactttgcccttgtgttgaattgtgagaga

SEQ ID NO: 46637 - DNA, 269 bp, Glycine max
  Clone ID: 701039295H1
gtcctatctcagtattttcaaatcaggaccaagtagagaaggggtttgactttgagtttgatgattcatcttccccttcttccggcacaagctcaggtcgagaatccacagaggtaaccaaatattccaacccaatcctagatacataagcgacatactcatggacgaggaagacgacttggagcgcaaaccctgcatgttgcaggaatgtttgagactccaggctgctgaagaatccttccatgatgtccttctccatcaaaaccttc

SEQ ID NO: 46638 - DNA, 238 bp, Glycine max
  unsure (1)..(238): unsure at all n locations
  Clone ID: 701039296H1
cgtgctgttgaatgtactggcagcatccaagccatgatctcagcattcgaatgcgtccacgatggttggggtgttgctgtacttgttggagtgccaaacaaagatgatgcattcaaaactcatccagtgaatttcttgaagagaggactctaaagggtaccgtctatgganactacaaaccccgcactgaccttccttctgttgtggagaagtacatgaatggggaattggactggag

SEQ ID NO: 46639 - DNA, 244 bp, Glycine max
  Clone ID: 701039301H1
ggcatttcaattatcgtgtcttcttggctctctgtttaggatcgacatggatttcttttttccattggcaatacttgtgatgatattaggcacaccatactctagtgcttctggaaagagtgaaagtaatgtgcaacagctgtttttctgtctcctaagtttgaacttggaccgggatcggttgaaaataaatatgattatgctattgattttccaagaggtcatatagcacttaagagtttca

SEQ ID NO: 46640 - DNA, 241 bp, Glycine max
  Clone ID: 701039303H1
agaatcccaggcgaggagaaagatggaggggaaggagcaggatgtgtcgttgggagcgaacaagttccccgagagacagccaattgggacggcggcgcagagccaagacgacggcaaggactaccaggagccgacgccggcgccgctggttgacccgacggagtttacgtcatggtcgttttacagagcagggatagcagagtttgtggccacttttctgtttctctacatcactgtctta

SEQ ID NO: 46641 - DNA, 70 bp, Glycine max
  Clone ID: 701039305H1
cttcaggatatccatttagaaagtgtgctgccaatgaacaaaacacacttaagacaatcgccacaacagc

SEQ ID NO: 46642 - DNA, 239 bp, Glycine max
  Clone ID: 701039306H1
atttgttttgatactatataggaagaaagaaaaactcttgaccgggagttagctcgtgccaaggtaacagcaaacagagtagctgtagtggttgcaaatgaatggaaagatgctaatgacaaagtgatgcctgtgaaacaatggcttgaagaacgacgattcttgcagggagagatgcagcaacttcgggacaagcttgctataactgagcgaactgcaaagtctgaagcacagttaaa

SEQ ID NO: 46643 - DNA, 53 bp, Glycine max
  Clone ID: 701039307H1
cggctcgagctcgagccgaagtcggctcgagcgtgctacgaggcataatctca

SEQ ID NO: 46644 - DNA, 237 bp, Glycine max
  Clone ID: 701039308H1
ctcaaattaaaattaatttaagcaagccaaacactatatcaaggggaaaatggcagaggctaatgtagtgctgttggatttctggccaagctcttatggaatgagagtgaaaatcgctttggcagagaagggaatctcatatgagtgcaagcaagaagacttggaagctagaagctctctgcttttagagatgaacccggttcacaaaatgataccagttttgattcataatggaaa

SEQ ID NO: 46645 - DNA, 238 bp, Glycine max
  Clone ID: 701039309H1
aagagaatggctcgcaagggtttaatcttcttggctgtgttatgcttctcagcactgtcactgagtcgttgtcttgcggaggataatggacttgttatgaacttctacaaggaatcatgccctcaggctgaagacatcatcaaagaacaagtcaagcttctctacaagcgccacaagaacactgcttgctcctggctcagaaacatcgtccatgactgtgctgttccgcgttgtgatg

SEQ ID NO: 46646 - DNA, 240 bp, Glycine max
  Clone ID: 701039312H1
gctcactcgagcgaatcggctcagtcggtggttgccagacagttacctctgtcaccacaacttgcggctgtcgggtcatcgctgtcttgttggtgttatttgtaatggaaccctttacatagcaaaccttggggattcccgggcagttttgggaagagcagtcaaggcaactggcgaggttttatccatgcaattatcagcagagcacaatgcatcgatagagactgtacgacaggagct

SEQ ID NO: 46647 - DNA, 240 bp, Glycine max
  Clone ID: 701039314H1
gaagccttattttgctctctgttctttctctcaacaatcgttccaacaaatcaagagagctgaattctgaagcttttgctacgtttctaccattcaggtttgtttctccgaacgcgaaaatctaatacttcttttagggtttgtgctggatgatctgcgagaatctatgttctatccgacttcatttatctcagtgaagttttctgcgcttccacgatgcaaatatagcgtttcgcgttt

SEQ ID NO: 46648 - DNA, 241 bp, Glycine max
  Clone ID: 701039315H1
cggacatacaatccataagagctgcctgaatgacatgagagaacatttccagtattcgtgccctctctgcttgaacatcagtctgtgacatgtcaaaggtttgggagacatttgatatagagattgctgctacaccaatgcctgagcaatatcaaaataaaatggtttggatcctgtgcaacgattgtggtaaaacttctcacgttcagttccattttgtggctcaaaagtgtccgaactg

SEQ ID NO: 46649 - DNA, 240 bp, Glycine max
  Clone ID: 701039316H1
ctcgaccgctccccctccccgattcgttttgcccctttcgtcgccctaatttcaaccatgcctcgccgtagctccggtggaagatctgcccgtcctgctcctcgtgcagcacctcgtcctgctccagttcaccatgctcctcctccagcccctgctcagagcggtggcggatctatgcttggtggcattggttcaaccatagctcaaggtatggcttttggcactggaagtgcagtggca

SEQ ID NO: 46650 - DNA, 268 bp, Glycine max
  Clone ID: 701039317H1
cgcgtacgtcaccgcatactgctcgactagcagctctcgttgtttcggagttagggaccttacgcagccatggccactgctacgaatgccgccgccgccccaccacgccagctctcccagaaggaagctgacatccagatgatgttggccgccgacgtccacctcggcaccaagaactgcgacttccaaatggaacgttacatcttcaagcgccgcaacgacgggatttacattattaaccttgggaagacgtgggagaagcttcagc

SEQ ID NO: 46651 - DNA, 242 bp, Glycine max
  Clone ID: 701039318H1
tcaaacttcaaatatagctagctaggtacaatacaattcaccggagcaaatactaaggaggtttagctcaattgattcagcaagtgtgtgagtgagttattgtaaactttctgatatctgtcttccatttttatgattaaaaaaatcagagcaatgaatgttttatatttaagctcaagttcaagcctaagcatgtccaagccgtttcaattctcaagtaaacatcatcaaagagcttctag

SEQ ID NO: 46652 - DNA, 238 bp, Glycine max
  Clone ID: 701039320H1
cgtcggaactcggaagtgggtttgcgtcgtcgtgaggtttaacgagacgatgacggcactgtttctgttcttcattctcttctctctcagctatgcctccgaacaaatcttccccgctcatatcggtagcatatttggtggtggcggtggtggccgctctcgcgaaccaaaatacaagattgaatttcatcccgaagatttcccttttcaccctgatgatgatcaggaatctatagtc

SEQ ID NO: 46653 - DNA, 236 bp, Glycine max
  Clone ID: 701039323H1
ctagcagcggaactctagcttgggcagcgaatcacaatggcgagaggattgaagaagcatttgaagaggcttaatgccccaaagcattggatgcttgacaaactgggtggtgcatttgctcctaagccctcatctggaccacacaaatcccgcggaatgcctgccactcatactcattttgcgaaaccggctgaagtatgctctgacataccgtgaagtcattgctattctgatgc

SEQ ID NO: 46654 - DNA, 235 bp, Glycine max
  Clone ID: 701039324H1
cgcctttcttattcttccttccaagaaaccactccaactcatcaacttccttagacttgcccaccctttatgctgctaatagtaatctcatcctcttgctatcattcagattgatttctctcctagcacctcgatcaacgggctaaaagtttaaactttgctgcttaaacttttctttcacggtttgatacatcttattgattttagtgctatttcaaaggggcgaaatttgaga

SEQ ID NO: 46655 - DNA, 268 bp, Glycine max
  Clone ID: 701039289H1
attccacaacagtgggaggtcgatccaaaaagagagagtggaaaagatggcgcggttgatcacagtggtgtggtgcgcggtggcggtgctattatgcgccgcggccggtgcgtcgtgggtggaggaggcggcgaacccgtacgaatggtgtctggcgtggaggcggaggtggttcgggtgatcggggagtgccggcgtgcgttgaagtttgctaggttcgtgagcaggttcgggaagagttaccaaagcgaggaagagatgaaggaga

SEQ ID NO: 46656 - DNA, 238 bp, Glycine max
  Clone ID: 701039326H1
ctccaattagggtttttgtgatctgcagctacgatgggtaagggaacggggagtttcggtaagaggaggaacaagacccacaccctctgtgtgaggtgtggccgccgcagcttccacctccagaagagtcgttgctctgcgtgcgcttaccccgctgcgcgcaccaggaaatataactggagcgtgaaggccattaggcgaaagaccaccggaactggaaggatgaggtacttgcgta

SEQ ID NO: 46657 - DNA, 134 bp, Glycine max
  Clone ID: 701039328H1
catcgcttgtcgcttctagcattggtatcaatcctcaccctcgcttttcttgttaccctcatttccacaagagaatccaccttcatcaccactgcaacttcttctgtgactccctcttcaaataatgctcagtt

SEQ ID NO: 46658 - DNA, 240 bp, Glycine max
  Clone ID: 701039329H1
ctcgcaagcaaaaagaaagaatcccaggcgaggagaaagatggaggggaaggagcaggatgtgtcgttgggagcgaacaagttccccgagagacagccaattgggacggcggcgcagagccaagacgacggcaaggactaccaggagccggcgccggcgccgctggttgacccgacggagtttacgtcatggtcgttttacagagcagggatagcagagtttgtggccacttttctgttt

SEQ ID NO: 46659 - DNA, 125 bp, Glycine max
  Clone ID: 701039330H1
gcttcttctaatggccatagatcaccgaaatcagagttggaaactcaagaggttgagaaaattgcatcaggagaagttgaaactgcttctggctctcattctgtcactacttatagtgaacagaa

SEQ ID NO: 46660 - DNA, 273 bp, Glycine max
  Clone ID: 701039258H1
aatggcccaaatgacactgttttcttattctcaaccccaaagtagcaataaatagatgtctccaattttattcttcttgatcaaaagtcgtagaactagaaggttaggttgagggcgatatgaaggtaaccaaagggaaggaactaaaattgttctgacaaaacccttccaattggaaggtgaatcagatttagaaccgtcttatagagctcccaatctcctacatcgcttgttaagtttactcaagaacgtgcggccaggatcagatctcac

SEQ ID NO: 46661 - DNA, 272 bp, Glycine max
  Clone ID: 701039259H1
tatacttgtcaaccctttgagagttagaatggctgctgctattgaaatccccacaatagtgtttccaaactcctctgcccaacagaggatgccagtggttggaatgggatctgcccctgacttcacatgcaagaaagacacaaggaggctatcattgaggccgtgaaacagggttacagacacttcgacactgctgctgcttatggctctgaacaggctctcggtgaagctctcaaggaagctatccatcttggcctcgtctcccgccaaga

SEQ ID NO: 46662 - DNA, 273 bp, Glycine max
  Clone ID: 701039263H1
gctcaacaagcatcaccaaggagtacactgagtccaagaagcattcagagtgattcaattgatttggcaattgatggagtggtggatacctcaattgagcaattgtatcacaatgtgtgtgaaatgaggagctctgatcattcccctcaagggctagtttctactcttatgattatgatggcgagtccaggattgattcagaactaggccatcttgctggtgatattgtggatttggagatcacaaaggaggtggttacagagaataaagagg

SEQ ID NO: 46663 - DNA, 276 bp, Glycine max
  Clone ID: 701039264H1
ggaaaaggttgcagaaagcaacatagatacgccggataaaggtggtgggtcttcacctttagagccccaggttgttcccgcatagatatagttgtttaatttgtgtttgttattgtacatggctttcatcttttttcaatttgcgacagagggacaaacaaaacgcatatgataaccgctaaataagaattattcgtttctgatttttcttatatgaatataccatagactggccaatcccaatactattttcagttggtcgagccttgttactct

SEQ ID NO: 46664 - DNA, 178 bp, Glycine max
  Clone ID: 701039265H1
gaaaaagagagagagagagagttaaaaaacaagaagcgaaaaatgaaacgatattgcgaattaggaatttcatgaggcggtagcaatgcaggaggggatgatgacgagaatgggattgaaaggcctatgactcattccaaatatttcccgtttgaattattccttgagtgcgtgatcg

SEQ ID NO: 46665 - DNA, 269 bp, Glycine max
  Clone ID: 701039266H1
gttctgcccaagggagaaatgaaattagcttttggacaaaatatgaaacttgaaacatgaaaaactctaaagtctcttccggttgccgaggttacaaattctcaaccactatggtctgttatacatcatactatcatagtggtctatcttggaaacaatatgcccttctgcttattttgttactcacattttgcttggagattgacttattgaactaaactccttggatcctttgacttaagcctcctaatagcatccaggatattggc

SEQ ID NO: 46666 - DNA, 271 bp, Glycine max
  Clone ID: 701039268H1
gtggaagtatatggttatggctgatacttctgctggcttcagttcaatcactgggatctgagaggacggatgtggcatacgtgactctattgtacggagatgaattcttgttgggtgttcgagttctcggcaaatcgatacggacacgggatccaacaaagacatggtcgttttggtctctgatggtgtctctgattatgccaatacccttctccaggctgatgggtggatagttgagaagattagtttactggcaaatcctaatcaagta

SEQ ID NO: 46667 - DNA, 271 bp, Glycine max
  Clone ID: 701039269H1
gccagcccttcctccatttcctcctcatataaactcttctcaataaccagatatttcattgcatgaatattcaaaaaacaatggccatgctcaatatcatctccattctctctctcttactcactcaatcccacgccaaaataccggcgtctattccggtgggccatggcaaagcgctcacgccactttctacggtggcagcgacgcctcaggaactatgggaggagcgtgtgggtacgggaacctatattcccaaggctacggtgtgaac

SEQ ID NO: 46668 - DNA, 275 bp, Glycine max
  Clone ID: 701039270H1
cttcaatcctcagtttctttcttcaacgtttccatcatacacagatcccaatcctctctcaagccctaatttcccctcatttccatggccacagaagagcccactgtcgcggtggaacccgctcccgaacctgcctccgccgacctcccccggaggagaaggaggagaccaaacctgaagccaaggctaagaaaaccaaggagcccaaacctaaaaaggtttccagacctcgcaaccctcccactcatccttcctacgaagagatggttaaagat

SEQ ID NO: 46669 - DNA, 272 bp, Glycine max
  Clone ID: 701039271H1
cgaggctcctgtttattctgtctgcccacattataaagaaaacattcagttcatcttttcaacagcgttagatgggaaaataaaagcatggttgtatgacaatttgggatctcgtgttgattatgaagctcctggtcgttgggcacaaccatggcttatagtgctgatggtacaaggctcttttcctgtgggacaagcaaagatggggaatcatccattgttgagtggaatgaaagtgaaggagctgttaaaaggacttaccaaggatttcg

SEQ ID NO: 46670 - DNA, 272 bp, Glycine max
  Clone ID: 701039272H1
agcaacttcaggtttttaagtctttgcctcttggcattgattgcatcatctcatgctcaacttcagcttggcttttatgccaagagttgcccaaaagctgagcaaatcattttgaaatttgttcatgaacatatccacaatgtccatcactagcagctgcattgataagaatgcactcccatgactgttttgtaaggggaagtgatggatcggtgcttctgaactcaacaaccaatcaggctgaaaagaatgctcctccaaatctcacagtt

SEQ ID NO: 46671 - DNA, 270 bp, Glycine max
  Clone ID: 701039273H1
aacaaacacaaaccgaaaaggcgaaaggggttttccgagtgagatctagggtttccatcgattcggagagaggatattgatcgaacgacctcagcgagcaaggacaggaggtggagtactagatcatggattcggtgccttgaattcgcatggaaacctcgatgagcagatttctcagctcatgcagtgcaaacccttgtccgagcaagaggtaagggtcttgtgtgataaggcaaaagagattttgatggaagagagcaatgtacagcc

SEQ ID NO: 46672 - DNA, 271 bp, Glycine max
  Clone ID: 701039274H1
cttgattttctttccgctgaattaacattaacatgattgaaatttgaatattttgttttgattcattggagatcttgatttttgaatttctgtggctcgttaatttattaacggcaataaatattattactactaccttatgtaaaatgaattgtgtgtatattttgtctttaataccatatttaccctccaatttttccaactattatccttctcttccacgccgcacgccaatcgtcactcattcagcgcgattccgccggagaacgcg

SEQ ID NO: 46673 - DNA, 265 bp, Glycine max
  Clone ID: 701039275H1
cgttgttcctgctttggtctggtctctcagctctgatagattggcaccgattctgggtgtgagccaaaaaagctttcttttgtttcctctgtttttcttttcggcaaagtagaagatatttgtgattttcttctgtgaatgaattcgagtcgttgcttctggcttcggtgcttgctgttttgttggcacaagttattggtccaattgaaatgaaagagtttgagtgaaaaggagacttagactgtgtggtctggccatggagaat

SEQ ID NO: 46674 - DNA, 270 bp, Glycine max
  Clone ID: 701039276H1
agaaaaacgaacaagaaaaaatcggatgagctatacatttcttagcagaaacttcaccggacctgagaattgagaaagtgtagtttgagtttcacatcaaaagattgtgtgtaagaagcgttttcttcagatcgatggaaatcttgggattgatctaagctgcgccgttggatctctccgccacggccagttaccggagaaggactgcttgctccctctcatttccaaactcctcggctacgccatcgtcgcggcttccaccaccgtcaa

SEQ ID NO: 46675 - DNA, 269 bp, Glycine max
  Clone ID: 701039277H1
taccaattagcctaaaaacactcacaacccaacccaagttttttcagtttttctcttcccaaagagttttgttttgtctattgttctcatgggtgggtttgaacagcagatgaaggatagagccaaggagctcaaggtctgctcaagaaaggggtgaagattgtgggagattcatgcaagaaggggtggaacaaagtcaaacacatcaaacgctagctgattagtgatttgtaatcatttgttgcatggcttattatcccaaagtctct

SEQ ID NO: 46676 - DNA, 271 bp, Glycine max
  Clone ID: 701039278H1
ccaaaacatcagtcatctccttcacaggaaccctaaatctgaaactaccttgactccgatcagccacggctgagaaaatagctcgtcttcacgatccagcgattccgctctccaacgggactgcgcagggtgaagaatcgaaggccagccgccggtgaagaatcgcgcgattactctggaaatcgcgcttccagcacgattcatgcccgatacagagatttaaccacgattcaggaacaaaaacgagacaacctccgattcgtactggtag

SEQ ID NO: 46677 - DNA, 65 bp, Glycine max
  Clone ID: 701039280H1
gggattcggctcgaggttttggagacccctacgcaaacccctccctgtcgctccatccacgcggc

SEQ ID NO: 46678 - DNA, 271 bp, Glycine max
  Clone ID: 701039282H1
cagatatcttgctagggttttaggaaaagacactgtctcgcgagtcaacacaggttacagcaatggctttctttggtagaattgggaatttattaagacagacagcaagcaggcaggttagttcagaattgcgatcatcccttccctttttcaggctatacgcagtatgtcatctgctccaagcacaaagctgtttatcggaggtgtttcatattctactgacgagcaaagtttgagggaagctttttcaaaatatggtgaagttgttgat

SEQ ID NO: 46679 - DNA, 270 bp, Glycine max
  Clone ID: 701039283H1
ggaaaattagccaaacaaaagcaaagatcaaacaaaccaaggacgagaacacgatgttgcttgaacttgcacttggtttattggttttggctctgtttctgcacttgcgtcccacacccactgcaaaatcaaaagcacttgccatctcccaaacccaccaagcccaaagcctcgtctccccttcataggacaccttcatctcttaaaagacaaacttctccactacgcactcatcgacctctccaaaaaacatggtcccttattctctct

SEQ ID NO: 46680 - DNA, 271 bp, Glycine max
  Clone ID: 701039284H1
gtttatgtagctattggtcaaaaagcatcttctgtggctcaagtggtgaataccttacaagaaagaggagcaatggaatacactattgtagtagctgaaacagcggattctccagctacattacaatacctcgccccttaacaggagcagctctggctgaatattttatgtaccgtgaacgtcacactttaatcatttatgacgatctctccaaacaagcacaggcttatcgccaaatgtctcttctattacgaagaccacctggtcgcga

SEQ ID NO: 46681 - DNA, 270 bp, Glycine max
  Clone ID: 701039285H1
aaaatctcgaattagggttctgattttaactaattttccgttttgatggtacttttcaatttgggtaatccgatgaatgatgatgattcatgatttgcatagtgattgtggaagctcaacagagggattggtactgtagtagggctaggagtccctgaaatgtatatgcctgtggctacctctgccacgctgcgcggcggattgcctactgacagtggggactctgttgtggcattagaccaagttcctcgatggaatgatgctgatcag

SEQ ID NO: 46682 - DNA, 272 bp, Glycine max
  Clone ID: 701039286H1
caattccactcccaccgaccaaaacgcgcaacacgttgtaattaaaacgacaccgaaactaatgggcgtcttcagcgaaaacccgaatccggacccggttgtgatccgccaggtttgggcttcaaatctcgaatccgaatccaactcatccgcgaactcatcgaccactatccttttatctcgatggacacagaattccccggtgttgttttccgaccacacctggaccccacaaaaccctacaaccaccgcaacaacaatcgcaaccgcca

SEQ ID NO: 46683 - DNA, 268 bp, Glycine max
  Clone ID: 701039287H1
agagaagacatattgttgagggtattcttattgggtttgataatctggatggagtgattcgcataatacgttaagcttcaagtaactcggctgcagcagctggtttacgtaatgcattcagtctctctgagaaacaagctaagctcttctggacattagcctaagaagactgtcccttcgtgagagtggaaactttgtggctgaaagtaaatctttgatggaacaaatttccaagttagaggaactgttgtccagcaggaaaaatata

SEQ ID NO: 46684 - DNA, 274 bp, Glycine max
  Clone ID: 701039257H1
attccaattctcaacactcaaactaactgcaacttgcattccctagagaacacacctctgttgccttccttcacttcagttagctgagtgtgttggtaagcactttccttctcctttgggtagttatgtcatcagcacctatgccgacaacaacaaggttcaaaacaaaggccttttatcttcttcttcttcttcttcttctgtgaggatagaggaagagatcatgaagcagggcatcataaccattttgaactcaaacacaaacacaaacaca

SEQ ID NO: 46685 - DNA, 280 bp, Glycine max
  Clone ID: 701039222H1
gtgatatggaaattgggaactcgtgttatgtaaagatgtgatgtggtgtggctagtgtgaaccgtttgcttgcttcgtgtatgtacattctctccggaggcaccgtcgtgagctcttctctctggtaggtccgtgttgctgaaaccttttgacctttccaataaagcatttgtttcaccctatcaatgagaggaaccattggaataaggattccaaaccccaatatttccaatgccaccagaaaaaccctagttccattttctacatcttccggttttgg

SEQ ID NO: 46686 - DNA, 280 bp, Glycine max
  Clone ID: 701039223H1
ctgatatcgtcaaccatcctttgcaattgcaagaatctttagtttttttatttcttcccatcagtgtctctctcagttgagtgccttacttttaacgcaggtacaaagaaggaagaagcacgcgtgggggtgtgggtgaatatatggcgaaagagtaccagtaggagagttgttggtgttggtgttattattgttggcaccaaagacaaaggcaatgagcataacaagaggtcataataaaagcaggggcaaagagtcctctggttctagtgatgagggg

SEQ ID NO: 46687 - DNA, 274 bp, Glycine max
  Clone ID: 701039226H1
ggtggtcgagtagttctctttgaacggacagatacaaaagatcattgcggatcaagaagggacttggagaggatggactattctattagtagacatcctgagttccgttataaaacagagtttcagagtcatgagcctgagtttgatatcttaagagtttggaaatagaagagaaaattaacaaaatcaaatggtgccaaacagccaatggtgctttgttccttctatccacaaatgataacaccatcaaattttggaaggttcaagaaaagaa

SEQ ID NO: 46688 - DNA, 275 bp, Glycine max
  Clone ID: 701039227H1
ctccaccctttattctcttacgtctccaactaatcatacagatcgataatcataatcatatctatagctaattaacttaattattttcatccctctactcttcttctctcctctaaactctcttttccattcttgcttcctttgtggttgtctgagttttctttccttcaatttaattgaaagatggcttgcttggtatctcgctcaggaagggaattgcagaggtacaacaacatgggtggccggcaagttgttgggtgagttcggtcgctatt

SEQ ID NO: 46689 - DNA, 275 bp, Glycine max
  Clone ID: 701039228H1
gtggtgccttatcgctgtggttatcatcttcttcttcctctttcttagatctcttctttctctacgccgcacgccgaaaccatggccggaaaaggagagggtcctgctatcggaatcgatctcggaaccacctactcttgcgtcgtgtgtggcaacatgaccgcgttgaaatcatcgccaacgaccaagggaacagaaccacgccgtcttacgtcggattcactgacaccgagcgtctcatcggtgatgcggccaagaatcaagtcgccatgaac

SEQ ID NO: 46690 - DNA, 276 bp, Glycine max
  Clone ID: 701039229H1
ttctatttcccataaagccatggaacattctcaactgtccattgtcattaccttctttgttttcttgctcttgcttaggctagttaaaaatcactagccaaaatcgagtcacaagttgccccctggtccatggaagttacctatcatggtaaccttcatcaggtagcactagcagcttcacttccacatcatgctctccaaaaacttgcccgtaaatatggacctctcatgcacctccaacttggtgaaatttcaacactggttgtgtcctccccc

SEQ ID NO: 46691 - DNA, 278 bp, Glycine max
  Clone ID: 701039230H1
ggaccccgtgaccgtttccacgggcataacctacgaccgcgacagcatcgagaagtggatcgagtccgggaaccgcacgtgcccggtcaccaaaacggagttgacaaccttcgacatgatcccgaaccacgccatccgtaggatgatccaggactggtgcgtggagcaccgttcccacggcatcgaacggatccccactcctcgtatccccgtcaccccgtacgaggttgctgacacgtgtacgaggatcttgtcggcggcgcaacacggggacgaga

SEQ ID NO: 46692 - DNA, 257 bp, Glycine max
  Clone ID: 701039234H1
gaaacgacggagactaaatctctaaaacgcttgaaaccctaaaactctgtgtcctccgccgttcacatcattgtcgacgttcgttcagttgctcacactctcaacagagaagagaagagagatgagaggaaggagctatagtccatccctcctcctccacgttacagcagaagaggaggagggaggagtcccagccctaggggccgctatcctccccgtccccgacaacaagatctccctaccagccttcttgttcg

SEQ ID NO: 46693 - DNA, 275 bp, Glycine max
  Clone ID: 701039236H1
tttcattctcctaatcttcgactggctaaggaagaagaagaaaaaaaaaaacagaagcgctcactaggtagcaatgccaatttcgcagttatgtccaaatatccattccgttcctcaaatcgtagcgtgcacccgcaacgacaaaacggatcgaaatccgtttcggggagacccaaggtgagccctcaactgaaccgttggtccagagcccgagccgtacggttcggtcagaaattggaccggtccagtatgcgaactcagctaccggaacccaa

SEQ ID NO: 46694 - DNA, 279 bp, Glycine max
  Clone ID: 701039237H1
attcattcaagattcagcaagtgcgttttggaagcagagaccgaaatacttcgagatggcccgtacaaagcaaactgctcgtaagtcaactggaggaaaagctcccaggaagcagcttgcaaccaaggctgcacgtaagtctgcaccacaactggtggtgtgaagaagcctcatcgttatcgccctggaactgttgctcttcgtgagattaggaaataccagaagagcactgagctcctaatcaggaagcttcctacccagaggttggttcgtgaaatt

SEQ ID NO: 46695 - DNA, 275 bp, Glycine max
  Clone ID: 701039238H1
cttatttcttatataatataaaatcgtcgctcgtcacggttccagcagtgcttttccgccgtcgtcgcggttcaaacttgaaaataagttaaggatcttcagcagcagaaacaatggatgaagataaaacccaacaacttcccagaaaatgaccaggtcttcagcttcatcgtctccatccacttcaaataacatagttgcagcaaaagtaactagccttgaacctctaacaatcaatgaccttttagttgggggagatccatcagcctagatga

SEQ ID NO: 46696 - DNA, 276 bp, Glycine max
  Clone ID: 701039239H1
ctcccaccgaccaaaacgcgcaacacgttgtaattaaaacgacaccgaaactaatgggcgtcttcagcgaaaacccgaatccggacccggttgtgatccgccaggtttgggcttcaaatctcgaatccgaattccaactcatccgcgactcatcgaccactatccttttatctcgatggacacagaattccccggtgttgttttccgaccacacctggaccccacaaaaccctacaaccaccgcaacaacaatcgcaaccgccactccgaccacta

SEQ ID NO: 46697 - DNA, 278 bp, Glycine max
  Clone ID: 701039240H1
taacaagatggcttcttttcatatcccatattcattccttgtgcttgtgcttgctatggtgatcacattgatgaacccgaccaatgcaaccctctctccccatttctatgataaagtttgccctcaggcattgccagttataaagtagtggttcaacgagcaattatccgtgagcgacgcatcggagcatctcttctgcgcttgcatttccatgattgtctcgtaaatgggtgtgatggatcaatattgctagatgacacccgaaacttcactggcga

SEQ ID NO: 46698 - DNA, 277 bp, Glycine max
  Clone ID: 701039241H1
cttgcaggaaaaatggtttcgctgaaactgcagaagcggctcgccgcgagcctgctcaagtgtggcagaggaaaggtttggcttgaccccaatgaagtcaacgaaatctccatggccaattctcgccaaaacataaggaagctggtaaggatgggtttatcatcaggaagcccaccaagattcactctcgctcacgtgctcgtcgaatgaaggaagccaagaggaaaggacgtcactctggatacggtaagcgtaagggtacaagggaggcaaggct

SEQ ID NO: 46699 - DNA, 273 bp, Glycine max
  Clone ID: 701039242H1
catttccatgcgcatggcttccaacgaaacttcaccgtttgactctcgcgagatgctcgcatccttcgtctcgtccacgcccctgccgtcggactcatggcgcctctgcacccaggccaacgccactcccttcctgaccttcgtgctgagcgtgtcggcgcctccgtgtatgtggctttctccggcgtccatatggccggcgagtccgacccgaactggagaaatttgactcctttgtacagcatcggcggcctgcctctgttttcgtctcgg

SEQ ID NO: 46700 - DNA, 172 bp, Glycine max
  Clone ID: 701039246H1
atcggaaaaaagatcagatatcttgagatcttattgatgagatgcatgataaaggtgaacctatcaatataatcaagtcacctatagttccttaattaatagacttgagaatgcacaacaggttttgatcatctattttcttattacctattttctttcaattttagtggtg

SEQ ID NO: 46701 - DNA, 275 bp, Glycine max
  Clone ID: 701039247H1
gaaaggaggaaaatattaaagctcttgcaattctcatgaactgtggagtcgtgttgggtttctattgttggggttgggagttcttaactgcccttcttctcttctctcatcaaccttattgatcattctcttcttcctcttctcttcaaaaaccaatttctttttatacaaataaagaagataccaaagaaaaacatagcaaaaaaatacaaataaaaaaatggaaggaccaagcaataaggggttgttggaatgtggaaggaagtgcactccac

SEQ ID NO: 46702 - DNA, 186 bp, Glycine max
  Clone ID: 701039248H1
cctcgagccgaatcggctcgagcggctcgagttttcgttcgcatcttctctctctctcagacatctgaaggtggtcgccgcgtatttgctcgccgtcctcggtggcaacaacagcccctccgccgatgtcatcaaggaaatccttggtccgttggagtagaagcagatgaagataggattgaatcg

SEQ ID NO: 46703 - DNA, 274 bp, Glycine max
  Clone ID: 701039249H1
tcaaaaccagagtggttctagtaatccggtgctgctagaggatgggaactagtgaatggcatatcgagcgaagatctagcttcggcactgaatcccccttagcaagagaggcaggaaatgtgcctgaaactgggtcactctctatgttgtgcttggcgcttctggggatcttgctaagaagaagacatttcctgcacttttccatctataccggcagggattcttaccagcagatgaagttcacatttttggctatgcaaggacaaaaatatct

SEQ ID NO: 46704 - DNA, 277 bp, Glycine max
  Clone ID: 701039250H1
cgcaaaagaggaaaaggagcatccaactacgaagaggcccagctcaaggatgagactgtgaaagtggtagtggtcgagaaggccctcaaaaaggttaaaagccttccaaagccagttctgaatcacgaacacatcctcaagaagaactctcttttggggtaaacaatttaccctccactttttggagtactaagcctcagcaggaggatgttgccgtggacgcagaggaagctcaagtttaaaccttcacatattaacacttgcacttcacgtgact

SEQ ID NO: 46705 - DNA, 277 bp, Glycine max
  Clone ID: 701039252H1
ggggaacacggagaagctgatgaaccagatcatggaattgaagttcacgtcgaaatcgctgcagcggcaatcgcgtaagtgcgagaaggaggagaaatcggagaagctgaaggtgaagaaggcgattgagaaaggcaacatggacgagcgcggatctacgcggagaacgcgatccgtaagcgcacggagcagatgaactacctccggcttgcctcgcgcctggacgccgtcgtggctcgcctcgacacgcaggcgaagatgacgacgatcagcaagt

SEQ ID NO: 46706 - DNA, 265 bp, Glycine max
  Clone ID: 701039253H1
tgagggcttgtgttggattggccccagagaataacatgattctcgagtacaagtgacgcatgggatagaataataattttgttggggtagcctatccgaatggtttatgttaataatatgtttgcttatgattttgcaagtgtaattgattgcatctctcattaatgctttagagcaggacatattctgttttctagggacatgaatgaatgtagtataattttgtgtaaaaaaaaaaaaaaaaaaaaaaaaaagggggggcccc

SEQ ID NO: 46707 - DNA, 273 bp, Glycine max
  Clone ID: 701039255H1
gttaaggatgttcctaacaatttgttgaggcacattaccttggacaacaatgagaacaaacctgtcactaacagtagggatacacaagaggttatgttggagcctgggctgaaattaattaaaattttcaaggaatataccagcagacatgcattttggatgattttggcttctatgaggctcgtcagaaaactattttggagaagaaagcaaagcaacaattcccaaagcaggtatgggaagggaaacctgctgatgagaagattgagataa

SEQ ID NO: 46708 - DNA, 283 bp, Glycine max
  Clone ID: 701039221H1
caacctcttctttctcttcttcttcctcttcttagcctccgccgccgccagcgtccccgcccacaacatcacccgcatgcttgccaaacaccccggcttctccaccttcaaccactacctctccctcacccacctcgccgaagagatcaacgccgccagaccatcaccgtcctggccctcgacaatgccgccatgtcctccctcctcgacaagcacctctccctccccaccatcaaaaacgtcctctccctccacgtcctcgtcgactacttcggcgccaaaa

SEQ ID NO: 46709 - DNA, 261 bp, Glycine max
  Clone ID: 701039175H1
ctagtctctaatttgcgttttgattcattgattccttcatttccttgctgagagtgcgtgtgatttctctcgtctcctttagaattccgattggtatttctaacactgtgaaagacagagagatatggcaggaggtggtggagctccagcacctaagatcgatgagccacagccacatccaccgaaggatcagctaccgaatgtttcttactgcattacgagtcctcctccatggcctgaggccatacttcttggttttca

SEQ ID NO: 46710 - DNA, 246 bp, Glycine max
  Clone ID: 701039176H1
gggttttaacaatggttctgtaccagcctcagcacaagctactttcccatatttatttgcagtcagtaagttcttgcaggcaggaacttttgaccttgtgggcactattatatacgagatagatgaccatccatatcatatttccttttgtaatggcactgttgaggttgtgaatctggtgctttcttagcatggaatccgtttttcctttactttggggttgatcctgtctctggggtaggatct

SEQ ID NO: 46711 - DNA, 257 bp, Glycine max
  unsure (1)..(257): unsure at all n locations
  Clone ID: 701039177H1
gaatcatggtgctgcagggcttcacagagggaggaaaactaagaaagatgagtcccagatggcgtcatcatggaaattcatgcgtccattcaagccatcaacagtaggactttccatggatttattatttaggagcaaataatcaatcagtttcttttgattttggcatcctagaatgaggatagtgatgatttaggccttgatacatcttttttgcatttcgcaatggttntcatttattttttttcgtgtcagtt

SEQ ID NO: 46712 - DNA, 252 bp, Glycine max
  Clone ID: 701039178H1
tgatgacttgcccaagactgttgtgatgactctcaaccaaggttcaattgtcaaaagcatggatttccatgccactgcagcaaattctacttcttgttggaacaaacatgggcgatgtcatggtgtgggatataggcagccgtgaaaggatcgcacaaagaaattttaaagtctgggaacttggagcatgctctgtggcgttacaagcatctctttccaatgattactcagcatcaatcaatcgggtggtgt

SEQ ID NO: 46713 - DNA, 259 bp, Glycine max
  Clone ID: 701039179H1
ccaaagaaaaggtgttgttgtggagtaggaatttgacagactcgaattcgaaggaatagaggtgatagggtttgtgattctgatatagcgatgagtgagagtcacgggaacagcaggaggcgaaatgttgaagatcaagatctgggactgtacttcttggaggcgtgcaggggtagggagatgacagacaaagaggaagaggcagaagaagaagaggaggaggaggcaccagggagctcaacaccattaacagctctgg

SEQ ID NO: 46714 - DNA, 270 bp, Glycine max
  Clone ID: 701039181H1
gaaatgcacagtaactaaacatgtctgcttcttctaatgccaatgggccatttgagcatcctagcttgcatgtaaatgcaattggtttacacaggaactgtgaattagacacagccccagtttcatggggggatgttgcttgtgataatgatgcttttgaaaaaaatgaatctgcttctatatctagagaacatactgttttgagcagcaacactggactacgatcccattccaactctaacttaaggactactatttcctctgatcatt

SEQ ID NO: 46715 - DNA, 263 bp, Glycine max
  Clone ID: 701039182H1
ctacattctctcgacacatgctttgctagatcacaggttgttggctaatagtgttctgtgtcagaaaatgttgtgaatgagagatgtgtattgctagcagtttgactgcacagttgaattagtatgctactaaggggattctgctggatgtcaaatgatgtttaagatttgatatacagtaaaaagaaattggagactatggaagaactacagtctcaatcagataattatagatcttcgtcatcgtcggcacgcagcccggc

SEQ ID NO: 46716 - DNA, 266 bp, Glycine max
  Clone ID: 701039185H1
ctttgttctctctgtctaagaagaagaagaagaagaagaagaagacgaatcaaatatccttgagccagacatgtacaggaacgctgcttcacgtcttagggtcatcagtgcccgttcgtgcagcagcagcaggatacctgccagtgccagatttgcaagttccgttgccacacaacaatcctcttctggtttgggtggtttatttggatggctcactggagaccgatccagttctttaccatctctggatttcccgcttccgggcg

SEQ ID NO: 46717 - DNA, 263 bp, Glycine max
  Clone ID: 701039186H1
caagaagcgaaactaaagtcagcattcgaaaaagatgagtagcatcggtacaggttacgatctatcggtcaccactttctcccctgatggccgcgttttccagatcgagtatgccgctaaagccgtcgacaacagcgggactgttattgggatcaagtgcaaagatggggttgtgttgggcgttgagaagcttattccgtcgaaaatgatgcttccgggttccaatagaagaatacactccgttcatcgtcactctgggatgg

SEQ ID NO: 46718 - DNA, 266 bp, Glycine max
  Clone ID: 701039188H1
gaggtagattttgatgaccatctcgatgacataagcaaggattgggtaaacccagggcttttcaactgatcccagcccctttgtctccatttttgccctatttactttgcaagtggaggatattgaggcttattatggtgcatatgctggattctcaatgatgaacatttagggactatattttgaccctaggaaagttgcttcatgaagctttttcagttgtataagcaggatatttaccaccagtccgtaaaggattttggttg

SEQ ID NO: 46719 - DNA, 261 bp, Glycine max
  Clone ID: 701039189H1
gcctcgaacacggcattcagcctgatgggcagatgccaagtgataagactgttggtggaggtgatgatgctttcaacaccttcttcagtgaaactggggctggaaagcacgtgcctcgtgcgatttttgtagatctcgagcctactgtgattgatgaagttaggactgggacataccgccaactatttcatcctgagcagctcattagcggaaaggaggatgctgcaaacaactttgcccgtggccactataccattggaa

SEQ ID NO: 46720 - DNA, 74 bp, Glycine max
  Clone ID: 701039193H1
ggagttttggggtgttgaggtgaaaagtggataatctcgtcatctctcggatcaaccttgagagattctccact

SEQ ID NO: 46721 - DNA, 177 bp, Glycine max
  Clone ID: 701039196H1
cgccgcctccggcgactccaaggtcttctacctcaagatgcagggagactaccacaggtacctcgctgagttcaagaccggcgccgaccgcaaggcagccgccgagagcacgctctccgcctacaaagccgctcaggacattgctaacaccgagctgcctccaactcaccctatcag

SEQ ID NO: 46722 - DNA, 92 bp, Glycine max
  Clone ID: 701039203H1
gtttctactctcacaactgtttatattctgcctcttctcaactgtgttcgtgtgtatgcatttgagttgaaagccagactcaaggagctgaa

SEQ ID NO: 46723 - DNA, 282 bp, Glycine max
  Clone ID: 701039206H1
ctctgatgcttttgaagataccgatgatgatctgatgagtgatgactatgattcagatgctagtcaaaagagtcatgagacacgtaagacaatcaaatggtttaagaagttttttgagattttggatggcttgactgttgaacagataaataaccagaaagacagtggcattgtccagcttgccaaggtggtcctggagctattgattggtacagaggactgcagcccttggtgacacatgccaaaacaaagggatctaaaagggtgaagattcacagggag

SEQ ID NO: 46724 - DNA, 277 bp, Glycine max
  Clone ID: 701039207H1
aggtgctgatggctcctggctttggtgcaccacagatgataccgtttatgatgctgttaaatcgagtgaccagaacaatgttggagctttagttgttgtgaaatctgatgcgaataaggcaattgcagggattattactgaaagagattattaagaaagatcatcgtgcagggaagatcatccaagtctatcaaggttggagatattatgactgaagagaacaaacttatcacagtcacccctgataccaaagttctacaggctatgcaactgatga

SEQ ID NO: 46725 - DNA, 280 bp, Glycine max
  Clone ID: 701039210H1
cgcggccctctctggaggccacaccatagggtttgcaaggtgcaccaccttcagaaacagaatctacaacgtaagcaacaacataatagaccccacgtttgcagcatctgtgaggaagacatgtccgaaaagcggaggagacaacaacttgatccacttgatgctacacccacaagagttgacaccacatactacacggatttgctgcacaaaaagggtcttctccattctgatcaagagctgttcaagggaaaaggcacagaaagtgacaaattggtgc

SEQ ID NO: 46726 - DNA, 278 bp, Glycine max
  Clone ID: 701039211H1
ctccttttctcttctctgtctaatcggtgccctgagatcacattgaacaatggtgaaggctgtggccgttcttggcagcagtgagggtgtcactggaactattcacttcgttcaggagggaagtggtccaaccaccgtaactggatccttgctggtcttaagcctggtctccatggtttccatgtccatgccttgggggacactaccaatggttgcctctcaactggatcacatttcaatcctaataacaaggagcatggtgcccctgacgatgagaa

SEQ ID NO: 46727 - DNA, 278 bp, Glycine max
  Clone ID: 701039213H1
attaattccaaaatcacactcctatatatcttcctatagcaatatatatgatgggtgacactgagatcaagccatcagttgaagtagtcgtatgtgcttccatgaacaataataatagcgcaaacaaccacaccctcccaaccgacataccaagccatcacaattaccaatcttgaccaggctccatgctggttactttttcatatgcctttcctttggagcacaagctttgctctggaagagtttgagtaaacacaacaaggactcacaaagtctct

SEQ ID NO: 46728 - DNA, 278 bp, Glycine max
  Clone ID: 701039215H1
caaaattcaggaaaaaaaaaaaaaaacatgggggtaaaggtgtatggtccaacccatggatccccaaagagggtcctggggtgtctgattgagaaggaaattgagtttgaaacagtgcatgttgatctcttcaggggggagaataaggacctgagtccctaaagctgcagccattgggaccccttccggttattaaagagggggattatactctctatgaatcccgggcaataatcagatacttagctgagaagtataaagcccaggggactgacttt

SEQ ID NO: 46729 - DNA, 143 bp, Glycine max
  Clone ID: 701039217H1
caacaatggcttctgtgcctcaaccaaaaatctcccttctaaccttattcttcttctcgtccttcaccatcattgcgcatgcaattgttcctcagaacgaaaccttacaatttgagaactcaggtgaacttggaccctacatc

SEQ ID NO: 46730 - DNA, 278 bp, Glycine max
  Clone ID: 701039218H1
gaacgagtgggtgatttgcagggtgtttcagaagagttcagctgggaagaaaactcatatctcggggataatgaggttggactcttttgctaatgaattgggttcttctgctctgccacccctttcagattcttcgccttctattggcacactaaacctctgaatgattcggcttacgtgccctgcttctccaatccaattgatgttcaaagaaaccaagaaggtgtcttcgattccgtcaccaactctatgtatgcggtttcttcaaatcctatgga

SEQ ID NO: 46731 - DNA, 280 bp, Glycine max
  Clone ID: 701039219H1
attgaactcaagttttttctcttctctcggtttcatcgccatggatgaagaagtgcgcaagatcttcagcaagttcgacaagaacggcgacggcaagatctcgtgcgccgagctgaaggagatgatggtggcgctgggatccaaaacgagtcgcaggaggtgaagcgcatgatggcggagcttgatcggaacggcgacggctacattgacctgaaggagttcggcgagttccattgcggcggcggcgacgggagggagctccgggaggcgttcgagctgt

SEQ ID NO: 46732 - DNA, 277 bp, Glycine max
  Clone ID: 701039220H1
gtcggagctgtgtctggggaaatttgcgttgtttttcgcggtacagctcacacacactgaacggtaagtatggcggacaaggctgttacaatccgaacccgaaagttcatgaccaacaggcttctttccaggaagcagtttgtcgttgagttcttcatccagggagggcaaatgtttccaaggctgaacttaaggagaagctagctaggatgtatgatgtgaaagaccctaatactgtatttgtcttcaaattccgaacacattttggaggtggcaa

SEQ ID NO: 46733 - DNA, 261 bp, Glycine max
  Clone ID: 701039174H1
ggagacatcagctcttccaaggagggggatatagttaaatcaaaagatctcgagagcggaagtagttctgcagacaatgtcgaagcaggaactgcagtttttctcgtggagcttgaggaaaaaagagctattaaggtttttgggaagagcactttgattggattggctctaacattctttgctggactttgcttctctatgttctcaccagcattcaacatagcaacaaatgaccaatggaatactttgaaaaaaggggtt

SEQ ID NO: 46734 - DNA, 265 bp, Glycine max
  Clone ID: 701039145H1
caaagaggaagaagacacagaaggagaggttcaacatcttcttcatctatggcgacgccggattctgacgctaccactcagcctcaagattccgacactgctcccaattccagtcctcccaacgccctcgtccccgccgctcccgccgtttgcctccttcgcttcgccaccgactccgccggcggcgctctcatgggctccgtctttggatacggtgctggattgtttaagaagaaaggttttaaaggatcctttgtagaagcag

SEQ ID NO: 46735 - DNA, 259 bp, Glycine max
  Clone ID: 701039146H1
cacaagtcttccttcccacttgcaccctctctctctcgccggtcgccgaatctttctccgcatccgcaacctccgccgtatccgcctttgattcttcaaccgatggatcggccggcgaccggacctggcgtggacatgccgatcatgcacgatagcgaccgctacgatttcgttcgcgatatcggctccgggaatttcggcgtcgcaaggcttatgaggcgataaccgacgcaagagcttgttgctcgtaagtatattg

SEQ ID NO: 46736 - DNA, 262 bp, Glycine max
  Clone ID: 701039147H1
cctgaatcaaagagctttagtgagcaaggtttgggaccaattccatcaaagtggagaggaatctgtgataacggaattgatcatacttttcactgcaacaggaagctaataggggcaaggtacttcaacaagggctacgcctcagtgctcggcccactgaactcctcctttgactcgccacgtgacaacgagggccacgggacccacaccctatccacagctggcgggaacatggtcgcacgtgtcagcctcttccgccaag

SEQ ID NO: 46737 - DNA, 276 bp, Glycine max
  Clone ID: 701039149H1
gtgagtgctttctttctgtaactaaccccaatcatcaactcagtcagcgaatgaatctgtggacggacgagaactcctcggtgatggaggccttcatgccatcctccgatctctcctccatctggccccctcccgctcctccgcagccgcaatccacggcggtcttcaatcaggacaccctccagcaccgcctccaggccttaatcgagggcgcccgagagacctggacctacgccatcttctggcagtcctcttacgactattccggctccactc

SEQ ID NO: 46738 - DNA, 271 bp, Glycine max
  Clone ID: 701039150H1
aaagagttttccaagtttatggttgtgttgtgactgcacaagacatggttgaacccagagatcccgtgaaagtgtttgacaaagcagactactatgcacatcctgagcattacaatcccactttccatgaaaaaatagcaccatatgcatctgttattgtcaattgcatgtattgggagaagagatttcctcaattgctgagctataagcagatgcaagacttaatgggccgggggagcccccgtgttggaatagctgacataacgtgtga

SEQ ID NO: 46739 - DNA, 271 bp, Glycine max
  Clone ID: 701039151H1
gagatttcttcgttgaactgtgggatgtctcaggacatgaacggtacaaagattgtcggcctctgttttattcgcagattaatggtgtaatttttgttcatgatctttcacaaagaagaacaaagactagcttgcagaagtgggcagctgagattgctgcaactgggacattttcagctcctttgggatctggtggtcctggtggccttcctgttccatatatttttattggtaataaagctgatattgctgcgaaagagggtacaagagg

SEQ ID NO: 46740 - DNA, 268 bp, Glycine max
  Clone ID: 701039152H1
ctcgagccgctccagaacagcaagggagaatcaattcctcatcgctgcaattctcatctttcactctctagattctcatctatctctctctctctctaaagttcaaagtttttgttgttttccccccgagtctttctctctcttgctgtggacttgtggaatgctggggtcagagacttctgagacatgttctagcagacttttgttgaattgggtcactggtttctgtcataggtggtagagaatctgagtcctcagagatctaagc

SEQ ID NO: 46741 - DNA, 267 bp, Glycine max
  Clone ID: 701039154H1
ctctgatcctgtaacatcaatgggcctagtgcagcatgaaggcggtccctgtggcgtattggcagctattcaagcatttgtgcttaaatacattattttcttcagtgatgagttgaaagatgtgtcatgcatgtcacagaagggtccgggtgcagcatttaaaagtcagtctgttccatcaaataatttttcttcgctcactgaaggtgaaaaagtaagagctcttgtaaaaagtatgggtgaaattttattttcatgtggaagtaa

SEQ ID NO: 46742 - DNA, 259 bp, Glycine max
  Clone ID: 701039156H1
ttcttctcttgcggctagggttttagcgcagttcttctagatttaaggaagatgggtaaggaaaaggttcacatcagtattgtggtcattggccatgtcgactctgggaaatccactaccaactggtcacctgatttacaagcttggaggcattgacaagcgtgttattgagaggtttgagaaggaagctgctgagatgaacaagaggtctttcaagtatgcctgggtgctggacagacttaaggctgagcgtgaaaga

SEQ ID NO: 46743 - DNA, 257 bp, Glycine max
  Clone ID: 701039157H1
ccctcgagccgaatcggctcgagcacaaagcgggatactgtctgcaccagctaccatctctccctctctttcttagtgcctacctgccagaagtcaaaatcgcccaagaaactgtcctattcacatctgcatcagtgaacgaggggcaccctgacaatctctttgaccagatctccgatgctgtgctcgatgcatgcttggagcaggaccctgacagcaaggttgcctgtgaaacctgcaccaagaccaacatggtg

SEQ ID NO: 46744 - DNA, 260 bp, Glycine max
  Clone ID: 701039158H1
cgccgccgtcgtcgaggacgtcaagaaaaaccccgacgccgccgtctccggcaccgtcatccgccgccgccttcagctcatgatgtacaacaacatgtaccgcataatgttcgaccggaggttcgagagcgaggaggatcccatcttccagaggctaagagccttgaacggagagaggagtcgcttggcgcagagctttgagtataactatggtgattttattcccatcttgagacgcttcttgaagggttacttgaaga

SEQ ID NO: 46745 - DNA, 262 bp, Glycine max
  Clone ID: 701039159H1
cctcgagccgctcgagccgaatcggctcgaggttgggtcgttcccagcaattgttagtatgctgcaagggcccagttctagtggcactgatatgaaacaccagtcttccttgaatcatgtgcaaaatgcagtagatttctgtttgtcagattataggggatcttctggtgagactgcatgtttacgtggtactggtcataatgttcagagcttcagtggctggaatactggtgaatctagttcaagactcaatctgatcaac

SEQ ID NO: 46746 - DNA, 262 bp, Glycine max
  Clone ID: 701039160H1
gtgtcatttacgcttctcttctctgcagcaactatgcctaaccctaaggtcttcttcgacatgaccatcggcggtcaatctgctggccgcatcgtgatggagctctacgccgacgtcactccccgcaccgccgagaacttccgcgcgctttgcaccggcgagaagggcgtagggcggagcggcaagcccctccactacaagggctcgtccttccaccgcgtgatcccgagtttcatgtgtcagggtggcgacttcaccgccg

SEQ ID NO: 46747 - DNA, 274 bp, Glycine max
  unsure (1)..(274): unsure at all n locations
  Clone ID: 701039161H1
ctaacctcccactgaagagtaattggtggattccagcaatggccgtggttcatggcagttgggtcaagcttgatcaaagaggagaagggcaaggagcgagaagctcacatgctatagccatagtagcacagaaggtgtatgcatttggtggcgaattcgtgccacgtgtcnccgttgataacaaacttcacgtgttcgacctagagactttgacctgggtcgtggctgatgcatcaggggatgccccancgccacgtgtcggtgtcacaatggc

SEQ ID NO: 46748 - DNA, 258 bp, Glycine max
  Clone ID: 701039162H1
tcgagccacactgagaggaagagggagtgagagtgttcttcgtttgctaccttctctcacaaatggttacgttcaggtttcaccagtaccaggtggtcgggagggctctcccaacggaagcagatcagcatccgaagatctaccgaatgaagctctgggccaccaacgaggttcgcgccaagtctaagttctggtattttttgaggaagctgaagaaggtaaagaagagcaatggtcaagttcttgctatcaacgaga

SEQ ID NO: 46749 - DNA, 263 bp, Glycine max
  Clone ID: 701039164H1
gcactgagcagttgaggaaatgggaaccttgggagagcgatctacagcgttggtaactggattcgagaaactggacaggccattgatcgtctcggttcccgtcttcagggcggttactacttccaagagcagctctctaggcatcgaactctgatgaacatatttgataaggctcctgttgttgataaggatgtatttgttgcgccaagcgcctccgtcattggagacgttcaacttggaagaggatcatccatttggtatgg

SEQ ID NO: 46750 - DNA, 269 bp, Glycine max
  Clone ID: 701039166H1
tgaagatgagctttttcacccatccaaaccttccaagaaaaacaacaacatcaacaaaaagcatgggggcaacaccaataacgatgataacagcaaggattccaaggctgctggcgacaagagattcaaaacgctgcccccagcagagtctcttcctaggaatgaaaccattggaggctacatctttgtttgcaacaatgataccatggctgagaatctcaagagacaactctttggtctgcctccacgatacagagattctgttcggg

SEQ ID NO: 46751 - DNA, 271 bp, Glycine max
  Clone ID: 701039167H1
atgaccactacagttgctgccctgcagactatcccatctgcaacacttacgctggaacttgtctcaggagcaagaacaacccctttggagtgaaggcattaaggcgtactccagcgaaaccccattggaccttcggacgtaagaacaaggtcagcagtgcttaagcagtttaaggaaatgtgaacgtgcagaaggagccaatgatgaagtaaaagggaagacgaaggactcaagcaccagctggatgcacttcccccttcttcacataatg

SEQ ID NO: 46752 - DNA, 266 bp, Glycine max
  Clone ID: 701039168H1
atctcggtctgagtggcagatccgcgccgatggtgtgagcgaaaacgttattggggcagaaataaaaaaccatagaatagatagagttattactccctataacatgtggcagtgatttggagatggcagacttaccagggtatcttcatgcctgtttgaacacagggaagcttgcctccttggcaattttggtgtctggaggaatcgtcttgcaaattttggcatgtgccttgtataataactggtggccgatgctgagtgtgtta

SEQ ID NO: 46753 - DNA, 270 bp, Glycine max
  Clone ID: 701039169H1
tgccatttcaatccccagtttcttcttcaacgtcctcttacgagcagatcccaattctccttcccagtttcaaaccctaattccctcattcccatggcctcagaagagcccactgtcgcggtggaacccgctcccgaacctgccaccgccgagcctcccccggaggagaaggaggagcccaaacctgaagccaaggctaagaaaaccaaggaacccaaacctaaaaaggtttccagaccacgcaaccctcccactcatccttcctacgag

SEQ ID NO: 46754 - DNA, 267 bp, Glycine max
  Clone ID: 701039170H1
cctcgagccgaatcggctcgagtgaaaatgggttcttctttgtggcctttgtgtctaatttcggcttcactagcctcttcaccattctgtgcctttccacggaggccagtggatgttccattcggcagaaactacgttcccacttgggcttttgatcacatcaaatacttcaatggaggttctgagattcaacttcatcttgacaagtacactggtactggcttccagtccaaagggtcatacttgtttggtcacttcagcatgaac

SEQ ID NO: 46755 - DNA, 265 bp, Glycine max
  Clone ID: 701039171H1
atctgtcctcatacctaactcctatgtttggtaaagacaaaacctcagaggaaaggagaattgccatttgtatatttgatgatgttgctgagcatggtcgtgaagctgctcttaaatattatgattctcttcttccattcttacttgaagcttgcaatgatgaatatccagatgttcgacaggctgctgtttatggtgttggtgtttgtgctgagtttggtggatctgttttcaaaccccttgttggagaggcactttcaaggtt

SEQ ID NO: 46756 - DNA, 265 bp, Glycine max
  Clone ID: 701039173H1
tcagacttagtatttctaagaattatgtgtttgttaaaggcttctatgacagcctcactgcttcaaaatagattcatgtatgtgagactcagaatctctggggaaaattgtgtgtggtgtggactacttgttttgtttgtcattgagctatatcgctgttaattaggattttgtttcaaaatgatgcttataagttgtaatctaggatttctcccattgaaatcctaggttgttcttgacatttgctatttcaaagaataaatat

SEQ ID NO: 46757 - DNA, 260 bp, Glycine max
  Clone ID: 701039144H1
atggaatttcgatgctcagtcatctcttttaccattctcttctctcttgctcttgcaggagagagccatgtccatgcatcgctacctgaggaagattattgggaagctgtttggccaaacactcccattcccactgcactgcgagagcttctaaagccactccctgcaggtgttgaaatcgatgaactccctaagcaaattgatgatacacagtacccaaaaacattcttctataaagaagaccttcatccaggcaaaac

SEQ ID NO: 46758 - DNA, 279 bp, Glycine max
  Clone ID: 701039117H1
ggaaatgttgcagccttcatatctgaagccatacagggagtggggggtatcattgaattggctcctggttacttgccagttgtgtacaatgccattaaaaaagcaggaggactttttattgctgatgaggttcaggctggctttggtcgcactggtagccatttctggggatttgaggcccacaaatccgttcctgacatagtcacaatagctaagggcattggaaatggcattccccttggtgctgttgtaactactccagagattgcagaggtctta

SEQ ID NO: 46759 - DNA, 280 bp, Glycine max
  Clone ID: 701039118H1
ctcgagcgaatcggctcgagcagaagacagagtgagacgctactcacgatggagggaacagtatcctacgcgcgcatgcctcgggtcaaaatccgcgagctgaaggacgactacgccaagttcgagctccgcgacaccgacgcgagcatcgccaacgcgctgcggcgcgtgatcgatcgcggaggtgccgacggtcgccatcgacctcgtggagatcgaggtcaactcctcggtgctcaatgacgagtttatcgctcacaggctgggcctcatccccctc

SEQ ID NO: 46760 - DNA, 275 bp, Glycine max
  Clone ID: 701039120H1
gttaagtgtaccaagttaataggtctttatatttagttgttgacatcaacaaagtcatggaggaagttaatgtggttcaaaccaagaatggaactgttgcagtagcttctgcgtttgctggacataaggaagctatacagcaaagggaccacaaatttttaagaattgctgttgaagaagcctataaaggggtagactgtgaagatgggggtccctttggtgctattatagtatgtaatgatgacatagttgctcgatgtcacaacatggttctg

SEQ ID NO: 46761 - DNA, 272 bp, Glycine max
  Clone ID: 701039121H1
gcggaaaacgttgttgagttcacagacttacccgtcaagaggccaagagaagaagaagaaggaaccaatggcgtctccaacgacgccgtttcagcgctccccaatgaccctcaataccctggcatctctgcggttattcccggttggttctccgaaatcagcccaatgtggcccggggaggcacattccttgaagatggaaaagattttgtttcaagggaagtctgactatcagaatgtcatggtcttccagtcatcaacatatggcaaagt

SEQ ID NO: 46762 - DNA, 272 bp, Glycine max
  Clone ID: 701039122H1
aagtggtgtcctaaagaaagaccatctttctcttttctgtatcaccgttggaagagactgagatgggttcaaaaaccaagacttttacctttgaagaggtggctaaacacaatcacaggaaggattgttggattatagtcaaagggaaggtgtatgatgtcaccccatttttggatgatcatccaggaggtgatgaagttttagtgactgcaacagagaaggatgccaccactgattttgaagatattggccacagtgattcagcaacacag

SEQ ID NO: 46763 - DNA, 270 bp, Glycine max
  Clone ID: 701039124H1
gcatcgcagtatgtttattgcctcaagaaattgggacttgatcccagaaaggtcaatgtcaatggtggtgccattgctcttggacatcctttgggcgttacaggtgcacgttgtgttgcaactttgttgaatgagatgaaacgcggtggcaaggattgtcgctttggtgtaatctcaatgtgcatagggtcaggtatgggagctgctgctgtatttgaacggggggacttttaaagatttgtgcaagtttagaatagttcataaaaataa

SEQ ID NO: 46764 - DNA, 270 bp, Glycine max
  Clone ID: 701039125H1
ctgataccaaatatagaagccaaaattgtgaacccagaaacaggggaagccatgtttcccggtgaacaaggagaactctggatcagaggaccttatgttatgaaaggttattctggtgacccaaaagcaacttcagcaactttggtggacgggtggttaaggactggggacctctgttattttgatagcaaaggtttcttgtatgttgtagataggttgaaagagttgattaaatacaagggctaccaggttgctccggcagagctagaa

SEQ ID NO: 46765 - DNA, 262 bp, Glycine max
  Clone ID: 701039127H1
taagaagagagagaaagacagaatgaatgaataaataatcatgcactctctttctattcttcttctttctatcataacataactatgatatcaacaccatataataattaatagcaataatttagtaatactctcttcattgtcaattccatcttcacttcacttcacttctctgttctgttgaatattcaatcattcgcaaaacgcatactttgctcttcattctcagcttttttcttgcattcttaattctccgttttcc

SEQ ID NO: 46766 - DNA, 249 bp, Glycine max
  Clone ID: 701039128H1
gcgatttggcattgctctttctttccctttgtcccctctgtcctcgtgcgcttcctccctgcaattcgctcttcggttcgcacctcaatacctgtctctctcaaccaaaccttacagatcttcttcccaaccatcattctttttcacgaagcggcgtttgtattggcccaatatcacatgagtcgattcattgcatttcttctctcctcttctcctgttgatgttagttagcacctaagaatacagact

SEQ ID NO: 46767 - DNA, 263 bp, Glycine max
  Clone ID: 701039129H1
cgagaggagaggagagaagagagaaagcttttggggtttgaatctatagaatagaagcaaaccaaattgaaagaagatcgatcgatcgatcgatggctctggtcggagttgaagtgaagcatgcgcgcggagggcgcaccggaggagaattgctccgccaagcccaccaagcagggcgagggcctccgccactactattctcacaacatccacgagcatcagctccttctccgtcaaaagacgcataacctcaaccgtcttga

SEQ ID NO: 46768 - DNA, 254 bp, Glycine max
  Clone ID: 701039130H1
gttaaggctttccaaaagtcttacttcaacaagtatggtggtggggctaattccctcgctgctgggtacagcacaggtactggattgggtgctgagattattggaacctttgttttggtctacactgtcttctctgccactgaccccaagaggaatgccagagattcccatgtgccggttttggctccacttcccattggatttgctgtgttcatggttcacttggccaccatcccagtcactggtactggtat

SEQ ID NO: 46769 - DNA, 280 bp, Glycine max
  Clone ID: 701039133H1
caatcattgaagggtaattcacgagctcttgcaactgtcacagcaatcattgacggaaccggttctataggggctgcagttggacctttactaacaggttacatatctgcaaagagctggagtgctgttttcacaatgttgatggcagcagctttaattgcagggctgcttttgaccaggctagtcgtgtctgaggtggccacaaagattgaagagtcaaggtataatagagcacaagactgttcattcaatgtataagaataaacctaaagggtcacag

SEQ ID NO: 46770 - DNA, 276 bp, Glycine max
  Clone ID: 701039134H1
cttctttctttcttactttctctcactcaccaaatagttttctcacaaaggaggaagaatggcatctttcatttcactctctttgttgcttctctttctcaattaccccttcctttccctctcaaccaaccctgaagggaacgctctgcatgctttgagaagcaggatttctgatcccaacaatgtgttgcagagttgggacccaacactggttaatccctgtacttggttccatgttacttgtgactccaacaatcatgtgattcgcttagactt

SEQ ID NO: 46771 - DNA, 276 bp, Glycine max
  Clone ID: 701039135H1
aaaacatctcaatgggttcttcttctattacaacatcgcccgcaaccatgaccatggctgcgatcgtgctcctgttcacggtctttgccgtttcctccgccctagacatgtcgataatctcgtacgacagcgcccacgcggacaaggccgccacgttaccgcaccgaggaggagctgatgtccatgtacgagcagtggctcgtgaagcacgggaaggtgtacaacgcgctcggcgagaaggagaagcgcttccagatcttcaaggacaacctgcga

SEQ ID NO: 46772 - DNA, 271 bp, Glycine max
  Clone ID: 701039137H1
ctacaactagtaacaaagatccaacaagcagatcaatctctctctctgtctcccaatcaaaacagacatgggtttgaaggaggattttgagcagtatgctgagaaagcaaagactttgccaccgactcaatcaaacgaagacttgcttatcctttatggattgtacaagcaggccaccgttggacctgtcaacaccagccgtccgggaatgttcaacatgagggacagagctaaatgggatgcatggaaggctgttgaagggaaatccaag

SEQ ID NO: 46773 - DNA, 271 bp, Glycine max
  Clone ID: 701039138H1
cagaccacccagagctccgccgtggcgctgaagtgcctgatcgtggtgcaccacgtgatcaagcgcggcagcttcatcatgagggaccagcttccgtacagcggcggcggcaggaactaccttaacctctccaaattcagagacaagagcaaccccgtgtgctgggaactctcttcttgggtacgatggtacgctaaacacgtggaacagcttctctgggcttccagaattgtcgggttcttaccgacggaaaaagagagagtttcgggtc

SEQ ID NO: 46774 - DNA, 270 bp, Glycine max
  Clone ID: 701039139H1
gcgcaagtgaggaacaagcaagtgcttctaaaggactatgttaccggttttcccaaagaatccgacatgaatattgtcgaaagtaccataacattgaagcttccacaaggttccaatgatgtcttgctcaaaaatttgtacttgtcttgtgatccgtatatgaggaatctcatgaacaagcccgaaggccctcccaatagtcgtgcttacactcctggctctccattaataggatatggtgtgtctaaagtcctggaatctgggcaccca

SEQ ID NO: 46775 - DNA, 270 bp, Glycine max
  Clone ID: 701039140H1
cagtgaaagagaatccgaggcgaagagaagagaaaaattaagatggaggggaaggagcaggatgtgtcgctgggagcgaacaagttcccggagagacagccgattgggacggcggcgcagagccaagacgacggcaaggactaccaggagccggcgccggcgccactggttgacccgacggagtttacgtcatggtccttttacagagcagggatagcagagtttgtggccacttttctgtttctatacatcactgtcttaaccgtcatg

SEQ ID NO: 46776 - DNA, 269 bp, Glycine max
  Clone ID: 701039141H1
agacaatgttccttgtgatgctggtggcagttgtgctaattatgatgctgatactgtacatgaagcttccattattcaaaagttgcctgtgcttcttcaacccgtggctgcaaatggcaaaaaagtccccctcggacaaagaaaactgatgtgtaatgatgactgtgctaagttagagcggaaaagggttcttgcagatgcttttgagattaccgctccaaatctggattcactccattttggtgagaattcggttgcttctgaattgc

SEQ ID NO: 46777 - DNA, 265 bp, Glycine max
  Clone ID: 701039142H1
ggggattgcttttgctcagaagcaaactgttgctgcttaaatttccttgtcagcaggtggtttcttgggttatggatttatttgagcataaatactacttagaggacttaggttgcagatttgttgtagcatctttactgcttccagaacttaggattcagactttctatgtatcaattctacttccagttttgttagtagaacgggaggacgcttccatttctgttctctaaaccgagcttaggttttggtcagaatcttcaaa

SEQ ID NO: 46778 - DNA, 264 bp, Glycine max
  Clone ID: 701039143H1
ataatatggcatttaaaggctatttcgttttgggcctcatagctcttgttgtcgttggcacttccaaagttacatgcgaaatagaagcagataaagtttcacctattattgacttttccctcaatcggaacagtttccctgaaggcttcatctttggggcggcatcatcctcctaccagttcgaaggtgcagcacaggaaggtggtagaggaccaagtgtatgggataccttcaccataaatatccagataagatcaaggatgg

SEQ ID NO: 46779 - DNA, 270 bp, Glycine max
  Clone ID: 701039116H1
ctgcaactttgaacttctgttctctattattattatctttctctttttcttcatctcttatcttccttcacctttttattgcaagaaaaaaaaaatgagcaccataagcatggtagaggcaaagctgccaccaggattcaggtttcatccaagagatgaagagcttgtgtgtgattacttgatgaagaaggtgcaacacaatgattcccttctcttgatagatgtggaccttaacaagtgtgagccatgggatattcctgaaacagcatg

SEQ ID NO: 46780 - DNA, 257 bp, Glycine max
  Clone ID: 701039078H1
cccacgcacgcgcccttccaagccgaagcctactgaaactggcttctgttgtgccgtttagcttcttcttcaccatattctccttcttttctcagattcagcagtaactatgaatcgcgttgcattgcccaaatccattgcccagcgtttcagaggcatccaccacagcccgcggaaccagtggtgtaataacaaccgttgcgaaacgcaggtccaaagtgctgggcccgtggcttctctcctcaagtcccgttccg

SEQ ID NO: 46781 - DNA, 258 bp, Glycine max
  Clone ID: 701039079H1
aaacaaatggctatatattcatccatgctgaaggtggtctaaatcagcaaagaattgcgatatgcaatgcagtggctgtggcaaaaatattaaatgccactcttattttgcctgttttgaagcaggaccagatttggaaagaccaaacgaaatttgaagacatttttgatgtggatcacttcattgactacctgaagtatgatgttcgtattgtccgtgatatcccagaatggtttaccgataaatcagagctattta

SEQ ID NO: 46782 - DNA, 257 bp, Glycine max
  Clone ID: 701039080H1
gcaaaatgcaacaaattcagaggcctcaaaccgagagaatacgctgccttgaaggactgcgctgaagaaatcagtgacagcgtcgaccggctcagccgtcgctgaaggaactcaaattgtgtaaggtgaagggtgaggacttcacgtggcacatcagcaacgttgagacgtgggtgagttcggctttgaccgatgagagcacttgcggcgatgggttcgccgggaaggcgccgaatgggaagattaaggaggcgatt

SEQ ID NO: 46783 - DNA, 258 bp, Glycine max
  Clone ID: 701039084H1
gcaggagccattactctcccccaccgccatgacggttgcaagccccgcctcttcacgcaccaagaggctcgtcaagctaacgctctcgctcctccgcctcggcttcaactcctccaaatgcaaaacggcagcgaagatggcggtggcgaggatcaagctgctgcggaacaagagagaggtggtcgtgaggcagatgcgacgcgacattgcccttcttctccagtctggtcaagacgccaccgctcgcatcagggttga

SEQ ID NO: 46784 - DNA, 256 bp, Glycine max
  Clone ID: 701039085H1
aattaataacaagctagctattagttcgattttgtagtaagtgaggtgccaatatggtgaagatagctcttggtactttggatgactcttttagcgctgcctctcttaaggcttatttcgcagagttccacgcaactctgattttcgtgttcgctggtgttggatcagccatcgcttacaacgagcttacaaaagatgcagccttggatccaacggggctggtggcagtagctgtggcacatgcatttgcactgtt

SEQ ID NO: 46785 - DNA, 256 bp, Glycine max
  Clone ID: 701039087H1
gcattcttgcgcactcagttattctctctctctctctagagcgtcgtcgtttagttagggcagaaaaccccttttcggatcggtggagcgaacctcgccggcgagacccccgaggctgttcaatcggcgatcgagcaacggcgaaaagcgacgaagatgaaggttttcgtgaagactctcaagggcacgcacttcgaaattgaagtgaacccttcggacacgctttctgaagtgaagaaaaatatagaaactgttc

SEQ ID NO: 46786 - DNA, 260 bp, Glycine max
  Clone ID: 701039088H1
aaaatattaatagcacttatattccttgcattcgcaatcacggctaccacttcaactcgaatccttgatgaaatagaaacaccagaagaacccaacagtgctgccgaatcccctgttgtctctccacttccacttgttgcagaatccccagttgcggaagtcaaaggagttgaccaacaacatcacacgctctcatttttcatgcacgacattctgggaggctccaaccccacggccagagctgtaacaggcgtggtgac

SEQ ID NO: 46787 - DNA, 250 bp, Glycine max
  Clone ID: 701039092H1
ttgctcctcaatttcatcagaagtcaactgctggtggcgccgttgttgatttgccttctcctgattcagtttctaggtattctcgatttcaatttctctatctggttttgtctttgaattgttctgattgtaaattttaatgttaagattggattgtttatttcattagtatgttgaatcatgttattacttatcgggtctggttatgagtgtatagggttagtaagggatttggttcttggcgatggtt

SEQ ID NO: 46788 - DNA, 253 bp, Glycine max
  Clone ID: 701039093H1
ccgacttgcaaaatatttacctgactcctcatctgatggtatgtctatctgttttttcgttatttaaattgtttgtgtatatgatatttaggacttatttatttgttgtttttagtccattaaacattcattttagcctgatttctcctttagatttatttggtgataacttttaaaaatgttgatagaagggaaaaaggccgacaagaaagaaacaggggatatgctttccaatcttgatggttcatcgtga

SEQ ID NO: 46789 - DNA, 254 bp, Glycine max
  Clone ID: 701039094H1
ctttcaattatccaacagaactgaagatatcgtagctggaaacgtctagcacccacaaatgggtaactcccatggacaccggcatcgcaaacacggtaactccgttcctcccaacacggttcctcctccctataaatacaatcctcacccaaccacctccaattccaccatgctttctcttccttacacccacgtcgacaccaccctccgctccctcgccgcccaagccgagggcttcggtcgcttcgctatcg

SEQ ID NO: 46790 - DNA, 248 bp, Glycine max
  Clone ID: 701039095H1
ctttccggcaacaagcgacccctgccgtcgaattccgcgacggatttaaaacgatcgcattcggaagttgtgagcttgatgaagggttgctcgcaggtttggcagaagcttatgaaacacaaacatgggtggatcttcaacgctcccgttgatgttgttgggttgcaacttaccgattactacgatgtaattaagcaacccatggatctgggaacggtgaagtccaatctttccatgaacaagtacac

SEQ ID NO: 46791 - DNA, 258 bp, Glycine max
  Clone ID: 701039096H1
aggggtttttcaatcccaaatccaaaaatccttgtctcagagatgatctaattctaaagaataaatgcatatactacatgtctattgcattgaatgttgtcctaagagtggcttgggtggagactataatgcacctcaaagtggggcctgttcaaactaggctactagactttttgttggcttcactagaggttattcgacgagggcattggaatttctacaggttggagaatgagcatctaaacaacgtgggtcatt

SEQ ID NO: 46792 - DNA, 285 bp, Glycine max
  Clone ID: 701039101H1
gcaggggcataagtggtagttaacagcaagagagaggaaagcagaatgaagaaggcaagggcgttgagcgtggcagtgaacgtgttgtgtttggccatagtttgcagtgcgatcgagtcaccgcaacacacagtagtacactccgagtccgatttcgagatcaggctctatcgtacctctgtttggatgtccgctcctgccctcgacatttccttcgaaaaagccacctggaatggcttccacaggttgttccagtccacagaaggtgccaacttgaatttctct

SEQ ID NO: 46793 - DNA, 280 bp, Glycine max
  Clone ID: 701039102H1
cttgctggcactaatggagaaaccaccactcagggtctagatcgccttggtcagcgttgcgccaagtactatgaagccggtgcacgttttgccaagtggcgtgctgtgctgaagattggtcccaacgagccatctgagctggctatccatgagaatgcctatggcttggccagatacgctgtcatatgccaggagaatggcctggttcccattgttgagcctgagatccttgttgatggatctcatgacattcacaagtgtgctgccgtcaccgagcgtg

SEQ ID NO: 46794 - DNA, 279 bp, Glycine max
  Clone ID: 701039103H1
cagtttgaaaatggtacttgtgctatggtcaagagggactaagaacatggacttcctaaccctcttcactcttctactcttgttattcattcatacagcactctcttctacccaatatcatgatcggaacatcttactcactcatcgtaagatcttccccaaacaggaagctatcacctcgtacgctgtcatctttgatgctggtagcactggtagccgtgtgcatgtcttccatttcgaccagaacttggatctccttcgtattggcaacgaactcga

SEQ ID NO: 46795 - DNA, 276 bp, Glycine max
  Clone ID: 701039104H1
gacgattcagatcttagggtttcttcttcttttctttctgtggagccccattgaccatagccgccagccagagagagaagagaagccttcggatcgtaggttttcttaccctcctttctcccaaatcgggcctttccgcttctcgattcgcttccgcagctgagcgatctggaaaacccagaaaagaaccaaccgaacgttttatatgtttcggataatcaatcaattgaagatgtctcgttgcttcccttttccccctcctgggtatagggcacg

SEQ ID NO: 46796 - DNA, 273 bp, Glycine max
  Clone ID: 701039109H1
ctccgctcaacaactataagattatcttcttcttcttcttctcttcaattcttctccaatcccaaccgcaccctcttccgtccctttcttcacacttccttcaaaccacttccttcgtctttctctttccgaacagatcacactatggccacctcaaacgccaaatcagtccatgatttcaccgttaaagatgccaagggaaatgatattaaccttggtgactacaaaggaaaggtccttatcattgtcaatgttgcctcacaatgtggcttg

SEQ ID NO: 46797 - DNA, 269 bp, Glycine max
  unsure (1)..(269): unsure at all n locations
  Clone ID: 701039110H1
ccgntcagggtcagtctctctctctctctctctcctcagctgtgtgatgattcatttactaaacccaccattctccttgtttccattgctgcttcattgttttttaagcaattccgagcattgatcaaatgggttttggttcacttccaattttctgaaacagcgtactctcaaaaaaaatatctgatcacattttctacttctgcaaattctgcatttttttccctctctttctttctggggtgtctgcagaacaagggaatctcaca

SEQ ID NO: 46798 - DNA, 267 bp, Glycine max
  Clone ID: 701039111H1
cgaaaactcctccaccgtggctccggcaacactctacaaagctctgacaaaagatgctgacactatcatcccaaagattattggggccatccaaactattgaaatcgttgaaggaaatggaggacccggaaccgtcaagaagataacagctagtgaaggtgaccaaaccagtttcgtgctgcaaaaagtggatgcaattgacgaggctaacttggtatacgactacagcatagtgggagggacggggttgcatgaaagtttggagaa

SEQ ID NO: 46799 - DNA, 266 bp, Glycine max
  Clone ID: 701039112H1
gatatatagaaaaacaaaggagaaaagatagaaatggagaagtttccagttgttgacatggggaaccttaataatgaagagagatcagcaaccatggagataatcaaagatgcctgtgagaactggggtttctttgagttggtgaaccatgggatatccatagagttgatggacaccgtggagaggatgacaaaagagcactacaaaaagtgtatggagcaaaggttcaaagaaatggtagcaagcaaaggtttggagtctgctca

SEQ ID NO: 46800 - DNA, 252 bp, Glycine max
  Clone ID: 701039113H1
ggctaatctctcactcttgttcttcggtctcctcctattctccgctgccgtagccaccgtcgaacgaatcgacgatgaagacaaccttctgatccgtcaagtggtgccggacgcggaggaccaccacctgctcaacgcggagcaccacttctccgccttcaagacaaagttcgccaagacctacgccacgcaggaggagcacgaccaccgcttccgtatcttcaagaacaacttgctccgcgccaagtcgca

SEQ ID NO: 46801 - DNA, 260 bp, Glycine max
  Clone ID: 701039114H1
ctctctcgttttttctcaaaaagttgcaagagttaaagcaaaaaccaaagtgagagagaaaatgatgaagccatcgatgctcagatctcttcactctgccgccacccgcggcgcctcccacctctcccgccgtggctacgcctccgagccggtgccggagcgcaaggtggccgttctaggtgccgccggcgggatcgggcaacccctctcccttctcatgaagctcaaccccctcgtttccagcctctccctctacgata

SEQ ID NO: 46802 - DNA, 264 bp, Glycine max
  Clone ID: 701039115H1
gcgctatgatggttggagttggaacctccgtcttctttcgatgaattcgaggaaatccttttatacttaattaacacttaacaaacacacaatctcattttgtttctcttcaatccaaacgcattcacattcacattcaatcaatgatggctcagcttctccacactcccttcatcccctcctcctcctccgcgctccgccgcgccgccaccattccccaccgcaaaacgacctctcgcctcgtcgttcgggccaagatccggg

SEQ ID NO: 46803 - DNA, 254 bp, Glycine max
  Clone ID: 701039076H1
gcggaatcagctagaattttctaataatggccaaagacgttgagcaggttacagagcaaggtgaatactccgcgaaggattaccatgacccacctccggcgccgttgatcgacccagatgagctcactaagtggtccttgtacagagccgccatagctgagttcatagcaacactccttttcctttacatcaccgtgttgaccattattggctacaagagacagagtgacaccaaaatccccggtaacaccgag

SEQ ID NO: 46804 - DNA, 258 bp, Glycine max
  Clone ID: 701039044H1
cggctcgaggtttttgctgccaattcccttcccttgcatgacaagtttcaatatttccaatttcaagattccaaaaccccttattattatttgtttatttttatctcttttgtactttgttctctgtagagtaccagatctttgcattccctggttataattccgaggctggtttcttgttaggaccgttaacttcttctcatggctcatcgctacgatagtaaccccttcgacgaagaagaagtcaatcccttctct

SEQ ID NO: 46805 - DNA, 271 bp, Glycine max
  Clone ID: 701039045H1
cttgttgaattcggaaataccatcaaaccatgatgagttgtgaacaaccgggatggagtttaacaggtagtatgatggttataaagcaactgaggaagtggtgccctaagttttgtatgctagagcttacacaaatataatattgggggaggtgagggagaggctagaaactgattcgacttgggattgataatccacatggttgtccgagtttgcaacattctaatatgcttctcccattgcacatttttcctttattgaactcaattac

SEQ ID NO: 46806 - DNA, 261 bp, Glycine max
  Clone ID: 701039047H1
attcttgggagataacagtgaggaatatactcctagtctaccaaagattatttttgctcaggctactggagggatcattgctggtgctactgcatcctgcattacaaacccattggatactatcaagacacgattacaggtgctgggacttgaaaagaaaatccctgtaaaacaagttgttaaagatttgatcgctgaggatggttggacaggtgtatatagaggattcggtccaagacttttcagcacgtcagcatgggg

SEQ ID NO: 46807 - DNA, 264 bp, Glycine max
  Clone ID: 701039048H1
aagccgcagtgaaccaaaccatcatcatcgcgttaccggaataatcgacccatcatcaattagatcgaaatgaaggatgaggacgggcttccgacgacgaccgcggttacaaagaaggaaaacttggattcgagtctgtttggaaaaggcaggtacaaattctgggcgttagcggccatcttgcttctggcgttctggtccatgttcaccggtaccgtctcgctccgctggtccggcactctcaattccctttccaacgacatc

SEQ ID NO: 46808 - DNA, 266 bp, Glycine max
  Clone ID: 701039049H1
atcgtatatcgcctctattatcccgtaaggataatccccgatgttcccagtgaagctgctgactaaaaccattcagggattatccttaccaaataatagctcctcttcgtgatcattggtcgtatattggaattttcattggtataatagggttatttcttaattgcatttacaggcacgtgttcaatattttgttttacccgaacaaactaatccgtaggagcagtttcaaaattcctttttagtggcttaaagtagattggtaa

SEQ ID NO: 46809 - DNA, 264 bp, Glycine max
  Clone ID: 701039050H1
caattacagagcattttccaacacgattacacgaccgaatcaaacccctctttctctccgaagctgcttttaatatcgtactggccttcgattgttctcctctttaatacatactgttctctcttcgatttgagggaacagtacaagagtctgagcatcggttaacccaactgcacaggtagtctccaaataatggagcctcatgatgagactggatgccaggctcctgaacgccccattctttgcattaataattgtggcttc

SEQ ID NO: 46810 - DNA, 263 bp, Glycine max
  Clone ID: 701039051H1
aaaagggaggagccaagaggcacaggaaggtgcttcgtgacaacatccagggtatcaccaaacccgcaattcggcgtttggctcgcagaggtggtgttaagagaatcagtggtctcatctacgaggagacacgtggcgtcctcaagatcttcctcgagaacgttattcgcgacgctgttacctacaccgagcacgctagaagaaagaccgttaccgctatggatgttgtttatgctctcaagaggcagggcaggactctctac

SEQ ID NO: 46811 - DNA, 260 bp, Glycine max
  Clone ID: 701039052H1
aaacactcttcttcatattcttcttcttcttcttgttcttgttctatctgtgacgagcatcatggcctcgagagcagtgctattgttggctatgtgtgtgcttccggccatggttgtggccattcgcccagcaaagaaccctttttgcgtgaagggtcgcgtctactgtgacccttgccgtgctggttttgagacctcagcaaccacctacattgccggtgctgagattatgttgcaatgcaagagcagggttagcaacg

SEQ ID NO: 46812 - DNA, 259 bp, Glycine max
  Clone ID: 701039053H1
aaaataactgcatacatcttccatccaactatatatcaaaacactctatggcgaggtgtgaatccgtttccacgacaatgcccctgaatgcaaaaatattaatagcacttatattccttgcattcgcaatcacggctaccacttcaactcgaatgcttgatgaaatagaaacaccagaagaacccaacagtgctgccgaatcccctgttgtctctccacttccacttgttgcagaatccccagttgcggaagtcaaagg

SEQ ID NO: 46813 - DNA, 261 bp, Glycine max
  Clone ID: 701039054H1
cccaatcgtagccgtcgcactttgcgttttctgcgtcatctccgattccccgacaatggccagccaaatgagcaatcagagaaagttcgtagctgatggagtgttcttcgctgaactgaacgaggttctgacaagggagttagccgaggacggatactccggcgtggaagttagggttacgccgatgcgcaccgaaatcatcatcagagccaccagaacccaagccgttctcggtgagaagggaaggagaatcagggaact

SEQ ID NO: 46814 - DNA, 261 bp, Glycine max
  Clone ID: 701039055H1
tggagtcgtaggagcccttacaccttgcagagtcatctcaacattcccaagggctcctactacgcaataacgccaagctcgatctcaaattaatatatcatttattcctcttaatcaaatattaaataagaaaagatgggagagatgtcaaacttccaattgggtgtgattggtgcactatttctctcggtggcttcttctgtctccattgtcatctgcaacaaagccttgatgagcaatcttggcttccctttcgccaca

SEQ ID NO: 46815 - DNA, 257 bp, Glycine max
  Clone ID: 701039058H1
gacggaacaccattttgcttaaactccattgatcttatagagagtacaacagtcgcccaatcaagcttcagcaaatttgccatgactatccctgagatcaaatctggcagtggcatatttgcattcaacttgacatggaatgatataaaaatcttgaccccctcaatattgaacccttttgcaaaatacagattgttcaggaatccaagatctaagaatgctgggacattgttggcattatcagatttcttgtcctt

SEQ ID NO: 46816 - DNA, 257 bp, Glycine max
  Clone ID: 701039061H1
ctgggtcctgaccagcccgtgatcctccacatgcttgacattcctccagcagcagagtcgttgaatggggttaacatggaattggtggatgctgcattccctcttcttaaaggtgttgttgctacaaccgatgtggttgaggcatgcactggggtcaatattgcagtgatggttggtggattccctagaaaagaaggtatggagaggaaggatgtgatgactaagaacgtctccatttacaagtcccaggcttctgc

SEQ ID NO: 46817 - DNA, 257 bp, Glycine max
  Clone ID: 701039062H1
gtccgaactgcaaatcctacaatacacgacaaacatgaggctgagcaagtggccacgattattcattggtttcgtcaaaagccttcacttgagttctcttgatgttgttgtgattcgtgaaggcagtgaaaatgcatgtgtgtccattgggtacgtggatgtgcacgtgggaatttgaatttggagtgcacgatgagccacattcaaagggatagaataaaggttctttttcttatatgttgatttggagtggggta

SEQ ID NO: 46818 - DNA, 262 bp, Glycine max
  Clone ID: 701039063H1
gaaagacattaaaatctacttttgtcagcagagcctctgaattcttgagaaattattttgctagtttggtggacttcatgataagtgataaaagttactcttctcagcggggacagttaaagatgcctgatcatgctgacctgcggtactcctgcaggacatatgcacgtcttctgcaacatttgaagagtcttgacaagaattgtcttggtccattgatcaaagcttattgcagttctctaaacttgcttcttcgcagaga

SEQ ID NO: 46819 - DNA, 276 bp, Glycine max
  Clone ID: 701039064H1
caattcggatagaactcgagtagaatcggttcgatagccgaaaaaaaaaagtaacttatgtttgtttaattgacttatgagtataggaatggacacagtgatggacgaggaagaatacaactatagagaagtgaggcttccttctctgatagcagtggtgggcgagccagagctggggagggaaacaggggaaaggagaagaggaagggacataataatagccatagatcatggccccaataccaaacatgctttcgattgggctctggttcacct

SEQ ID NO: 46820 - DNA, 264 bp, Glycine max
  Clone ID: 701039066H1
aagatattcctcaacgtaatccaatattcctatctaatagctaccaagctattattctgtcataagaaaaagaaacacacaaaagagaaacaagttgttagccacagcaaaagtcgatgcttactagtcttagttaggcctcagcgtcagttcatgaaaacttttgcttttataggaattttgctcagggaggattcttgttgtattgttgctgatagcctagaggtggaagttttagtctttggttggaactagttgttggct

SEQ ID NO: 46821 - DNA, 260 bp, Glycine max
  Clone ID: 701039068H1
atttttatgaatatctcttccttgaagtcagcttatattgagcttcaagctgctcatactccctacgaccctgataaaattcacactgctgataaacttgttattagtgagctgaaaaatctgtctgaactcaagcatttctacagggagaacaacccaaaaccagtgtgtgtttctccccaagactcacgtttagctgcagaaattcaagaacaacagagccttctgaaaacttatgaggtcatggtgaagaagttcca

SEQ ID NO: 46822 - DNA, 260 bp, Glycine max
  Clone ID: 701039069H1
gcagcgtccaggtgcatccccttcctccgtcaaacccacgcccatttcattcttctcaattcccaattccaaattagggttagggttttcacaatctcaatgaccttctcttcttccttcaccttacaatccctattccactaccgctactactactccctttgtcttcgtcgttgtcgttcgtaaggattaatcaattaacctatcgaatcgtttcagtatcttcttcttctttttcttccatggacctctctcaccct

SEQ ID NO: 46823 - DNA, 259 bp, Glycine max
  Clone ID: 701039070H1
atttgcctcatgactactacccctgttgttcaacgcatttcagaatgcttcgtcaaaccacatggtttaacccaactgtcaaaccaaatatgtcatttaacacaatgggatattgttatgttgtctatgcactatatccagaagggtctactcttcaagaaacccacacctcttgttgatcaacatgatttcatagagaatctcttggagaagctcaaacactctctttctctcactctctcccatttctatcctttgg

SEQ ID NO: 46824 - DNA, 260 bp, Glycine max
  Clone ID: 701039072H1
atttcgtataacatttcatttcacttcacttagggtggtgcatttgcaaccctttaatttcctcacaaaaatggaggcacgtagtttgtactcactagtgtttcttgtgcttgctttggctattgtgaacaaagtgcatgggcaagggacgcgtgtagggttctattcgagtacatgcccacgcgctgagtccattgttaagtccacagttacaacccatgttaattctgatagtactttggctgctgggttgcttcgga

SEQ ID NO: 46825 - DNA, 257 bp, Glycine max
  Clone ID: 701039074H1
ctttctcttcgagggtttgggtttctcttcctcccttggagaacaagaagagccaccgctgcgacgccgttcgtgcatttttgaggtgccgctgtcatgtttgggcgtggtggaccaaggaggagtgataactccaaatattatgatattctcgggatttccaaaaatgccagtgaagatgaaatcaagaaggcctatagaaaggcggctatgaagaaccatccagataagggaggagatcctgaaaagtttaagga

SEQ ID NO: 46826 - DNA, 255 bp, Glycine max
  Clone ID: 701039075H1
cgagcatcgaagctcacgaattgaattgaattgagtttctttgtctccagagatgaagaagggcgtccatccacagaagcaatggatatcctacgttacacaaacgggtaggttgatgcatgtgatgatgacaaagatacaccctgttgggaaagtttaccacttccgagctaagcgccaaatggccgagagtttaggacagattgctaagttcagacgtcgctttgggctagaaaatccagagggcaatgaaaa

SEQ ID NO: 46827 - DNA, 261 bp, Glycine max
  Clone ID: 701039043H1
aaaaaaaattgttttcgtgtggaaacaaaaaaacaattcaaaaacaaacatatgatggtgaagccgagtagcgaaaagccagaggagcatagggattccaactactacaaaggggtccgaaagagaaaatggggcaaatgggtatccgaaataagactacccaacagccgtcagaggatttggttgggatccttcgacacccccgagaaggccgcgcgtgccttcgacgccgcaatgttctgcttacgtggccgcaacgcc

SEQ ID NO: 46828 - DNA, 266 bp, Glycine max
  Clone ID: 701039006H1
attttgttattcctatcttatcttaacattgtttcttggagttgattgaaatggcagtgcaacctgaaattgagcatcccaggaaggcctatggatgggcagctagggatacatctggtgttctctcccctttttggttctctagaaggaaaacaggggagaaagacgtgacatttaaagtgttgtattgtggagtatgccactcggaccttcacaagttgaaaaatgaatggagtgattccatctatccccttgtccctggccgt

SEQ ID NO: 46829 - DNA, 268 bp, Glycine max
  Clone ID: 701039007H1
cgtaattaaagtggtgtgactattgagttctatgaaatgatgccaccaacaaccacacccactcattgattcatttggttccctcactttccccacttcctttgtctccatataaacccttcaccctgtgacccttttcccactcccaaacccctctcttcattccaattttggcaccacaccatgccaaccctcaaccatgtcctcacattcacattcttccttctcctctcttgccattgccacctcctcaatggccaagaggaca

SEQ ID NO: 46830 - DNA, 268 bp, Glycine max
  Clone ID: 701039008H1
acagctgtctgctgttagatctgtacccgcctagccattgatttggaaaagtccaacttcaaggatgagtaagcttcagagtgatgctctaagagaagctatctcaggaatcatggctgattccaaggaaaagaacaggaaatttgtggagaccattgaactccaaattgggttgaaaaattatgatccccagaaggacaagcgtttcagtggctctgttaagttgcctcatattcctcgccccaagatgaagatttgtatgcttgga

SEQ ID NO: 46831 - DNA, 261 bp, Glycine max
  Clone ID: 701039011H1
cacaatacaagctggaggagtggacatattaattaagttactgacaactgggcagtctagcactttagccaatgtgtgctttttacttgcttgtatgatgatggaggatgcatctgtttgttcaaagttgttgacagcagagacaacaaaacaactcctcaaacttttaggccctggtaatgatgcccctgtcagggctgaggcagctggtgctcttaaatctctatctgcccagtgcaaagatgcaaggaaagagatagc

SEQ ID NO: 46832 - DNA, 262 bp, Glycine max
  Clone ID: 701039012H1
agggtgcagaagcaaatggcggcgagaagcaattgaaatttctgatctacggtcgcagcggttggattggtggtctactgggtaagctctgcgaagagcgcgggatccaatatgagtacggcaccggcagattggagaaccggtcgtcgttggaggcggacatagcggctgtgaagcccagccacgtgttcaacgccgcgggtgtcacgggtagacccaatgtggactggtgcgaatctcacaaagttgaaaccatccgaac

SEQ ID NO: 46833 - DNA, 263 bp, Glycine max
  Clone ID: 701039013H1
atggagctgtatatttcctggaagcaagaaagtgagcaacaagacaaaggaagtggtgaactctactatatcaagcaatgcaggggagaagttgaggttcaaaacctttaacagcatcaaaataagtgcaattggcaacattttgcacattttattggctgcatatctccctactttgttgttagtccttttatgaggtgctaataattcaattttttgttctttttggaattttgaatttcatagagttaaggatgaggtca

SEQ ID NO: 46834 - DNA, 263 bp, Glycine max
  Clone ID: 701039014H1
tgactaagtcccaatatttgttgttgaacaaagcctatttccagtgaccaagcctcatctgttgttgaacaaaggctctttgtgtgagcatttggcagcaccagaaagaggaaaatggtggctagtgaagacatatatggtggggaggaagtttctcttgtccaaccagaccctgtggggttgcagattgatcgtttgcaaaaccaactcacagaaaaggttaaggaactggcaacttgccagagtgaaatcaaggccttaag

SEQ ID NO: 46835 - DNA, 268 bp, Glycine max
  Clone ID: 701039016H1
taaaatacaagatgaagagcaagttcctttttgttttcctattattgggaattcttaactgtgaggcacaatatttcaatgccaacccatacgactatttacaactagccttaaggtggcctaattcctattgcttgacacatgaaggtggttgcagggaaatagtgccacaatattttactattagctaccttcatcccatgagaagaggaggccctgatctgcaaaattgcccctcaccatttaatatgccaaatagcactatgga

SEQ ID NO: 46836 - DNA, 105 bp, Glycine max
  Clone ID: 701039018H1
aattaagaaaattagaagtgttgacttaattgcaatttacaaaaatattcgatacacgatcttcaaattgcaattaagacaattagaagtgttgatttaacaccc

SEQ ID NO: 46837 - DNA, 265 bp, Glycine max
  Clone ID: 701039020H1
ctcctcttcttctacttttcattcttctctctctctaaaccacgcctagagagagaacctcgccgccggcatccctccggcgatgacatgaccgccggttccctcatcccttcctagacctttgatgcgccgataccctgcccgcactcgcagcgccgcctccaatctcaacaacaacaacgaaacaatggatccgatcaaaaccaaaacccgctccaacaacctcttctctcgtaaccctaagccctcgcaatcgaggtccctc

SEQ ID NO: 46838 - DNA, 278 bp, Glycine max
  unsure (1)..(278): unsure at all n locations
  Clone ID: 701039021H1
ttctctctctgtctttcgcactttcattctctcttaaaaatctaaatccctttccgtcttcatctccccctctgctccagctatggcntctatatgcatcctgaaggtgctcaaggatttgcagaaggatcctcctacgtcatgcagcgcaggtcctgtggctgaagacatgtttcactggcaagccacaatcatgggacctgctgatagcccatatgcaggtggtgttttcttagtttcaattcattttcctcctgactatcccttcaagccaccaa

SEQ ID NO: 46839 - DNA, 62 bp, Glycine max
  Clone ID: 701039022H1
atctgcatagctttcaacacttcaggacaggacacagcgcatttgcgctctgtaagaattga

SEQ ID NO: 46840 - DNA, 266 bp, Glycine max
  Clone ID: 701039023H1
cttccttgctcaaaaaaaataaagagagaatagtactccaatcaacataccccacactgtttgattaggaattcgggttgcacacctactccttctactttccaacaccgctgtctctgtctttctagtcacagttgggtgggttggtaccaaaggtgaggcagaggagactcagaaagagatggctgaacacggaagagttatggcaaactgtgtatatgctcccaatccctaccatgaatgcacggaggcttgcgtgcaaagaa

SEQ ID NO: 46841 - DNA, 263 bp, Glycine max
  Clone ID: 701039025H1
acttcctcaccgattgccagactggaatttcgatgctcagtcatctcttttaccattctcttctctcttgctcttgcaggagagagccatgtccatgcatcgctacctgaggaagattattgggaagctgtttggccaaacactcccattcccactgcactgcgagaccttctaaagcctctccctgcaggtcttgaaatcgatgaactccctaagcaaattgatgatacacagtacccaaaaacattcttctataaagaaga

SEQ ID NO: 46842 - DNA, 238 bp, Glycine max
  Clone ID: 701039027H1
gttcgcgactaatgttacgattctcaccttttctcgctactccccctactccttcttccctctctttctcctccaactgccacgtgtcctcttccgctcaagcaacactacaacaacaacatgaacaacagccccttccgcaaagctcacagctggtggcattggaatatgctgacctcaacctctcttacaactcggatctcgctcacgtcaggctaccgcagcatgttaatcccct

SEQ ID NO: 46843 - DNA, 260 bp, Glycine max
  Clone ID: 701039029H1
gggatttcggccgtttgctccccaaaaaggaaagaagcagattccgtcctttgaaatcaacaagaaaagatgtcaggtgaagaggtagctgttgcagttgaggtacctgctacttcaattccaggtgagccaatggacatcatgactgctctacagcttgtgctgagaaaatctctggcctatggtcctcttgcacgaggtcttcatgaaggtgccaaggtgatcgagaagcatgctgcacagctctgtgttctagcaga

SEQ ID NO: 46844 - DNA, 261 bp, Glycine max
  Clone ID: 701039030H1
tggagattttggtttagctaaacttatggattataaagatactcatgtcactactgctgtacgtggaacaattggacatatagcaccagagtacctctcaactggaaagtcttcagagaagactgatgtttttggatatggtgtgatgcttcttgaactaataactggacaaagggcttttgatctagctcgacttgccaatgatgatgatgtcatgttgctcgattgggttaaaggacttctcaaagacaggaaattgga

SEQ ID NO: 46845 - DNA, 260 bp, Glycine max
  Clone ID: 701039031H1
aaaaaattaaaatctacttttgtcaggagagcctctgaattcttgagaaattattttgctagtttggtggacttcatgataagtgataaaagttacttttctcagcggggacagttaaagaggcctgatcatgctgacctgcggtacaagtgcaggacatatgcacgtcttctgcaacatttgaagagtcttgacaagaattgtttgggtccattgaggaaagcttattgcagttctctaaacttgcttcttcgcagaga

SEQ ID NO: 46846 - DNA, 260 bp, Glycine max
  Clone ID: 701039032H1
cagattcggatagccgagcttgtatagccgaagcgggacgattccggttttggttcggttccttaatgcggagaatccgagcctgcaggttaacgccgtcacgacgattttgaacatgtcaatattggaagcgaataagactaagataatggagactgacggcgcgttaaacggcatcgcgaggttttgatatcgggtgccacgtgggaggccaaggcgaacgcggcagcacggtgtttagtttgtccggtgtggcggcg

SEQ ID NO: 46847 - DNA, 265 bp, Glycine max
  Clone ID: 701039034H1
gtctccggtgagggaaaagtagtagaagagaagatgtcgaccgtaccaggacagctcatctgggagatcgtgaagaagaacaactcctttttggtgaaagagttcggaaggggcactcagagcgtgcagttcagcagagagcccaacaatctctacaacctcaacactttcaagtactccggtttggcgaaccagaaaactgtcactgttcaacctgctggtaaagaccagtccgtgttgctcgcaacaaccaagacaaagaagc

SEQ ID NO: 46848 - DNA, 265 bp, Glycine max
  Clone ID: 701039035H1
cttcgacgaagctgagacccttttggttgaagctcttaacaacgatgccagggatccagaaactctagccaatctagttgtatgctgtcttcatctcggcaaaccatctaacaaatcattcagccagctgaaactttctcacccagagcatgtattggtcaaacgggtatcatcagctgaagaaagttttgatagagcgctacaatcattttcctcatgagtgtcgatgattgaatttctttcaagagttgaatggtgtgaggtc

SEQ ID NO: 46849 - DNA, 263 bp, Glycine max
  Clone ID: 701039036H1
gccgattgagagagaaagagaaatgggagaacgaaaaggaatcccaatggctttggggctcttagcgatgatcctcttcttcattgcttcctcttcctctcacctcgttcgcgcttccggtgacgccgacgacgcgatcttctacgagtcgttcgacgaggattttgatggacggtggattgtatccgacaaggaggattacaatggtgtctggcagcatgccaagagtgatgggcatgatgattatggacttcttgttagtg

SEQ ID NO: 46850 - DNA, 262 bp, Glycine max
  Clone ID: 701039037H1
attccccaagcattagaagatgagtatggtggctttttaagtaccgcgcatagtgaaagatttccgagactatgcggaactttgcttcagggaatttggtgatagggtaaagtattgggttacattgaatgagccatggagttacagccaaaatggctatgcaaatgggcgaatggcacctggtcgttgttctgcttggatgaatctgaattgcactggaggtgattcttcaacggagccttatttggttacacatcaccaa

SEQ ID NO: 46851 - DNA, 265 bp, Glycine max
  Clone ID: 701039040H1
catgccttccattaattaccttgatgtttcctcaaataaatccactgggatgcttttcaataacatgtcatgcaatgatgatctccactttgtaaatttgtcttcaaatcttctgaaaggtgaacttcccacttgtttagaaccaaagaccagggttgttctgtatgctagaaactgcttatcaaacaagaaccaagatcagcacccttcagatttctgcagcaatgaggctttggcagtgacaatcataccccatcagcagaag

SEQ ID NO: 46852 - DNA, 268 bp, Glycine max
  Clone ID: 701039005H1
atgccacttggatttgatttgtgtgcgcttataagaatagccaactaaggtggggcatggcctacacccattctacactcgcctccttccaaaaccgcaccctccacacacctcttcctccttcgccccctcagattcaaaagacctgtccccccgctgaaaggtgcgatggcggagaccaacaacaacgttgccgtcgaggtccttgaaaaagaggatcttgccgtgtccctggccaaatacgtcgccgatctctccaacaaattca

SEQ ID NO: 46853 - DNA, 258 bp, Glycine max
  Clone ID: 701038972H1
gcatgaggcttagagatgaacccatttaaagaatctacctaccaacctaagagactggacccaaggccttagctttaggtcagttagatgatatgtttgcatcatgttatccgtagcttcaactttctgtaacttcttgtataggcaaaggtttcaaaccttcaatctatccttctcttgcttttgccaaaatgttatggtgaatagggagaaaaagatggaaaaaaatgtgactgtttcatgtactgatattgtaaa

SEQ ID NO: 46854 - DNA, 256 bp, Glycine max
  Clone ID: 701038973H1
cagatacaatgcgttgatcagaagggcttgtgttatgacattatgaggatttctaaagactctgatattaaggttgcttttggtcgattttcttcaagtgtgaaaggctttcggaatattgacttgtttgtccagcacaacgatgggaaaaagatcatagatcctgaaagccagaaaaccttgtgttcatgcttaaaagaagagatgctatccgttgcgggtgacgatagtgaaccggggtccagacacagaactt

SEQ ID NO: 46855 - DNA, 254 bp, Glycine max
  Clone ID: 701038974H1
cggagcatggcagatctcaagtccacattcttgaacgtctattctgttctcaaatctgaactcctccacgaccctgcttttgagttctccgatgatgctcgtaattgggtcgaccggatgctggactacaatgtgccgggaggaaagttgaaccggggactgtcagtaattgatagctacagattgttaaaagaaggacaggcattaagatgacgaaatttttcatgccagtgctcttggttggtgtattgaat

SEQ ID NO: 46856 - DNA, 257 bp, Glycine max
  Clone ID: 701038975H1
ctttctccctcagctccttccaaaatgaagttccaagttatagagactctctttggtaaaagcaccccaaaacaaatgatcccaaaagtgactttgcttgcagtgtttgccgtactgttattcactgtcacaccactttcctaccctttgtttagatactcttcttcatcatcatctttgaagagcaataagcaattatccaagaaaccaatcagcatttgatgatctgaatgagtcagcaagcttgccttcaactt

SEQ ID NO: 46857 - DNA, 258 bp, Glycine max
  Clone ID: 701038976H1
gaagggtgagctaaagtcaattttccttcctttcctttccactagtcacataatcccgctagtggacatggccagactcttcgccttgcacgacgtcgacgtcaccatcatcaccaccgcacataacgccaccgttttccaaaagtccatcgatttagatgcgactcgcggtcgccccatcagaacgcacgttgtcaacttccccgccgcaagtgggtctccccgttgggatcgaagccttcaacgtcgatacgcctc

SEQ ID NO: 46858 - DNA, 255 bp, Glycine max
  Clone ID: 701038977H1
agagagaatagaaatgactcaagtgatgagaggagaggtgattgacacggcttatgctgggtcttggaaggctcacaagtccccagacaagccttaccttattgaaaagatcaacagaaacgaccctcaagaagttatcttttgctttccaggatcaggtgctgtcagggattggtactctcagaaaaactttggtgaaacacaaatagattggtctgtttccctcactcagaagcattggtatcgatgaacaag

SEQ ID NO: 46859 - DNA, 260 bp, Glycine max
  Clone ID: 701038978H1
cttcacattcagaatgcagagaggcacgccagtcagaaagccacacaccaacacctccgatctcctcacttggtcggaaactcctccgccagaatccgccgccaccgtcgcctccgccacccgctctggccagccttccgatagaatcagcaaggttctccatggcggccagctcaccgacgaagaagctcagccgctagccaagagcaaactgctcagggtataaaatgaaagacatgactggaagtggtatattttct

SEQ ID NO: 46860 - DNA, 261 bp, Glycine max
  Clone ID: 701038979H1
ctcaaaccgatggtaccagaatgtccatagcttctttctacaaccctggtgatgatgctgtcatttctcctgcaccagccttggtgaaggaattagatgagacaagccaagtgtacccaaaatttgtgtttgatgattacatgaagctctatgctggtctcaagtttcaggctaaagagccaaggtttgaagctatgaaggccaatgcaagcagttgatgtgggggccatagccacagtttgagtctcagggctctcagca

SEQ ID NO: 46861 - DNA, 262 bp, Glycine max
  Clone ID: 701038980H1
ctttgttttctgatctatggcttccaaggagttctctggtctttgctccttggctccttcactatctgagagcattttgtgcactactgggttgaaaatgtatatgctggagagcaaaggaggtgccatagcatgcacgttcttgtctcttttcttcttggggacatggcctgctcttttgactatgttagagaggcgtggtcgtcttcctcaatacctaccttgattactcaatcaccaatttcttggctgctttactcat

SEQ ID NO: 46862 - DNA, 254 bp, Glycine max
  Clone ID: 701038984H1
tttggttcttctttgtcagcttcttctctttcttgtacttcacatattatggaatgatgactgtgtccatcacaccaaaccaccaagtggcatcaatctttgcagcagcattctatggactctttaatctcttctctggtttctttatcccaagaccggtgagtaccattctagtttcgttattatattgaaacaaacatatcttacaatctttactaacataactcttctaccaactttggcttttcagaaaa

SEQ ID NO: 46863 - DNA, 257 bp, Glycine max
  Clone ID: 701038985H1
atgaattaaggtggtgttggcatacgctgaatctgagttagaaaagcaggtggacgcgtttactgagtcagcattcaaggggaaccctgcatctgtgtgtttcttagaggaagagagagatgaggagtggctgcaagcagtagccgctgaattcaatatctctgagacttgttacttatcacgcatcacccactcgctccatggaatctaatccccgttttcgtctcagatggtttactcctgttgctgaggttaaa

SEQ ID NO: 46864 - DNA, 258 bp, Glycine max
  Clone ID: 701038986H1
cagccaagtaagctacaccagtgaggaacagaaaacctgagcaaaaaacaaaacaaaacagtaagctaagcttcactgccatgcctgcaacgccattctcgtgttcgttcctcactcttcaaccgcgcttcaactcctacgttaaccccatcttccgttcactcaccttccaactctcttcttcgccgctcccattgttcactaggaaagggagaagaaattaaggatcagctttattgttttgaagatcgaggcaat

SEQ ID NO: 46865 - DNA, 256 bp, Glycine max
  Clone ID: 701038987H1
tctcaagccaaccatgtcttccttcaagagcaagtaccaagatgaactcattgccaatgctgcttacattggcaccccagggaagggtatccttgctgctgatgagtcaactggtacaattggcaagcgattggccagcattaatgtcgagaatgttgaagcaaataggcgtgctcttcgtgaactcctattcaccacacctggtgcttgagtgcctcagtggtgtgatcttgtttgaggaaaccctataccaaaa

SEQ ID NO: 46866 - DNA, 256 bp, Glycine max
  Clone ID: 701038988H1
gaaggattttgctgtggaactggaggaactggcagagctagttcttgacttgctgtgtgagaatcttgggctagagaaagggtatctgaagaaggtgttctatggatcaaagggcccaaattttggtaccacagttagcaactaccctccttgtccgaagccagagctgataaaggggctcagagctcacacagatgctggtggcatctctactcttccaagatcacaaggtcagtggattacagctcctcaaaga

SEQ ID NO: 46867 - DNA, 253 bp, Glycine max
  Clone ID: 701038989H1
cggctcgaggtaagcaatgaatctgatggacagcatgaccaggaaaactgcgatcaagttgtctctgtcaatgatcaggagaatgaaagggttccttctgattctagccagaagcattgtgatgttgatatgggtgttgtttcatcatctattagtgaaggtagcatggaaatcgagttgacaacttccacagtatcaatcgatctgacctgtcaataattcagtttcacaagttgtttcagaaaataatagt

SEQ ID NO: 46868 - DNA, 253 bp, Glycine max
  Clone ID: 701038990H1
cgagtatttaattcattccattggcagtagtagcaacgtcgttgtgtggcggtgacaaccatggccgactcatctcaagaccttgaccaacttctcgatagtgctttggatgattttcagtccttcaacctcaatcctccccctccaagtggggaagcaactgcgaatagcaagaaggagagtccttctttgccgtcgggggttcaaattgggcatgggtttacccgatttgagaacgaagaaaaaggggaaa

SEQ ID NO: 46869 - DNA, 256 bp, Glycine max
  Clone ID: 701038991H1
cactaagaccctacgcgcacatcttgcaactccaatcgacatagcagcaatgtctacgctcgaaattgaagctcgagatgtcatcaagattgtgcttcagttttgcaaagaaaattcgttgcatcagacttttcagatgctgcagaacgaatgccaggtttctctgaacaccgttgacagcattgagacctttgttgctgatattaattggaaggtgggatgcaatattgcctcaagtttctcaactcaagcttcc

SEQ ID NO: 46870 - DNA, 253 bp, Glycine max
  unsure (1)..(253): unsure at all n locations
  Clone ID: 701038992H1
cgggaattgcaaagaacaggcagatgctagactctggtaaatttaatcttagagatctttcgcgcaggcggccaccacaagttagncttgggtctaataacttttccagagtctagcatctgcctgttcttcatagttattagacccaaggctcacttgtcgtgtccacctgggcaaaagatctctaagattaaatttgcaagatacattgncanatggagattgtggaaacttcagagaaggaagttgtcat

SEQ ID NO: 46871 - DNA, 239 bp, Glycine max
  Clone ID: 701038994H1
aatccgagtgacactcctcactttgccgccatggcttcactgaggtgcctccactcaacccaccctcatcttcatcgcggttcagcgcttctcgccatttcgaaccgctgcttcaaccattcctcctgctgaaccggactctctccgtaaaccctcctcgaaccgctcctccacgcgccatggccaagcccagtttctcaactgcccaacctagtggcttctcctggcgattttgaatt

SEQ ID NO: 46872 - DNA, 259 bp, Glycine max
  Clone ID: 701038995H1
tgaagatatattatggcattctctatcttcaaacatgttctgtcgttattccttctttgcattttcttgcaggaacctaccaatgcccttagaaagacctacattgtgtacatgggaggacattctcatggtccagaccctttgcctagtgatcttgaaacagccacaaattcccatcatgatttactcgcttcttacttaggaagtcacgaaggccaaggcagcaattatatactcgtacaataagtacatcaatggt

SEQ ID NO: 46873 - DNA, 263 bp, Glycine max
  Clone ID: 701038996H1
ctaggacatgggtgatactccaaagcgttcaaacctttcacgaagaatagcatccttggtcaggttccgcgagacacgcaaggaaagatgttttgacaagaaaattaggtattccgtcagaaaagaggtagcacagaggatgcatcggaagaatgggcagtttgcttccttgaaggaaagcccaggttcatctaatacggattctgcacagagctggtcaagttggcacttctcattctgaatctgtacgtagatgtcaccat

SEQ ID NO: 46874 - DNA, 277 bp, Glycine max
  unsure (1)..(277): unsure at all n locations
  Clone ID: 701039001H1
agaaaggccctttgacnccccgtttccggggtgaacatgcactccgacgatatccaacaggagaggaacgctgcattgcttgcaaactttgtgaagctatatgtcctgcacaagcaatcacaattgaggctgaggagcgagaagatggaagccgcaggacaactcggtatgatattgacatgaccaagtgcatttattgtggattttgtcaagaggcatgccctgttgatgcgattgttgaagggccaaactttgaatttgctacagagactcatga

SEQ ID NO: 46875 - DNA, 196 bp, Glycine max
  Clone ID: 701039002H1
acgaagtcaccatgccttcgttattttctcttttggtttcttccagccatttagtgtgttaaactaaattgattagcgttgttggatgagttaccatagaatttgttatctatggtcttgtaatgcatttattgttacactgcatgattttgaagattagtgccgtcatgattttattaatgtttcaattttactt

SEQ ID NO: 46876 - DNA, 268 bp, Glycine max
  Clone ID: 701039004H1
atggaaaggcgttttagagtggaaaatggcaggaagcagcattaacagaggagaaagatggtctctcaatggaatgactgctcttgtcaccggcggcactcgtgggatcgggcactccatagtgagtgacttggctgcgtttggcgctgcagtgcacacctgttccaggacccaaacagagctcaacaaatgcttacaagagtggcagagtcaggggtttcaggtaactgggtcgctctgtgacgtgtcctcaccaccccagagagag

SEQ ID NO: 46877 - DNA, 258 bp, Glycine max
  Clone ID: 701038971H1
ggcgttctatatattattgaattgacaatgaggcctgctcttgctttgcttcctcttctatttgccttcttgaagttagctgccactacagaatcaagaaaagatacaggggaatattggaaaatgatcatgaaagatcaggaaatgccagaaggacttcaaggtcttgtttcatttcaatctgaaaataaccctaagactcaagagcagtggtaaaggttccaaaaaccattgtgaagagtctctagttacaaatac

SEQ ID NO: 46878 - DNA, 263 bp, Glycine max
  Clone ID: 701038943H1
ctccttcaaaactcatctcgaaaccctaagcactcgctcgggttcgtgtagtgccaaaccctagggctcattttccagatctattcagtttttctctcctctcttttccgatccaccgttggagatcgaagatggtgtccgacgccagcaagaagaaggccgcacagaagaaggccgccgccgccgccaagataggtggcaaagctgccgccgctcgttatggccgccacctcttccaaagccgccgacaaggtcgccaacgg

SEQ ID NO: 46879 - DNA, 259 bp, Glycine max
  Clone ID: 701038944H1
ccctcgagccgaatcggctcgagcaaatattctcactcgtcgtcttcggctgcgccctaaccaaattcaattcaaactcttctcatcaaaatccaaggctcgttcttgaaaccctaattcgatatcctcctcctcagaagaagaaggatcgatgtgggcagcttcttgcctggcgtcatgctgcgcggcctgcgcatgcgacgcctgcaggaccgtcatcgggaatcagccgccgttccgccaggatcgcctactgcgg

SEQ ID NO: 46880 - DNA, 261 bp, Glycine max
  Clone ID: 701038945H1
gcggagatgatgagatagaccttgagttcttggggaacagaacaggacaaccttacattctgcaaacaaatgtgttcaccggaggcaagggtgatagagagcaaagaatctatctctggtttgatcccacgaaagagtaccacagatactccattctctggaacttgtatcagattgtgttctttgtggacgaggtgccaatcagggtgttcaaacagcaaggacttgggagtgaaattcccattcgaccagccaatgaag

SEQ ID NO: 46881 - DNA, 264 bp, Glycine max
  Clone ID: 701038946H1
agcatgtccaattctcagagagaacatgcattggctatagaacaactggtacctgaattcatcgcactaaggctgaatctttgcagttacatgaatgtggaaaagttttggatgatctattttttgttaatacttccaagactaaatcagcatgattttgagcgcctatcaactcccaagattgttgaagcaagagatgtgcttcttcagaaactgagagaggaaaaatttgcaagccggagaacctgaaaaaccaaggactgt

SEQ ID NO: 46882 - DNA, 266 bp, Glycine max
  Clone ID: 701038949H1
taattgcaagaatggcacttcgttgcttggtgatgtccctttctgttctcttcactcttggtcttgcgagagaaagccatgccagagacgaagatttttggcatgctgtttggccaaacactcccattccaagttcattgcgagatcttctaaagcctggccctgcaagtgttgaaatcgatgatcaccctatgcaaattgaagaaacacagtaccaaaaccttcttctataaagcagaccttcatccaggcaaaacaatgagagt

SEQ ID NO: 46883 - DNA, 264 bp, Glycine max
  Clone ID: 701038950H1
actagttagcttgaattctgttattgaagaaatctaagttccttaacgaaaacacttcacatgtagtagagtagggtaattttgtggtgctttgtttcacgagtaacatctgcaagaagtcttctccttcaccatgccaccaaagcctttagactatgggtcaataaatgaaaacgtgaagaagagtcaatatgctgtcagaggtgaattatacccgagcttctgagcttcagaaagagggcaaaaagattatatttactaatg

SEQ ID NO: 46884 - DNA, 260 bp, Glycine max
  Clone ID: 701038951H1
cgtcaacagttgcaaattctgtggatagtgacgatgaaaactgttctaatggatcaagaacttcctcttctgatttccttgatcaaaataaggttatgatgttggataagtcaactgccggaatctgtttggatcaaaagttggatgtggagaaagaattaatagagcaggaaatgaatttatcttcttcatatgaggagaaaaacgatattaaggcattcaagtggtgttgttggagatgtgaaggaaaatgattcata

SEQ ID NO: 46885 - DNA, 262 bp, Glycine max
  Clone ID: 701038953H1
gagagatgcagacctgacctagggtttttttatcattcctcttcccaattccagggtaagctttggatctccgatcggagccttacccatcttttcttgatcttcaaggaaccctttgggacactaaagtttccaaattgaagaggaaacgataaaaaaagggcttgctccggagaggttgcgtctgggggggaagatttggatcgggattcgggtgacatatctgagggtggttacttatggcgaaaagttgggctagtga

SEQ ID NO: 46886 - DNA, 262 bp, Glycine max
  Clone ID: 701038954H1
gtaaaacttggcattagggttgtgatttgtggaactattggttgttcggccatagtttcatcaattttttgtaacattttatgaaagacttaaatatgtttttgacccctgatatatatactcgaattttgccataatcaattacaaagcggcattctatgttttgacaaaactcaagcgtttacgctctatgctagccaagcggatcaatattatcagcagtttctccttcaacccatgttatagattcctgctctaacag

SEQ ID NO: 46887 - DNA, 255 bp, Glycine max
  Clone ID: 701038955H1
caataccttagcatgaaattcaactttgtgggactacatgttgaagtttgattggtgaacgaggtgcgctaatgccttcttaagttttgcttttctgtcactttccctctgtgttggtttgctctgatcacttttgtctgcattacaacctgagcctcagatctgatctcttgatccacaaaaccatggctgaaaaggtgaccatcatgaaacaaggttgaccttgagtgtgagaactgctacaagaaggttaag

SEQ ID NO: 46888 - DNA, 262 bp, Glycine max
  Clone ID: 701038956H1
ccgctcgaggtcctcttccacctcgccttcttctcccaatgccttccctccgcctgggcccactaggcgatcctcctcccgggtcaactcgcccgtgactcaccgcagagctgccccgcccctgaccccaacctctactacaagccagtcatcggaatcgtcagccatcccggcgacggcgcctccggccgcctcagcaacgccaccggcgccttacatcgccgcctcctatgtcaaattcgttgaggccgccggcgcccgt

SEQ ID NO: 46889 - DNA, 256 bp, Glycine max
  Clone ID: 701038957H1
tcaagtttcaagtttgagccccctttctgtaatccataaccatagctttggttgagttgagggatttgattatggataagtatgaggctgtcaaggatttgggagctgggaattttggggtggctaggctcatgaggaacaaggagaccaaggagcttgttgccatgaaatacatcgagcgtggccaaaagattgatgagaatgtggccagagattatcaaccacagatcccttcggcaccccaatataattcgct

SEQ ID NO: 46890 - DNA, 258 bp, Glycine max
  Clone ID: 701038958H1
gttcgattttgtagtaagtgaggtgccaatatggtgaagatagctcttggtactttggatgactcttttagcgctgcctctcttaaggcttatttcgcagagttccacgcaactctgattttcgtgttcgctggtgttggatcagccatcgcttacaacgagcttacaaaagatgcagccttggatccaacggggctggtggcagtagctggcacatgcatttgcactgtttgtaggtgtctccgtcgccgccaacat

SEQ ID NO: 46891 - DNA, 256 bp, Glycine max
  Clone ID: 701038961H1
accaaatggggggccaaggattcttctatttgtagggtagtggcactttcaaagaaggccaaggattctatttgtagggtagtggcactttcaaagagtttctttctcttttaaaaactcgttaatcttttatgtttactgttaacagctcgagattacgaatttctgatttctgaaaaaaaaaaaaaaaaaaaaaaaaaaaaaaaaaaaaaaaaaaaaaacaaaaaaaaaaaaaaaaaggggggccccccctttt

SEQ ID NO: 46892 - DNA, 260 bp, Glycine max
  Clone ID: 701038962H1
cgagggtcttgcatgcccctttgagtttcaagtttcaagtttgagccccctttctgtaatccataaccatagctttggttgagttgagggatttgattatggataagtatgaggctgtcaaggatttgggagctgggaattttggggtggctaggctcatgaggaacaaggagaccaaggagcttgttgccatgaaatacatcgagcgtggaaaagattgatgagaatgtggcaagagagattatcaaccacagatccct

SEQ ID NO: 46893 - DNA, 265 bp, Glycine max
  Clone ID: 701038963H1
ctcgagccgctttctccttattcttcattagatcctcagttcccaatcgaccctccatttctgtgaactgagatggctggaggtgttattcggcagttatttaggaggaaactccaatctcattctcctaattcttcttttaagtcattcattatcacaaagaaagatggtgctgactctattggcaacaactccttaagagtgcttgcattagttagctggtgtctcagggtttctaggttttgcaacaacagcatttgctgat

SEQ ID NO: 46894 - DNA, 265 bp, Glycine max
  Clone ID: 701038964H1
gttgtgttgcactgtcactgttacagttgttggtgtaaaggaacagcggtgggtgagtgagagagggaggaaacatggctacggcgtcggcgtcggcgtcgtgggaggaactgacgctgaaagtgaaatggagcggcaacgaatacaccgtccgcgtctgctgcgacgacaccgtgggcgaactcaaacgtcgaatctgcgagctaaccaacgtcttcccttcgccagaagctcttgtaccctaaactcgcttccaaactcagcg

SEQ ID NO: 46895 - DNA, 261 bp, Glycine max
  Clone ID: 701038966H1
ccggatcacagggaaaataaaaaacaatggagttggacttgacaccaaagacagcagaagtgttgtttgagggagatggtggaggttactacacttggtggagttctaaagtgccactgctggccaagaccaatgttggtgctggtcggttagtgcttcagcctcagggctttgctattcctcattattcagatatatccaaagtaggttatgcttcaagggaacgatggcgtagctgggatggccctccgcaacagtact

SEQ ID NO: 46896 - DNA, 259 bp, Glycine max
  Clone ID: 701038967H1
tgtttgtgtagtagtgactttcggttgggttccgtctcaactcaacaaacgtcgtcgttctgcatttcccaaccttcctccaatggcttctgcttccttaatcaactcgttgacttgttcttcgcgtgctcccactcagcactgttccactttcacccgcaccaccgccgccacgtcactgagacaatttaacagccactgtcggagaccacgcgacgaggatctcgccgccttccaccgttgtctgcaaagctgtctc

SEQ ID NO: 46897 - DNA, 259 bp, Glycine max
  Clone ID: 701038968H1
tcttcaacggtaaatccctctctgcacttcgtctctgttagggattaatcattattttccgcgcaccaaacagccccagtcaattttcttctctcttctaagacacaccaatgccagagaagaagaacaagaaagtttctttcaccgaagaagatgctgttacgctcatgcagaggtacgacgcaactacggtgttcactttacttcaggatggcgcattaccctcaccccaagattgattggtgcgagttggtgaaga

SEQ ID NO: 46898 - DNA, 259 bp, Glycine max
  Clone ID: 701038969H1
tttgtcccttcttctcaagatctcattgcatttccctccctttacaggggagatagaatttagatagtgcaagagaagcgtaatctccaagttctcatcttttttgttcccttttgttttcagagatatacataggccccagaagaacaaattgctacaacctattttgatttgagatctgtctgtctctttggtttcacttcagggctcagtgaggaatgcgaagaaaatggggaggaaaggaaatagttggttttct

SEQ ID NO: 46899 - DNA, 261 bp, Glycine max
  Clone ID: 701038970H1
caaagcttccactctacccgtttacccaacccctcttcccaaaacctctaatttctctcttcatctccttccaatggcttccattcccacactctcttcatccctacctacactctctgctcactccttatcccattcaaaccccaacaaccactgcactctccctcccacatctctcttcggcaccaggatcaccctcctacgcgccaccttcgtctcattccctccccaacaccaattgccgtgcaacctcagccaccg

SEQ ID NO: 46900 - DNA, 260 bp, Glycine max
  Clone ID: 701038942H1
gacacacgctcatggaggttgtatccgacgcggttgccgtcatcaccatcgtcaaccctctcgttaattcactttcctttgatgtattgcgcagtttaaaggagagttttgatcaggcgatacatagagatgatgtcaatgcaattgttgttacaggtgcgaagggaaaattttctggaggttttgatatttctgcatttggtggtattcaaggcgtgagagcgtccaaaacctggttggatatcagtaggagtcatcac

SEQ ID NO: 46901 - DNA, 267 bp, Glycine max
  Clone ID: 701038914H1
cacactcactctccttctctctcctattgcggctagggtttgggtttttcactttcagcctctccattccttcaaccttcttcttctctttgatctctgatggagacgttccgtgtttagtagcaagggttagttgaggccttgtgtttggaaacgtacggtgtcgttttggagttgggaaaacaaataattctgagagatggcaaccacgaaccctttatttgttgggtgacgacgctgaggacccttctcagctcatcgccgccg

SEQ ID NO: 46902 - DNA, 271 bp, Glycine max
  Clone ID: 701038915H1
agcaaacttagaaggatttttcgaaagccaggtgttttcagaaacgagatccaggttttattgtcgaatttcgctagtcaaattaattttcataattatttttttctttgaaaccagccaagagggttatttttgatccctcaaagctaatttctctctctctttttttatgtccgggactgaagaggttgtctatttgacatctccttcatcctttccttttgtagaaaactttttaaatttttttgtcagtgggtgttttaattaacca

SEQ ID NO: 46903 - DNA, 270 bp, Glycine max
  Clone ID: 701038916H1
cttcagcacaatgggtgcctacaagtatgtttcggagctatggcgcaagaagcagtctgatgttatgagattcttgcagcgggtgacgtgctgggagtatcgccagcaaccttctattgtccgtttgacaaggtctactcgcccagataaggctcgtcgcttgggtttcaaggctaagcagggttacgtgatttaccgtgttcgcgtacgaaggggtggccgtgagaccagttccaaagggtattgtttatggtaagcccaccaaccaag

SEQ ID NO: 46904 - DNA, 269 bp, Glycine max
  Clone ID: 701038918H1
cttcttcttccttccttcactcgtatatcacttccttcctcgttacgttaaccttctaattcaatccattcctcacttccttttcaaccgaagcttttctccgataatcgcagagagaaagaataatggattggggaaacgtaaccgcggaggatctgatcgacgcgctccgcgaggtcgattggtcgtcgccgccgcgcccgctgtcggaattcttctcgattcactgttcccagatcttcctctaaatggaacagccgcctcaaatg

SEQ ID NO: 46905 - DNA, 265 bp, Glycine max
  Clone ID: 701038920H1
gagagctggaatcacatggacttgtctttctctttctgggtctccattaaatttttcttctctcccttctttctctctctctctctctgaccattctcttcttcttctttttcttctcctctctctctctcccctccgccatggctgaggataaggagatgtctacctctgtcatcaatgggaatgattccctaactggtcacatcatatctacaacttggaggcaaaaatggggaacccaaacagactattagctacatggcag

SEQ ID NO: 46906 - DNA, 265 bp, Glycine max
  Clone ID: 701038921H1
cttcaagaacttcaagaaatggggagacattgaatttccactgccatttggaagggttatgagtgccaccgagtctttcattcatggattagatgaaaagacaagtgcatccttaaaattcacagtgttgaacccaaagggccgaatttggacaatggtagctgggggaggtgctagtgtcatttatgctgatacggtaggagatcttggctttgcatgagcttggaaactatgctgaatacagtggtgcacccaaagaagagga

SEQ ID NO: 46907 - DNA, 267 bp, Glycine max
  Clone ID: 701038922H1
ggagtctgtaaagaaaaagtatggaggaatgctgcccaaaaagccaccactcatatctaaggaccatgaacgtgcttacttcgattctgcggattgggcacttggaaagcaaggcggagagaagcctaagggaccacttgaggctcttcggcctaaattacagccaacgcagcagcaaacacgttaccggaaatctccttatgctccttcaggagaaggggggaagtgttccagccgaggatgcaccttccaaccagtaagcagcaa

SEQ ID NO: 46908 - DNA, 265 bp, Glycine max
  Clone ID: 701038923H1
ctaaaaagcaatcacgcccgaaaacgaaagcatctccctctccccgaagcaaacaactgcccttaaccctcaaaaacaagccacccaaacccatccacttcaacccccccccccaaaatcacctccctctctcaccgggattgattctccatggacgagtatctctctctctgtcttcaattttacacatcagtaaaccttatttctaatttcttcttctgttgcttgctttcaatttcattgacacaggtcagagcaataccca

SEQ ID NO: 46909 - DNA, 266 bp, Glycine max
  Clone ID: 701038924H1
tagcactttgatcatgcaactgctacgtgataacctcaccctctggacctctgacatgcaggacgatggtgcagatgaaattaaagaagccgcacccaaaggtgacggggaacaaaattaaacataccatactctctgcttattagtcattgaacttcccttctgtaatgttttcaaagggagaaggtgttgaatgctaatctcaatgttactgagattgggcattcgtgttcttcgttatgaattgtggatgtactgggctattt

SEQ ID NO: 46910 - DNA, 264 bp, Glycine max
  Clone ID: 701038926H1
gtaaaaacctgccatgacagtaataacaatgtctcctttcttatcttactctcttctttccctcgtgttcttcttcactctcaagtaccttttccaaagaagcagaaaagtacgaaacctgccacctggtccgactcctcttcctataatcggcaaccttaacctcgttgaacaacctatacaccgtttcttccaccgcatgtcccaaaaatatggacatcatatccctttggtttgggtcacgtcttgttgtggttgtttcat

SEQ ID NO: 46911 - DNA, 264 bp, Glycine max
  Clone ID: 701038927H1
tgaagctctcaaggaagctatccatcttggcctcgtctcccgccaagacctctttgtcacttccaagctttgggtcaccgaaaatcatcctcatcttgtccttcctgctttgcgcaaatcacttaaaactcttcaactagagtacttggacctgtatctcatccactggcccctgagttctcagccagggaagttctcatttccaattgaagtagaatctcttgccttttgacgtgaagggtgtgtgggaatccatggaagagt

SEQ ID NO: 46912 - DNA, 264 bp, Glycine max
  Clone ID: 701038928H1
caacgatatcagtcttccattcatcaacaaccactctctctcccctctctgcagcaaaaccaattctccggcgacatctccggtcaggttccggcagcctctccggcgactcggcatggcaactcaatgaatgcggaatcaccgccggggctcctcatgtcggtttcctgcctctccgactacgacctcctctgcggcgaggactcctccggaatcctccggagagtcgccggagtgctccttctccgacatcgactcctcacc

SEQ ID NO: 46913 - DNA, 264 bp, Glycine max
  Clone ID: 701038929H1
gagaatacctcaccggagtttctgcgcgacgttgtgataagttttattctggcggggcgtgatacgacgtcgtctgctctgagctggtttttctggattctgtcctccagacccgacgtgcaaagaaaaattcgggacgaaatcgaaacggttagatcggaaaaatcaaagggcgcgtttggatacgaggaggtgaaggagatgcgctacctgcaaggcgatttcggagacgatgaggttgtacccgccagtgccggttgacac

SEQ ID NO: 46914 - DNA, 265 bp, Glycine max
  Clone ID: 701038930H1
cacaaggtcaatgaaactgtcaatgttgtctctcagaagacaacagagattggacaaaggacatggggtatgatgaaaggggtcatggcattggcttcacagaaggttgaggaattcgctagagataacccgaattggacgtctgataactggcaacgaaatgaaagtgatagaacatggtttctaccaggagttcaatcgagagaataatggccggttcttctaccagagaaggacaacattcttcaggtggacaaactaatac

SEQ ID NO: 46915 - DNA, 268 bp, Glycine max
  Clone ID: 701038931H1
gaaagataccagtttttttgttgttttttttcctcaatctcaaccatggaaaagcagaagacactgatgagtttgattctgttgctgttgttatttacttcggatgtgagtgcttggaccggtgaaatccatggaagagttgtttgtgacgtttgtggggattcttctcttggacctgaagaccatattcttgaaggtgctgaggttgctgttctttgccaccaagtctggggaagttctaaattatcaggcattcactgatgctaag

SEQ ID NO: 46916 - DNA, 272 bp, Glycine max
  Clone ID: 701038932H1
tccaaaatcacactcctatatatcttcctatagcaatatatatgatgggtgacactgagatcaagccatcagttgaagtagtcgtatgtgcttccatgaacaataataatagcgcaaacaaccacaccctcccaaccgacatcaccaagccatcacaattaccaatcttgaccaggctccatgctggttactttttcatatgcctttcctttggagcacaagttgctctggaagagtttgagtaaacacaacaaggactcacaaagtctctg

SEQ ID NO: 46917 - DNA, 270 bp, Glycine max
  Clone ID: 701038933H1
ctttggacgttccaagctccaaccttagattctttcttgtcagacgaagcccttatataactgcctctgtcacaaagccaacacctctttccatcaggacagtgcaccccgtagtttccttgtcttcagatgattacgacaccaaacacacccttaagcttaacaacactcaggcgtggatcatatacacctcctctccaatctacttgaaccatgttccttgaggttacatccaagccattttctggcatcattcgtatagcggctttg

SEQ ID NO: 46918 - DNA, 264 bp, Glycine max
  Clone ID: 701038935H1
tcacaaaactagttaactatctctctctctgtctctacaaaacttagctctgtttttgaattattccttgcattctcttgagttcagatggaagcaactaatggccaccaaaatggttcgttttgcttgtccagtactaagggaagtgatccgttaaactggggagcggcggcggaggcgatgaatgggagccacctggacgaggtgaagcgcatggtccgagtaccggaacccggtggtccggctcggcggcgagacgctcac

SEQ ID NO: 46919 - DNA, 264 bp, Glycine max
  Clone ID: 701038937H1
ctttgtttgttccatctcttgcttcttgcttctattacttgcttccttcttcaccatgtcacttgctgggaaaatcaccactgaaattggggttcatgcaaccgctgcaaagtggttcaacctctttgcaacacaacttcatcatgttcaaaaccttactgatagagtacatggaaccaagctgcatcaaggtgaagactggcatcacaacgagagtcaaacactggacttataccatagatggtaaggctacaacatgtctgg

SEQ ID NO: 46920 - DNA, 263 bp, Glycine max
  Clone ID: 701038938H1
gaacaaagcacttagtgctattcaataattacgaaaaaccaacagcgagtgctgtttttgtctggtccaggctggaccagggaatgaatagagatgagaggctttcggttgaagagaactgagttaagcggcgaaccaaacgcagaatcggcggcagaaattgccaccggaagcacgtcgaagaggtgtgaaccaaacacaaaattccatccaccttctcttttcaatccccaactcagatctgtgaagaaaatctcaatttc

SEQ ID NO: 46921 - DNA, 262 bp, Glycine max
  Clone ID: 701038939H1
gtgaatgcgtataaaaggaaaataaagaaattagcgccaaaatgttgggtgtgttcagcagctccatagtgtcgccgccggacgagctcgtggccgccggcagccgtactccgtcgccgaagatgacggcggcggcgctgcggaagcggttcgaggagaagaacccctccgccgtgtcggtggaggtcggagagcatgtccagctcgcttataccccacaacgagtcgccgtttcagcccagatcctttgctgtcaaggatg

SEQ ID NO: 46922 - DNA, 263 bp, Glycine max
  Clone ID: 701038940H1
gcttcttgcaagaagtttctgagcttttatatcctctatatatagttctctggcaattaaggtctcatccgcataagcacaaatgggtagccagagttacttcaaggctttgattatttgccttatagcactaattggatcaactcaagctcaattgcagcttggtttctatgccaaaagttctccaaaggctgagcaaataattctgcagtacggttgagcatatccacaacgctccatcactagcagctgctctcataaga

SEQ ID NO: 46923 - DNA, 259 bp, Glycine max
  Clone ID: 701038941H1
ctgatttgatggaaaacgggagtctttatgatcatttattcggtactgctaagaagaatctcacttggccaattcgtcaaaagattgctctagggaccgctagggggttggcttatttgcactatggagctcaaccttccatcatccatagggatattaaggctagtaacattcttctggaccacaattttgaagccaaggttgcggatttcggtggcaaagttcaaccctgaggggatgactcacatgagtactagag

SEQ ID NO: 46924 - DNA, 265 bp, Glycine max
  Clone ID: 701038913H1
taacacccccattacaaatctctgtatttcagggttgaagattcacacattgaattgaagtttggaaatttgacacctaccccacaccatcatggcctgcatcgacaaattttgggttttcgccctcgctcttctcctcctcgcttcccctctcctccaagttgctaggtgccagtcagactctgatgatgtagtggaggctgctgaagaatcaggtgaacggcattgttggtgatgatgtccaagactttggtgatgggacttt

SEQ ID NO: 46925 - DNA, 198 bp, Glycine max
  Clone ID: 701038855H1
caagaatcacatcgcaacgaatcagaggcccctttcaacgaatcacatggcagaaccgtcgtccaccgccgccaccatcgctaccgctgatcctccggttccagcgaccaaaagctgggccgacgaagcggacgaagaaaccaacgcctccaccgccgaggcagaaacctcctccgttaacctggaagcgttaaccat

SEQ ID NO: 46926 - DNA, 196 bp, Glycine max
  Clone ID: 701038856H1
aatcaatcttctgagagtgtttggctgaaagtagcaaagatgtttcctttcgggcaaaagggtcaaaagatagaggggactatggtggttatgcagaagaatgtgttggatatcaacagcatcaccagtgttggagggatcgttgaccaaggcttaggcttcataggcagtgcagtcgatgcacttacttttgcag

SEQ ID NO: 46927 - DNA, 192 bp, Glycine max
  Clone ID: 701038857H1
agagtttgcagctgcatcatcgatcatcgtcacctcatggacggacacgattcacaagacccgaagcagagccctgctgacatgactgcctttgtgcaaaatcttctccagcagatggtgagttgtgtagtctaggttcttagagctgcattttctgacttttagaatatgtttcactgttgctaactggag

SEQ ID NO: 46928 - DNA, 190 bp, Glycine max
  Clone ID: 701038858H1
tttcagcttatcggaagcttgcccggagttatcatcctgatgtgaacaagtgagtttttctttcttctttcatattgaacatcgtctactttctgattctgttcccttgccttgttccccactctcttttttttgcttttaaaatttttatttcttttatttcactgttgctgtggacaaagtggtttgg

SEQ ID NO: 46929 - DNA, 191 bp, Glycine max
  Clone ID: 701038860H1
gaaaaagttataaagttattatctttgtctgtttcagaacaacccagttaataatataaatacatccttgtttttgcaatatttttctgagaacccatttttcattttctctctcatcttgtggtgctagttgttcttttgagaatagtgggtgtttttgtgcttaaaactataatgtctgtcttaaagta

SEQ ID NO: 46930 - DNA, 191 bp, Glycine max
  Clone ID: 701038864H1
gcacaagttaggcagttctgaaactacatcattgttatcaagcgctgtctacttgtttagcatcggatccaatgattatcttagcccgttcttgacacattctgatgttcttaactcttactctcattcagaatatgttggtatggttgttggtaacttgacttccattatcaaggaaatatacaagagag

SEQ ID NO: 46931 - DNA, 190 bp, Glycine max
  Clone ID: 701038865H1
ctctgatatttctatattttggtgctctgtgtctctacgatctggatccaacggtccaaaatgttcggggcttgtgctgcttgttttcccaggttttagagctccaaaccttcagatccacctcattcgtctccagatcttccttcctagataacgttttcgggttcgagaaggcacttgtttgtttgtc

SEQ ID NO: 46932 - DNA, 191 bp, Glycine max
  Clone ID: 701038866H1
gttccccttcgcgtctctctccaaacaaaacagaactgaactcgctgactgacactcgcaaaaattagggttttgcagtgatggcactgtccaaccgcgtccgatcgggaatctctctcttcaccaaatccacgttcctcactttcgagcgatccactctccaacgatcccttgttgccccttccatttct

SEQ ID NO: 46933 - DNA, 191 bp, Glycine max
  Clone ID: 701038870H1
cttcgccaagaagagggggaagaagctgttcacactcccagcaccaagcaagccatcaaggctctcacttctcagatcaaggacatcggcagtgaaggcttctggggcatataagagctgcaggccatcttcaggatcttcaaatggtaacaggaataggaagtatgcagactcagatatggggtcagatt

SEQ ID NO: 46934 - DNA, 189 bp, Glycine max
  Clone ID: 701038871H1
agagcctagagtgtgggagtgatgaattgcctgttaaggtggagaaggacgagggtgagtcttttcctgctggatccagaataaggaagcatcatcacagggaagaggggggtgttgaagaaaatagaagcagcaagcaagccgcaattttctctgaacctacattgcgatcatccatgattgatataa

SEQ ID NO: 46935 - DNA, 191 bp, Glycine max
  Clone ID: 701038872H1
agaaaatagcgaaataaacgacgtagaaagtagataacgagtgagagagagggataaaggaataaagaaataaaaataaaagtaaaatagagggagaaatgagaagtgtgaagatggtaaaatgatctcaaactcggaccccgtagaaccagtcacggcaaccgccactgccggcgccgacgacgccaccg

SEQ ID NO: 46936 - DNA, 186 bp, Glycine max
  Clone ID: 701038873H1
attaattgcaagaatggcacttcgttgcttggtgatgtccctttctgttctcttcactcttggtcttgcgagagaaagccatgccagagacgaagatttttggcatgctgtttggccaaacactcccattccaagttcattgcgagatcttctaaagcctggccctgcaagtgttgaaatcgatga

SEQ ID NO: 46937 - DNA, 185 bp, Glycine max
  Clone ID: 701038874H1
tgagcaccacttcattaaactcttcccaccgttaagctccactcatcccccatgatcccttcaggaataatgaagcaccccagaggaaagcttcctcttcccatcattgtcatcacaacctgtgttcttgcttttgtggctatcttgtatgtagagaggctcagtttcctctcttccaagtccat

SEQ ID NO: 46938 - DNA, 181 bp, Glycine max
  Clone ID: 701038875H1
ctcaatgaagctcagtcccgcggtggcggcggcggcggcggaggaggaggatacaatcgtggtggcggtggatatggtggtcgtagtggcggtggcggtggcggtggtggataccgtagccgtgacggtggttatggcggtggctatggtggtggtggtggtggtggttatggcggtggca

SEQ ID NO: 46939 - DNA, 185 bp, Glycine max
  Clone ID: 701038878H1
caaaaaaccaaacaccccttctcccaattcccattcccaccagaatcctccattactccgagacccagcacatgctacctccttcttttctcatttctttatttgcaaaatccacacaccctaaattcctttcccttcgaagaatcccttacatcaccgtaacccaataagaagtacctcatttc

SEQ ID NO: 46940 - DNA, 219 bp, Glycine max
  Clone ID: 701038881H1
acccgaacgtacacaccgaattcggctcgcagcaaaatcactcctattgctatagcaatatgatgggtgacactgagatcaaaccatcagttgaagtagtcatatgtgcttccatgaacaataacaatagcgcaaacaaccacaccctcccaaccgacatcaccaagtcatcacaatcacacttaccaatcttgaccaagctccatgctggttactttt

SEQ ID NO: 46941 - DNA, 188 bp, Glycine max
  Clone ID: 701038882H1
tagaaacggcgtcgcagggaatggtcttatctggttaaggaccgactcttcacttaggaggaagtgacgatcgacatctggtaagaggctttaatcaaccaacgaacaacgatgtcgtggtttgcaaggacaatcgcaaactcactcagactcgacgacgacgacgacgaccacaatggcagtgacct

SEQ ID NO: 46942 - DNA, 186 bp, Glycine max
  Clone ID: 701038883H1
ccgacgcccacgcgccaaacccgcgcgtgctgccactttatgacatctttagttttctcagcaccacaatcagcagcggcatcataacctacctcgcatacaccaaaaacgacaccccaatgctcctcttcgccgccttcatctacgtcgtttacttctccgtcgacttctccccaccaccacaac

SEQ ID NO: 46943 - DNA, 182 bp, Glycine max
  Clone ID: 701038884H1
atcaagtactccatggacttgtatgctgcttacatagttgagagcttaaggcactaacttctttagaaactgaatagccaatttcagtgatctccaattatgtaaaatgtggatgaaactccataaacattctgatttccgtgccgttctgttatggcactactgctggctcggttcttgac

SEQ ID NO: 46944 - DNA, 183 bp, Glycine max
  Clone ID: 701038885H1
gttccatttattggacttgttatgggtgatagggggttgatttctcgtatactttctgcaaaattttgtggatatctcacttttggtacccttgagtcaggagttgtttcagctcctggtcaacctactcttaaggatctattgtatctatacaatttaagacaactggctcctgatacaaaa

SEQ ID NO: 46945 - DNA, 185 bp, Glycine max
  Clone ID: 701038886H1
aaaaaaatggaccttctcctaaattgcctaaaccttaacaccattgctattgcatcaatcctttctctaatcttcttatgtttgtctctatatcgtaaaaattctcgtgggaaagatgctccagtagtgtctggtgcatggccaatacttggtcacctctcattgctgaatggttcacaaacacc

SEQ ID NO: 46946 - DNA, 172 bp, Glycine max
  Clone ID: 701038889H1
aacactgaaaatctaaagagaaagtgattccctcagcggtgacagaacgcttccttgagcagagaaacccaagcagatcgattactcttgagaaaacaagatgagccgccacccttctgtcaaatgggctcagacgtctgatgtactctacttaacagttgagctgcctgat

SEQ ID NO: 46947 - DNA, 179 bp, Glycine max
  Clone ID: 701038892H1
gctaaaccaaaccaaaactaaaacaatgttgtctgtctgagtttacattgagagtgcccaagttcgaattcgaaagcaaaaacatgtttttggcgagacccattttccgaggaccctccctttgggcgttgcactcttcctatgcatattcctctgcctctgcagctgctattcaagct

SEQ ID NO: 46948 - DNA, 178 bp, Glycine max
  Clone ID: 701038893H1
ggtatctcaaaccaagtcacgccaaaaatgtgatagaggttcctatttccgagctcttaaatacatctattttgtgcctttatctatctgcttgtttgttgcttggacaacgtgataactttagtgtgggtcattctgttgtcgtggtctatgactcctggagtcctggttttttgat

SEQ ID NO: 46949 - DNA, 277 bp, Glycine max
  Clone ID: 701038901H1
cagagacagggagacaagacagagtagtacagattactaccaatggctaccaaggtttacattgtttattattctacgtatggacatgttgagaagctagctagagagatagaaaaaggggctgcttctgtggagggagtagaagcaaaactgtggcaggtacctgaaacattgcctgaagaagtccttgctaagttgggagcacctccaaagagtgatgttccaatattactcccaatgagcttcctgaggctgatggctttttgtttggttttcc

SEQ ID NO: 46950 - DNA, 259 bp, Glycine max
  Clone ID: 701038902H1
gattttctctgcagggggaacttggagccaatgctatattagctgtgtccattgccgcttgtaaagctggtgctgcagaaaaggaggttccactttacaagcacattgctgacctgtctggaaaaaccagcccaacacttcctgttcctgcctttactgtcataagtggtggaaaacatgctgggagtaacctggccattcaggaaatcatttctcccaatcggagcaagcaaatttgaggaagcattgcgaatgggca

SEQ ID NO: 46951 - DNA, 198 bp, Glycine max
  Clone ID: 701038854H1
gctcctggtgctgcttcatctgagactgtgcccaagagatcgccaataccaagccaggaagatgcaacgaggaatgcactgaaaattttgtcacatggtaaggatgatggaagtgatactggtagaggaagagaatatggagggagaggtgggttggatcgaggcaggggcagaggcagaggcaggggaagaggtcga

SEQ ID NO: 46952 - DNA, 261 bp, Glycine max
  Clone ID: 701038904H1
gcaaacgatccagactcttgtttcatttgcagcatcaaaatgagtggtacaacgatgcctgccgagtggagctctaggttttttaatgtggctagtgcagctgtcgctacagccgccgttgtcggcggtttatatgccattctttcatcctcaacctctgctagctctgtgatggctgtgccgtttggcagcgcacggcgtgagagcaaagaacgtggatggtggctccgggtctcatcctcgcgatggttccaccacggt

SEQ ID NO: 46953 - DNA, 266 bp, Glycine max
  Clone ID: 701038909H1
tggcaggcatgcgtttggtgatcaatatcgggctactgacactgtaattaaaggagctggaaagctgaagctggtgtttgttccagaaggccaaggtgaggaaactgaattcgaggtttttaacttcactggtgaagggggtgtttcattggctatgtacaatactgatgagtctattcgttcttttgccgaggcttctatggcaactgctttagagaaagtggccactttatcttagcaccaaaaatacaattctcaagaaatat

SEQ ID NO: 46954 - DNA, 267 bp, Glycine max
  Clone ID: 701038911H1
gtttaataaacgttgaaactattcctcctgcgccatctccattgctgttttctctctgcttgctattacaatccaattcaagaagttcgttcaactttgatgctcaagtctaacaacatatataaccattgacagatattcaaattcagcataattgtgattaagattttggtccttccctggaatgaaaatactgtttgtcaataaatttgggagtgatttgcggttatatttaatgggctgctactgttcaacttcaaagaaaac

SEQ ID NO: 46955 - DNA, 266 bp, Glycine max
  Clone ID: 701038912H1
gcgaccaggttacgatcacaggaactgcagcaacttatagctgcccttcttgagttcatggctgtttgtaaacgtgccatccgtgtacatttcagattgattggtgaggaagatcaggatttccacacacaacttgtaaatggtttccagtcactgacagcagagttatcacattacattcctgccattctctcagagctatgacaagtgtttgcctctatattttgcttcgatttgttcatattgtagtctcctcattccctttc

SEQ ID NO: 46956 - DNA, 211 bp, Glycine max
  Clone ID: 701038819H1
tcaatccctaaaacaaatgagaacttccgcctgctgtatgacaccaaaggccgattccgtcttcactcagtcagagatgacgaggctaagttcaagctttgcaaagttcgctcagtgcagtttgggcaaaaaggtatcccatacttgaacacctacgatggtcgcactatccgctacccagaccctctcatcagagctaatgacaccatta

SEQ ID NO: 46957 - DNA, 209 bp, Glycine max
  Clone ID: 701038821H1
ctgaattatacaaaacagcacgtatatctccaattacacttacttatttccataattgcatggaaaatgggaactatactgtaaacctccattttgctgagatacagtttacaaatgataaaacatttagaagtcttgggaagcgcatatttgatatctatgttcagggaaaactgattcgcaaaaattttgatatagagaatgagaca

SEQ ID NO: 46958 - DNA, 212 bp, Glycine max
  Clone ID: 701038822H1
tttgggagatcaaatcatatctatctatcagcggcaaggcaataccaagttgtgaaatggagaccctctgctctgcattggtgttcccatctttcagaatcagaacttcagctttctccaaatgtggcatcagggcttccattgccgttgagcaacaaacttcccagactaaggttgctctcctcagaattggtaccagaggaagtccacta

SEQ ID NO: 46959 - DNA, 210 bp, Glycine max
  Clone ID: 701038823H1
ttcttcctcttcctcagtagtgcgattttcgattctcttctctgcaactatgcctaaccctaaggtcttcttcgacatgaccatcggcggtcaacctgccggccgcatcgtgatggagctctatgccgacgtgactcccagcaccgccgagaacttccgcgcgctctgcaccggcgagaagggcgccgggcggagcggcaagcccctcca

SEQ ID NO: 46960 - DNA, 109 bp, Glycine max
  Clone ID: 701038824H1
caagttgtgttcttgtgttttagtcttagaagggtatggtaacttctaaacacaaaattgttcttaccactcataagtagcaccaatttgtcagcactaactagtaaaa

SEQ ID NO: 46961 - DNA, 211 bp, Glycine max
  Clone ID: 701038825H1
cgagcacagacacggtgcattccagatatgcatggagtctctctctctgtatgaacacgcaaaagaccattgattgtccgagagaacgcaagcactgacatcagtactccatatatttgctactctgcatgaacataacattcatacttaagttttgctggttgtgtgtgtgttttttgttcttggtcgagccttgtactgattaacgaga

SEQ ID NO: 46962 - DNA, 209 bp, Glycine max
  Clone ID: 701038826H1
cgagagaaggtggtactacccgtcttaagaaaaagaaggaagatcgtgattatgatgacgatgacgatgatgaggattgaagaattgtagcaggctattactagctattaataaaagcaggcattactttctgagttctgatgggcaatttttatgtatcttgagagttcaaatagacattcaaattatgtgctagtatcagtatttta

SEQ ID NO: 46963 - DNA, 209 bp, Glycine max
  Clone ID: 701038827H1
ctcgagctacactatacttgtcaaccctttgagagttagaatggctgctgctattgaaatccccacaatagtgtttccaaactcctctgcccaacagaggatgccagtggttggaatgggatctgcccctgacttcacatgcaagaaagacacaaaggaggctatcattgaggccgtgaaacagggttacagacacttcgacactgctg

SEQ ID NO: 46964 - DNA, 99 bp, Glycine max
  Clone ID: 701038828H1
ctcgagctcgagccgcaaaatgcagggtttaattcgcaaactggtggcacaggtacaggcacagcatccccttcgcaacaccaactctcaccaccgtat

SEQ ID NO: 46965 - DNA, 179 bp, Glycine max
  Clone ID: 701038829H1
tcgagtttttgttttgaagttgttactaaataaaattaaatagtgtattaattttaagtaagtgttaaaaaacttatccttctctttttactttgttaaaaaaaattgaattttgctaaggaatatactgtgcatatcctttgggtattctagtaaagtgatgaaagccttcatggttc

SEQ ID NO: 46966 - DNA, 209 bp, Glycine max
  Clone ID: 701038830H1
cgagcaaaagattgcaatgtttgacaagaatggtggtttacaggctctgattcaatatccagatatccaaacagctgttgtggccaaggaagccttggaaggacactgcatatatgatggaggtttttgcaagcttcacatctcgtattcgcgtcattctgatcttagtataaaggtgaataatgatagacgtagagactatactattc

SEQ ID NO: 46967 - DNA, 206 bp, Glycine max
  Clone ID: 701038831H1
cgaggcttcaaggaaggagagcttgttattctctatcaacaaggaaaatgtcaggtgaagaggttgttgttgcagctgagccagctgctgccatcccaggcgagcctatggatatcatgactgccttgcaacttgtgctcagaaaatctctggcttatggtggtcttgcacgaggccttcacgaaggggcaaaagtgattgagaag

SEQ ID NO: 46968 - DNA, 210 bp, Glycine max
  Clone ID: 701038832H1
tcgagtaccgacctaacccaagacgagagaatagaggaagcttggggtttgaatcgaatcgaatcgaagcgattcatcgatcgatcgatggctcttgtaggagttgaactgaagcatgcggcggagggcgtaccggaggcgaattgctccgccaagcccaccaagcagggcgagggcctccgccactactattctctcaacatccacgag

SEQ ID NO: 46969 - DNA, 216 bp, Glycine max
  Clone ID: 701038833H1
cggctcgagtggacgttggcgtctctaagttccattcccctaattatactacatcgtcgttcgcctccgatcacaaccatcgccggagcttcacgccggcaaaacctctgccgttcaagataacggatgagatgatcggcatgaccgttccgagaaaggctcgttgagcatctgcaaaaaggtttcacgaaagttggatttccgcaagcagcggtg

SEQ ID NO: 46970 - DNA, 214 bp, Glycine max
  Clone ID: 701038834H1
cggctcgaggttcccaatactgtacctatcagcagggacatgcaccacattgatcatcataggaggatccacagcaaggacattttaccaagtggtgtgtggtgaaacatgcactgccaaacctatgaccactgtggaatggtacttggtgttcacctgtgtagctgtggtgctatcacagttgccaaactcgaattccattgctggggtgtca

SEQ ID NO: 46971 - DNA, 210 bp, Glycine max
  Clone ID: 701038835H1
ggctcgaggcgagcatggctccgaagaaggttcttctcctttgcggggacttcatggaagactatgaagccatggttccatttcaggcattgcaagccttcggtctcgccgtcgacgccgtctgtcccggaaagaaatccggcgatgtctgccgcaccgctgtccatgtacttgccggcgcccagacttatagtgagacggttggtcaca

SEQ ID NO: 46972 - DNA, 212 bp, Glycine max
  Clone ID: 701038836H1
cggctcgaggaaagattttaaaatgttaaaaatattgaagtcaaatttcattttctgcattgggttggacttaggattgcaattctagtatttgcctacaactttctgctgagatattgacatggtgctttattcctaatttttgtgggggtggttctcagctacctaggattcaggtcacagatcctgttgcaagatattatggattgaag

SEQ ID NO: 46973 - DNA, 213 bp, Glycine max
  Clone ID: 701038837H1
cggctcgagaattacatagcctcaataatctgagagagaaacaaaaacaatgaaggtttccattgccaagttccactcccttcccctatgttttttccttctcttggccttcaacacaaaacccctcctagcagcagaaccagagccagtggttgataagcaagggaaccctttggagccaggagtagggtactacgtgtggccactttgggc

SEQ ID NO: 46974 - DNA, 212 bp, Glycine max
  Clone ID: 701038839H1
cggctcgagatatcccttctttccactaacttctctctcatgttgatacaaataaaaaacaaagtttcatactttacgacacccttttctgcaactgatgatggaaggaagctgaaacagtgaaaaacagcaacaacgaccaccctgtctttgttttttgttttttgtttgttgagttgaaactttagagaaagtgaatagtgatatggagg

SEQ ID NO: 46975 - DNA, 212 bp, Glycine max
  Clone ID: 701038840H1
cggctcgagattccaattcccctcacccccaattcggggaattagggtttcgccccattcattcatcgatgcaccaccaccatcgtcgctagggtttgcttcgatggcggaattggaggaggagcggatgggaggggatttcaagcccttctcggagggctcttcgtgctcgcgttcgatcagcgaaaccgtgaacggctcgcaccaattca

SEQ ID NO: 46976 - DNA, 199 bp, Glycine max
  Clone ID: 701038841H1
cactcttcttctcttgcggctagggttttagcgcagcttcttctagatttaaggaagatgggtaaggaaaaggttcacatcagtattgtggtcattggccatgtcgactctgggaaatccactaccactggtcacctgatttacaagcttggaggcattgacaagcgtgttattgagaggtttgagaaggaagctgctg

SEQ ID NO: 46977 - DNA, 199 bp, Glycine max
  Clone ID: 701038842H1
attaatttgaattcttgatggattcccttccttccgtgtcgccctccatggtcctccctcccagccaccctttccgccgcctccctcccagcctcgtctccgcccgaaccagaagccgccgccgccgccacgtgtcggtgtcctgcaccctctccggcaacggcaccgacgacgaggtcgagagggccctccacatgga

SEQ ID NO: 46978 - DNA, 196 bp, Glycine max
  Clone ID: 701038843H1
cagatatgaaccggtcaatgaacccactttggacaactgctttgtatcaacaagttatgatgctactactcactttgagtcgaccgtggatgacgttctcaacatgtatacattgataactggaaaggtaagtgttatgccttggttaccacttgtttccacttcttgaattaatttttgagccacagatagtgac

SEQ ID NO: 46979 - DNA, 198 bp, Glycine max
  Clone ID: 701038845H1
tgagaaaagcatgaggatggtattaatggctttgttggctttcacgatgcttttatctaagggtgaaggccaattagtagagaatttctacagtttatcttgtccaaacgtggaatccatcgtgaaagaagcagtgactaacaagtttacacagaccattacaactggacaagcaactctgcgtctctttttccatga

SEQ ID NO: 46980 - DNA, 196 bp, Glycine max
  Clone ID: 701038847H1
cttgatttgaaggacttggtcctgctctctggtgctcacacaattggtatcgctcattgttcatcattatcaaaccgcttgttcaatttcactggcaagggtgatcaagacccttcactagacagtgaatatgctgcaaatctgaaagccttcaagtgcaaggacctcagtaaattgaacaccacaaaaattgaga

SEQ ID NO: 46981 - DNA, 197 bp, Glycine max
  Clone ID: 701038849H1
caatcttctgagagtgtttggtctgacagtagcaaagatgtttcctttcgggcaaaagggtcaaaagataaaggggactatggtggttatgcagaagaatgtgttggatatcaacagcatcaccagtgttggagggatcgttgaccaaggcttaggcttcataggcagtgcagtcgatgcacttacttttgcagcca

SEQ ID NO: 46982 - DNA, 209 bp, Glycine max
  Clone ID: 701038818H1
ttaaatccaccgtgataaaaacaaatgttttgactggctgtattgccactgtgtattgaattgacccactttagaaagtccatctttctcctctaatcagaaaccaggtgaatcaatgataaatttgatcccatgaacatatttcagctggacatttggaactgggaatgacttgtatgcattcaaatcaagtagcattttgttaaaaa

SEQ ID NO: 46983 - DNA, 197 bp, Glycine max
  Clone ID: 701038850H1
cagagacagagacgcagccatggggcggagacctgcgaggtgttataggcaaattaagaacaagccataccccaagtcacgtttctgccgtggtgttcctgatcccaagatcaggatttatgatgttggtatgaagaagaagggtgttgatgagtttcctttctgtgtccatctggttagttgggagaaggaaaatg

SEQ ID NO: 46984 - DNA, 195 bp, Glycine max
  Clone ID: 701038851H1
ctttatctttgtgacaataagtttcatactgaagctttgaatgaactcctagagtctgatgacaagtttggatttattgtcatggatggcaatggtactttgtttgggaccttgagtggtaatacgagagaagtgcttcataaattcagtgtggatctcccaaagaaacatggatgaggaaggcaatcagctctg

SEQ ID NO: 46985 - DNA, 198 bp, Glycine max
  Clone ID: 701038853H1
tgttttgagatttgactcacgagaggagagtaataatgtgtgggaagtagaagtagaagtagaaggagagaagcaccactacgtcagcgattcctttgcctttttcttctgtcttagactcgaagacaagtttgatcctattttgagaatcgcattcagatggaaagcgcatcagagcttgtggaattcccgttgttg

SEQ ID NO: 46986 - DNA, 236 bp, Glycine max
  Clone ID: 701038772H1
gcagtctatgcttcttttagatgccttcaacaaagatagggcatctttgcccacacctctgccaaatccaccacctttggcacctcttcctgtagttgctcctgatgctcgaacacaagagatgataaatgaaaacctgaagaaggctgaggatcttggtgagcaaggaatggttgatgaggctcaaaaagcactggaagaggctgaagcacttaagaagcttcctgccaggcaag

SEQ ID NO: 46987 - DNA, 231 bp, Glycine max
  Clone ID: 701038773H1
cagaggccatatcttcgcctggatttgtgagcttatttctggccaaagatgtaccgagtgataataaaattggaccggttgttgctgatgaggatctctttgctgtagattatgtcacttgtgtgggacaggttataggagtagttgtggccgatactcatgaaaatgcaaagattgctgcacgaaaagttattgttgagtatgaagagctcccagccatcctttcaatac

SEQ ID NO: 46988 - DNA, 229 bp, Glycine max
  Clone ID: 701038774H1
gtcgtagatgtttctgcatgaaagtatttatacagacgtactagaccaacttgttgaagtctacaaacaagtcaaaattgggaaccccttggagaaggggactctagttgggcccttgcatactcgtacttcagtagaaaactttcagaagggtatttcagtcataaaatctcagggagggaaaatcctaaccggtggatctgtattagagtcgggaggaaattttgta

SEQ ID NO: 46989 - DNA, 230 bp, Glycine max
  Clone ID: 701038775H1
catccaccttggcctagccagctagcgcttcttctctcgcattccgtggagatctagtgctgccaaacctcgctgaaaattagggtttcgtttcggaggtagacgaagatgttcggaagggcaccgaagaaaagcgacagcaccaggtactacgaaatcctcggcgtttcgaagaacgcttcgccggatgatttaaagaaggcttacaagaaagccgccattaagaacca

SEQ ID NO: 46990 - DNA, 234 bp, Glycine max
  Clone ID: 701038776H1
aaaattcttttaatttttgattaaattatttattatatatttgtataatgttataatttgatctaggttttctagataaatatatgggtattgaatatatgatgttgaatgatgtaaaatcagacggattcccactgatattatttgtatatgattacacaaccagctactactgacaacatcatgttcatgctctttgttttgtagattcttagtgttttaagtttcatctgc

SEQ ID NO: 46991 - DNA, 234 bp, Glycine max
  Clone ID: 701038777H1
gaagcgaagtgtgtttgggaacaatggcagagcaaaagaaccggtggagctgggacgtcgccggctttgacccgtggaagtcgtctacgcctccgcagtcgccggcggggcggaacacggcgatcggaaacctagtgcgccgttggtgcggcggtactccatttcggccacgtcggttcttccgcaatcgaagcacgctgtggccttcaagcttcagcggctgaaggaccaagt

SEQ ID NO: 46992 - DNA, 235 bp, Glycine max
  Clone ID: 701038778H1
cagcaagcagccatgccgtcggacgacgaacgctcgaacgccagcgactcggaggaggaggtcgaggagaccaaggaggagaaggtcgtcgaggacctgagcaactcggacgtcgtcgagcgctaccgcctcgcggccgagatcgcgcagtcggcgctccagggcgtgctcgcgcactcgcggccggcaaggacgtcgtcgagctctgcaagttcggcgacctcatcatccagca

SEQ ID NO: 46993 - DNA, 237 bp, Glycine max
  Clone ID: 701038779H1
gaatcagggaggacccattttgctctagcatttgaacttcctggtggctggcataagttgaaggatgctatgattttgactgttcttcagatgctattgggaggtggtggatcattctcagctggtggacctggtaaagggatgtattcacggctatatctcaatgttctgaatgaatatccacaagttcattcaatttcagcattcaacaatatttacaatggcactggcattttt

SEQ ID NO: 46994 - DNA, 238 bp, Glycine max
  Clone ID: 701038780H1
atcagtggcttgtaagacctgttttagaaactcacggatgggatcatgatgtgggttatgaagggttgaatgtagagagattgttcgttctcaaggaaaagatacctttatctttctctggtcaggttactaaagataaacaggatgctaatgttcagatggaaatatccagttcagttaagcatgggaaagggagagcaacttcattaggttttgatttgcaaactgtggggaagga

SEQ ID NO: 46995 - DNA, 236 bp, Glycine max
  Clone ID: 701038783H1
ggcgcagagcgtgatccattgacgaagatggtgcagcgtctcacctaccgcaagaggcacagctatgccaccaaatccaaccaacacagggtcgtcaaaacccctggtgggaagctcgtttatcagaccaccaagaagagggccagctggcccaagtgccccgtcactggcaagaggattcaggggattccacacttgatgcctgcagagtacaagagatcaaggttacccagaaa

SEQ ID NO: 46996 - DNA, 231 bp, Glycine max
  Clone ID: 701038784H1
cttcaaccctagcgtttccacaatcgattctgatgatatatttgcgctggtgtttgcctgaggatttggggcgtttccgggtgatacataacttgacttgattgtggttgatactaactggacaggaataatgcatcgcaattcacttaaaagatcaaatgatagtacccggattatcatcacagctatcatgggaattgcctttggattttttgttggtatttcaatttc

SEQ ID NO: 46997 - DNA, 231 bp, Glycine max
  Clone ID: 701038785H1
gttttgtagtaagtgaggtgaggtgccaaaatggtgaagataactcttggtactttcgatgactcttttggtgttgcctctcttaaggcttagttggcagagttccatgcaactctgattttcgtgttcgctggtgttggttcagccatcgcttacaacgagcttacaaaagatgcagccttggatccaacggggctggtggcagtagctgtggcccatgcatttgcactg

SEQ ID NO: 46998 - DNA, 233 bp, Glycine max
  Clone ID: 701038787H1
ctcagattgcaattgcctcttctcttctcccagaatcggtcactaatccgatatcatgaagctcgatacgactagtctcgaatcgtttcccacactgattgcacctcaaaacgacgtcgccggagaactctccgccgctccgttctttgaccttccgaattccaatgacttcgatgggttcttgaaagacgctattcagatggtgaagcccgcgaagggtactacaactcttg

SEQ ID NO: 46999 - DNA, 233 bp, Glycine max
  Clone ID: 701038788H1
ttcttcttcatcttcttctcctttgtcacttctcagcaccactcaatctcttcaatttctttcttctactggcaataagcatcagcacactgccacatccagttcccttctgtgtgttcctttcttctactctctccagtccagccaaaacgaagctccttccatcattttcagttttttctgtcaagtgttgttgcttcttctcccaaactcgtccaaacattgctggtaac

SEQ ID NO: 47000 - DNA, 216 bp, Glycine max
  Clone ID: 701038790H1
ggactcctaagttcagtgatggctattgtcacctgcttgattgggttgcactatggacatattattgtccattttaaggaccacagagtgagaatcatatactggatgatcccaacctcttgtcttttagtttttggccttgcgttggacttatttggaatgcatataaataaggttctgctactcgctcagttgacacattgtgtcactcgctgg

SEQ ID NO: 47001 - DNA, 227 bp, Glycine max
  Clone ID: 701038791H1
ggaaaagcactggcgcactaccccgaggcttctcttctcttctcttctctgacgtgagtcaccatggcgagggttagtgtgctgaacgatgctctgaagagcatgtacaatgctgagaaaaggggaaagcgccaagtcatgattaggccatcctccaaagtcattatcaaattccttttggtgatgcaaaagcacggatacatcggagagtttgagtatgttgatga

SEQ ID NO: 47002 - DNA, 234 bp, Glycine max
  Clone ID: 701038793H1
attatctacccacaatctaacacagaaggccaagttttgccgtttgcatttcctcttcaaactctgtctctccagatctaggtgctctgccttcatgttacatttcgacaagatggcaacaacaacagtttccaacttgccaattgctatgtcaagacccaagattccttcatcacaaaggattgcaaatgtatgtcctgcaattcttggaggtagatctaaggttggttcatg

SEQ ID NO: 47003 - DNA, 240 bp, Glycine max
  Clone ID: 701038796H1
tttgcatccttcctttggtcttatagttattagttagaccttgcacagtaaataacaatgaagcggccatttagttcgagcggttatcacttttgtctaatgaatatgttcctgttgcttttggcagtaaggtcccaactgacaacagacttttataaatcatcatgtcctaacgtttccaaaatagtaaggagagaagttcaaaaagctctaatgaatgagattcgaatggctgcttct

SEQ ID NO: 47004 - DNA, 213 bp, Glycine max
  Clone ID: 701038801H1
atttagtatccttttcaatttcatcccattttttgtcatcacatgtgagatatatacatgtacaaatatttatatatatgatatgatatatcttactatttgtagctctaggaatctattcatagcagcaaaaagtaaacagaactgaacaactagtaatggaagatactagcttctttgtgatcttatcatcctttctgcttctcatagtta

SEQ ID NO: 47005 - DNA, 93 bp, Glycine max
  Clone ID: 701038803H1
tttgcacaagtaattgcagcatcccatctagagttacctgctgtagttggtttttggagtgtttatgcagttacgtcactatgttctatcagg

SEQ ID NO: 47006 - DNA, 211 bp, Glycine max
  Clone ID: 701038804H1
gagaaggaactggttgctgagatatctgaactgcaatgcaaaaaagaagatcttgaagctgaattgaaaaaggttagcactactttggctgctgctcaagcacgactatggaatgtgagggaagagagagaccagtttgaagaagcaaacaatcagatagttgaacacctgaagataaaggaagatgaactttcaaaatcagttagctcat

SEQ ID NO: 47007 - DNA, 208 bp, Glycine max
  Clone ID: 701038805H1
tagtgctgagttctttgagttgcaacctaaggacaggccttgcccttgtgaatggcactgctgttggttctggcttggcttcaattgttctttttgaagccaacatcattgctgtcttgtctgaggttatttcagcaatttttgctgaagtgatgcaagggaagccagagttcactgaccatttgactcataaactaaagcaccaccc

SEQ ID NO: 47008 - DNA, 194 bp, Glycine max
  Clone ID: 701038806H1
ttggtaattcggttaaacactggacttatgtcatcaacatcatgcagcttggattcatgcactctttcacaaaggttctgaacatggtgaaagagtgcatgaaaccaagctgcatgatggtgatgaatggcacgagtgttggtaattcggttaaacactggacttatgttcatagacggcaaggtacacccatg

SEQ ID NO: 47009 - DNA, 212 bp, Glycine max
  Clone ID: 701038808H1
tcaaacccaaaaccccttgtgcacctttctcttcttctcctggtcctcttttcttcctcaaccgaatccctgagatttgaaatccaatccgggcacaccaaatgcatctccgaggatatcaagagcaattccatgaccgttggcaagtaccaaatcgttagccccaacgagggtcaacctctgccagatgcccacagattcaccgtcagggt

SEQ ID NO: 47010 - DNA, 209 bp, Glycine max
  Clone ID: 701038812H1
aaaatcgaatctttgtttgaaacatggcttcctcctccttcctctgccccgcagcatttaccttctcacagaagccacttcaatccacttttcttcattcctcctctcttctcactctaagcattcttcctaagaaattgagaaaaccccaccaactgagaagcctcatagtggccaaatccaatggcagtgactctgctgatgttcct

SEQ ID NO: 47011 - DNA, 206 bp, Glycine max
  Clone ID: 701038813H1
ggggaaatggttgtactgacaacctcagtagaatggggagcgctggtcaccaagctgactgtacctaaagattggaaagagtggcagatctatttggtgctattgggactatttttagcatcagctgttgcattttacatattctttgagaactctgattcattctggaactttcccatgggcaaagaccaaccagcaagaccaag

SEQ ID NO: 47012 - DNA, 207 bp, Glycine max
  Clone ID: 701038814H1
agccgattcggctcgagctttttgatatcacttgtatgcaccttggtggtcgggccgctgagcaggttcttatacggagaatctcaacaggagcacaaaatgacttggaaaaagtgaccaagatgacgtatgcccaagtagcagtttatggttttagcgacaaagtaggcctcctctccttccctccaactgagggctcatatgagt

SEQ ID NO: 47013 - DNA, 109 bp, Glycine max
  Clone ID: 701038816H1
gatcttcgttaagacactcaccggcaagaccataaccctagaggttgaaagctccgacaccatcgataacgtcaaggccaagatccaggacaaggagggtatccccccg

SEQ ID NO: 47014 - DNA, 138 bp, Glycine max
  Clone ID: 701038771H1
gcagaaggagcaaaagcaatggcgccgaagaagccgagaaccacgacaaggaaccctgatttggttagggggattggcaagtattcgaggtcgcagatgtaccacaagagcgggcatctcgggccatgcaaggccaaa

SEQ ID NO: 47015 - DNA, 236 bp, Glycine max
  Clone ID: 701038738H1
caaacatcacaacaatgtctccattttctctcttcctcttcaccacattgctattctttctcggcgccgccgacgcgcgactcaccttggacttctacaaggacacgtgtccgcagttcagccagatcataagggacaccgtcacaagcaagcagatcgccagccccagcaccgccgccgccacgctccgcctcttcctccacgactgcctcctccccaacggctgtgacgcctcc

SEQ ID NO: 47016 - DNA, 238 bp, Glycine max
  Clone ID: 701038739H1
gggactaaaaggaaaaatgaagaaaatgagtaaggcatttgacgaagtgtttgaacaaatcataaaagaccatgaagatccttctgcaagcaacaagaatagtgtgcactctgaagattttgtggacatactgctatcacatatgcaccaagctgtgaatcagcaagagcagaaatatgtcattggtagaactaatatcaaggcaattatattagatatgattgcagggtcatttgac

SEQ ID NO: 47017 - DNA, 238 bp, Glycine max
  Clone ID: 701038740H1
ctctcctcctcgtggaagatctcggtcaaagtcaagatctcccatcagttaccggagaaggaggaggtctcgctcttattcacctgctcgtcattctaaggatcaccgctctaggtcaccattgaggccccatcattactcaagctatgatagggaaagacggtcctatagagatattagggaacatagtgatagatacagaagacgagattcagatagatcacttgatcatcgttca

SEQ ID NO: 47018 - DNA, 238 bp, Glycine max
  Clone ID: 701038741H1
acctcgagcgaatcggctcgagggaccattattaaggcctcagcttgttatgttcggtacttccattgttcagtatggtctttatgatgaaggttggatggctgatctttctcacttgtatgctcgcaaggttgatatagttttgcgaggatatgctggttggaattcaaggcgtgctctgcaggttctggataaaatctttcctaaggatgcccctgtacaaccttcattggtcatt

SEQ ID NO: 47019 - DNA, 236 bp, Glycine max
  Clone ID: 701038743H1
tgtatgtctttgcgagcgtaaggttgaggagaagagatggtgggagcacggtcacgggacatagatgacttgcccaagaccgccgccaactacacagcgcttacgccgttgtggtttctagagagagctgctacggtccaccccaccagaaactccctcatccacggatctcgtcgctacacgtggcagcagacttaccaccgttgccgtcgattcgcctccgctctttctaatca

SEQ ID NO: 47020 - DNA, 236 bp, Glycine max
  Clone ID: 701038745H1
aacaaccacttatcccctttctccttctaacgagtgaggaaaaatggcgcgtaagaagatcagagagtatgactcacagaggttgttgaaggagcactttaagagactctctggcaaggagttgccgatcaagtctgcacaaattaccgcatcaactgatttcactgagctacaagagaaggaaccctggctttcatcttctaaattggttgttaaacctgacatgttatttggaa

SEQ ID NO: 47021 - DNA, 237 bp, Glycine max
  Clone ID: 701038746H1
ggaaaccctacacgattaccaagtccagggagagctggactgagcaggagcacgacaagtttctagaagctctccaattatttgatcgggactggaaaaagattgaagcatttgttggttcaaaaacagttatccagatacgaagtcatgcacagaagtattttcttaaagttcagaagaagggaacaagtgaacatgtacctcctccccggccaaagagaaaagctgctcgcccat

SEQ ID NO: 47022 - DNA, 241 bp, Glycine max
  Clone ID: 701038747H1
gcattggtggctagctaagccaagtaataaccaaactcttcagcagtttgtctttgcttagcttcttcttctgcttttgctttctccaccaccacaaccaccatgtattctgccactgcctccaacactttcttccttctctcttgtttccttctcttctgtctcctctcagctccttcctgtgtttccatgttctctggtattgagacaggagatttagagaaaagagatgatttgtttc

SEQ ID NO: 47023 - DNA, 245 bp, Glycine max
  Clone ID: 701038748H1
gagcaatgaatttgtaaatagggcaaaagtaatggataaggaattaatttctctggatatattagaaaaccgaattcgattgtctaatgatgaaactagaacaaaatatttaactaaaatatatgatcctttcctgaacggacgctttcgtggacaaatcgaaaatgttttttcaacctcaatccaatatgaaaaaaatgaaaaaaaaaataccattttgataaataaaattcatggtatcctta

SEQ ID NO: 47024 - DNA, 173 bp, Glycine max
  Clone ID: 701038749H1
ctctctttctttctctcaaagtgttgaacttgaagttgcagagagaaaatggattgagaattctctctcttttctctttctcttcccaactttccttccttgggatcattctgcttctttgctatggaagactcagattcagttgctacgctgatagattccacaacttctaa

SEQ ID NO: 47025 - DNA, 238 bp, Glycine max
  Clone ID: 701038750H1
ggatctatgggttatgggaacactgctgcttggggtgctcctagtggtggtgctggatctggtggtggcggtcctggttcagcaactgcaggtcagtcccctggtggagctgctggatatgggaatcaaggttatggatatggtgggtatgctggatatggtggaagtgatagttcttatgggaattcaagtgcatatggtactgttggtggacgtactgggagtggtccaaacagta

SEQ ID NO: 47026 - DNA, 235 bp, Glycine max
  Clone ID: 701038752H1
aaaccataaagtaaagaggcctttaaaagctcttattggtgatgtattgagcttactttgaggacaactcattggtacttttcatatatttgtggtgctccctcttcagtttttggtaaactaaacttcctcaattcaagggggtatcaaaatctgctggttggtttcatcaatctgatggaggaaaatctgcctcccggatttaggttccaccctacagatgaagagctcatca

SEQ ID NO: 47027 - DNA, 235 bp, Glycine max
  Clone ID: 701038753H1
ggatgttaagtcagaaactggaagtacatctctaaaggttttgccaccatggatgattaaatcagggatggttcttacaaaggaacaacgtggagaggtgaaggaggaaatgaagatggatgggacttcaatttccacatcagcacagtacttggacgacaagaaatcaacagttgaccatgatgataagagaaatatacaggatgagtatattaaggcttattatgctgctttg

SEQ ID NO: 47028 - DNA, 235 bp, Glycine max
  Clone ID: 701038754H1
gtaacgacgatgctggagttggtgttgttgtacaagaacccattgctccacacatccctaaccccaatcctcgctttcaccttcgccttcttcaagatccccctcttcttcctccacggcctccagacctacatccaccccgactcccaaccccaatccaacaatggcctccgagccgccatccgccgccccggcagcatcgacagctaccaacccttgtcttccaaaaccgccg

SEQ ID NO: 47029 - DNA, 237 bp, Glycine max
  Clone ID: 701038755H1
gataatgttatatctatgcacgatatcatacaagaaatggcttgggagattgtgcgccaagaatcaattgaggatcctggaaaccgtagccgattgatcgatcctaatgacgtttatgaagtattaaaatataacaaggggactgaggccataagaagcataagagcaaacttgccagcaattcagaatctgcagttaagccctcacgtgtttaacaagatgagcaaactacagttt

SEQ ID NO: 47030 - DNA, 235 bp, Glycine max
  Clone ID: 701038756H1
cacacacaaggcagaaccaaatagctcattagtgagtttttgagttcgtgtgtcctttctttgtgtgttgcaaggttacaagatggaggatcaaaatgcatcatctaatggattgggcaaggtgttccacaaggttaagccctaccttgctatgatgtcccttcagtttggctactccggaatgtacatcatcaccatggtttctttcaagcatggcatgagccattgggtactc

SEQ ID NO: 47031 - DNA, 236 bp, Glycine max
  Clone ID: 701038757H1
caaacccaaaacaaaaaataaaaatggagggggatctgaagcagaagctgttgagacgaagaaaggaagaggaagaagaagaagaagaagagttatcattggccaagagggtgtggaatgagagcaaggttatgtggatagtggcggcaccagccatattcacaaggttttccacctttggcatcagtgttataagccaagcttttgttggccatattggttctaaggaattggcc

SEQ ID NO: 47032 - DNA, 236 bp, Glycine max
  Clone ID: 701038760H1
gagaaattgcattaaaagaccaatttgcccttcgatcttcttcttcttcgtcttcctctctctcgcaccatgaacgagaaggccaacgtctccaaagagctcaacgctaaacacaaaaagatactggagggacttcttaaactaccagataacaaggaatgtgctgactgcaaagctaaaggtccaagatgggctagtgtcaatcttggcatctttatatgcatgcagtgttctgg

SEQ ID NO: 47033 - DNA, 238 bp, Glycine max
  Clone ID: 701038762H1
cggaaaacgagaagagagagagaaagacaaatagaagaagctgcatttgcagagacgccctgagagagagaattggaaggttgcgacgagtgatgatatacacatattgtgacggtagtgaaatcgaggaaaaagaggtagcaatttgcgagttgcaatgagtaacgaaaaggctccttcatcagcttcttcgagtagctacgagttgagcaaaggcatcaatggcctcgacaaggtt

SEQ ID NO: 47034 - DNA, 243 bp, Glycine max
  Clone ID: 701038763H1
ctagaatggaatttcgatgctcagtcatctcttttaccattctcttctctcttgctcttgcaggagagagccatgtccatgcatcgctacctgaggaagattattgggaagctgtttggccaaacactcccattcccactgcactgcgagagcttctaaagcctctaccctgcaggtgttgaaatcgatgaactccctaagcaaattgatgatacacagtacccaaaaacattcttctataaa

SEQ ID NO: 47035 - DNA, 258 bp, Glycine max
  Clone ID: 701038764H1
ggtataacaggactactaacagcagacaagaaaaatggagattgaggacacatcaagtagagtatctattgcatttcctcttggcttagctcttcttgttgccttgttattgttcttttgttgcttcttttgttgctgcttgcactgggaaaaactccaacctttgtttccattttgtatggttatcgtcgatactcagcctctgacacaagcagacttcactccccctcctcacaagccaggctttcctgtcttgat

SEQ ID NO: 47036 - DNA, 240 bp, Glycine max
  Clone ID: 701038766H1
gccattgcattcactcaagtgagaaaaaaaaagtaacaaaaataaacaccaaaaacagatcagaacagagcaacaaccatggtgattcacagactcgaattgtgcataaccatggttcgactagccatagagttcgtcgtgagcgtcgcggaaacagtggtcatagttcaacagagaaacaatgagcctcttggaacgttgaatcgcgcaagtacacctcttcctttctatggctacctc

SEQ ID NO: 47037 - DNA, 237 bp, Glycine max
  Clone ID: 701038767H1
cttcaattgtgactcctcaacccacttgattcaccccaaaccaataattttagccaccagtgtgtagataacttaagccaaaacaaccaaccaattcttttggataccaccttccatatattgatactgcaaaatatagttaaatttcattccgaaacaatgatcaacaaagtagcagttctattagttgttttgcttttcatcattgctgctttggcttctgatcctgatccagta

SEQ ID NO: 47038 - DNA, 237 bp, Glycine max
  Clone ID: 701038768H1
acaaaattcaccaattcccagttccgtggactgcagcacccttagatttcgttaccaaagacaaggagaagcaccggaagcgtaataaaatggatatgtacattcgtgttaaacgtagtaagacaacctacttcattcggtgcaagccatctgataaaattcttgacataaagcagaagttgcaagaacttattgatcagccagctattaatcaacggttaattttacctgatacag

SEQ ID NO: 47039 - DNA, 234 bp, Glycine max
  Clone ID: 701038769H1
ctgtgttagtgttgtgtttgttgtgtgttgagaagcagagatgcaaggaagcgcggccgacggagaagccttggatttcgagcctgaggacgatgacttgatggacgaggacggcgcccccgacgccgacgccgacgcttctccacctcaacctaagctcaaatccgccatcacccccgccgccacttcctctctctccgccccgaagaagaccaagggccgcggattccgcca

SEQ ID NO: 47040 - DNA, 234 bp, Glycine max
  Clone ID: 701038770H1
ggaaaacttcaccccggggaactggggaagtatattttcttcttttttggtggttctagttgttggaggaagatattgtaatcatgaatgttgaagaagaggttcagcgtctcagccaagaaatcaagaggcttggtaaggtccaagcagatggttcttacaaggtaacatttggaacactatttaacgatgatgagtgtgcaaatatatttgaagcacttgttggaacactaa

SEQ ID NO: 47041 - DNA, 237 bp, Glycine max
  Clone ID: 701038737H1
atttcaaccagtattttgttacatttaaattggcatcttcccccatttacattgacctgagattttcaaactttggtatcatctagcaaaggaatagattaaataattgaagttccatataaacttaggttactggtgttgtttgtttaagtgcttctaagaacacacgactggatacttgattctcatgacataaatttcctagcttgaaggaaagaaataattttctgagtttat

SEQ ID NO: 47042 - DNA, 242 bp, Glycine max
  Clone ID: 701038690H1
tctagatcgcgagcagccgacctttttttgtactgtacttgtccaatgtgatgactaagccaaggtagatctgttctattatagtattatctgtcacatatatgatatatgctagacttacgtacaatttagttttatttgtgtgccgggtgtgtgaaaggaaaaaaaaacaagtcaaaaggtgttctgctgcacttgaatccagtgctgtatctgtgtgtgctgcttttcttttctctttc

SEQ ID NO: 47043 - DNA, 239 bp, Glycine max
  unsure (1)..(239): unsure at all n locations
  Clone ID: 701038691H1
gcaacacacacttcaatttatcagcatggcctccgttcagtgccacaaaacctgcaaagtgagctgccaacaggaaaaccagcacgcctcgtttgggcagaaagtttctgacttgttcaaagggcatcaacataatgaccacagctccaattatgccacccaaaccaaagtgctttcccagtcagggtcagggttaggccccttcaccaccanaactcaaacacaatgcggttggcccc

SEQ ID NO: 47044 - DNA, 242 bp, Glycine max
  Clone ID: 701038693H1
cttttgcattgatcggtatcttttgagaagatgggaacagtgtggcaggatcaaagactgttcttgctgttggacctggaccaaaatcttctgtggattcggtgactgggagattgcccctgctttgacagcattcaagaagcatgtgctaatatggtcaaatcacctgagcttgttgccacttggtctgtgttctaacgcattatctagcattcgttggctgattcggtagttatagtcac

SEQ ID NO: 47045 - DNA, 244 bp, Glycine max
  Clone ID: 701038694H1
ctcagatctatataattcagttcttcttattctccactaatagcttcttcttcggctacttgagaccttgctgcaaaggttctctcttagcttagtaacaatgggtttgaaagcactttttgtttggtgcattatatggttaggtttagcacatttgtcccttggaggaagagtgaggcactacaagtttgatgtggagtacatgatcagaaagccagattgcttggaacacgttgtgatggga

SEQ ID NO: 47046 - DNA, 242 bp, Glycine max
  Clone ID: 701038695H1
agcaaattaatcaaacatggctagggttagtgctttgtttcactctttgctcttgatttcttcccttgtattggcttctcaaagccatgtttcctctgggaaactagtccctggactatcatggaattactatttgttgacatgtcccaagcttgagaggattataaggaagcatcttgaggatgtcttcgagaaggacagtggagtagctcctggcatacttcgactcttcttccatgact

SEQ ID NO: 47047 - DNA, 198 bp, Glycine max
  Clone ID: 701038701H1
gcgcagtcgtttgattgtgaagtgagttccgattgagcacgtcttggaggcaacgacgtctacggcagctcctcgttggtggttaagtcgcttgtcctttcagtccctcgatgagtccgccaacccctaaaaagcacttcttagttctccctctcccactaataaacatagtcatgctagatattaattaacatcagc

SEQ ID NO: 47048 - DNA, 247 bp, Glycine max
  Clone ID: 701038702H1
agcatacccaaaaaagaaaaagaaaaaaagaatgggtgttgcatagcgagctgcgagaatctatctgctcctgttgccgctagtggtcttgagcgttgaatgattcactttcaggaacagaaaagcccttgacgctagccatcgtcgcttttattgatagaaaaaagaatacaacatatattattttttcccactacctttttccttcaccacccttttgcttctccctgaattacccggattgggt

SEQ ID NO: 47049 - DNA, 243 bp, Glycine max
  Clone ID: 701038705H1
caactttcctaactttagcaaccatctaagaagttcagtcccttaattatctctcaccttgaattagaaaagcattcaaagctttgaacccaatttcactgtttgcacctcaaacatcttagaagtcccaattgagtctcaattccacaaccaaaaatgcacagttcaatttcacaatctgatatttttatcactgattaccttgtaccccaagaagttccatttcaatttcaatttcaagat

SEQ ID NO: 47050 - DNA, 240 bp, Glycine max
  Clone ID: 701038707H1
cttaaataagcaaggtgcattttagtggaaaatttttcacctttattggatcagctttgagggtaaataaaaagatgatgagagggtagttagaaactcgtaaatcagctagactctaagcgttgtttttcttgactaaacatcttactgtcaattttattttttttggattttgatttgagaaaattaattgatgtcaagtgcatttgaagacagtttataattattgatttaattaaa

SEQ ID NO: 47051 - DNA, 243 bp, Glycine max
  Clone ID: 701038708H1
gaaaattgaacaattctgaggctatcacaaaaaataaacactgagaaaggagagaaggctgtgcttgaggcatatccttgatgggaaataacaggtttagactgtcagatatgatgccaaatgcatggttttataagctcaaagatatgagcaaatcaaggaagagaaatgttcctcatgttatgaagaacaaagtagcctcaccaacaacatcacaaaggtcacagccaagatactctcatt

SEQ ID NO: 47052 - DNA, 243 bp, Glycine max
  Clone ID: 701038709H1
ataacacccaccaaagaaccatggctacccagttcctcaaatccctccttctcctctccaccttaaccctaaccatctcagcagaatacacaggctttgtgggcacaatagacccaaagtccataggcataaagcacaagaaaaccctaagccacttcagattctactggcacgaagtcttcagcggagaaaaccccacatcggttagaatcattcccgcactccccaaatacaacacaacca

SEQ ID NO: 47053 - DNA, 238 bp, Glycine max
  Clone ID: 701038711H1
ctttttcttacgttatcattgaaaattaagttacaaacttccgtccaatgtttctgtgtaagccgagtgacacagttttgtttagacaatcagaagacatttttggcgcgtaatatatctgggttttgttcagaacccaaaatcagatttgcttgcttaaaaaaaaaaaaaaaaaaacaaaaaaaaggggggcccccgcatagtgacctcggtcaccgggaatttatttcgggaccgg

SEQ ID NO: 47054 - DNA, 232 bp, Glycine max
  Clone ID: 701038712H1
gttcggttgggacaaggatcttgccaagaaaatctggtgctttggccctgagacccttggtcccaacatggtggttgatttcattcaaatactggactcccttgcacatatcaaccaccatgttgggtccaagggagtccagtatttgaatgaaatcaaggattctgtggttgctggattccagtgggcatcaaaagaaggtgctttggctgaagaaaacatgagagccatc

SEQ ID NO: 47055 - DNA, 241 bp, Glycine max
  Clone ID: 701038713H1
tccatggttgggctttgaaagtcactaagaagatgaccatatctttaaaccccatcgtcagcttcagctcaacgaagttggaaacaaagtatcaggatgcatcaagatattctgttggagcttctttaccaaaggcaacccagtttacacctttgttgatagtgtctagatcgagaaagcttgtcaaggaaagaagatttggtccttgtttttcagtggcagatagtgatcagcttgcagc

SEQ ID NO: 47056 - DNA, 242 bp, Glycine max
  Clone ID: 701038715H1
cctcgagcgaatcggctcggggctcgagtgcgtttcattctgaacgaaaattgcactctgaaaaattcaagaatcagttggtcaatcagagtacttatgctaagcttggatgcacacaaggatggttttttgctcctctgttccatcctccttccagcaacatagcacatcttgcaaaagtaaaagtcatgaaaacgcatggtggttgggaagacttgcaaattccttccagcatcaggtca

SEQ ID NO: 47057 - DNA, 243 bp, Glycine max
  Clone ID: 701038719H1
actcactaacatcacaacttctctctttctacacaaataactcctcaacagtgtgagcagttgataagagagatgatgatcaacgtgaaggaatcgaccatggtgcggccggcggaggaggtggcgcggcgggtggtgtggaactccaacgtggacctggtggtccccaatttccacacgcccagcgtctctttctataggtccaatggcgccagcaactttttcgacggcaaggttatgaag

SEQ ID NO: 47058 - DNA, 242 bp, Glycine max
  Clone ID: 701038720H1
tgcttagaaaagctatgtttaaggggaaacaattttgaaacactacccagcctcaaggagctttccaaactgttacatttaaacttacaacactgcaagagattgaaatatttgcctgagctcccttcacgaactgatgtcccatcaccatcaagtaacaagctgcggtggacaagtgttgaaaatgaggaaatagtattgggattaaatattttcaactgcccagaattagttgagaggga

SEQ ID NO: 47059 - DNA, 239 bp, Glycine max
  Clone ID: 701038721H1
cggaaccgcacgcgagggtctcggtcgaaccggcctcggaggtttccaaggtcgcactcgaccgggcactcgctggtccaaccgggagaaaacactgaccggttcactttgaggttgcctttggaggtgaggaagcaattaataaaccgccaattgcaacgtgcgagtagcttgatcgtgttacccagggaaggtagtttgcggcagggttaccgaaccggaggagaagggagtagtag

SEQ ID NO: 47060 - DNA, 239 bp, Glycine max
  Clone ID: 701038723H1
ctcaaagtctggggcttcaatgacctgtgctggttgccagggtactggcatgaaggtgtctattaggcaccttggtccttctatgattcagcaaatgcagcatccttgcaatgagtgtaagggtactggagagacaatcaatgacagagacaggtgccaacagtgcaagggagagaaggttgttcaggagaagaaagtacttgaagttgttgtggagaagggaatgcagaatggacaga

SEQ ID NO: 47061 - DNA, 239 bp, Glycine max
  Clone ID: 701038724H1
gaaacatttcactaatagcgagacataagcataatattgagaaataatggagggttgtacttatcgtgggaagttgctatgccttgtaggggttgtggagcttgtgagtactattgcaggggtggagagtgctggtgaatgtgggaaatctaccatcccagataatgaggcttataagcttgcaccatgtgcctcagcagcagaagatgagaatgctagtgattctcagagttgctgtg

SEQ ID NO: 47062 - DNA, 236 bp, Glycine max
  Clone ID: 701038725H1
ggtatacggtgatattggtacatcaccactttatgtgtatgcaagcaccttcactaaaaaaattaacaacaatgatgacattcttggcgtcttgtctctcatcatctataccattgtgctcataccttttcttacatatgtcttcatcgtattgtgggccaacgacaacggcaacggtggagcgtttgcactctattcgctaatctgtaggcatataaagatgagtttgattccaa

SEQ ID NO: 47063 - DNA, 238 bp, Glycine max
  Clone ID: 701038726H1
gagagacctagtttgaaacatcaaaggaaatggaactccgaccccaattacaccaaatcatggtatgatagaggtgctaaaatctttcaggcagacaagtatcggaaaggtgcatgtgagaattgtggagctatgacacatgattctaagtcatgcatggaaagacctcggagagtgggagcaaaatggacaaacaaacacattgctcctgatgaaaagatagaaacttttgagcttg

SEQ ID NO: 47064 - DNA, 239 bp, Glycine max
  Clone ID: 701038728H1
ctaacgcgtgcatagcagagtcagagacagagacgcagccatcgggcggagacctgcgaggtgttataggcaaattaagaacaagccataccccaagtcacgtttctgccgtggtgttcctgatcccaagatcaggatttatgatgttggtatgaagaagaagggtgttgatgagtttcctttctgtgtccatctggttagttgggagaaggaaaatgtttcaagtgaggccctggaag

SEQ ID NO: 47065 - DNA, 240 bp, Glycine max
  Clone ID: 701038729H1
ctgaaacttacattctttcaaccaacagtccttaaaaattaacagaatcatataattgatatcgacttagtataaagaatattattatgtgagggcaatcaccaatcagctactgaagaatttccctggctgctatactattatgcttgaaaacaatgaagttttgcattgaagcaaattctattgtatccaagaaccctctaatgctatgtgagcatagcaaataaccttataattccc

SEQ ID NO: 47066 - DNA, 195 bp, Glycine max
  Clone ID: 701038733H1
caagattctaagagagattttactgctctttgaagaagggtgtttgcttgattttcgtgatgtcgctgctctcagatctcatgaaccttaacctctcagacactactgagaaggtgatcgcagagtacatatggatcggtggatcaggaatggacctgaggagcaaagcaggactcttccaggaccaagtagcga

SEQ ID NO: 47067 - DNA, 237 bp, Glycine max
  Clone ID: 701038736H1
gtgaggagttagtgtccacaattttctgatcatcatatcaaaccctcttcatttgattttttttcttaatttaccaaaaaaatggttctatgagtctcacgagtacgcatgcgatggatccagaaggtggaacaactcgtcaaaactctgctaagagagagtcgtggagaacggttctgactctggcgtaccagagtttaggagcggtgtacggcgatttgagcatttcgccgttgt

SEQ ID NO: 47068 - DNA, 242 bp, Glycine max
  Clone ID: 701038686H1
cagaatccgcggcaatgcaggtttgtgaagaggaaccgaagatgttggaacctaaacctgaacctgttatcagcgaagaggaaccgaagtgttggatgatgttatcaatgaagaggaagctgttgtggccgagacgttgaagggagaggagcctatcgtggctgagacattgaaggaagaggttgtggatgagatggcagaacaacccctttgtaaagaggaatcggagaagggtgtttcgg

SEQ ID NO: 47069 - DNA, 248 bp, Glycine max
  Clone ID: 701038643H1
caaagaatatgaatcagggccaatcatacttcatttggattctttgggtcttcactctagtaaatcagtttttgataatattaaaagctatttgattgaagaaaagaactatatggatcgagaagatgtgtctttagatgtttcaattgcggatagaatatggaagtgccttcctcgtagaattgaatctcaaatcatccaggttccccaacagaagaatgaatatgactgtggtctttttgtattgt

SEQ ID NO: 47070 - DNA, 249 bp, Glycine max
  Clone ID: 701038646H1
gtcatctcatcccagggttcatctttgctttctgtagatctttctgggtctgatgtcactgattttgggctgacataccttaaagattgtgaaagtctcatttccttaaatctaaattactgtgacgaaatttcagatcgtggactagagtgtatcagtggtctgtcaaacttgacaagtttgagtttcagaagaaatgattcaatttctgctcaaggaatgagtgccttttctggtcttgttaacttg

SEQ ID NO: 47071 - DNA, 253 bp, Glycine max
  Clone ID: 701038648H1
gtaaaacctcagtctctcactcgcagatctttcactcacccaaaaccaagctagtccgaggaagtcctctattcagaaccagatatggagacaaaacccaccgagatcagcagcggcaagatgttcggaggctacaacaagaggttcagacatttcagccctaccctcggctgctccatgaacttccacatctacttcactccatctccttctccctctcacaaattcccagtcttgtactttctctctggcc

SEQ ID NO: 47072 - DNA, 253 bp, Glycine max
  Clone ID: 701038649H1
gccgaagcgaagagtgtttgtagggtttgcgttgcgcatcgtttgagagagagagatgggaagagaaaaagagacaacaaaggtagcttacgcagtggagcagcttgtagccttcaatcgatacaatcccgatattcttccagatctcgaaaactatgtcaacgaccaggtttcgtcgcaaacttatagcctggacgcgaatctctgccttcttcgcctctaccagtttgaatctgagaaaatgagttcccag

SEQ ID NO: 47073 - DNA, 251 bp, Glycine max
  Clone ID: 701038650H1
gtttctgcgaggcttaagaaacctcgcagaaccaaagaaaactcactctcacacactttggttcacaaaaacctttcacttctattttcaatctttctagttccttctcccatattatagtacccttttatcccaagttacttaaatttaaaacctttattactgctcatacttgtttttcgctttgttaagttttaagaaaaatggaggcacattctccagttatagccaagaagctatggaatgtgttg

SEQ ID NO: 47074 - DNA, 248 bp, Glycine max
  Clone ID: 701038651H1
cgagaagcaccagcgcgtgtggctgggaacgttcaacgaggaagacgaggcggcgcgtgcgtacgacgtcgccgtgcagcgattccgcggcaatgacgccgtcacaaacttcaagccgctctccggcaccgacgacgacgacggggaatcggagtttctcaactcgcattcgaaatccgagatcgtcgacatgctgcgtaacatacgtacaatgacgagctggaacaaagcaagcgcaccgcggcttc

SEQ ID NO: 47075 - DNA, 193 bp, Glycine max
  Clone ID: 701038652H1
tgaaaatcttccaccaaatgtaattaaacaacttgccaaggagttgaaaagtcttgatgaatcccctcctgagggcattaaggttgtggtaaatgatgatgatttttcgacaatattttctgacattgaaggcccaggtaagtagctttcatgtggtatgttgcatgattgagaactcccattgggtagggcc

SEQ ID NO: 47076 - DNA, 249 bp, Glycine max
  Clone ID: 701038654H1
cttcaccactccaaacccaccacaccaccattattcatatctcattctctaacctttcactctgccttactcactctctactttgctcatcatcgtagatgaaccaacacttctagtctctcttactttataaccatgtaaaaatgagtcacctaatgaaaaattagtagcttcttgttgtgctttttattttgtttgtgttgagataaatttgtttgtttgtttggtattgttttgtgttttatgaat

SEQ ID NO: 47077 - DNA, 248 bp, Glycine max
  Clone ID: 701038655H1
gaaacattatctgctgttaagtctcagcaaataaaggataataaccctcactttggcattgattgtaatgatgttggcactaatgacatgcgtgagcaaaatgtctttgaaactttgatcggaaagcagcaacagctcctactcgctactcaagttgtcaagatgatactgaaaattgatgatgtcatctccccatctgagtactgatatttttaaactcagtcatggtctacgtcaagatgctgaat

SEQ ID NO: 47078 - DNA, 235 bp, Glycine max
  Clone ID: 701038659H1
cgatttcatcacacttatagttctctcttctctttcttttcctttctttctccgccgaagatggcgccgcccacgccagcagttgacggcgcccaggcgccgcaagggcggcagcaacagccgcaaggagggtttggcctcaccggaatcatacgcatggtcgttttctggtacttcgcttccaaattcttttcccccaaaaaacctaccgaaccttccgctctcatctccaatc

SEQ ID NO: 47079 - DNA, 254 bp, Glycine max
  Clone ID: 701038664H1
tgctgtatacacaattacaatcctcacaatcctcctcccttcatttctcaaattctcaatatttcaccaattcaaaacccttcatcattgatcttttcactcttttcttctttgctcgcaacattcattcacaatttgggtgctccttctgtttcttctcctcaccattggattggataatctgcaatttcttcaattgacaaaagcaacgggagttgggttccaacggaattatggttttcctcattgcgatg

SEQ ID NO: 47080 - DNA, 270 bp, Glycine max
  Clone ID: 701038665H1
ctcggaacgcggctcgagcttgaggaaactttgtgatccataaataagtctcagaacacgaaattctcatcacaaaattctcataccacaatacaaaagagattgaagctagcagactcatcaaatggcggaaatggcagcatccttcgcacgagacaaattgctttcactgctaagcaatgaagcaaacctgctttccggcatccccaaagaatttgcagacataagacaagtactcagatgtcatgcaagccttactctaggatgcag

SEQ ID NO: 47081 - DNA, 250 bp, Glycine max
  Clone ID: 701038667H1
cggctcgagaaaaaattgttcttgtttgtccatttagccatgaagaagttgtctttctccatccccaccgcaaaaccccaatcggtggacacttccaccacccgaaaggacgacgacagcgacggaaccaaacagtacatcaccgaattcgacccttccaaacccgcaaaccccaaaatcacaatccccccaatccaaaaccagtggaacccccaacaagacaacgaacacagcaccacgcggtggcgcc

SEQ ID NO: 47082 - DNA, 219 bp, Glycine max
  Clone ID: 701038668H1
tttttgttttgaagttgttactaaataaaattaaatagtgtattaattttaagtaagtgttaaaaaacttatccttctctttttactttgttaaaaaaaattgaattttgctaaggaatatactgtgcatatcctttgggtattctagtaaagtgatgaaagccttcatggttcaaaaaaaagagtaaaaaaaaaaaaaaaagggggggcccccaataa
